United States Patent Application Publication US 2020/0163878 A1 - sequence listing, part 55

SEQ ID NO: 207116 - RNA, 1413 nt, Artificial Sequence
  derived and/or modified CDS sequence (opt5) from neuraminidase__InfluenzaA__ABF47575
augaaccccaaucagaagaucauuaccaucggcagcauuuccaucgccauugggaucaucucucugaugcuccaaauuggaaacaucauuagcaucugggcuucccacucuauucagacaggcagccagaaucauacgggggugugcaaccagagaaucauuaccuacgaaaauuccacaugggucaaccacaccuauguuaauaucaacaauacaaacgugaucgccggaaaagacaagaccucuguggcgcuggcuggcaauagcucccuuuguagcauuucugggugggccaucuacacaaaagauaacuccauucggaucggaagcaagggcgacgucuucgugauucgcgagccuuuuaucucuugcucccauuucgaguguagaaccuuuuuccugacgcaaggcgcccuccugaaugauaaacacagcaacgggaccguuaaggaccggucuccguaucgcgcucuuauguccugcccccugggagaagccccuagccccuacaauuccaaguuugagucuguggcuuggagcgccuccgcgugucaugauggcaugggguggcucacaaucggaauuagcggcccugacaacggggccgucgcugugcugaaauauaacggaaucauuaccgaaacaaucaagucuuggaaaaagcagauucugagaacccaggaguccgagugcguuugugugaauggcagcugcuucacgaucaugacagauggccccucuaacggggccgcuagcuacaaaaucuuuaagauugaaaagggaaaagucaccaaguccaucgagcucaaugccccuaacuuccacuaugaagaguguucuugcuacccggacacaggcaccgugaugugugugugccgggauaauuggcacgggagcaaccgccccugggucuccuuuaaucagaaccuggacuaccaaauuggauauaucugcagcggcguuuucggggauaauccuagacccaaagacggagagggcucuuguaacccugugaccguggauggcgcgaauggggucaagggauuuuccuacaaauauggcaacgggguguggauuggacggacaaagagcaaucgccuuagaaaaggcuucgaaaugaucugggaccccaacggguggacggacaccgauucugacuuuuccguuaagcaggauguggucgccauuacagacuggagcggcuacuccggaucuuucgugcagcauccggagcugaccggccucgauugcauccggccuuguuucuggguugaacuggugcgcgggcuucccaaggagaauacaaccaucuggacgagcggauccucuauuagcuuuugcggcgucaacuccgacacagcuaacuggagcuggccugauggggccgaacugcccuucaccaucgacaaauga

SEQ ID NO: 207117 - RNA, 1413 nt, Artificial Sequence; identical to SEQ ID NO: 206468
  derived and/or modified CDS sequence (opt5) from neuraminidase__InfluenzaA__ABF47586

SEQ ID NO: 207118 - RNA, 1410 nt, Artificial Sequence; identical to SEQ ID NO: 206198
  derived and/or modified CDS sequence (opt5) from neuraminidase__InfluenzaA__ABF47597

SEQ ID NO: 207119 - RNA, 1413 nt, Artificial Sequence; identical to SEQ ID NO: 207040
  derived and/or modified CDS sequence (opt5) from neuraminidase__InfluenzaA__ABF47608

SEQ ID NO: 207120 - RNA, 1410 nt, Artificial Sequence
  derived and/or modified CDS sequence (opt5) from neuraminidase__InfluenzaA__ABF47619
augaaccccaaucagaagaucauuaccaucggcagcgugucccugacaauugccacgaucugcuuccucaugcaaauugcuauccuggucaccacaguuacccuucacuuuaaacaguacgaguguaacucuccuccgaauaaccaggugaugcugugcgaacccacaaucauugagagaaauaucaccgaaauuguguaucucacaaacaccacgaucgagaaggaaauuuguccuaaacuggccgaguaccggaauuggagcaagccccagugcaaaaucaccggguucgcgccuuuuuccaaggacaacucuauucgccuuagcgcuggaggcgauaucugggucacaagagagcccuauguguccugugacccugggaagugcuaccaauucgcccugggacagggcaccacacucaauaaccggcauucuaaugauaccguucacgaccgcacgccguauagaacacugcugaugaacgaacucggggugcccuuucaucugggaaccaaacaggucuguaucgccuggagcuccagcucuugccacgauggcaaggcuuggcuucauguguguguuacaggccacgacgagaaugccaccgcuuccuucauuuacgaugggcggcugguggacagcaucggaucuugguccaaaaacauucuccgcacccaggaaagcgagugcgucuguaucaauggcacaugcacgguggugaugaccgaugggucugccuccggcagagcggacacaaagauucuguuuaucgaggaaggaaaaaucguccacauuagcccucuuuccgggucugcccaacauguugaggaaugcagcuguuauccccgguacccuggagugcgcugcguguguagagauaacuggaagggcuccaaccggcccaucgucgacauuaaugugaaggauuacagcaucguuucuuccuaugugugcagcggccuggucggggacaccccgcgcaaaaacgacucugcuagcuccucucacugucucaauccuaacaaugaggaaggaggccauggggugaagggaugggccuucgaugacggcaacgauguuuggauggggagaacaauuagcgagaaacugcgguccggauacgagaccuuuaaggugaucggcggcuggagcaaacccaauucuaagcugcagaucaaccgccaggucauuguggacagagggaaucgguccggauauagcggcaucuucucugucgaagggaaauccugcauuaacagauguuuuuacguggagcucauccgcggacggaagcaggaaacggagguuugguggacaagcaauuccauuguggucuucugcggcaccucugggaccuauggcacaggaagcuggccugauggcgcugacaucaaccugaugcccauuuga

SEQ ID NO: 207121 - RNA, 1413 nt, Artificial Sequence
  derived and/or modified CDS sequence (opt5) from neuraminidase__InfluenzaA__ABF47630
augaaccccaaucagaagaucauuaccaucggcagcauuuccaucgccauugggaucaucucucugauucuccaaaucggaaacauuaucagcauuugggcuucccacucuauccagacaggcagccagaaucauacggggauuugcaaccagagaaucaucaccuacgagaauagcacaugggugaaccaaaccuaugucaauauuaacaauacaaacguuguggccggaaaagacaagaccucuauggcgcuggcuggcaauagcucccuuuguccuauccgggggugggccauuuacacaaaagauaacagcauccgcauuggaucuaagggcgacguguucgucaucagagaaccguuuaucuccugcagccaccuggagugucggaccuucuuucucacgcagggcgcccugcuuaaugauaaacauucuaacgggaccgugaaggaccgcucccccuauagagcucugaugagcugcccucucggagaagcccccucuccuuacaauucccgguucgagagcguugcuugguccgccucugcgugucacgauggccugggguggcugacaauuggaaucagcggccccgacaacggggccguggcuguccucaaguauaacggaauuaucaccgaaacaauuaaauccuggaagaaacgcauccugagaacccaggagagcgagugcguguguaugaauggcucuugcuuuacgaucaugacagauggcccuuccaacggggccgcuagcuaccggauuuucaagaucgaaaaaggacgcguuaccaagucuauugagcuugacgccccgaauuaucauuacgaagaguguagcugcuaccccgauacaggcaccgugaugugugucugcagagacaacuggcacggguccaaucggccuugggugucuuuuaaccagaaucuggauuaucaaaucggauacauuugcagcggcguguucggggacaacccccgcccuaaggauggagagggcuccuguaaucccgucaccguugacggcgcggacggggugaaaggauuuagcuauagauacggcaacgggguguggaucggacggacaaagucuaaucgccucagaaaaggcuucgaaaugauuugggauccgaacggguggacggacaccgauuccgacuuuagcaugaagcaggauaucgucgccaugacagacuggucuggcuauuccggauccuucgugcagcacccugagcugaccggccuugauugcaugcggcccuguuuuuggguugaacuggugagagggcucccucgcgagaauacaaccaucuggacguccggaucuagcauuuccuucugcggcgucaacucugacacagcuaauuggagcuggcccgauggggccgaacugcccuucaccaucgacaaauga

SEQ ID NO: 207122 - RNA, 1413 nt, Artificial Sequence
  derived and/or modified CDS sequence (opt5) from neuraminidase__InfluenzaA__ABF47652
augaaccccaaucagaagaucauuaccaucggcagcauuuccaucgccauugggaucaucucucugauucuccaaaucggaaacauuaucagcauuugggcuucccacucuauccagacaggcagccagaaucauacggggauuugcaaccagagaaucaucaccuacgagaauagcacaugggugaaccaaaccuaugucaauauuaacaauacaaacguuguggccggaaaagacaagaccucuaugacacuggcgggcaauagcucccuuuguccuauccgggggugggcuauuuacaccaaagauaacagcauccgcauuggaucuaagggcgacguguucgucaucagagaaccguuuaucuccugcagccaccuggagugucggacguucuuucucacccagggcgcccugcuuaaugauaaacauucuaacgggacagugaaggaccgcucccccuauagagcccugaugagcugcccucucggagaagcucccucuccuuacaauucccgguucgagagcguugccugguccgcuucugccugucacgauggccugggguggcugaccauuggaaucagcggccccgacaacggggcgguggccguccucaaguauaacggaauuaucacagaaaccauuaaauccuggaagaaacgcauccugagaacgcaggagagcgagugcguguguaugaauggcucuugcuuuacaaucaugaccgauggcccuuccaacggggcugccagcuaccggauuuucaagaucgaaaaaggacgcguuacaaagucuauugagcuugacgcuccgaauuaucauuacgaagaguguagcugcuaccccaacaccggcaccgugaugugugucugcagagauaauuggcacggguccaaccggccuugggugucuuuuaaucagaaccuggacuaucaaaucggauacauuugcagcggcguguucggggauaauccccgcccuaaggacggagagggcuccuguaaccccgucacaguugauggcgccgacggggugaaaggauuuagcuauagauacggcaaugggguguggaucggacggacgaagucuaaccgccucagaaaaggcuucgaaaugauuugggacccgaauggguggaccgauacagacuccgauuuuagcaugaagcaggacaucgucgcgaugaccgauuggucuggcuauuccggauccuucgugcagcacccugagcugacaggccuugacugcaugcggcccuguuuuuggguugaacuggugagagggcucccucgcgagaacaccacgaucuggacauccggaucuagcauuuccuucugcggcgucaauucugauaccgccaacuggagcuggcccgacggggcugaacugcccuucaccaucgauaaauga

SEQ ID NO: 207123 - RNA, 1413 nt, Artificial Sequence; identical to SEQ ID NO: 207040
  derived and/or modified CDS sequence (opt5) from neuraminidase__InfluenzaA__ABF47663

SEQ ID NO: 207124 - RNA, 1413 nt, Artificial Sequence
  derived and/or modified CDS sequence (opt5) from neuraminidase__InfluenzaA__ABF47674
augaaccccaaucagaagaucauuaccaucggcagcauuuccaucgccauugggaucaucucucugaugcuccaaauuggaaacaucauuagcaucugggcuucccacucuauucagacaggcagccagaaucauacgggggugugcauccagagaauuaucaccuacgagaacuccacaugggucaaucacaccuauguuaacaucaauaacacaaaugugauugccggaaaagacaagaccucugugacacuggcgggcaacagcucccuuuguagcaucucugggugggcuauuuacaccaaagauaauuccauccggauuggaagcaagggcgacgucuucgugauccgcgaaccuuuuaucucuugcucccaucuggaguguagaacguucuuucucacccaaggcgcccugcuuaacgauaaacacagcaaugggacaguuaaggaccggucuccguaucgcgcccugauguccugcccccucggagaagcuccuagccccuacaacuccaaguucgagucuguggccuggagcgcuuccgccugucaugauggcaugggguggcugaccauuggaaucagcggcccugacaauggggcggucgccgugcugaaauauaacggaauuaucacagaaaccauuaagucuuggaaaaagcagauccucagaacgcaggaguccgagugcguuugugugaacggcagcugcuuuacaaucaugaccgauggccccucuaauggggcugccagcuacaaaauuuucaagaucgaaaagggaaaagucacaaaguccauugagcugaacgcuccuaauuuucacuaugaagaguguucuugcuacccggacaccggcaccgugaugugugugugccgggauaacuggcacgggagcaaucgccccugggucuccuucaaccagaaucuugacuaccaaaucggauauauuugcagcggcguuuuuggggauaacccuagacccaaagacggagagggcucuuguaauccugugacaguggauggcgccaacggggucaagggauucuccuacaaauauggcaaugggguguggaucggacggaccaagagcaaccgccugagaaaaggcuuugaaaugauuugggaccccaauggguggacggacacagauucugacuucuccguuaagcaggauguggucgcgaucaccgacuggagcggcuacuccggaucuuuugugcagcauccggagcucacaggccuggauugcauccggccuuguuucuggguugaacuugugcgcgggcugcccaaggagaacaccacgauuuggacaagcggauccucuaucagcuucugcggcgucaauuccgacaccgccaacuggagcuggccugauggggcugaacuccccuuuaccauugacaaauga

SEQ ID NO: 207125 - RNA, 1413 nt, Artificial Sequence; identical to SEQ ID NO: 207023
  derived and/or modified CDS sequence (opt5) from neuraminidase__InfluenzaA__ABF47696

SEQ ID NO: 207126 - RNA, 1413 nt, Artificial Sequence
  derived and/or modified CDS sequence (opt5) from neuraminidase__InfluenzaA__ABF47707
augaaccccaaucagaagaucauuaccaucggcagcauuugcauggccaucgggauuaucucccugauccuccaaauuggaaacaucauuucuaucugggugagccacuccauucagacaggcucucagaaucauacggggaucuguaaccagagaauuaucaccuacgagaauagcacaugggucaaccaaaccuauguuaauaucuccaacacaaaugugguggcuggaaaaggcaccacaucuaugacccuggccgggaacagcucccuuugcccuauucggggaugggcgaucuacagcaaggacaauucuauucgcaucggcuccaaaggcgaugucuucgugauuagagaaccguuuaucagcuguucucaccuggagugccggacguucuuucucacccagggggcucugcuuaacgacaagcauuccaauggaacaguuaaagaucgcagccccuauagagcccugaugucuuguccuaucggcgaagcccccuccccuuacaacagccgguucgaguccguggcuuggucugccagcgcuugccacgacgggaugggauggcucaccauuggcaucuccgggcccgaugacggagccgucgcggugcugaaguauaauggcauuaucacagaaaccauuaagagcuggcgcaaacagauccugagaacgcaggagucugaguguguuugcgugaacggcuccuguuuuacaaucaugaccgaugggccuagcgacggaccggccucuuaccggauuuucaagaucgaaaaaggcaagauuacaaaaagcaucgagcucgaugcucccaacucccauuaugaagagugcucuuguuacccugacaccgggaccgucaugugcgugugccgcgauaauuggcacggaagcaacagacccuggguguccuuuaaucaaaaccuggacuaccagauuggcuauaucuguagcggggucuucggagauaauccucggcccaaggacggcaagggcucuugcgacccgguuaacguggauggggccgacggagugaaaggcuuuuccuaccgcuaugggaauggagucuggauuggcagaacaaagagcaacucuucccggaaaggguucgagaugaucugggauccuaauggcuggacggacaccgauagcaacuuucuugugaagcaggacguuguggcuaugacagauugguccggauacucuggcagcuucguccagcaccccgaacugaccgggcucgacuguaugcgcccuugcuuuuggguggagcugaucagaggacggcccagagagaaaacaaccauuuggacguccggcucuagcaucuccuucugugggguuaauagcgauacagugaacuggucuuggcccgacggagccgaacuuccuuucaccauugauaaguga

SEQ ID NO: 207127 - RNA, 1413 nt, Artificial Sequence; identical to SEQ ID NO: 207023
  derived and/or modified CDS sequence (opt5) from neuraminidase__InfluenzaA__ABF47718

SEQ ID NO: 207128 - RNA, 1413 nt, Artificial Sequence; identical to SEQ ID NO: 207023
  derived and/or modified CDS sequence (opt5) from neuraminidase__InfluenzaA__ABF47729

SEQ ID NO: 207129 - RNA, 1413 nt, Artificial Sequence; identical to SEQ ID NO: 207023
  derived and/or modified CDS sequence (opt5) from neuraminidase__InfluenzaA__ABF47740

SEQ ID NO: 207130 - RNA, 1413 nt, Artificial Sequence
  derived and/or modified CDS sequence (opt5) from neuraminidase__InfluenzaA__ABF47751
augaaccccaaucagaagaucauuaccaucggcagcauuugcauggccaucgggauuaucucccugauccuccaaauuggaaacaucauuucuaucugggugagccacuccauucagacaggcucucagaaucauacggggaucuguaaccagagaauuaucaccuacgagaauagcacaugggucaaccaaaccuauguuaauaucaacaauacaaacgugguggcuggaaaagacaccacauccgucacccuggccggcaauucuagccuuugcccuauucgggggugggcgaucuacuccaaggauaacagcauucgcaucggaucuaaaggcgacguguucguuauuagagaaccguuuaucuccuguagccaccuggagugccggacguucuuucucacccagggcgcucugcuuaaugauaagcauucuaacgggacagugaaagaccgcucccccuauagagcccugaugagcuguccuaucggagaagcccccucuccuuacaauucccgguucgagagcgucgcuugguccgccucugcuugccacgauggcaugggguggcucaccauuggaaucagcggccccgacgauggggccguggcgguucugaaguauaacggaauuaucacagaaaccauuaaguccuggcgcaaaagaauccugcggacgcaggagagcgagugugugugcgucaacggcucuuguuuuacaaucaugaccgacggcccuuccaaugggccggccagcuaccgcauuuucaagaucgaaaaaggaaagauuacaaaaucuaucgagcucgaugcucccaacagccauuaugaagagugcuccuguuacccugacaccggcaccgugaugugcgugugcagagauaauuggcacgggucuaaccggcccugggucagcuuuaaucagaaccuggacuaccaaauuggauauaucuguuccggcguuuucggggauaauccucgccccaaggacggaaagggcagcugcgacccggugacaguggauggcgccgacggggucaaaggauuuucuuacagauauggcaacgggguguggauuggacggacgaaguccaauagcucucgcaaaggcuucgagaugaucugggauccuaacggguggaccgacacagauuccaauuuucuuguuaagcaggacguggucgcuaugaccgauuggagcggcuacuccggaucuuucgugcagcaccccgaacugacaggccucgacuguaugagaccuugcuuuuggguugagcugauccgggggagaccccgcgagaaaaccacgauuuggacaagcggauccucuaucagcuucuguggcgugaacuccgauaccgccaauuggagcuggcccgacggggcggaacuuccuuucaccauugauaaguga

SEQ ID NO: 207131 - RNA, 1413 nt, Artificial Sequence
  derived and/or modified CDS sequence (opt5) from neuraminidase__InfluenzaA__ABF47773
augaaccccaaucagaagaucauuaccaucggcagcauuugcaugacaaucgggauuaucucccugauccuccaaauuggaaacaucauuucuaucugggugagccacuccauucagacgggcucucagaaucauaccgggaucuguaaccagagaauuaucacauacgagaauagcaccugggucaaccaaacauauguuaauaucaacaauaccaacgugguggccggaaaagacacaaccuccgucacgcuggcuggcaauucuagccuuugcccuauucgggggugggccaucuacuccaaggauaacagcauucgcaucggaucuaaaggcgacguguucguuauuagagaaccguuuaucuccuguagccaccuggagugccggaccuucuuucucacacagggcgcgcugcuuaaugauaagcauucuaacgggaccgugaaagaccgcucccccuauagagcucugaugagcuguccuaucggagaagcccccucuccuuacaauucccgguucgagagcgucgccugguccgcuucugccugccacgauggcaugggguggcucacaauuggaaucagcggccccgacgauggggcuguggccguucugaaguauaacggaauuaucaccgaaacgauuaaguccuggcgcaaaagaauccugcggacacaggagagcgagugugugugcgucaacggcucuuguuuuaccaucaugacagacggcccuuccaaugggccggcgagcuaccgcauuuucaagaucgaaaaaggaaagauuaccaaaucuaucgagcucgaugcccccaacagccauuaugaagagugcuccuguuacccugacaccggcacagugaugugcgugugcagagauaauuggcacgggucuaaccggcccugggucagcuuuaaucagaaccuggacuaccaaauuggauauaucuguuccggcguuuucggggauaauccucgccccaaggacggaaagggcagcugcgacccggugacgguggauggcgcugacggggucaaaggauuuucuuacagauauggcaacgggguguggauuggacggaccaaguccaauagcucucgcaaaggcuucgagaugaucugggauccuaacggguggacagacaccgauuccaauuuucuuguuaagcaggacguggucgccaugacagauuggagcggcuacuccggaucuuucgugcagcaccccgaacugaccggccucgacuguaugagaccuugcuuuuggguugagcugauccgggggagaccccgcgagaaaacgacaauuuggaccagcggauccucuaucagcuucuguggcgugaacuccgauaccgcuaauuggagcuggcccgacggggccgaacuuccuuucacaauugauaaguga

SEQ ID NO: 207132 - RNA, 1413 nt, Artificial Sequence; identical to SEQ ID NO: 207131
  derived and/or modified CDS sequence (opt5) from neuraminidase__InfluenzaA__ABF47784

SEQ ID NO: 207133 - RNA, 1413 nt, Artificial Sequence; identical to SEQ ID NO: 207131
  derived and/or modified CDS sequence (opt5) from neuraminidase__InfluenzaA__ABF47795

SEQ ID NO: 207134 - RNA, 1413 nt, Artificial Sequence; identical to SEQ ID NO: 207131
  derived and/or modified CDS sequence (opt5) from neuraminidase__InfluenzaA__ABF47806

SEQ ID NO: 207135 - RNA, 1413 nt, Artificial Sequence; identical to SEQ ID NO: 207131
  derived and/or modified CDS sequence (opt5) from neuraminidase__InfluenzaA__ABF47817

SEQ ID NO: 207136 - RNA, 1413 nt, Artificial Sequence; identical to SEQ ID NO: 207131
  derived and/or modified CDS sequence (opt5) from neuraminidase__InfluenzaA__ABF47839

SEQ ID NO: 207137 - RNA, 1413 nt, Artificial Sequence; identical to SEQ ID NO: 207131
  derived and/or modified CDS sequence (opt5) from neuraminidase__InfluenzaA__ABF47850

SEQ ID NO: 207138 - RNA, 1413 nt, Artificial Sequence; identical to SEQ ID NO: 206900
  derived and/or modified CDS sequence (opt5) from neuraminidase__InfluenzaA__ABF47872

SEQ ID NO: 207139 - RNA, 1413 nt, Artificial Sequence; identical to SEQ ID NO: 206900
  derived and/or modified CDS sequence (opt5) from neuraminidase__InfluenzaA__ABF47883

SEQ ID NO: 207140 - RNA, 1413 nt, Artificial Sequence; identical to SEQ ID NO: 206900
  derived and/or modified CDS sequence (opt5) from neuraminidase__InfluenzaA__ABF47894

SEQ ID NO: 207141 - RNA, 1410 nt, Artificial Sequence; identical to SEQ ID NO: 206916
  derived and/or modified CDS sequence (opt5) from neuraminidase__InfluenzaA__ABF47905

SEQ ID NO: 207142 - RNA, 1362 nt, Artificial Sequence
  derived and/or modified CDS sequence (opt5) from neuraminidase__InfluenzaA__ABF47958
augaaccccaaucagaagaucauuaccaucggcagcauuugcaugguggucgggaucauuucccugauccuccaaaucggaaacauuaucucuauuuggaucagccacuccauucagacaggcaaucagaaccauacggggaucuguaaucagggaucuauuaccuacaaaguuguggccggccaagacagcacauccgugauccugaccgggaacucuagccuuugcccuaucagaggaugggcuauucacuccaaggauaauggcauccggauuggcagcaaaggggacgucuucgugauccgcgagccguuuauuucuuguucccaucuggaaugcagaacauucuuucucacccagggagcccugcuuaacgauaagcacagccggggcacauucaaagaccgcucucccuauagagcgcugauguccuguccuguuggggaggcucccagcccuuacaauucucgguuugaauccguggccuggagcgccuccgcuugccaugauggaaugggcuggcucaccaucgggaucucuggacccgacgauggcgccgucgcugugcugaaguauaacggcauuaucacggagaccauuaagagcuggcgcaaaaauauccugagaacacaggaauccgaguguaccugcguuaacgggagcuguuucacaauuaugaccgacggaccuucugauggccucgccuccuacaagaucuuuaaaaucgagaaggggaaagugacaaagagcauugaacugaaugcgccgaacucucacuaugaggaaugcagcuguuaccccgacacgggaaaggucaugugcgugugccgggauaauuggcacggcuccaaccgcccuugggugucuuucgaccagaaccuugauuauaaaaucggguacauuuguagcggagucuuuggcgacaaucccagaccuaaggacggcaccggguccugcggacccguuagcgccgauggcgcuaacggggugaaaggauucucuuacaaguauggcaaugggguguggaucggccggacaaaauccgacagcucucgccauggauuugagaugauuugggauccgaacggcuggaccgagaccgacuccagauucagcaugcggcaagaugucguggccaugacagaccgcuccggguacucuggcagcuuuguucagcacccugaacugacgggacucgauuguaugagacccugcuucuggguggagcugauccgggggcuuccugaagaggacgcuauuuggaccuccggaucuaucaucagcuucuguggcgucaauuccgauacaguggacuggagcuggcccgauggggccgaacugcccuuuaccauugacaaguga

SEQ ID NO: 207143 - RNA, 1350 nt, Artificial Sequence
  derived and/or modified CDS sequence (opt5) from neuraminidase__InfluenzaA__ABF56651
augaaccccaaucagaagaucauuaccaucggcagcauuugcauggugacagggaucgucucccugaugcuccaaguuggaaacaugauuucuaucugggugagccacuccauccauacgggcucucagcaccaggccgagccuauuagcaauaccaacuuccugacagaaaaagcuguggccuccgucaaacuugcgggcaauucuagccuguguccgaucaacggaugggcuguguacuccaaggacaauagcauuagaaucggcucuaagggggauguuuuugugauucgggagcccuucaucuccugcagccaucucgaaugucgcaccuuuuuccugacacagggagcccuucugaacgacaaacacucuaauggcaccgucaaggauagauccccucaucggacacucaugagcugccccgugggcgaggccccuucucccuauaacucccgcuuugaaagcguugcuugguccgccucugcuugucacgacgggaccagcuggcugacgauuggaaucuccggcccugauaauggggccguggcgguccugaaguacaacggaaucauuaccgacacaaucaaaagcuggagaaauaacauucuccggacccaagagucugagugcgccugugugaauggcuccugcuucacagugaugaccgaugggccgagcaacggacaggcuucucacaagaucuuuaaaauggaaaagggcaaagucguuaagagcguggagcuggacgcccccaacuaucauuacgaagaguguuccugcuauccugaugcuggcgagauuacgugugugugccgcgacaauuggcacgggucuaacagacccugggucagcuucaaucagaaccuugaauaccagaucggauauaucugcuccggcguguuuggggauaauccucggcccaacgacggaacaggcagcugugggccgguuucuuccaauggagccuacggcgugaagggcuucagcuuuaaauacgggaacggagucuggauuggccgcaccaagucuacaaauuccagaagcggguucgagaugaucugggauccuaacggauggaccgaaaccgacuccucuuuuagcgugaaacaagacauuguugcgaucacagauugguccggcuauucugggagcuucgugcagcaucccgagcugacgggccucgacugcauucggccuuguuucugggucgaacugauccgcggaagacccaaggaguccaccaucuggacaagcgggucuuccauuagcuuuugcggggucaauucugauaccgugggaugguccuggcccgacggcgccgagcuuccuuucacaaucgauaaauga

SEQ ID NO: 207144 - RNA, 1410 nt, Artificial Sequence; identical to SEQ ID NO: 206899
  derived and/or modified CDS sequence (opt5) from neuraminidase__InfluenzaA__ABF82654

SEQ ID NO: 207145 - RNA, 1413 nt, Artificial Sequence; identical to SEQ ID NO: 206468
  derived and/or modified CDS sequence (opt5) from neuraminidase__InfluenzaA__ABF82665

SEQ ID NO: 207146 - RNA, 1413 nt, Artificial Sequence; identical to SEQ ID NO: 206468
  derived and/or modified CDS sequence (opt5) from neuraminidase__InfluenzaA__ABF82676

SEQ ID NO: 207147 - RNA, 1413 nt, Artificial Sequence
  derived and/or modified CDS sequence (opt5) from neuraminidase__InfluenzaA__ABF82687
augaaccccaaucagaagaucauuaccaucggcagcauuuccaucgccauugggaucaucucucugaugcuccaaauuggaaacaucauuagcaucugggcuucccacucuauucagacaggcagccagaaucauacgggggugugcaaccagagaaucauuaccuacgaaaauuccacaugggucaaccacaccuauguuaauaucaacaauacaaacgugaucgccggaaaagacaagaccucugugacacuggcgggcaauagcucccuuuguagcauuucugggugggcuaucuacaccaaagauaacuccauucggaucggaagcaagggcgacgucuucgugauucgcgagccuuuuaucucuugcucccaucuggaguguagaacguucuuucucacccaaggcgcccugcuuaaugauaaacacagcaacgggacaguuaaggaccggucuccguaucgcgcccugauguccugcccccucggagaagcuccuagccccuacaauuccaaguucgagucuguggccuggagcgcuuccgccugucaugauggcaugggguggcugaccaucggaauuagcggcccugacaacggggcggucgccgugcugaaauauaacggaaucauuacagaaaccaucaagucuuggaaaaagcagauucucagaacgcaggaguccgagugcguuugugugaauggcagcugcuuuacaaucaugaccgauggccccucuaacggggcugccagcuacaaaaucuucaagauugaaaagggaaaaacaaccaaguccaucgagcugaaugcuccuaacuuucacuaugaagaguguucuugcuacccggacaccggcacagucaugugugugugccgggauaauuggcacgggagcaaccgccccuggguguccuucaaucagaaccuugacuaccaaauuggauauaucugcagcggcgucuuuggggauaauccuagacccaaagacggagagggcucuuguaacccuguuacgguggauggcgccaauggggugaagggauucuccuacaaauauggcaacggggucuggauuggacggaccaagagcaaucgccugagaaaaggcuuugaaaugaucugggaccccaacggguggacagacaccgauucugacuucuccgugaagcaggauguuguggcgauuacagacuggagcggcuacuccggaucuuuuguccagcauccggagcucaccggccugaauugcauccggccuuguuucuggguggaacuuguucgcgggcugcccaaggagaacacgacaaucuggaccagcggauccucuauuagcuucugcggcgugaacuccgauaccgccaauuggagcuggccugacggggcugaacuccccuuuacaaucgauaaauga

SEQ ID NO: 207148 - RNA, 1410 nt, Artificial Sequence
  derived and/or modified CDS sequence (opt5) from neuraminidase__InfluenzaA__ABF82698
augaaccccaaucagaagaucauuaccaucggcagcgugucccugacaauuacgaccaucugcuuccucaugcaaauugccauccuggucaucacaguuacccuucacuuuaaacagugugagugcaacucuccuccgaauaaccaggugaugcugugugaacccacaauuaucgagagaaauauuaccgaaaucguguaccucacaaacaccacgauugagaaggaaaucugcccuaaacuggcugaguaucggaauuggagcaagccccaguguaaaauuaccggguucgccccuuuuuccaaggacaacucuauccgccuuagcgcgggaggcgauaucugggucacaagagagcccuacguguccugcgacccugggaaguguuaucaauucgcucugggacagggcaccacacucaauaaccggcauucuaaugauaccguucacgaccgcacgccguacagaacacugcugaugaacgaacucggggugcccuuucaucugggaaccaaacaggucugcauugccuggagcuccagcucuugucacgauggcaaggccuggcuucaugugugcguuacaggccacaaugagaacgcuaccgccuccuucaucuaugacgggcggcugguggauagcauuggaucuugguccaaaaauauccuccgcacccaggaaagcgagugugucugcauuaacggcacaugcacgguggugaugaccgacgggucugcuuccgggagagccgauacaaagauccuguuuaucgaggaaggcaaaauuguccacaucagcccucuuuccgggucugcgcaacauguugaggaauguagcugcuacccccgguauccuggagugcgcugugugugcagagacaacuggaagggcuccaaucggcccauugucgauaucaacgugaaggacuacagcauuguuucuuccuacguguguagcggccuggucggggauaccccgcgcaaaaaugacucuagcuccucuagcuauugccucgacccuaacaaugaggaaggaggccacggggugaagggaugggccuucgaugacggcaacgauguuuggauggggagaacaaucuccgagaaacugcggagcggauacgagaccuuuaaggugaucggcggcuggucuaaacccaauuccaagcugcagauuaaccgccaggucaucguggacaaagggaauagaagcggauauucuggcauuuucuccgucgaaggaaagagcuguacgaaccggugcuuuuacguggagcucaucagaggacgcaagcaggaaacagagguuugguggaccuccaauucuauuguggucuucuguggcaccagcgggacauauggcaccggauccuggccugauggcgcugacaucaaccugaugcccauuuga

SEQ ID NO: 207149 - RNA, 1410 nt, Artificial Sequence; identical to SEQ ID NO: 206198
  derived and/or modified CDS sequence (opt5) from neuraminidase__InfluenzaA__ABF82709

SEQ ID NO: 207150 - RNA, 1413 nt, Artificial Sequence; identical to SEQ ID NO: 206487
  derived and/or modified CDS sequence (opt5) from neuraminidase__InfluenzaA__ABF82822

SEQ ID NO: 207151 - RNA, 1413 nt, Artificial Sequence; identical to SEQ ID NO: 206468
  derived and/or modified CDS sequence (opt5) from neuraminidase__InfluenzaA__ABF82833

SEQ ID NO: 207152 - RNA, 1413 nt, Artificial Sequence; identical to SEQ ID NO: 206468
  derived and/or modified CDS sequence (opt5) from neuraminidase__InfluenzaA__ABF82844

SEQ ID NO: 207153 - RNA, 1413 nt, Artificial Sequence
  derived and/or modified CDS sequence (opt5) from neuraminidase__InfluenzaA__ABF82855
augaaccccaaucagaagaucauuaccaucggcagcauuuccaucgccauugggaucaucucucugaugcuccaaauuggaaacaucauuagcaucugggcuucccacucuauucagaucggcagccagaaucauacaggggugugcaaccagagaauuaucacguacgaaaauuccaccugggucaaccacacauauguuaauaucaacaauaccaacgugauugccggaaaagacaagacaucugugacccuggcgggcaauagcucccuuuguagcaucucugggugggcuauuuacacaaaagauaacuccauccggauuggaagcaagggcgacgucuucgugauccgcgagccuuuuaucucuugcucccaucuggaguguagaaccuucuuucucacgcaaggcgcccugcuuaaugauaaacacagcaacgggaccguuaaggaccggucuccguaucgcgcccugauguccugcccccucggagaagcuccuagccccuacaauuccaaguucgagucuguggccuggagcgcuuccgccugucaugauggcaugggguggcugacaauuggaaucagcggcccugacaacggggcggucgccgugcugaaauauaacggaauuaucaccgaaacaauuaagucuuggaaaaagcagauccucagaacccaggaguccgagugcguuugugugaauggcagcugcuuuacgaucaugacagauggccccucuaacggggcugccagcuacaaaauuuucaagaucgaaaagggaaaagucaccaaguccauugagcugaaugcuccuaacuuucacuaugaagaguguucuugcuacccggacacaggcaccgugaugugugugugccgggauaauuggcacgggagcaaccgccccugggucuccuucaaucagaaccuugacuaccaaaucggauauauuugcagcggcguuuuuggggauaauccuagacccaaagacggagagggcucuuguaacccugugaccguggauggcgccaauggggucaagggauucuccuacaaauauggcaacgggguguggaucggacggacaaagagcaaucgccugagaaaaggcuuugaaaugauuugggaccccaacggguggacggacaccgauucugacuucuccguuaagcaggauguggucgcgaucacagacuggagcggcuacuccggaucuuuugugcagcauccggagcucaccggccuggauugcauccggccuuguuucuggguugaacuugugcgcgggcugcccaaggagaauacaaccauuuggacgagcggauccucuaucagcuucugcggcgucaacuccgacacagccaacuggagcuggccugauggggcugaacuccccuuuaccauugacaaauga

SEQ ID NO: 207154 - RNA, 1413 nt, Artificial Sequence; identical to SEQ ID NO: 206468
  derived and/or modified CDS sequence (opt5) from neuraminidase__InfluenzaA__ABF82866

SEQ ID NO: 207155 - RNA, 1413 nt, Artificial Sequence; identical to SEQ ID NO: 207002
  derived and/or modified CDS sequence (opt5) from neuraminidase__InfluenzaA__ABF82888

SEQ ID NO: 207156 - RNA, 1413 nt, Artificial Sequence; identical to SEQ ID NO: 206468
  derived and/or modified CDS sequence (opt5) from neuraminidase__InfluenzaA__ABF82910

SEQ ID NO: 207157 - RNA, 1413 nt, Artificial Sequence; identical to SEQ ID NO: 206468
  derived and/or modified CDS sequence (opt5) from neuraminidase__InfluenzaA__ABF82921

SEQ ID NO: 207158 - RNA, 1413 nt, Artificial Sequence; identical to SEQ ID NO: 206468
  derived and/or modified CDS sequence (opt5) from neuraminidase__InfluenzaA__ABF82932

SEQ ID NO: 207159 - RNA, 1413 nt, Artificial Sequence; identical to SEQ ID NO: 206468
  derived and/or modified CDS sequence (opt5) from neuraminidase__InfluenzaA__ABF82943

SEQ ID NO: 207160 - RNA, 1350 nt, Artificial Sequence
  derived and/or modified CDS sequence (opt5) from neuraminidase__InfluenzaA__ABG20474
augaaccccaaucagaagaucauuaccaucggcagcauuugcauggugaucgggauugucucccugaugcuccaaaucggaaacaugaucucuauuuggguuagccacuccauccagacaggcaaucagagacaggccgagccuauuucuaacacgaaauuccugaccgaaaaggcuguggccagcgugacacuugcgggaaauuccucucuguguccgaucagcgggugggcugucuacuccaaagacaacagcauucggaucggcucucgcggggauguguuuguuauuagagagcccuucaucuccugcagccaucucgaaugucggaccuuuuuccugacacaaggagcccuucugaaugacaagcacucuaacggcaccgugaaagaucgcuccccuuauagaacacucaugagcugccccgucggcgaggccccuucucccuacaauucccgguuugaaagcguggcuugguccgccucugcuugucaugacgggaccagcuggcugacgaucggaauuuccggcccugauaacggggccguugcggugcugaaguauaauggaaucauuaccgacacaaucaagagcuggcgcaacaauguccucagaacccaggagucugagugcgccugugugaacggcuccugcuucacagugaugaccgaugggccgagcaauggacaggcuucuuacaaaauuuuuaagauggaaaaaggcaaggucguuaaaagcguggagcuggacgcccccaacuaucacuacgaagaguguuccugcuauccugaugcuggcgagaucacgugugugugccgggacaacuggcaugggucuaaucgccccugggucagcuucaaccagaaucuugaauaccaaaucggauacauuugcuccggcguguuuggggauaacccuagacccaaugacggaacaggcagcugugggccgguuucuccuaacggagccuauggcgugaagggcuucuccuuuaaguacgggaauggagucuggaucggccggaccaaaagcacaaacucucgcuccggguucgagaugauuugggaucccaauggauggaccggcaccgacagcaacuuuuccgugaagcaggacaucguugcgauuacagauuggucuggguauagcggcuccuucgugcagcacccugaacugacgggacucgacugcaucagacccuguuucugggucgagcugauccggggccgccccaaagaaucuaccauuuggacaagcggguccagcaucuuuuucugcggagucaauucugauaccguguccuggagcuggccugacggcgccgagcuuccguuuacaauugauaaguga

SEQ ID NO: 207161 - RNA, 1410 nt, Artificial Sequence; identical to SEQ ID NO: 206198
  derived and/or modified CDS sequence (opt5) from neuraminidase__InfluenzaA__ABG26761

SEQ ID NO: 207162 - RNA, 1410 nt, Artificial Sequence
  derived and/or modified CDS sequence (opt5) from neuraminidase__InfluenzaA__ABG26772
augaaccccaaucagaagaucauuaccaucggcagcgugucccugacaauugccacgaucugcuuccucaugcaaauugcuauccuggucaccacaguuacccuucacuuuaaacaguacgaguguaacucuccuccgaauaaccaggugaugcugugcgaacccacaaucauugagagaaauaucaccgaaauuguguaucucacaaacaccacgaucgagaaggaaauuuguccuaaacuggccgaguaccggaauuggagcaagccccagugcaaaaucaccggguucgcgccuuuuuccaaggacaacucuauucgccuuagcgcuggaggcgauaucugggucacaagagagcccuauguguccugugacccugauaagugcuaccaauucgcccuggggcagggaaccacacucaauaaccggcauucuaaugacaccguucacgaucgcacgccguauagaacacugcugaugaacgaacucggcgugcccuuucaucuggggaccaaacaggucuguaucgccuggagcuccagcucuugccacgacggaaaggcuuggcuucauguguguguuacaggccacgaugagaaugccaccgcuuccuucauuuacgacggccggcugguggauagcaucgggucuugguccaaaaagauucuccgcacccaggaaagcgagugcgucuguaucaacggaacaugcacgguggugaugaccgacggcucugccuccgggagagcggauacaaaaauucuguuuaucaaggagggaaagaucguccacauuagcccucuuuccggcucugcccaacauguugaagagugcagcuguuauccccgguacccuggggugcgcugcguguguagagacaauuggaaaggauccaaccggcccaucgucgauauuaacgugaaggacuacagcaucguuucuuccuaugugugcagcggccuggucggcgacaccccgcgcaaaaaugauucuagcuccucuagccacugucucaacccuaauaacgaagaagggggacauggcgugaaggggugggcuuucgacgauggaaaugacguuuggaugggcagaacaauuuccgagaaacugcggagcggguacgagaccuuuaaggugaucgagggauggucuaaacccaacuccaagcugcagaucaaucgccaggucauuguggauagaggcaaccggagcggcuauucugggaucuucuccgucgaaggaaagagcugcauuaauagauguuuuuacguggagcucauccgcggccggaaacaggaaacggagguuugguggacauccaacucuauuguggucuucugcgggaccagcggaaccuauggcacaggguccuggccugacggcgccgauaucaaucugaugcccauuuga

SEQ ID NO: 207163 - RNA, 1413 nt, Artificial Sequence
  derived and/or modified CDS sequence (opt5) from neuraminidase__InfluenzaA__ABG26783
augaaccccaaucagaagaucauuaccaucggcagcauuuccaucgccauugggaucaucucucugauucuccaaaucggaaacauuaucagcauuugggcuucccacucuauccagacaggcagccagaaucauacggggauuugcaaccagagaaucaucaccuacgagaauagcacaugggugaaccaaaccuaugucaauauuaacaauacaaacguuguggccggaaaagacaagaccucuaugacacuggcgggcaauagcucccuuuguccuauccgggggugggcuauuuacaccaaagauaacagcauccgcauuggaucuaagggcgacguguucgucaucagagaaccguuuaucuccugcagccaccuggagugucggacguucuuucucacccagggcgcccugcuuaaugauaaacauucuaacgggacagugaaggaccgcucccccuauagagcccugaugagcugcccucucggagaagcucccucuccuuacaauucccgguucgagagcguugccugguccgcuucugccugucacgauggccugggguggcugaccauuggaaucagcggccccgacaacggggcgguggccguccucaaguauaacggaauuaucacagaaaccauuaaauccuggaagaaacgcauccugagaacgcaggagagcgagugcguguguaugaauggcucuugcuuuacaaucaugaccgauggcccuuccaacggggcugccagcuaccggauuuucaagaucgaaaaaggacgcguuacaaagucuauugagcuugacgcuccgaauuaucauuacgaagaguguagcugcuaccccaacaccggcaccgugaugugugucugcagagauaauuggcacggguccaaccggccuugggugucuuuuaaucagaaccuggacuaucaaaucggauacauuugcagcggcguguucggggauaauccccgcccuaaggacggagagggcuccuguaaccccgucacaguugauggcgccgacggggugaaaggauuuagcuauagauacggcaaugggguguggaucggacggacgaagucuaaccgccucagaaaaggcuucgaaaugauuugggacccgaauggguggaccgauacagacuccgauuuuagcaugaagcaggacaucgucgcgaugaccgauuggucuggcuauuccggauccuucgugcagcacccugagcugacaggccuugacugcauccggcccuguuuuuggguugaacuggugagagggcucccucgcgagaacaccacgauuuggacauccggaucuagcaucuccuucugcggcgucaauucugauaccgccaacuggagcuggcccgacggggcugaacugcccuucaccauugauaaauga

SEQ ID NO: 207164 - RNA, 1413 nt, Artificial Sequence; identical to SEQ ID NO: 207040
  derived and/or modified CDS sequence (opt5) from neuraminidase__InfluenzaA__ABG26794

SEQ ID NO: 207165 - RNA, 1410 nt, Artificial Sequence
  derived and/or modified CDS sequence (opt5) from neuraminidase__InfluenzaA__ABG26805
augaaccccaaucagaagaucauuaccaucggcagcgugucccugacaauugccacgaucugcuuccucacccaaauugcuauccuggucacaaccguuacacuucacuuuaaacaguacgaguguucuagcccuccgaacaaucaggugaugcccugcgaaccuaucauuaucgagagaaacauuaccgaaaucguguaucugacaaauaccacgauugagaaggaaaucugucccaaacucgucgaguaccggaacugguccaagccucagugcaaaauuaccggguucgcccccuuuucuaaggacaauagcauccgccuguccgcgggaggcgauaucugggugacaagagagccuuauguuucuugugacccggggaagugcuaccaauucgcucuuggacagggcaccacacugaacaauaaacauagcaacgauaccauucacgaccggacgcccuaucgcacacuccugaugaaugaacugggggugccuuuucaucucggaaccaagcaggucuguaucgccugguccuccucuuccugccacgauggcaaagccuggcugcauguguguauuacaggccacgacaagaacgcuaccgccagcuucaucuacgaugggagacuuguugacucuauuggauccuggagcaaaaauauccugcggacccaggagucugaaugcguguguaucaacggcacaugcacggucgugaugaccgauggguccgcuagcgagcgcgccgacacaaagauucucuuuaucgaggaaggaaagauugugcacaucagcccccugucuggcagcgcgcaacaugucgaggaaugcuccuguuauccuagauaccccgggguucggugcgugugucgcgauaauuggaaaggaagcaacagaccgauuguggacaucaacgucaaggauuacucuaucguguccagcuauguuugcucuggccuugugggcgacaccccucggaaaaaugaccgcagcuccucuagcuacuguagaaaccccaauaacgagaaggggaaucacggagucaaaggcugggccuucgaugacgggaacgauguguggaugggacggacaauuggcgaggaacugcgcuccggguaugagaccuuuaagguuaucggaggcuggagcacgccuaauucuaaacuccagauuaacagacagaucauuguggacuccggcaaucggagcggguacucuggaaucuucuccgucgaaggcaagagcugcauuaacagauguuuuuauguggagcugauccgcgggcgggaacaggagacaagagucugguggaccuccaauucuaucgugguuuucugcggaaccagcggcacauacgggaccggcuccuggcccgauggagcugacauuaaccugaugcccaucuga

SEQ ID NO: 207166 - RNA, 1413 nt, Artificial Sequence; identical to SEQ ID NO: 207023
  derived and/or modified CDS sequence (opt5) from neuraminidase__InfluenzaA__ABG26816

SEQ ID NO: 207167 - RNA, 1413 nt, Artificial Sequence; identical to SEQ ID NO: 207131
  derived and/or modified CDS sequence (opt5) from neuraminidase__InfluenzaA__ABG26827

SEQ ID NO: 207168 - RNA, 1413 nt, Artificial Sequence; identical to SEQ ID NO: 207131
  derived and/or modified CDS sequence (opt5) from neuraminidase__InfluenzaA__ABG26838

SEQ ID NO: 207169 - RNA, 1410 nt, Artificial Sequence
  derived and/or modified CDS sequence (opt5) from neuraminidase__InfluenzaA__ABG26860
augaaccccaaucagaagaucauuaccaucggcagcgugucccugacaauugccacgaucugcuuccucaugcaaauugcuauccuggucaccacaguuacccuucacuuuaaacaguacgaguguaacucuccuccgaauaaccaggugaugcugugcgaacccacaaucauugagagaaauaucaccgaaauuguguaucucacaaacaccacgaucgagaaggaaauuuguccuaaacuggccgaguaccggaauuggagcaagccccagugcaaaaucaccggguucgcgccuuuuuccaaggacaacucuauucgccuuagcgcuggaggcgauaucugggucacaagagagcccuauguguccugugacccugggaagugcuaccaauucgcccugggacagggcaccacacucaauaaccggcauucuaaugauaccguucacgaccgcacgccguauagaacacugcugaugaacgaacucggggugcccuuucaucugggaaccaaacaggucuguaucgccuggagcuccagcucuugccacgauggcaaggcuuggcuucauguguguguuacaggccacgacgagaaugccaccgcuuccuucauuuacgaugggcggcugguggacagcaucggaucuugguccaaaaacauucuccgcacccaggaaagcgagugcgucuguaucaauggcacaugcacgguggugaugaccgaugggucugccuccgacagagcggauacaaagauucuguuuaucgaggaaggaaaaaucguccacauuagcccucuuuccggcucugcccaacauguugaggaaugcagcuguuauccccgguacccuggggugcgcugcguguguagagacaacuggaagggauccaaccggcccaucauugauaucaaugucaaggacuacagcauugugucuuccuauguuugcagcggccuggugggcgacaccccgcgcaaaaacgauucuagcuccucuagcuacuguuggaauccuaacaaugagaaagggggacacggcgucaaggggugggcuuucgacgauggaaacgacguguggaugggcagaacaaucuccgaagagagccggucuggguaugagaccuuuaagguuaucggaggcugguccaaacccaauagcaagcuccagauuaaccgccaggugaucgucgauagaggcaaucggucuggguacuccggaauuuucagcguggaaggcaaauccugcaucaacagauguuuuuaugucgagcugauucgcgggcggaagcaggaaacggaggugugguggacaucuaauagcaucguuguguucugcggaaccuccggcaccuacgggacaggcucuuggccugacggagccgauauuaaccugaugcccaucuga

SEQ ID NO: 207170 - RNA, 1410 nt, Artificial Sequence
  derived and/or modified CDS sequence (opt5) from neuraminidase__InfluenzaA__ABG26871
augaaccccaaucagaagaucauuaccaucggcagcgugucccugacaauugccacgaucugcuuccucaugcaaauugcuauccuggucaccacaguuacccuucacuuuaaacaguacgaguguaacucuccuccguauaaucagaucaugcugugcgaacccacaauuaucgagagaaacauuaccgaaaucguguaccucacaaauaccacgauugagaaggaaaucuguccuaaacuggccgaguaucggaacuggagcaagccccagugcaaaauuaccggguucgcgccuuuuuccaaggacaauucuauccgccuuagcgcuggaggcgauaucugggugacaagagagcccuacgucuccugugacccugggaagugcuaucaauucgcccugggacagggcaccacacucaacaaucggcauucuaacgauaccgugcacgaccgcacgccguacagaacacugcugaugaaugaacucgggguucccuuucaucugggaaccaaacagguguguauugccuggagcuccagcucuugccacgauggcaaggcuuggcuucaugucugugugacaggccacgacgagaacgccaccgcuuccuucaucuaugaugggcggcugguugacagcauuggaucuugguccaaaaauauccuccgcacccaggaaagcgagugcguguguauuaacggcacaugcacggucgugaugaccgaugggucugccuccgacagagcggauacaaagauccuguuuaucgaggaaggaaaaauugugcacaucagcccucuuuccggcucugcccaacaugucgaggaaugcagcuguuacccccgguacccugggguucgcugcguguguagagacaauuggaagggauccaaccggcccauuguggauaucaacgucaaggacuauagcauugugucuuccuacguuugcagcggccuggugggcgacaccccgcgcaaaaaugauucuagcuccucuagcuauuguuggaacccuaauaacgagaaagggggacacggcgucaaggggugggcuuucgacgauggaaaugacguguggaugggcagaacaaucuccgaagagagccggucuggguacgagaccuuuaagguuaucggaggcugguccaaacccaacagcaagcuccagauuaaucgccaggugaucgucgauagaggcaaccggucuggguauuccggaauuuucagcguggaaggcaaauccugcaucaauagauguuuuuacgucgagcugauucgcgggcggaagcaggaaacggaggugugguggacaucuaacagcaucguuguguucugcggaaccuccggcaccuaugggacaggcucuuggccugacggagccgauauuaaucugaugcccaucuga

SEQ ID NO: 207171 - RNA, 1410 nt, Artificial Sequence
  derived and/or modified CDS sequence (opt5) from neuraminidase__InfluenzaA__ABG26893
augaaccccaaucagaagaucauuaccaucggcagcauuucccugacaaucgccacgauuugcuuccucaugcaaaucgcuauccuggugaccacagucacccuucacuuuaaacaguacgaguguaacucuccuccgaauaaccagguuaugcugugcgaacccacaauuaucgagagaaauauuaccgaaaucguguaucucacaaacaccacgauugagaaggaaaucuguccuaaacuggccgaguaccggaauuggagcaagccccagugcaaaauuaccggguucgcgccuuuuuccaaggacaacucuauccgccuuagcgcuggaggcgauaucugggugacaagagagcccuaugucuccugugacccugggaagugcuaccaauucgcccugggacagggcaccacacucaauaaccggcauucuaaugauaccgugcacgaccgcacgccguauagaacacugcugaugaacgaacucgggguucccuuucaucugggaaccaaacagguguguauugccuggagcuccagcucuugccacgauggcaaggcuuggcuucaugucugugugacaggccacgacgagaaugccaccgcuuccuucaucuacgaugggcggcugguugacagcauuggaucuugguccaaaaacauccuccgcacccaggaaagcgagugcguguguauuaauggcacaugcacggucgugaugaccgaugggucugccuccgacagagcggauacaaagauccuguuuaucgaggaaggaaaaauugugcacaucagcccucuuuccggcucugcccaacaugucgaggaaugcagcuguuauccccgguacccugggguucgcugcguguguagagacaacuggaagggauccaaccggcccauuguggauaucaaugucaaggacuacagcauugugucuuccuauguuugcagcggccuggugggcgacaccccgcgcaaaaacgauucuagcuccucuagcuacuguuggaauccuaacaaugagaaagggggacacggcgucaaggggugggcuuucgacgauggaaacgacguguggaugggcagaacaaucuccgaagagagccggucuggguaugagaccuuuaagguuaucggaggcugguccaaacccaauagcaagcuccagauuaaccgccaggugaucgucgauagaggcaaucggucuggguacuccggaauuuucagcguggaaggcaaauccugcaucaacagauguuuuuaugucgagcugauucgcgggcggaagcaggaaacggaggugugguggacaucuaauagcaucguuguguucugcggaaccuccggcaccuacgggacaggcucuuggccugacggagccgauauuaaccugaugcccaucuga

SEQ ID NO: 207172 - RNA, 1410 nt, Artificial Sequence
  derived and/or modified CDS sequence (opt5) from neuraminidase__InfluenzaA__ABG26915
augaaccccaaucagaagaucauuaccaucggcagcgugucccugacaauugccacgaucugcuuccucaugcaaauugcuauccuggucaccacaguuacccuucacuuuaaacaguacgaguguaacucuccuccgaauaaccaggugaugcugugcgaacccacaaucauugagagaaauaucaccgaaauuguguaucucacaaacaccacgaucgagaaggaaauuuguccuaaacuggccgaguaccggaauuggagcaagccccagugcaaaaucaccggguucgcgccuuuuuccaaggacaacucuauucgccuuagcgcuggaggcgauaucugggucacaagagagcccuauguguccugugacccugggaagugcuaccaauucgcccugggacagggcaccacacucaauaaccggcauucuaaugauaccguucacgaccgcacgccguauagaacacugcugaugaacgaacucggggugcccuuucaucugggaaccaaacaggucuguaucgccuggagcuccagcucuugccacgauggcaaggcuuggcuucauguguguguuacaggccacgacgagaaugccaccgcuuccuucauuuacgaugggcggcugguggacagcaucucuuccuggagcaaaaacauucuccgcacccaggaaucugagugcgucuguaucaauggaacaugcacgguggugaugaccgauggcuccgccagcgagagagcggacacaaagauucuguuuaucgaagaggggaaaaucguccacauuuccccucuuucuggaagcgcccaacauguugaagagugcuccuguuauccccgguacccuggcgugcgcugcguguguagagauaacuggaaggggagcaaccggcccaucgucgacauuaaugugaaggauuacucuaucguuuccagcuaugugugcucuggacuggucggcgacaccccgcgcaaaaacgacagcuccucuagcuccuacugucucaauccuaacaaugaagagggcgggcacggagugaagggcugggcuuucgaugacgggaacgauguuuggaugggaagaacaauuagcgagaaacugcggucuggcuaugaaaccuuuaaggugaucgggggaugguccaaacccaauagcaagcugcagaucaaccgccaggucauuguggacagaggcaaucggucuggcuacuccgggaucuucagcgucgagggaaaauccugcgugaacagauguuuuuauguugaacucauucgcggccggaagcaggagacggaagugugguggacaucuaauagcaucgucguguucugcgggaccuccggaaccuacggcacagggucuuggccugauggcgccgacauuaaccugaugcccaucuga

SEQ ID NO: 207173 - RNA, 1410 nt, Artificial Sequence
  derived and/or modified CDS sequence (opt5) from neuraminidase__InfluenzaA__ABG26937
augaaccccaaucagaagaucauuaccaucggcagcgugucccugacaauugccacgaucugcuuccucaugcaaauugcuauccuggucaccacaguuacccuucacuuuaaacaguacgaguguaacucuccuccgagcaaucaggugaugcugugcgaacccacaaucauugagagaaacaucaccgaaauuguguaucucacaaauaccacgaucgagaaggaaauuuguccuaaacuggccgaguaccggaacugguccaagccccagugcaaaaucaccggguucgcgccuuuuucuaaggacaauagcauucgccuuuccgcuggaggcgauaucugggucacaagagagcccuaugugucuugugacccugggaagugcuaccaauucgcccugggacagggcaccacacucaacaaucggcauagcaacgauaccguucacgaccgcacgccguauagaacacugcugaugaaugaacucggggugcccuuucaucugggaaccaaacaggucuguaucgccugguccucuagcuccugccacgauggcaaggcuuggcuucauguguguguuacaggccacgacgagaacgccaccgcuagcuucauuuacgaugggcggcugguggacucuaucggauccuggagcaaaaauauucuccgcacccaggaaucugagugcgucuguaucaacggcacaugcacgguggugaugaccgauggguccgccagcgagagagcggacacaaagauucuguuuaucgaagagggaaaaaucguccacauuuccccucuuucuggcagcgcccaacauguugaagagugcuccuguuauccccgguacccuggggugcgcugcguguguagagauaauuggaagggaagcaaccggcccaucgucgacauuaacgugaaggauuacucuaucguuuccagcuaugugugcucuggccuggucggcgacaccccgcgcaaaaaugacagcuccucuagcuccuacuguagaaacccuaauaacgaaaaggggagccacggagugaaaggcugggcuuucgaugacgggaaugauguuuggaugggacggacaauuucugaggagcuccgcuccggcuaugaaaccuuuaaggugaucgggggauggagcaaacccaacucuaagcugcagaucaauagacaggucauuguggaccggggcaacagauccggcuacagcgggaucuucuccgucgagggaaaaucuugcauuaaucgcuguuuuuauguggaacugauccggggcagaaagcaggagacggaaguuugguggacaagcaacuccauuguggucuucugcgggaccucuggaaccuacggcacagggagcuggccugauggcgccgacaucaaucucaugcccauuuga

SEQ ID NO: 207174 - RNA, 1413 nt, Artificial Sequence; identical to SEQ ID NO: 206468
  derived and/or modified CDS sequence (opt5) from neuraminidase__InfluenzaA__ABG26948

SEQ ID NO: 207175 - RNA, 1410 nt, Artificial Sequence; identical to SEQ ID NO: 206238
  derived and/or modified CDS sequence (opt5) from neuraminidase__InfluenzaA__ABG26959

SEQ ID NO: 207176 - RNA, 1413 nt, Artificial Sequence
  derived and/or modified CDS sequence (opt5) from neuraminidase__InfluenzaA__ABG37123
augaaccccaaucagaagaucauuaccaucggcagcauuuccaucacaauugggaucaucucucugaugcuccaaauuggaaacaucauuagcaucugggccucccacucuauucagacgggcagccagaaucauaccggggugugcaaccagagaaucauuacauacgaaaauuccaccugggucaaccacacauauguuaauaucaacaauaccaacgugaucgcuggaaaagacaagacaucugugacccuggccggcaauagcucccuuuguagcauuucugggugggcgaucuacacgaaagauaacuccauucggaucggaagcaagggcgacgucuucgugauucgcgagccuuuuaucucuugcucccaucuggaguguagaaccuucuuucucacacaaggcgcucugcuuaaugauaaacacagcaacgggaccguuaaggaccggucuccguaucgcgcccugauguccugcccccucggagaagccccuagccccuacaauuccaaguucgagucuguggcuuggagcgccuccgcuugucaugauggcaugggguggcugacaaucggaauuagcggcccugacaacggggccgucgcggugcugaaauauaacggaaucauuaccgaaacgaucaagucuuggaaaaagcagauucucagaacacaggaguccgagugcguuugugugaauggcagcugcuuuaccaucaugacagauggccccucuaacggggccgcuagcuacaaaaucuucaagauugaaaagggaaaagucaccaaguccaucgagcugaaugccccuaacuuucacuaugaagaguguucuugcuacccggacaccggcacagugaugugugugugccgggauaauuggcacgggagcaaccgccccugggucuccuucaaucagaaccuugacuaccaaauuggauauaucugcagcggcguuuuuggggauaauccuagacccaaagacggagagggcucuuguaacccugugacgguggauggcgcuaauggggucaagggauucuccuacaaauauggcaacgggguguggauuggacggaccaagagcaaucgccugagaaaaggcuuugaaaugaucugggaccccaacggguggacagacaccgauucugacuucuccguuaagcaggauguggucgccauuacagacuggagcggcuacuccggaucuuuugugcagcauccggagcucaccggccuggauugcauccggccuuguuucuggguugaacuugugcgcgggcugcccaaggagaauacgacaaucuggaccagcggauccucuauuagcuucugcggcgucaacuccgacaccgcgaacuggagcuggccugauggggccgaacuccccuuuacaaucgacaaauga

SEQ ID NO: 207177 - RNA, 1410 nt, Artificial Sequence
  derived and/or modified CDS sequence (opt5) from neuraminidase__InfluenzaA__ABG37134
augaaccccaaucagaagaucauuaccaucggcagcgugucccugacaauugccacgaucugcuuccucaugcaaauugcuauccuggucaccacaguuacccuucacuuuaaacaguacgaguguaacucuccuccgaauaaccaggugaugcugugcgaacccacaaucauugagagaaauaucaccgaaauuguguaucucacaaacaccacgaucgagaaggaaauuuguccuaaacuggccgaguaccggaauuggagcaagccccagugcaaaaucaccggguucgcgccuuuuuccaaggacaacucuauucgccuuagcgcuggaggcgauaucugggucacaagagagcccuauguguccugugacccugauaagugcuaccaauucgcccuggggcagggaaccacacucaauaaccggcauucuaaugacaccguucacgaucgcacgccguauagaacacugcugaugaacgaacucggcgugcccuuucaucuggggaccaaacaggucuguaucgccuggagcuccagcucuugccacgacggaaaggcuuggcuucauguguguguuacaggccacgaugagaaugccaccgcuuccuucauuuacgacggccggcugguggauagcaucgggucuugguccaaaaagauucuccgcacccaggaaagcgagugcgucuguaucaacggaacaugcacgguggugaugaccgacggcucugccuccgggagagcggauacaaaaauucuguuuaucgaggaaggaaagaucguccacauuagccaacuucugggcuccgcccagcauguugaggaaugcucuuguuauccucgguaccccggggugcgcugcguguguagagacaauuggaagggaagcaaccggccuaucgucgauauuaacgugaaagacuacuccaucguuagcucuuaugugugcuccggccucgucggcgacacaccccgcaagaaugauagcucuagcuccucucacugucugaacccgaauaacgaggaagggggacauggcgugaaagggugggcuuucgacgauggaaaugacguuuggaugggcagaaccauuagcgagaagcugcgguccggguacgagaccuuuaaagugaucgaaggauggagcaagccuaacucuaaacuccagaucaaucgccaggucauuguggauagaggcaaccgguccggcuauagcgggaucuucucugucgagggaaaguccugcauuaauagauguuuuuacguggaacugauccgcggccggaagcaagagacggaaguuugguggacaagcaacuccauuguggucuucugcgggaccucuggaaccuauggcacagggagcuggcccgacggcgccgauaucaaucuuaugccuauuuga

SEQ ID NO: 207178 - RNA, 1410 nt, Artificial Sequence; identical to SEQ ID NO: 206198
  derived and/or modified CDS sequence (opt5) from neuraminidase__InfluenzaA__ABG37145

SEQ ID NO: 207179 - RNA, 1410 nt, Artificial Sequence
  derived and/or modified CDS sequence (opt5) from neuraminidase__InfluenzaA__ABG37156
augaaccccaaucagaagaucauuaccaucggcagcgugucccugacaauugccacgaucugcuuccucaugcaaauugcuauccuggucaccacaguuacccuucacuuuaaacaguacgaguguaacucuccuccgaauaaccaggugaugcugugcgaacccacaaucauugagagaaauaucaccgaaauuguguaucucacaaacaccacgaucgagaaggaaauuuguccuaaacuggccgaguaccggaauuggagcaagccccagugcaaaaucaccggguucgcgccuuuuuccaaggacaacucuauucgccuuagcgcuggaggcgauaucugggucacaagagagcccuauguguccugugacccugggaagugcuaccaauucgcccugggacagggcaccacacucaauaaccggcauucuaaugauaccguucacgaccgcacgccguauagaacacugcugaugaacgaacucggggugcccuuucaucugggaaccaaacaggucuguaucgccuggagcuccagcucuugccacgauggcaaggcuuggcuucauguguguguuacaggccacgacgagaaugccaccgcuuccuucauuuacgaugggcggcugguggacagcaucggaucuugguccaaaaacauucuccgcacccaggaaagcgagugcgucuguaucaauggcacaugcacgguggugaugaccgaugggucugccuccggcagagcggacacaaagauucuguuuaucgaggaaggaaaaaucguccacauuagcccucuuuccgggucugcccaacauguugaggaaugcagcuguuauccccgguacccuggagugcgcugcguguguagagauaacuggaagggcuccaaccggcccaucgucgacauuaaugugaaggauuacagcaucguuucuaacuaugugugcuccggccuggucggggacaccccgcgcaaaaaugacagcucuagcuccucucacugucucaacccuaauaacgaggaaggaggccauggggugaagggaugggcuuucgaugacggcaaugauguuuggauggggagaacaauuagcgagaaacugcgguccggauacgagaccuuuaaggugaucggcggcuggagcaaacccaacucuaagcugcagaucaaucgccaggucauuguggacagagggaaccgguccggauauagcggcaucuucucugucgaagggaaauccugcauuaauagauguuuuuacguggagcucauccgcggacggaagcaggaaacggagguuugguggacaagcaacuccauuguggucuucugcggcaccucugggaccuauggcacaggaagcuggccugauggcgccgacaucaaucugaugcccauuuga

SEQ ID NO: 207180 - RNA, 1410 nt, Artificial Sequence
  derived and/or modified CDS sequence (opt5) from neuraminidase__InfluenzaA__ABG37167
augaaccccaaucagaagaucauuaccaucggcagcgugucccugacaauugccacgaucugcuuccucaugcaaauugcuauccuggucaccacaguuacccuucacuuuaaacaguacgaguguaacucuccuccgaauaaccaggugaugcugugcgaacccacaaucauugagagaaauaucaccgaaauuguguaucucacaaacaccacgaucgagaaggaaauuuguccuaaacuggccgaguaccggaauuggagcaagccccagugcaaaaucaccggguucgcgccuuuuuccaaggacaacucuauucgccuuagcgcuggaggcgauaucugggucacaagagagcccuauguguccugugacccugauaagugcuaccaauucgcccuggggcagggaaccacacucaauaaccggcauucuaaugacaccguucacgaucgcacgccguauagaacacugcugaugaacgaacucggcgugcccuuucaucuggggaccaaacaggucuguaucgccuggagcuccagcucuugccacgacggaaaggcuuggcuucauguguguguuacaggccacgaugagaaugccaccgcuuccuucauuuacgacggccggcugguggauagcaucucuuccuggagcaaaaacauucuccgcacccaggaaucugagugcgucuguaucaaugggacaugcacgguggugaugaccgacggauccgccagcggcagagcggauacaaagauucuguuuaucgaggaagggaaaaucguccacauuuccccucuuucuggaagcgcccaacauguugaggaaugcuccuguuauccccgguacccuggcgugcgcugcguguguagagacaacuggaaggggagcaaccggcccaucgucgauauuaaugugaaggacuacucuaucguuuccagcuaugugugcucuggacuggucggcgacaccccgcgcaaaaacgauagcuccucuagcuccuacugucucaauccuaacaaugaggaaggcgggcacggagugaagggcugggcuuucgacgaugggaacgacguuuggaugggaagaacaauuagcgagaaacugcggucuggcuaugagaccuuuaaggugaucgggggaugguccaaacccaauagcaagcugcagaucaaccgccaggucauuguggauagaggcaaucggucuggcuacuccgggaucuucagcgucgaaggaaaauccugcgugaacagauguuuuuauguugagcucauucgcggccggaagcaggaaacggaggugugguggacaucuaauagcaucgucguguucugcgggaccuccggaaccuacggcacagggucuuggccugacggcgccgauauuaaccugaugcccaucuga

SEQ ID NO: 207181 - RNA, 1410 nt, Artificial Sequence
  derived and/or modified CDS sequence (opt5) from neuraminidase__InfluenzaA__ABG37189
augaaccccaaucagaagaucauuaccaucggcagcgugucccugacaauugccacgaucugcuuccucaugcaaauugcuauccuggucaccacaguuacccuucacuuuaaacaguacgaguguaacucuccuccgaauaaccaggugcugcucugcgaacccacaaucauugagagaaauaucaccgaaauuguguaucugacaaacaccacgaucgagaaggaaauuuguccuaaacuugccgaguaccggaauuggagcaagccccagugcaaaaucaccggguucgcgccuuuuuccaaggacaacucuauucgccugagcgcuggaggcgauaucugggucacaagagagcccuauguguccugugacccugggaagugcuaccaauucgcccucggacagggcaccacacugaauaaccggcauucuaaugauaccguucacgaccgcacgccguauagaacacugcucaugaacgaacugggggugcccuuucaucuuggaaccaaacaggucuguaucgccuggagcuccagcucuugccacgauggcaaggcuuggcugcauguguguguuacaggccacgacgagaaugccaccgcuuccuucauuuacgaugggcggcucguggacagcaucggaucuugguccaaaaacauucugcgcacccaggaaagcgagugcgucuguaucaauggcacaugcacgguggugaugaccgaugggucugccuccggcagagcggacacaaagauucuuuuuaucgaggaaggaaaaaucguccacauuagcucccugucugggagcgcccaacauguugaggaaugcuccuguuauccucgguaccccggagugcgcugcguguguagagauaacuggaagggcagcaaccggccuaucgucgacauuaaugugaaggauuacucuaucguuuccagcuaugugugcucuggccucgucggggacacaccccgcaaaaacgacagcuccucuagcucccacugucugaauccgaacaaugaggaaggaggccauggggugaagggaugggcuuucgaugacggcaacgauguuuggauggggagaaccauuagcgagaaacugcggucuggauacgagaccuuuaaggugaucggcggcugguccaaaccuaauagcaagcuccagaucaaccgccaggucauuguggacagagggaaucggucuggauauuccggcaucuucagcgucgaagggaaauccugcauuaacagauguuuuuacguggagcugauccgcggacggaagcaggaaacggagguuugguggacaucuaauagcauuguggucuucugcggcaccuccgggaccuauggcacaggaucuuggcccgauggcgccgacaucaaccuuaugccuauuuga

SEQ ID NO: 207182 - RNA, 1410 nt, Artificial Sequence
  derived and/or modified CDS sequence (opt5) from neuraminidase__InfluenzaA__ABG37200
augaaccccaaucagaagaucauuaccaucggcagcgugucccugacaauugccacgaucugcuuccucaugcaaauugcuauccuggucaccacaguuacccuucacuuuaaacaguacgaguguaacucuccuccgaauaaccaggugaugcugugcgaacccacaaucauugagagaaauaucaccgaaauuguguaucucacaaacaccacgaucgagaaggaaauuuguccuaaacuggccgaguaccggaauuggagcaagccccagugcaaaaucaccggguucgcgccuuuuuccaaggacaacucuauucgccuuagcgcuggaggcgauaucugggucacaagagagcccuauguguccugugacucugggaagugcuaccaauucgcccugggacagggcaccacacucaauaaccggcauagcaaugauaccguucacgaccgcacgccuuauagaacacugcugaugaacgaacucggggugccguuucaucugggaaccaaacaggucuguaucgccugguccucuagcuccugccacgauggcaaggcuuggcuucauguguguguuacaggccacgacgagaaugccaccgcuagcuucauuuacgaugggcggcugguggacucuaucggauccuggagcaaaaacauucuccgcacccaggaaucugagugcgucuguaucaauggcacaugcacgguggugaugaccgauggguccgccagcggcagagcggacacaaagauucuguuuaucgaggaaggaaaaaucguccacauuuccacccuuucugggagcgcccaacauguugaggaaugcuccuguuauccccgguacccuggagugcgcugcguguguagagauaacuggaagggcagcaaccggcccaucgucgacauuaaugugaaggauuacucuaucguuuccagcuaugugugcucuggccuggucggggacacaccucgcaaaaacgacagcuccucuagcucccacugucucaaucccaacaaugaggaaggaggccauggggugaagggaugggcuuucgaugacggcaacgauguuuggauggggagaaccauuagcgagaaacugcggucuggauacgagacguuuaaggugaucggcggcugguccaaaccgaauagcaagcugcagaucaaccgccaggucauuguggacagagggaaucggucuggauauuccggcaucuucagcgucgaagggaaauccugcauuaacagauguuuuuacguggagcucauccgcggacggaagcaggaaacagagguuugguggaccucuaauagcauuguggucuucugcggcaccuccgggacauauggcaccggaucuuggccugauggcgccgacaucaaccugaugcccauuuga

SEQ ID NO: 207183 - RNA, 1410 nt, Artificial Sequence
  derived and/or modified CDS sequence (opt5) from neuraminidase__InfluenzaA__ABG37211
augaaccccaaucagaagaucauuaccaucggcagcgugucccugacaauugccacgaucugcuuccucacccaaauugcuauccuggucacaaccguuacacuucacuuuaaacaguacgaguguucuagcccuccgaacaaucaggugaugcccugcgaaccuaucauuaucgagagaaacauuaccgaaaucguguaucugacaaauaccacgauugagaaggaaaucugucccaaacucgucgaguaccggaacugguccaagccucagugcaaaauuaccggguucgcccccuuuucuaaggacaauagcauccgccuguccgcgggaggcgauaucugggugacaagagagccuuauguuucuugugacccggggaagugcuaccaauucgcucuuggacagggcaccacacugaacaauaaacauagcaacgauaccauucacgaccggacgcccuaucgcacacuccugaugaaugaacugggggugccuuuucaucucggaaccaagcaggucuguaucgccugguccuccucuuccugccacgauggcaaagccuggcugcauguguguauuacaggccacgacaagaacgcuaccgccagcuucaucuacgaugggagacuuguugacucuauuggauccuggagcaaaaauauccugcggacccaggagucugaaugcguguguaucaacggcacaugcacggucgugaugaccgauggguccgcuagcgagcgcgccgacacaaagauucucuuuaucgaggaaggaaagauugugcacaucagcccccugucuggcagcgcgcaacaugucgaggaaugcuccuguuauccuagauaccccgggguucggugcgugugucgcgauaauuggaaaggaagcaacagaccgauuguggacaucaacgucaaggauuacucuaucguguccagcuauguuugcucuggccuugugggcgacaccccucggaaaaaugaccgcagcuccucuagcuacuguagaaaccccaauaacgagaaggggaaucacggagucaaaggcugggccuucgaugacgggaacgauguguggaugggacggacaauuggcgaggaacugcgcuccggguaugagaccuuuaagguuaucggaggcuggagcacgccuaauucuaaacuccagauuaacagacaggugaucgucgacuccggcaaucggagcggguacucuggaauuuucuccguggaaggcaagagcugcaucaacagauguuuuuaugucgagcugauucgcgggcgggaacaggagacaagagugugguggaccuccaauucuaucguuguguucugcggaaccagcggcacauacgggaccggcuccuggcccgauggagcugacaucaaccugaugcccauuuga

SEQ ID NO: 207184 - RNA, 1410 nt, Artificial Sequence
  derived and/or modified CDS sequence (opt5) from neuraminidase__InfluenzaA__ABG37233
augaaccccaaucagaagaucauuaccaucggcagcgugucccugacaauugccacgaucugcuuccucaugcaaauugcuauccuggucaccacaguuacccuucacuuuaaacaguacgaguguaacucuccuccgagcaaucaggccaugcugugcgaacccacaaucauugagagaaacaucaccgaaauuguguaucucacaaauaccacgaucgagaaggaaauuuguccuaaacuggcggaguaccggaacugguccaagccccagugcaaaaucaccggguucgcuccuuuuucuaaggacaauagcauucgccuuuccgccggaggcgauaucugggugacaagagagcccuaugucucuugugacccugggaagugcuaccaauucgcccugggacagggcaccacaaucaacaaucggcauagcaacgauaccgugcacgaccgcacgccguauagaacacuccugaugaaugaacuggggguucccuuucaucucggaaccaaacagguguguauugcuugguccucuagcuccugccacgauggcaaggccuggcugcaugucugugugacaggccacgacgagaacgcuaccgccagcuucaucuacgaugggcggcuuguugacucuauuggauccuggagcaaaaauauccugcgcacccaggaaucugagugcguguguauuaacggcacaugcacggucgugaugaccgauggguccgcgagcggcagagccgacacaaagauccucuuuaucgaggaaggaaaaauugugcacaucuccccucugucugggagcgcucaacaugucgaggaaugcuccuguuauccccgguacccuggaguucgcugcguguguagagauaauuggaagggcagcaaccggcccauuguggacaucaacgucaaggauuacucuauuguguccagcuauguuugcucuggccuugugggggacaccccgcgcaaaaaugacagcuccucuaacagcuacuguagaaauccuaacaaugagaagggaucccacggcgucaaagggugggccuucgaugacggaaacgauguguggaugggccggacaaucagcgcugaaucucgcuccggguaugagaccuuuaagguuaucggaggcuggagcaaacccaauucuaagcugcagauuaacagacaggugaucgucgaccggggcaauagauccggguacagcggaauuuucuccguggagggcaaaucuugcaucaaccgcuguuuuuaugucgaacucauucgggggagaaagcaggagacggaagugugguggacaagcaauuccaucguuguguucugcggaaccucuggcaccuacgggacaggcagcuggccugauggagccgacauuaaccugaugcccaucuga

SEQ ID NO: 207185 - RNA, 1410 nt, Artificial Sequence
  derived and/or modified CDS sequence (opt5) from neuraminidase__InfluenzaA__ABG37244
augaaccccaaucagaagaucauuaccaucggcagcgugucccugacaauugccacgaucugcuuccucaugcaaauugcuauccuggucaccacaguuacccuucacuuuaaacaguacgaguguaacucuccuccgaauaaccaggugaugcugugcgaacccacaaucauugagagaaauaucaccgaaauuguguaucucacaaacaccacgaucgagaaggaaauuuguccuaaacuggccgaguaccggaauuggagcaagccccagugcaaaaucaccggguucgcgccuuuuuccaaggacaacucuauucgccuuagcgcuggaggcgauaucugggucacaagagagcccuauguguccugugacccugggaagugcuaccaauucgcccugggacagggcaccacacucaauaaccggcauucuaaugauaccguucacgaccgcacgccguauagaacacugcugaugaacgaacucggggugcccuuucaucugggaaccaaacaggucuguaucgccuggagcuccagcucuugccacgauggcaaggcuuggcuucauguguguguuacaggccacgacgagaaugccaccgcuuccuucauuuacgaugggcggcugguggacagcaucggaucuugguccaaaaacauucuccgcacccaggaaagcgagugcgucuguaucaauggcacaugcacgguggugaugaccgaugggucugccuccgacagagcggauacaaagauucuguuuaucgaggaaggaaaaaucguccacauuagcccucuuuccggcucugcccaacauguugaggaaugcagcuguuauccccgguacccuggggugcgcugcguguguagagacaacuggaagggauccaaccggcccaucgucgauauuaaugugaaggacuacagcaucguuucuuccuaugugugcagcggccuggucggcgacaccccgcgcaaaaacgauucuagcuccucuagcuacuguuggaauccuaacaaugagaaagggggacacggcgugaaggggugggcuuucgacgauggaaacgacguuuggaugggcagaacaauuuccgaagagagccggucuggguaugagaccuuuaaggugaucggaggcugguccaaacccaauagcaagcuccagaucaaccgccaggucauuguggauagaggcaaucggucuggguacuccggaaucuucagcgucgaaggcaaauccugcauuaacagauguuuuuauguggagcugauccgcgggcggaagcaggaaacggagguuugguggacaucuaauagcauuguggucuucugcggaaccuccggcaccuacgggacaggcucuuggccugacggagccgauaucaaccugaugcccauuuga

SEQ ID NO: 207186 - RNA, 1410 nt, Artificial Sequence; identical to SEQ ID NO: 207185
  derived and/or modified CDS sequence (opt5) from neuraminidase__InfluenzaA__ABG37255

SEQ ID NO: 207187 - RNA, 1410 nt, Artificial Sequence; identical to SEQ ID NO: 207172
  derived and/or modified CDS sequence (opt5) from neuraminidase__InfluenzaA__ABG37266

SEQ ID NO: 207188 - RNA, 1410 nt, Artificial Sequence; identical to SEQ ID NO: 207185
  derived and/or modified CDS sequence (opt5) from neuraminidase__InfluenzaA__ABG37277

SEQ ID NO: 207189 - RNA, 1410 nt, Artificial Sequence; identical to SEQ ID NO: 207185
  derived and/or modified CDS sequence (opt5) from neuraminidase__InfluenzaA__ABG37288

SEQ ID NO: 207190 - RNA, 1410 nt, Artificial Sequence; identical to SEQ ID NO: 207185
  derived and/or modified CDS sequence (opt5) from neuraminidase__InfluenzaA__ABG37310

SEQ ID NO: 207191 - RNA, 1410 nt, Artificial Sequence; identical to SEQ ID NO: 207172
  derived and/or modified CDS sequence (opt5) from neuraminidase__InfluenzaA__ABG37321

SEQ ID NO: 207192 - RNA, 1410 nt, Artificial Sequence
  derived and/or modified CDS sequence (opt5) from neuraminidase__InfluenzaA__ABG37332
augaaccccaaucagaagaucauuaccaucggcagcgugucccugacaauugccacgaucugcuuccucaugcaaauugcuauccuggucaccacaguuacccuucacuuuaaacagcaugaguguaacucuccuccgaauaaccaggugaugcugugcgaacccacaaucauugagagaaauaucaccgaaauugugcaccucacaaacaccacgaucgagaaggaaauuuguccuaaacuggccgaguaccggaauuggagcaagccccagugcaaaaucaccggguucgcgccuuuuuccaaggacaacucuauucgccuuagcgcuggaggcgauaucugggucacaagagagcccuauguguccugugacccugggaagugcuaccaauucgcccugggacagggcaccacacucaauaaccggcauucuaaugauaccguucacgaccgcacgccguauagaacacugcugaugaacgaacucggggugcccuuucaucugggaaccaaacaggucuguaucgccuggagcuccagcucuugccacgauggcaaggcuuggcuucacguguguguuacaggccaugacgagaaugccaccgcuuccuucauuuacgaugggcggcugguggacagcaucggaucuugguccaaaaacauucuccgcacccaggaaagcgagugcgucuguaucaauggcacaugcacgguggugaugaccgaugggucugccuccgacagagcggauacaaagauucuguuuaucgaggaaggaaaaaucguccacauuagcccucuuuccggcggggcccaacauguugaggaaugcucuuguuauccccgguacccuggagugcgcugcguguguagagacaacuggaagggcagcaaccggcccaucgucgauauuaaugugaaggacuauuccaucguuagcucuuacgugugcuccggccuggucggggacaccccgcgcaaaaacgauagcucuagcuccucuuacuguuggaauccuaacaaugagaagggaggccacggggugaaaggaugggcuuucgacgauggcaacgacguuuggauggggagaacaauuagcgaagagucccggagcggauaugagaccuuuaaggugaucggcggcuggucuaaacccaauuccaagcuccagaucaaccgccaggucauuguggauagagggaaucggagcggauacucuggcaucuucuccgucgaagggaaaagcugcauuaacagauguuuuuauguggagcugauccgcggacggaagcaggaaacggagguuugguggacauccaauucuauuguggucuucugcggcaccagcgggaccuacggcacaggauccuggccugacggcgccgauaucaaccugaugcccauuuga

SEQ ID NO: 207193 - RNA, 1410 nt, Artificial Sequence
  derived and/or modified CDS sequence (opt5) from neuraminidase__InfluenzaA__ABG37343
augaaccccaaucagaagaucauuaccaucggcagcgugucccugacaauugccacgaucugcuuccucaugcaaauugcuauccuggucaccacaguuacccuucacuuuaaacaguacgaguguaacucuccuccgaauaaccaggugaugcugugcgaacccacaaucauugagagaaauaucaccgaaauuguguaucucacaaacaccacgaucgagaaggaaauuuguccuaaacuggccgaguaccggaauuggagcaagccccagugcaaaaucaccggguucgcgccuuuuuccaaggacaacucuauucgccuuagcgcuggaggcgauaucugggucacaagagagcccuauguguccugugacccugggaagugcuaccaauucgcccugggacagggcaccacacucaauaaccggcauucuaaugauaccguucacgaccgcacgccguauagaacacugcugaugaacgaacucggggugcccuuucaucugggaaccaaacaggucuguaucgccuggagcuccagcucuugccacgauggcaaggcuuggcuucauguguguguuacaggccacgacgagaaugccaccgcuuccuucauuuacgaugggcggcugguggacagcaucggaucuugguccaaaaacauucuccgcacccaggaaagcgagugcgucuguaucaauggcacaugcacgguggugaugaccgaugggucugccuccgacagagcggauacaaagauucuguuuaucgaggaaggaaaaaucguccacauuagcccucuuuccggcucugcccaacauguugaggaaugcagcuguuauccccgguacccuggggugcgcugcguguguagagacaacuggaagggauccaaccggcccaucgucgauauuaaugugaagaacuacagcaucguuucuuccuaugugugcagcggccuggucggcgacaccccgcgcaaaaaugacucuagcuccucuagcuacuguuggaacccuaauaacgagaaagggggacacggcgugaaggggugggcuuucgaugacggaaaugauguuuggaugggcagaacaauuuccgaagagagccggucuggguaugagaccuuuaaggugaucggaggcugguccaaacccaacagcaagcuccagaucaaucgccaggucauuguggacagaggcaaccggucuggguacuccggaaucuucagcgucgaaggcaaauccugcauuaauagauguuuuuauguggagcugauccgcgggcggaagcaggaaacggagguuugguggacaucuaacagcauuguggucuucugcggaaccuccggcaccuacgggacaggcucuuggccugauggagccgacaucaaucugaugcccauuuga

SEQ ID NO: 207194 - RNA, 1410 nt, Artificial Sequence; identical to SEQ ID NO: 207173
  derived and/or modified CDS sequence (opt5) from neuraminidase__InfluenzaA__ABG37354

SEQ ID NO: 207195 - RNA, 1413 nt, Artificial Sequence; identical to SEQ ID NO: 206900
  derived and/or modified CDS sequence (opt5) from neuraminidase__InfluenzaA__ABG37365

SEQ ID NO: 207196 - RNA, 1413 nt, Artificial Sequence; identical to SEQ ID NO: 207002
  derived and/or modified CDS sequence (opt5) from neuraminidase__InfluenzaA__ABG37387

SEQ ID NO: 207197 - RNA, 1413 nt, Artificial Sequence
  derived and/or modified CDS sequence (opt5) from neuraminidase__InfluenzaA__ABG37398
augaaccccaaucagaagaucauuaccaucggcagcauuuccaucgccauugggaucaucucucugaugcuccaaauuggaaacaucauuagcaucugggcuucccacucuauucagacaggcagccagaaucauacgggggugugcaaccagagaaucauuaccuacgagaauaacacaugggucaaucacaccuauguuaacaucaauaacacaaaugugaucgccggaaaagacaagaccuccgugacacuggcgggcaacucuagccuuuguuccauuagcgggugggcuaucuacaccaaagauaauucuauucggaucggauccaagggcgacgucuucgugauucgcgaaccuuuuaucagcugcucucaucuggaguguagaacguucuuucucacccaaggcgcccugcuuaacgauaaacacuccaaugggacaguuaaggaccggagcccguaucgcgcccugaugucuugcccccucggagaagcuccuucccccuacaacagcaaguucgaguccguggccuggucugcuagcgccugucaugauggcaugggguggcugaccaucggaauuuccggcccugacaacggggcggucgccgugcugaaauauaauggaaucauuacagaaaccaucaagagcuggaaaaagcagauucucagaacgcaggagucugagugcguuugugugaacggcuccugcuuuacaaucaugaccgauggccccagcaauggggcugccucuuacaaaaucuucaagauugaaaagggaaaagucacaaagagcaucgagcugaacgcuccuaauuuucacuaugaagaguguuccugcuacccggacaccggcaccgugaugugugugugccgggauaacuggcacgggucuaaucgccccugggucagcuucaaccagaaucuugacuaccaaauuggauauaucugcuccggcguuuuuggggauaacccuagacccaaagacggagagggcagcuguaauccugugacaguggauggcgccaacggggucaagggauucucuuacaaauauggcaaugggguguggauuggacggacgaaguccaaccgccugagaaaaggcuuugaaaugaucugggaccccaauggguggaccgacacagauagcgacuucucuguuaagcaggauguggucgcgauuaccgacugguccggcuacagcggauccuuugugcagcauccggagcucacaggccuggauugcauccggccuuguuucuggguugaacuugugcgcgggcugcccaaggagaacaccacgaucuggacaucuggaagcuccauuucuuucugcggcgucaacagcgacaccgccaauugguccuggccugauggggcugaacuccccuuuaccaucgacaaauga

SEQ ID NO: 207198 - RNA, 1410 nt, Artificial Sequence
  derived and/or modified CDS sequence (opt5) from neuraminidase__InfluenzaA__ABG37409
augaaccccaaucagaagaucauuaccaucggcagcgugucccugacaauugccacgaucugcuuccucaugcaaauugucauccugguuaccacagugacccuucacuuuaaacaguacgaguguaacucuccuccgaauaaccaggugaugcccugcgaaccuacaaucauugagagaaauaucaccgaaauugucuaucugacaaacaccacgaucgagaaggaaauuugucccaaacucgcugaguaccggaauuggagcaagccucagugcaacaucaccggguucgcccccuuuuccaaagacaauucuauucgccugagcgcgggaggcgauaucugggugacaagagagccuuauguuuccugugacccggauaagugcuaccaauucgcucuugggcagggaaccacacugaacaauggccauucuaacgacaccgugcacgaucggacgcccuaucgcacacuccugaugaaugaacugggggucccuuuucaucucggaaccaaacagguguguaucgccuggagcuccagcucuugccacgacggcaaggccuggcugcauguuugugugacaggcgaugacgagaacgcuaccgccuccuucauuuacaaugggagacuugucgauagcaucggaucuugguccaagaaaauucugcggacccaggaaagcgagugcguguguaucaacggcacaugcacgguggucaugaccgacgggucugcuuccggaaaggccgauacaaaaauucucuuuaucgaggaaggcaagaucguucacaccagccugcuuuccgggucugcgcaacacguggaggaaugcagcuguuauccccgcuacccuggagugagaugcgucugucgggacaacuggaagggcuccaaucgccccauuguggauaucaacguuaaagacuacagcauugugucuuccuaugucugcagcggccuggugggggacacaccgagaaagaaugauucuagcuccucuagccauugucucgacccuaacaaugaggaaggaggccacgggguuaaaggaugggccuucgaugaccggaacgauguguggaugggccgcaccaucuccgagaagcugagaagcggguacgagacguuuaaagucauugaaggauggucuaagcccaauuccaaacugcagaucaaccgccaggugaucgucgaccggggcaauagaagcggcuauucugggauuuucuccguggagggaaagagcugcaucaaccgguguuuuuacguugaacucauuagaggccgcaagcaggagacagaagugcuguggaccuccaauucuaucgucguguucugcgggaccagcggaacauauggcaccggguccuggccugauggcgcugacauuaaccuuaugcccaucuga

SEQ ID NO: 207199 - RNA, 1410 nt, Artificial Sequence
  derived and/or modified CDS sequence (opt5) from neuraminidase__InfluenzaA__ABG37442
augaaccccaaucagaagaucauuaccaucggcagcgugucccugacaauugccacgaucugcuuccucaugcaaauugcuauccuggucaccacaguuacccuucacuuuaaacaguucgaguguaacucuccuccgaauaaccaggugaugcugugcgaacccacaaucauugaggggaauaucaccgaaauuguguaccucacaaacaccacgaucgagaaggaaauuuguccuaaacuggccgaguauagaaauuggagcaagccccagugcaacaucaccggauuugcgccuuucuccaaagacaauucuauucggcuuagcgcuggcggggauaucugggucacacgcgagcccuacguguccugugacccugauaagugcuaucaauuugcccugggacagggcaccacacucaacaaugggcauucuaacgacaccguucacgauagaacgccguaccggacacugcugaugaaugaacucggagugcccuuccaucugggcacccgccaggucuguaucgccuggagcuccagcucuugccacgacggcaaggcuuggcuucauguguguguuacaggggaugacgagaacgccaccgcuuccuuuauuuauaauggaagacugguggauagcaucggcucuugguccaaaaagauucuccggacccaggaaagcgagugcgucuguaucaacgggacaugcacgguggugaugaccgacggaucugccuccggcaaagcggauacaaagauucuguucaucgaggaagggaaaaucguccacauuagcacccuuuccggaucugcccaacacguugaggaaugcagcuguuacccucgcuaucccggcgugagaugcgugugucgggacaacuggaagggcuccaaucgcccuaucgucgauauuaacgugaaggacuacagcaucguuucuuccuacgugugcagcgggcuggucggagacacaccccggaaaaaugauucuuuuagcuccucucauugucucgacccgaacaaugaggaaggcgggcacggagugaagggcugggcuuucgaugacgggaacgauguuuggaugggaagaaccauuagcgagaaacugcgcuccggcuaugagacguuuaaggugaucgaaggcuggagcaaaccuaauucuaagcugcagacaaacagacaggucaucguggagcgggggaaucgcuccggauacagcggcauuuucucugucgaagggaaauccugcaucaacagauguuuuuauguggagcucauucggggaagaaaggaagagaccgagguuugguggaccagcaauuccaucguggucuucugcggcacaucugggaccuacggcacaggaagcuggcccgacggcgccgauauuaaccugaugccuaucuga

SEQ ID NO: 207200 - RNA, 1410 nt, Artificial Sequence; identical to SEQ ID NO: 206226
  derived and/or modified CDS sequence (opt5) from neuraminidase__InfluenzaA__ABG37453

SEQ ID NO: 207201 - RNA, 1410 nt, Artificial Sequence; identical to SEQ ID NO: 206238
  derived and/or modified CDS sequence (opt5) from neuraminidase__InfluenzaA__ABG37464

SEQ ID NO: 207202 - RNA, 1410 nt, Artificial Sequence
  derived and/or modified CDS sequence (opt5) from neuraminidase__InfluenzaA__ABG37475
augaaccccaaucagaagaucauuaccaucggcagcgugucccugacaauugccacgaucugcuuccucaugcaaauugcuauccuggucaccacaguuacccuucacuuuaaacaguacgaguguaacucuccuccgaauaaccaggugaugcugugcgaacccacaaucauugagagaaauaucaccgaaauuguguaucucacaaacaccacgaucgagaaggaaauuuguccuaaacuggccgaguaccggaauuggagcaagccccagugcaacaucaccggguucgcgccuuuuuccaaagacaauucuauucgccuuagcgcuggaggcgauaucugggucacaagagagcccuauguguccugugacccugauaagugcuaccaauucgcccuggggcagggaaccacacucaacaauggccauucuaacgacaccguucacgaucggacgccguaucgcacacugcugaugaaugaacucggggugcccuuucaucugggaaccagacaggucuguaucgccuggagcuccagcucuugccacgacggcaaggcuuggcuucauguguguguuacaggcgaugacgagaacgccaccgcuuccuucauuuacaaugggcggcugguggauagcaucggaucuugguccaaaaagauucuccgcacccaggaaagcgagugcgucuguaucaacggcacaugcacgguggugaugaccgacgggucugccuccggaaaagcggauacaaagauucuguuuaucgaggaaggcaaaaucguccacauuagcacccuuuccgggucugcccaacacguugaggaaugcagcuguuauccuagauaccccggagugcggugcgugugucgcgacaacuggaagggcuccaauagaccuaucgucgauauuaacgugaaggacuacagcaucguuucuuccuaugugugcagcggccuggucggggacacaccccggaaaaaugauucuuucagcuccucucauugucucgacccgaacaaugaggaaggaggccacggggugaagggaugggcuuuugaugacggcaacgauguuuggauggggcgcaccauuagcgagaaacugagauccggauacgagacguucaaggugaucgaaggcuggagcaaaccuaauucuaagcugcagaucaaccggcaggucauuguggagcgcggcgacagauccggguauagcggaaucuuuucugucgaaggcaaauccugcauuaaucgguguuucuacguggagcucaucagagggcgcaaggaagagacagagguucuguggaccagcaacuccauuguggucuuuugcggaaccucuggcacauaugggaccggcagcuggcccgauggagccgacaucaaucuuaugccuauuuga

SEQ ID NO: 207203 - RNA, 1410 nt, Artificial Sequence
  derived and/or modified CDS sequence (opt5) from neuraminidase__InfluenzaA__ABG37486
augaaccccaaucagaagaucauuaccaucggcagcgugucccugacaauugccacgaucugcuuccucaugcaaauugcuauccuggucaccacaguuacccuucacuuuaaacaguacgaguguaacucuccuccgaauaaccaggugaugcugugcgaacccacaaucauugagagaaauaucaccgaaauuguguaucucacaaacaccacgaucgagaaggaaauuuguccuaaacuggccgaguaccggaauuggagcaagccccagugcaaccuuaccggguucgcgccuuuuuccaaagacaauucuauccgccugagcgcuggaggcgauauuugggucacaagagagcccuauguguccugugacccugauaagugcuaccaauucgcccucgggcagggaaccacacugaacaauggccauucuaacgacaccguucacgaucggacgccguaucgcacacugcucaugaaugaacugggggugcccuuucaucuuggaaccagacaggucuguaucgccuggagcuccagcucuugccacgacggcaaggcuuggcugcauguguguguuacaggcgaugacgagaacgccaccgcuuccuucaucuacaaugggcggcucguggauagcauuggaucuugguccaaaaagauccugcgcacccaggaaagcgagugcgucuguauuaacggcacaugcacgguggugaugaccgacgggucugccuccggaaaagcggauacaaagauccuuuuuauugaggaaggcaaaaucguccacaucagcacccuguccgggucugcccaacacguugaggaaugcagcuguuauccuagauaccccggagugcggugcgugugucgcgacaacuggaagggcuccaauagaccuauugucgauaucaacgugaaggacuacagcauuguuucuuccuaugugugcagcggccucgucggggacacaccccggaaaaaugauucuuucagcuccucucauugucuggacccgaacaaugaggaaggaggccacggggugaagggaugggcuuuugaugacggcaacgauguuuggauggggcgcaccaucagcgagaaacugagauccggauacgagacguucaaggugauugaaggcuggagcaaaccuaauucuaagcuccagacaaaccggcaggucaucguggagcgcggcaauagauccggguauagcggaaucuuuucugucgaaggcaaauccugcauuaaccgguguuucuacguggagcugaucagagggcgcaaggaagagaccgagguuugguggaccagcaauuccauuguggucuuuugcggaacaucuggcaccuaugggacaggcagcuggcccgacggagccgauaucaaccuuaugccuauuuga

SEQ ID NO: 207204 - RNA, 1410 nt, Artificial Sequence
  derived and/or modified CDS sequence (opt5) from neuraminidase__InfluenzaA__ABG37497
augaaccccaaucagaagaucauuaccaucggcagcgugucccugacaauugccacgaucugcuuccucaugcaaauugcuauccuggucaccacaguuacccuucacuuuaaacaguacgaguguaacucuccuccgaauaaccaggugaugcugugcgaacccacaaucauugagagaaauaucaccgaaauuguguaucucacaaacaccacgaucgagaaggaaauuuguccuaaacuggccgaguaccggaauuggagcaagccccagugcaacaucaccggguucgcgccuuuuuccaaagacaauucuauucgccuuagcgcuggaggcgauaucugggucacaagagagcccuauguguccugugacccugauaagugcuaccaauucgcccuggggcagggaaccacacucaacaauggccauucuaacgacaccguucacgaucggacgccguaucgcacacugcugaugaaugaacucggggugcccuuucaucugggaaccagacaggucuguaucgccuggagcuccagcucuugccacgacggcaaggcuuggcuucauguguguguuacaggcgaugacgagaacgccaccgcuuccuucauuuacaaugggcggcugguggauagcaucggaucuugguccaaaaagauucuccgcacccaggaaagcgagugcgucuguaucaacggcacaugcacgguggugaugaccgacgggucugccuccggaaaagcggauacaaagauuaucuuuaucgaggaaggcaaaauuguccacaucagcacccuguccgggucugcccaacacguugaggaaugcagcuguuauccuagauaccccggagugcggugcgugugucgcgacaacuggaagggcuccaauagaccuauugucgauaucaacgugaaggacuacagcauuguuucuuccuaugugugcagcggccuugucggggacacaccccggaaaaaugauucuuucagcuccucucauugucuggacccgaacaaugaggaaggaggccacggggugaagggaugggcuuuugaugacggcaacgauguuuggauggggcgcaccaucagcgagaaacucagauccggauacgagacguucaaggugaucgaaggcuggagcaaaccuaauucuaagcugcagacaaaccggcaggucauuguggagcgcggcaauagauccggguauagcggaaucuuuucugucgaaggcaaauccugcauuaaccgguguuucuacguggagcugaucagagggcgcaaggaagagaccgagguuugguggaccagcaauuccauuguggucuuuugcggaacaucuggcaccuaugggacaggcagcuggcccgacggagccgauaucaaccucaugccuauuuga

SEQ ID NO: 207205 - RNA, 1410 nt, Artificial Sequence; identical to SEQ ID NO: 206252
  derived and/or modified CDS sequence (opt5) from neuraminidase__InfluenzaA__ABG37508

SEQ ID NO: 207206 - RNA, 1410 nt, Artificial Sequence; identical to SEQ ID NO: 206663
  derived and/or modified CDS sequence (opt5) from neuraminidase__InfluenzaA__ABG37519

SEQ ID NO: 207207 - RNA, 1410 nt, Artificial Sequence; identical to SEQ ID NO: 206663
  derived and/or modified CDS sequence (opt5) from neuraminidase__InfluenzaA__ABG37530

SEQ ID NO: 207208 - RNA, 1410 nt, Artificial Sequence; identical to SEQ ID NO: 206663
  derived and/or modified CDS sequence (opt5) from neuraminidase__InfluenzaA__ABG37541

SEQ ID NO: 207209 - RNA, 1410 nt, Artificial Sequence; identical to SEQ ID NO: 206663
  derived and/or modified CDS sequence (opt5) from neuraminidase__InfluenzaA__ABG37552

SEQ ID NO: 207210 - RNA, 1410 nt, Artificial Sequence; identical to SEQ ID NO: 206663
  derived and/or modified CDS sequence (opt5) from neuraminidase__InfluenzaA__ABG37563

SEQ ID NO: 207211 - RNA, 1410 nt, Artificial Sequence; identical to SEQ ID NO: 206663
  derived and/or modified CDS sequence (opt5) from neuraminidase__InfluenzaA__ABG37585

SEQ ID NO: 207212 - RNA, 1410 nt, Artificial Sequence; identical to SEQ ID NO: 206663
  derived and/or modified CDS sequence (opt5) from neuraminidase__InfluenzaA__ABG37596

SEQ ID NO: 207213 - RNA, 1410 nt, Artificial Sequence; identical to SEQ ID NO: 206663
  derived and/or modified CDS sequence (opt5) from neuraminidase__InfluenzaA__ABG37607

SEQ ID NO: 207214 - RNA, 1410 nt, Artificial Sequence; identical to SEQ ID NO: 206663
  derived and/or modified CDS sequence (opt5) from neuraminidase__InfluenzaA__ABG37618

SEQ ID NO: 207215 - RNA, 1413 nt, Artificial Sequence; identical to SEQ ID NO: 206900
  derived and/or modified CDS sequence (opt5) from neuraminidase__InfluenzaA__ABG47810

SEQ ID NO: 207216 - RNA, 1413 nt, Artificial Sequence
  derived and/or modified CDS sequence (opt5) from neuraminidase__InfluenzaA__ABG47832
augaaccccaaucagaagaucauuaccaucggcagcauuuccaucgccauugggaucaucucucugauucuccaagugggaaacaucauuagcaucugggcuucccacucuauucagacaggcagccagaaucauacggggaucugcaaccagagaauuaucaccuacgagaauagcacaugggugaaccaaaccuauguuaauaucaacaauacaaacgugguggccggaaaagacaagaccucuaugacacuggcgggcaauagcucccuuuguccuauucgggggugggcuaucuacaccaaagauaacagcauucgcaucggaucuaagggcgacgucuucgugauuagagaaccguuuaucuccugcagccaccuggagugucggacguucuuucucacccagggcgcccugcuuaaugauaaacauucuaacgggacaguuaaggaccgcucccccuauagagcccugaugagcugcccucucggagaagcucccucuccuuacaauucccgguucgagagcguggccugguccgcuucugccugucacgauggccugggguggcugaccaucggaauuagcggccccgacaacggggcggucgccgugcucaaguauaacggaaucauuacagaaaccaucaaauccuggaagaaacgcauucugagaacgcaggagagcgagugcguuuguaugaauggcucuugcuuuacaaucaugaccgauggcccuuccaacggggcugccagcuaccggaucuucaagauugaaaaaggacgcgugacaaagucuaucgagcuugacgcuccgaauuaucauuacgaagaguguagcugcuaccccaacaccggcaccgucaugugugugugcagagauaauuggcacggguccaaccggccuugggugucuuuuaaucagaaccuggacuaucaaauuggauacaucugcagcggcgucuucggggauaauccccgcccuaaggacggagagggcuccuguaaccccguuacaguggauggcgccgacggggugaaaggauuuagcuauagauacggcaauggggucuggauuggacggacgaagucuaaccgccucagaaaaggcuucgaaaugaucugggacccgaauggguggaccgauacagacuccgauuuuagcaugaagcaggacauuguggcgaugaccgauuggucuggcuauuccggauccuucguucagcacccugagcugacaggccuugacugcaugcggcccuguuuuuggguggaacuggucagagggcucccucgcgagaacaccacgaucuggacauccggaucuagcaucuccuucugcggcgucaauucugauaccgccaacuggagcuggcccgacggggcugaacugcccuucaccauugauaaauga

SEQ ID NO: 207217 - RNA, 1413 nt, Artificial Sequence; identical to SEQ ID NO: 207040
  derived and/or modified CDS sequence (opt5) from neuraminidase__InfluenzaA__ABG47843

SEQ ID NO: 207218 - RNA, 1410 nt, Artificial Sequence
  derived and/or modified CDS sequence (opt5) from neuraminidase__InfluenzaA__ABG47865
augaaccccaaucagaagaucauuaccaucggcagcgugucccugacaauugccacgaucugcuuccucaugcaaauugcuauccuggucaucaccguuacacuucacuuuaaacaguacgaguguaacucuccuccgaauaaccaggugaugcugugcgaacccaccauuaucgagagaaauauuacagaaaucguguaucucaccaacacaaccauugagaaggaaaucuguccuaaacuggccgaguaccggaauuggagcaagccccagugcaaaauuacgggguucgcgccuuuuuccaaggacaacucuauccgccuuagcgcuggaggcgauaucugggucaccagagagcccuauguguccugugacccugauaagugcuaccaauucgcccuggggcagggaacaacccucaauaaccggcauucuaaugacacaguucacgaucgcaccccguauagaacgcugcugaugaacgaacucggcgugcccuuucaucuggggacaaaacaggucuguauugccuggagcuccagcucuugccacgacggaaaggcuuggcuucauguguguguuaccggccacgaugagaaugccacagcuuccuucaucuacgacggccggcugguggauagcauugggucuugguccaaaaagauccuccgcacccaggaaagcgagugcgucuguauuaacggaaccugcacaguggugaugacggacggcucugccuccgggagagcggauaccaaaauccuguuuaucgaggaaggaaagauuguccacaucagcccucuuuccggcucugcccaacauguugaggaaugcagcuguuauccccgguacuccggggugcgcugcguguguagagacaauuggaagggaagcaaccggccuauugucgauaucaacgugaaagacuacucuauuguuuccagcuaugugugcucuggccuggucggcgacacaccccgcaagaaugauagcuccucuagcucccacugucucaacccgaauaacgaggaagggggacauggcgugaaagggugggcuuucgacgauggaaaugacguuuggaugggcagaaccaucagcgagaagcugcggucuggguacgagacauuuaaagugaucggaggcugguccaagccuaacagcaaacugcagauuaaucgccaggucaucguggauagaggcaaccggucuggguauuccggaauuuucagcgucgaaggcaaguccugcaucaauagauguuuuuacguggagcucauucgcgggcggaagcaggaaaccgagguuugguggacgucuaacagcaucguggucuucugcggaacauccggcaccuaugggaccggcucuuggcccgacggagccgauauuaaucugaugccuaucuga

SEQ ID NO: 207219 - RNA, 1410 nt, Artificial Sequence; identical to SEQ ID NO: 207185
  derived and/or modified CDS sequence (opt5) from neuraminidase__InfluenzaA__ABG47876

SEQ ID NO: 207220 - RNA, 1410 nt, Artificial Sequence; identical to SEQ ID NO: 207185
  derived and/or modified CDS sequence (opt5) from neuraminidase__InfluenzaA__ABG47887

SEQ ID NO: 207221 - RNA, 1410 nt, Artificial Sequence; identical to SEQ ID NO: 207172
  derived and/or modified CDS sequence (opt5) from neuraminidase__InfluenzaA__ABG47898

SEQ ID NO: 207222 - RNA, 1410 nt, Artificial Sequence; identical to SEQ ID NO: 207185
  derived and/or modified CDS sequence (opt5) from neuraminidase__InfluenzaA__ABG47909

SEQ ID NO: 207223 - RNA, 1410 nt, Artificial Sequence; identical to SEQ ID NO: 207173
  derived and/or modified CDS sequence (opt5) from neuraminidase__InfluenzaA__ABG47920

SEQ ID NO: 207224 - RNA, 1410 nt, Artificial Sequence; identical to SEQ ID NO: 207173
  derived and/or modified CDS sequence (opt5) from neuraminidase__InfluenzaA__ABG47931

SEQ ID NO: 207225 - RNA, 1410 nt, Artificial Sequence; identical to SEQ ID NO: 207173
  derived and/or modified CDS sequence (opt5) from neuraminidase__InfluenzaA__ABG47942

SEQ ID NO: 207226 - RNA, 1410 nt, Artificial Sequence
  derived and/or modified CDS sequence (opt5) from neuraminidase__InfluenzaA__ABG47953
augaaccccaaucagaagaucauuaccaucggcagcgugucccugacaauugccacgaucugcuuccucaugcaaauugcuauccuggucaccacaguuacccuucacuuuaaacaguacgaguguaacucuccuccgagcaaucaggugaugcugugcgaacccacaaucauugagagaaacaucaccgaaauuguguaucucacaaauaccacgaucgagaaggaaauuuguccuaaacuggccgaguaccggaacugguccaagccccagugcaaaaucaccggguucgcgccuuuuucuaaggacaauagcauucgccuuuccgcuggaggcgauaucugggucacaagagagcccuaugugucuugugacccugggaagugcuaccaauucgcccugggacagggcaccacacucaacaaucggcauagcaacgauaccguucacgaccgcacgccguauagaacacugcugaugaaugaacucggggugcccuuucaucugggaaccaaacaggucuguaucgccugguccucuagcuccugccacgauggcaaggcuuggcuucauguguguguuacaggccacgacgagaacgccaccgcuagcuucauuuacgaugggcggcugguggacucuaucggauccuggagcaaaaauauucuccgcacccaggaaucugagugcgucuguaucaacggcacaugcacgguggugaugaccgauggguccgccagcgagagagcggacacaaagauucuguuuaucgaagagggaaaaaucguccacauuuccccucuuucuggcagcgcccaacauguugaagagugcuccuguuauccccgguacccuggggugcgcugcguguguagagauaauuggaagggaagcaaccggcccaucgucgacauuaacgugaaggauuacucuaucguuuccagcuaugugugcucuggccuggucggcgacaccccgcgcaaaaaugacagcuccucuagcuccuacuguagaaacccuaauaacgaaaaggggagccacggagugaaaggcugggcuuucgaugacgggaaugauguuuggaugggacggacaauuucugaggagcuccgcuccggcuaugaaaccuuuaaggugaucgggggauggagcaaacccaacucuaagcugcagaucaauagacaggucauuguggaccggggcaacagauccggcuacagcgggaucuucuccgucgagggaaaaucuugcauuaaucgcuguuuuuauguggaacugauccggggcagaaagcaggagacggaaguuugguggacaagcaacuccauuguggucuucugcgggaccucuggaaccuacggcacagggagcuggccugauggcgccaauaucaaccucaugcccauuuga

SEQ ID NO: 207227 - RNA, 1410 nt, Artificial Sequence
  derived and/or modified CDS sequence (opt5) from neuraminidase__InfluenzaA__ABG47964
augaaccccaaucagaagaucauuaccaucggcagcgugucccugacaauugccacgaucugcuuccucaugcaaauugcuauccuggucaccacaguuacccuucacuuuaaacaguacgaguguaacucuccuccgaauaaccaggugaugcugugcgaacccacaaucauugagagaaauaucaccgaaauuguguaucucacaaacaccacgaucgagaaggaaauuuguccuaaacuggccgaguaccggaauuggagcaagccccagugcaaaaucaccggguucgcgccuuuuuccaaggacaacucuauucgccuuagcgcuggaggcgauaucugggucacaagagagcccuauguguccugugacccugggaagugcuaccaauucgcccugggacagggcaccacacucaauaaccggcauucuaaugauaccguucacgaccgcacgccguauagaacacugcugaugaacgaacucggggugcccuuucaucugggaaccaaacaggucuguaucgccuggagcuccagcucuugccacgauggcaaggcuuggcuucauguguguguuacaggccacgacgagaaugccaccgcuuccuucauuuacgaugggcggcugguggacagcaucggaucuugguccaaaaacauucuccgcacccaggaaagcgagugcgucuguaucaauggcacaugcacgguggugaugaccgaugggucugccuccgagagagcggacacaaagauucuguuuaucgaagagggaaaaaucguccacauuagcccucuuuccggcucugcccaacauguugaagagugcagcuguuauccccgguacccuggggugcgcugcguguguagagauaacuggaagggauccaaccggcccaucgucgacauuaaugugaaggauuacagcaucguuucuuccuaugugugcagcggccuggucggcgacaccccgcgcaaaaacgacucuagcuccucuagcuacugucagaauccuaacaaugaaaaggggucccacggagugaaaggcugggcuuucgaugacgggaacgauguuuggaugggaagaacaauuagcgaggagcuccggucuggcuaugaaaccuuuaaggugaucgggggaugguccaaacccaauagcaagcugcagaucaaccgccaggucauuguggacagaggcaaucggucuggcuacuccgggaucuucagcgucgagggaaaauccugcauuaacagauguuuuuauguggaacugauccgcggccggaagcaagagacggaaguuugguggacaucuaauagcauuguggucuucugcgggaccuccggaaccuacggcacagggucuuggccugauggcgccgacaucaaccucaugcccauuuga

SEQ ID NO: 207228 - RNA, 1410 nt, Artificial Sequence
  derived and/or modified CDS sequence (opt5) from neuraminidase__InfluenzaA__ABG47975
augaaccccaaucagaagaucauuaccaucggcagcgugucccugacaauugccacgaucugcuuccucaugcaaauugcuauccuggucaccacaguuacccuucacuuuaaacaguacgaguguaacucuccuccgagcaaucaggugaugcugugcgaacccacaaucauugagagaaacaucaccgaaauuguguaucucacaaauaccacgaucgagaaggaaauuuguccuaaacuggccgaguaccggaacugguccaagccccagugcaaaaucaccggguucgcgccuuuuucuaaggacaauagcauucgccuuuccgcuggaggcgauaucugggucacaagagagcccuaugugucuugugacccugggaagugcuaccaauucgcccugggacagggcaccacacucaacaaucggcauagcaacgauaccguucacgaccgcacgccguauagaacacugcugaugaaugaacucggggugcccuuucaucugggaaccaaacaggucuguaucgccugguccucuagcuccugccacgauggcaaggcuuggcuucauguguguguuacaggccacgacgagaacgccaccgcuagcuucauuuacgaugggcggcugguggacucuaucggauccuggagcaaaaauauucuccgcacccaggaaucugagugcgucuguaucaacggcacaugcacgguggugaugaccgauggguccgccagcgagagagcggacacaaagauucuguuuaucgaagagggaaaaaucguccacauuuccccucuuucuggcagcgcccaacauguugaagagugcuccuguuauccccgguacccuggggugcgcugcguguguagagauaauuggaagggaagcaaccggcccaucgucgacauuaacgugaaggauuacucuaucguuuccagcuaugugugcucuggccuggucggcgacaccccgcgcaaaaaugacagcuccucuagcuccuacuguagagauccuaacaaugaacgggggagccacggagugaagggcugggcuuucgacgaugggaacgacguuuggaugggacgcacaauuucugaggagcucagauccggcuaugaaaccuuuaaagugaucgggggauggagcaagcccaauucuaaacugcagaucaaccggcaggucauuguggauagaggcaaucgcuccggcuacagcgggaucuucuccgucgagggaaagucuugcauuaaccgguguuuuuauguggaacugaucagaggccgcaaacaggagacggaaguuugguggacaagcaauuccauuguggucuucugcgggaccucuggaaccuacggcacagggagcuggccugacggcgccgauaucaaccucaugcccauuuga

SEQ ID NO: 207229 - RNA, 1410 nt, Artificial Sequence
  derived and/or modified CDS sequence (opt5) from neuraminidase__InfluenzaA__ABG47986
augaaccccaaucagaagaucauuaccaucggcagcgugucccugacaauugccacgaucugcuuccucaugcaaauugcuauccuggucaccacaguuacccuucacuuuaaacaguacgaguguaacucuccuccgagcaaucaggugaugcugugcgaacccacaaucauugagagaaacaucaccgaaauuguguaucucacaaauaccacgaucgagaaggaaauuuguccuaaacuggccgaguaccggaacugguccaagccccagugcaaaaucaccggguucgcgccuuuuucuaaggacaauagcauucgccuuuccgcuggaggcgauaucugggucacaagagagcccuaugugucuugugacccugggaagugcuaccaauucgcccugggacagggcaccacacucaacaaucggcauagcaacgauaccguucacgaccgcacgccguauagaacacugcugaugaaugaacucggggugcccuuucaucugggaaccaaacaggucuguaucgccugguccucuagcuccugccacgauggcaaggcuuggcuucauguguguguuacaggccacgacgagaacgccaccgcuagcuucauuuacgaugggcggcugguggacucuaucggauccuggagcaaaaauauucuccgcacccaggaaucugagugcgucuguaucaacggcacaugcacgguggugaugaccgauggguccgccagcgagagagcggacacaaagauucuguuuaucgaagagggaaaaaucguccacauuuccccucuuucuggcagcgcccaacauguugaagagugcuccuguuauccccgguacccuggggugcgcugcguguguagagauaauuggaagggaagcaaccggcccaucgucgacauuaacgugaaggauuacucuaucguuuccagcuaugugugcucuggccuggucggcgacaccccgcgcaaaaaugacagcuccucuagcuccuacuguagaaagccuaacaaugaaaaagggagccacggagugaagggcugggcuuucgaugacgggaacgauguuuggaugggacggacaauuucugaggagcuccgcuccggcuaugaaaccuuuaaagugaucgggggauggagcaagcccaauucuaaacugcagaucaacagacaggucauuguggaccggggcaauagauccggcuacagcgggaucuucuccgucgagggaaagucuugcauuaaccgcuguuuuuauguggaacugauccggggcagaaagcaggagacggaaguuugguggacaagcaauuccauuguggucuucugcgggaccucuggaaccuacggcacagggagcuggccugauggcgccgacaucaaccucaugcccauuuga

SEQ ID NO: 207230 - RNA, 1410 nt, Artificial Sequence; identical to SEQ ID NO: 207173
  derived and/or modified CDS sequence (opt5) from neuraminidase__InfluenzaA__ABG47997

SEQ ID NO: 207231 - RNA, 1410 nt, Artificial Sequence
  derived and/or modified CDS sequence (opt5) from neuraminidase__InfluenzaA__ABG48008
augaaccccaaucagaagaucauuaccaucggcagcgugucccugacaauugccacgaucugcuuccucaugcaaauugcuauccuggucaccacaguuacccuucacuuuaaacaguacgaguguaacucuccuccgagcaaucaggugaugcugugcgaacccacaaucauugagagaaacaucaccgaaauuguguaucucacaaauaccacgaucgagaaggaaauuuguccuaaacuggccgaguaccggaacugguccaagccccagugcaaaaucaccggguucgcgccuuuuucuaaggacaauagcauucgccuuuccgcuggaggcgauaucugggucacaagagagcccuaugugucuugugacccugggaagugcuaccaauucgcccugggacagggcaccacacucaacaaucggcauagcaacgauaccguucacgaccgcacgccguauagaacacugcugaugaaugaacucggggugcccuuucaucugggaaccaaacaggucuguaucgccugguccucuagcuccugccacgauggcaaggcuuggcuucauguguguguuacaggccacgacgagaacgccaccgcuagcuucauuuacgaugggcggcugguggacucuaucggauccuggagcaaaaauauucuccgcacccaggaaucugagugcgucuguaucaacggcacaugcacgguggugaugaccgauggguccgccagcgagagagcggacacaaagauucuguuuaucgaagagggaaaaaucguccacauuuccccucuuucuggcagcgcccaacauguugaagagugcuccuguuauccccgguacccuggggugcgcugcguguguagagauaauuggaagggaagcaaccggcccaucgucgacauuaacgugaaggauuacucuaucguuuccagcuaugugugcucuggccuggucggcgacaccccgcgcagaaaugacagcuccucuagcuccuacugucggaaaccuaacaaugaaaaggggagccacggagugaaaggcugggcuuucgaugacgggaacgauguuuggaugggacgcacaauuucugaggagcucagauccggcuaugaaaccuuuaaggugaucgggggauggagcaaacccaauucuaagcugcagaucaaccggcaggucauuguggacagaggcaaucgcuccggcuacagcgggaucuucuccgucgagggaaaaucuugcauuaaccgguguuuuuauguggaacugaucagaggccgcaagcaggagacggaaguuugguggacaagcaauuccauuguggucuucugcgggaccucuggaaccuacggcacagggagcuggccugauggcgccgacaucaaccucaugcccauuuga

SEQ ID NO: 207232 - RNA, 1410 nt, Artificial Sequence
  derived and/or modified CDS sequence (opt5) from neuraminidase__InfluenzaA__ABG48019
augaaccccaaucagaagaucauuaccaucggcagcgugucccugacaauugccacgaucugcuuccucaugcaaauugcuauccuggucaccacaguuacccuucacuuuaaacaguacgaguguaacucuccuccgagcaaucaggugaugcugugcgaacccacaaucauugagagaaacaucaccgaaauuguguaucucacaaauaccacgaucgagaaggaaauuuguccuaaacuggccgaguaccggaacugguccaagccccagugcaaaaucaccggguucgcgccuuuuucuaaggacaauagcauucgccuuuccgcuggaggcgauaucugggucacaagagagcccuaugugucuugugacccugggaagugcuaccaauucgcccugggacagggcaccacacucaacaaucggcauagcaacgauaccguucacgaccgcacgccguauagaacacugcugaugaaugaacucggggugcccuuucaucugggaaccaaacaggucuguaucgccugguccucuagcuccugccacgauggcaaggcuuggcuucauguguguguuacaggccacgacgagaacgccaccgcuagcuucauuuacgaugggcggcugguggacucuaucggauccuggagcaaaaauauucuccgcacccaggaaucugagugcgucuguaucaacggcacaugcacgguggugaugaccgauggguccgccagcgagagagcggacacaaagauucuguuuaucgaagagggaaaaaucguccacauuuccccucuuucuggcagcgcccaacauguugaagagugcuccuguuauccccgguacccuggggugcgcugcgcuuguagagauaauuggaagggaagcaaccggcccaucguggacauuaacgucaaggauuacucuaucguguccagcuauguuugcucuggccuggugggcgacaccccgcgcaaaaaugacagcuccucuagcuccuacuguagaaacccuaauaacgaaaaggggagccacggagucaaaggcugggccuucgaugacgggaaugauguguggaugggacggacaauuucugaggagcuccgcuccggcuaugaaaccuuuaagguuaucgggggauggagcaaacccaacucuaagcugcagaucaauagacaggugauugucgaccgggauaacagauccggcuacagcggcaucuucuccguggaggggaaaucuugcauuaaucgcuguuuuuaugucgaacugauccggggaagaaagcaggagacggaagugugguggacaagcaacuccauuguuguguucugcggcaccucugggaccuacggaacaggcagcuggccugacggggcugauaucaaucucaugcccauuuga

SEQ ID NO: 207233 - RNA, 1410 nt, Artificial Sequence; identical to SEQ ID NO: 207173
  derived and/or modified CDS sequence (opt5) from neuraminidase__InfluenzaA__ABG48030

SEQ ID NO: 207234 - RNA, 1410 nt, Artificial Sequence; identical to SEQ ID NO: 207173
  derived and/or modified CDS sequence (opt5) from neuraminidase__InfluenzaA__ABG48041

SEQ ID NO: 207235 - RNA, 1413 nt, Artificial Sequence; identical to SEQ ID NO: 206900
  derived and/or modified CDS sequence (opt5) from neuraminidase__InfluenzaA__ABG48052

SEQ ID NO: 207236 - RNA, 1410 nt, Artificial Sequence; identical to SEQ ID NO: 206802
  derived and/or modified CDS sequence (opt5) from neuraminidase__InfluenzaA__ABG48063

SEQ ID NO: 207237 - RNA, 1410 nt, Artificial Sequence; identical to SEQ ID NO: 206925
  derived and/or modified CDS sequence (opt5) from neuraminidase__InfluenzaA__ABG48074

SEQ ID NO: 207238 - RNA, 1410 nt, Artificial Sequence; identical to SEQ ID NO: 206226
  derived and/or modified CDS sequence (opt5) from neuraminidase__InfluenzaA__ABG48085

SEQ ID NO: 207239 - RNA, 1410 nt, Artificial Sequence
  derived and/or modified CDS sequence (opt5) from neuraminidase__InfluenzaA__ABG48107
augaaccccaaucagaagaucauuaccaucggcagcgugucccugacaauugccacgaucugcuuccucaugcaaauugcuauccuggucaccacaguuacccuucacuuuaaacaguacgaguguaacucuccuccgaauaaccaggugaugcugugcgaacccacaaucauugagagaaauaucaccgaaauuguguaucucacaaacaccacgaucgagaaggaaauuuguccuaaacuggccgaguaccggaauuggagcaagccccagugcaacaucaccggguucgcgccuuuuuccaaagacaauucuauucgccuuagcgcuggaggcgauaucugggucacaagagagcccuauguguccugugacccugauaagugcuaccaauucgcccuggggcagggaaccacacucaacaauggccauucuaacgacaccguucacgaucggacgccguaucgcacacugcugaugaaugaacucggggugcccuuucaucugggaaccagacaggucuguaucgccuggagcuccagcucuugccacgacggcaaggcuuggcuucauguguguguuacaggcgaugacgagaacgccaccgcuuccuucauuuacaaugggcggcugguggauagcaucggaucuugguccaaaaagacccuccgcacacaggaaagcgagugcgucuguauuaacggcacgugcaccguggugaugacagacgggucugccuccggaaaagcggauaccaagauccuguuuauugaggaaggcaaaaucguccacaucagcacacuuuccgggucugcccaacacguugaggaaugcagcuguuauccuagauaccccggagugcggugcgugugucgcgacaacuggaagggcuccaauagaccuauugucgauaucaacgugaaggacuacagcauuguuucuuccuaugugugcagcggccuggucggggacacgccccggaaaaaugauucuuucagcuccucucauugucucgacccgaacaaugaggaaggaggccacggggugaagggaugggcuuuugaugacggcaacgauguuuggauggggcgcaccaucagcgagaaacugagauccggauacgagacauucaaggugauugaaggcuggagcaaaccuaauucuaagcugcagaucaaccggcaggucaucguggagcgcggcaauagauccggguauagcggaaucuuuucugucgaaggcaaauccugcauuaaccgguguuucuacguggagcucauuagagggcgcaaggaagagaccgagguuugguggaccagcaauuccaucguggucuuuugcggaacaucuggcaccuaugggacaggcagcuggcccgacggagccgauauuaaccugaugccuaucuga

SEQ ID NO: 207240 - RNA, 1410 nt, Artificial Sequence; identical to SEQ ID NO: 206238
  derived and/or modified CDS sequence (opt5) from neuraminidase__InfluenzaA__ABG48118

SEQ ID NO: 207241 - RNA, 1410 nt, Artificial Sequence; identical to SEQ ID NO: 206238
  derived and/or modified CDS sequence (opt5) from neuraminidase__InfluenzaA__ABG48129

SEQ ID NO: 207242 - RNA, 1410 nt, Artificial Sequence; identical to SEQ ID NO: 206226
  derived and/or modified CDS sequence (opt5) from neuraminidase__InfluenzaA__ABG48140

SEQ ID NO: 207243 - RNA, 1410 nt, Artificial Sequence; identical to SEQ ID NO: 206238
  derived and/or modified CDS sequence (opt5) from neuraminidase__InfluenzaA__ABG48151

SEQ ID NO: 207244 - RNA, 1410 nt, Artificial Sequence; identical to SEQ ID NO: 206226
  derived and/or modified CDS sequence (opt5) from neuraminidase__InfluenzaA__ABG48173

SEQ ID NO: 207245 - RNA, 1410 nt, Artificial Sequence; identical to SEQ ID NO: 206238
  derived and/or modified CDS sequence (opt5) from neuraminidase__InfluenzaA__ABG48184

SEQ ID NO: 207246 - RNA, 1410 nt, Artificial Sequence
  derived and/or modified CDS sequence (opt5) from neuraminidase__InfluenzaA__ABG48195
augaaccccaaucagaagaucauuaccaucggcagcgugucccugacaauugccacgaucugcuuccucaugcaaauugcuauccuggucaccacaguuacccuucacuuuaaacaguacgaguguaacucuccuccgaauaaccaggugaugcugugcgaacccacaaucauugagagaaauaucaccgaaauuguguaucucacaaacaccacgaucgagaaggaaauuuguccuaaacuggccgaguaccggaauuggagcaagccccagugcaacaucaccggguucgcgccuuuuuccaaagacaauucuauucgccuuagcgcuggaggcgauaucugggucacaagagagcccuauguguccugugacccugauaagugcuaccaauucgcccuggggcagggaaccacacucaacaauggccauucuaacgacaccguucacgaucggacgccguaucgcacacugcugaugaaugaacucggggugcccuuucaucugggaaccagacaggucuguaucgccuggagcuccagcucuugccacgacggcaaggcuuggcuucauguguguguuacaggcgaugacgagaacgccaccgcuuccuucauuuacaaugggcggcugguggauagcaucggaucuugguccaaaaagauucuccgcacccaggaaagcgagugcgucuguaucaacggcacaugcacgguggugaugaccgacgggucugccuccggaaaagcggauacaaagauucuguuuaucgaggaaggcaaaaucguccacauuagcacccuuuccgggucugcccaacacguugaggaaugcagcuguuauccuagauaccccggagugcggugcgugugucgcgacaacuggaagggcuccaauagaccuaucgucgauauuaacgugaaggacuacagcaucguuucuuccuaugugugcagcggccuggucggggacacaccccggaaaaaugauucuuucagcuccucucauuguauugacccgaacaaugaggaaggaggccacggggugaagggaugggcuuuugaugacggcaacgauguuuggauggggcgcaccaucagcgagaaacucagauccggauacgagacguucaaggugaucgaaggcuggagcaaaccuaauucuaagcugcagacaaaccggcaggucauuguggagcgcggcaauagauccggguauagcggaaucuuuucugucgaaggcaaauccugcauuaaccgguguuucuacguggagcugaucagagggcgcaaggaagagaccgagguuugguggaccagcaauuccauuguggucuuuugcggaacaucuggcaccuaugggacaggcagcuggcccgacggagccgauaucaaccucaugccuauuuga

SEQ ID NO: 207247 - RNA, 1410 nt, Artificial Sequence
  derived and/or modified CDS sequence (opt5) from neuraminidase__InfluenzaA__ABG48206
augaaccccaaucagaagaucauuaccaucggcagcgugucccugacaauugccacgaucugcuuccucaugcaaauugcuauccuggucaccacaguuacccuucacuuuaaacagcaugaguguaacucuccuccgaauaaccaggugaugcugugcgaacccacaaucauugagagaaauaucaccgaaauuguguaccucacaaacaccacgaucgagaaggaaauuuguccuaaacuggucgaguaucggaauuggagcaagccccagugcaacaucaccggguucgccccuuuuuccaaagacaauucuauucgccuuagcgcgggaggcgauaucugggugacaagagagcccuacguuuccugugacccugauaagugcuaucaauucgcucuggggcagggaaccacacucaacaauggccacucuaacgacaccgugcaugaucggacgccguaccgcacacugcugaugaaugaacucgggguccccuuucaccugggaaccagacagguguguaucgccuggagcuccagcucuugccaugacggcaaggccuggcuucacguuugugugacaggcgaugacaaaaacgcuaccgccuccuucauuuauaaugggcggcuggucgauagcaucggaucuugguccaagaaaauucuccgcacccaggagagcgaaugcguguguaucaacggcacaugcacgguggucaugaccgacgggucugcuuccggaaaggccgauacaaaaauucuguuuaucgaggagggcaagaucguucacauuagcacccuuuccgggucugcgcaacauguggaagagugcagcuguuacccuagauaucccggagugcggugcgucugucgcgacaacuggaagggcuccaauagaccuaucguggauauuaacguuaaagacuacagcaucgugucuuccuacgucugcagcggccuggugggggacacaccccggaagaaugauucuuucagcuccucucacugucucgacccgaacaaugaagagggaggccaugggguuaaaggaugggccuuugaugacggcaacgauguguggauggggcgcaccauuaaugaaaagcugagaagcggauaugagacguucaaagucaucgagggcugguccaagccuaacagcaaacugcagaucaaucgccaggugauugucgaacggggcaacagaucuggguacuccggaaucuuuagcguggagggcaagucuugcauuaaucgguguuucuauguugaacucaucagagggcgcaaggaggaaacagaggugugguggaccuccaacagcauugucguguuuugcggaaccuccggcacauacgggaccggcucuuggcccgacggagcugauaucaaucugaugccuauuuga

SEQ ID NO: 207248 - RNA, 1410 nt, Artificial Sequence; identical to SEQ ID NO: 206663
  derived and/or modified CDS sequence (opt5) from neuraminidase__InfluenzaA__ABG48217

SEQ ID NO: 207249 - RNA, 1410 nt, Artificial Sequence; identical to SEQ ID NO: 206663
  derived and/or modified CDS sequence (opt5) from neuraminidase__InfluenzaA__ABG48228

SEQ ID NO: 207250 - RNA, 1410 nt, Artificial Sequence; identical to SEQ ID NO: 207247
  derived and/or modified CDS sequence (opt5) from neuraminidase__InfluenzaA__ABG48239

SEQ ID NO: 207251 - RNA, 1410 nt, Artificial Sequence; identical to SEQ ID NO: 206663
  derived and/or modified CDS sequence (opt5) from neuraminidase__InfluenzaA__ABG48250

SEQ ID NO: 207252 - RNA, 1410 nt, Artificial Sequence
  derived and/or modified CDS sequence (opt5) from neuraminidase__InfluenzaA__ABG48272
augaaccccaaucagaagaucauuaccaucggcagcgugucccugacaauuucuacgaucugcuucuuuaugcaaauugccauccucaucaccacagucacccugcacuucaaacaguacgaguuuaacagcccuccgaauaaccagguuaugcuuugugaacccacaauuaucgagagaaauauuaccgaaaucguguaucugacaaacaccacgauugagaaggaaaucugcccuaaacucgcugaguaccggaauugguccaagccccagugugacauuaccggguucgccccuuuuucuaaagauaacagcauccgccuguccgcgggaggcgacaucugggugacaagagagcccuaugucucuugcgauccugacaaguguuaccaauucgcucuugggcagggaaccacacugaauaacgugcauagcaaugauaccguucacgaccggacgccguaucgcacacuccugaugaacgaacugggcgugcccuuucaucucgggaccaagcaggucugcauugccugguccucuagcuccugucacgauggaaaagccuggcugcaugugugcguuacaggcgacgauaagaaugcuaccgccagcuucaucuacaacggcagacuuguggacucuauugucuccuggagcaaaaagauccugcggacccaggagucugaaugugugugcauuaaugggacauguacgguggucaugaccgauggauccgcuagcggcaaagccgacacaaagauccucuuuaucgaggaggggaagauuguucacaccuccacacugucuggaagcgcgcaacacguggaagagugcuccugcuauccucgcuaccccggcgugagaugugucugccgggauaacuggaaagggagcaaccgcccuaucguggacauuaauaucaaggacuacucuauuguuuccagcuauguguguucuggacuugucggcgauacccccagaaagaacgacagcuccucuagcucccauugccuggauccgaauaacgaagagggcgggcacggagugaaaggcugggccuucgacgaugggaaugacguuuggaugggacggacgaucagcgaaaaaucucgcuccggcuacgagacauuuaaggugaucgagggguggagcaacccuaauucuaaacuccagauuaacagacaggucaucguggaucggggaaaucgcuccggcuauagcggcauuuucuccgucgaagggaagucuuguaucaacagaugcuuuuacguggagcugauucggggaagaaaggaagagaccgaaguucuguggaccagcaauuccaucguggucuucuguggcacaucugggaccuauggaacaggcagcuggcccgacggggcugauauuaaccucaugccuaucuga

SEQ ID NO: 207253 - RNA, 1410 nt, Artificial Sequence
  derived and/or modified CDS sequence (opt5) from neuraminidase__InfluenzaA__ABG48294
augaaccccaaucagaagaucauuaccaucggcagcgugucccugacaauugccacgaucugcuuccucaugcaaauugcuauccuggucaccacaguuacccuucacuuuaaacaguacgaguguucuagcccuccgaacaaucaggugauccccugccagccuacaauuaucgaaagaaacauuaccgagaucguguaucugacaaauaccacgauugaaaaggagaucugucccaaacucgucgaauaccggaacugguccaagccucaaugcaaaauuaccggguucgcccccuuuucuaaggacaauagcauccgccuguccgcgggaggcgauaucugggugacaagagagccuuauguuucuugugacccggggaagugcuaccaguucgcucuuggacagggcaccacacugaacaaucggcauagcaacgauaccgugcacgaccgcacgcccuauagaacacuccugaugaaugagcugggggucccuuuucaucucggaaccaaacagguguguauugccugguccuccucuuccugccacgauggcaaggccuggcugcauguuugugugacaggccacgacgaaaacgcuaccgccagcuucaucuacgaugggcggcuugucgacucuauuggauccuggagccgcaauauccugagaacccaagagucugaaugcguguguauuaacggcacaugcacgguggucaugaccgauggguccgcuagcgagcgggccgacacaaaaauccucuuuaucgaggaaggaaagguugugcacauuagcccccugucuggcagcgcgcagcauguggaggaaugcuccuguuauccucgcuaccccggggucagaugcgugugucgggauaauuggaaaggaagcaaccgcccgaucguugacauuaacgugaaggauuacucuaucauuuccagcuaugucugcucuggccuugugggcgacaccccuagacggaaugacagcuccucuagcuccuacugucagaaccccaauaacgagaaggggagccacggaguuaaaggcugggccuucgaugacgggaaugauguguggaugggacgcacaaucucugaggaacugagauccggcuaugagaccuuuaaggucaucgggggauggagcacgccuaacucuaaacuccagauuaaucggcaagugaucgucgacuccggcaacagaagcggcuacuccgggauuuucucuguggaaggaaagagcugcaucaaucgcuguuuuuauguugagcugauucggggcagaaaacaggaaacaaaggugugguggaccuccaacucuaucgucguguucugcgggaccagcggaacauacggcaccggguccuggcccgauggcgcugacauugaucugaugcccaucuga

SEQ ID NO: 207254 - RNA, 1410 nt, Artificial Sequence
  derived and/or modified CDS sequence (opt5) from neuraminidase__InfluenzaA__ABG48305
augaaccccaaucagaagaucauuaucauuggcagcgugucccugaccaucgccacaauuugcuuccucaugcaaaucgcuauccuggucacgaccguuacacuucacuuuaaacaguacgaguguaacucuccuccgaauaaccaggugaugcugugcgaacccaccauuaucgagagaaauauuacagaaaucguguaucucaccaacacaaccauugagaaggaaaucuguccuaaacuggccgaguaccggaauuggagcaagccccagugcaaaauuacgggguucgcgccuuuuuccaaggacaacucuauccgccuuagcgcuggaggcgauaucugggucaccagagagcccuauguguccugugacccugggaagugcuaccaauucgcccugggacagggcacaacccucaauaaccggcauucuaaugauacaguucacgaccgcaccccguauagaacgcugcugaugaacgaacucggggugcccuuucaucugggaacaaaacaggucuguauugccuggagcuccagcucuugccacgauggcaaggcuuggcuucauguguguguuaccggccacgacgagaaugccacagcuuccuucaucuacgaugggcggcugguggacagcauuggaucuugguccaaaaacauccuccgcacccaggaaagcgagugcgucuguauuaaugggaccugcacaguggugaugacggauggcucugccuccgagagagcggacaccaagauccuguuuaucgaagagggaaaaauuguccacaucagcccucuuuccggcucugcccaacauguugaagagugcagcuguuauccccgguacccuggggugcgcugcguguguagagauaacuggaagggauccaaccggcccauugucgacaucaaugugaaggauuacagcauuguuucuuccuaugugugcagcggccuggucggcgacacaccgcgcaaaaacgacucuagcuccucuagcuacuguagaaauccuaacaaugaaaaggggucccacggagugaaaggcugggcuuucgaugacgggaacgauguuuggaugggacggaccaucagcgaggagcuccgcucuggcuaugaaacauuuaaggugaucgggggaugguccaaacccaauagcaagcugcagauuaacagacaggucaucguggaccggggcaauagaucuggcuacuccgggauuuucagcgucgagggaaaauccugcaucaaccgcuguuuuuauguggaacugauucggggcagaaagcaggagaccgaaguuugguggacgucuaauagcaucguggucuucugcgggacauccggaaccuacggcaccgggucuuggccugauggcgccgacauuaaccucaugcccaucuga

SEQ ID NO: 207255 - RNA, 1410 nt, Artificial Sequence
  derived and/or modified CDS sequence (opt5) from neuraminidase__InfluenzaA__ABG48316
augaaccccaaucagaagaucauuaccaucggcagcgugucccugacagucgccacgauuugcuuccucaugcaaaucgcuauucugguuaccacagugacccuucacuuuaaacaguacgaguguaacucuccuccgaauaaccaggugaugcugugcgaacccacaaucaucgagagaaauauuaccgaaaucgucuaucucacaaacaccacgauugagaaggaaaucuguccuaaacuggccgaguaccggaauuggagcaagccccagugcaaaauuaccggguucgcgccuuuuuccaaggacaacucuauccgccuuagcgcuggaggcgauauuugggugacaagagagcccuauguuuccugugacccugggaagugcuaccaauucgcccugggacagggcaccacacucaauaaccggcauucuaaugauaccgugcacgaccgcacgccguauagaacacugcugaugaacgaacucgggguccccuuucaucugggaaccaaacagguguguaucgccuggagcuccagcucuugccacgauggcaaggcuuggcuucauguuugugugacaggccacgacgagaaugccaccgcuuccuucaucuacgaugggcggcuggucgacagcauuggaucuugguccaaaaacauccuccgcacccaggaaagcgagugcguguguauuaauggcacaugcacgguggucaugaccgaugggucugccuccgagagagcggacacaaagauccuguuuauugaagagggaaaaaucguucacaucagcccucuuuccggcucugcccaacauguggaagagugcagcuguuauccccgguacccuggggugcgcugcgucuguagagauaacuggaagggauccaaccggcccauuguggacaucaauguuaaggauuacagcauugugucuuccuaugucugcagcggccuggugggcgacaccccgcgcaaaaacgacucuagcuccucuagcuacuguagaaauccuaacaaugaaaaggggucccacggaguuaaaggcugggcuuucgaugacgggaacgauguguggaugggacggacaaucagcgaggagcuccgcucuggcuaugaaaccuuuaaggucauugggggaugguccaaacccaauagcaagcugcagaucaacagacaggugaucgucgagcggggcaauagaucuggcuacuccgggauuuucagcguggaaggaaaauccugcaucaaccgcuguuuuuauguugagcugauucggggcagaaagcaggaaacggaggugugguggacaucuaauagcaucgucguguucugcgggaccuccggaaccuacggcacagggucuuggccugacggcgccgauauuaaccucaugcccaucuga

SEQ ID NO: 207256 - RNA, 1410 nt, Artificial Sequence
  derived and/or modified CDS sequence (opt5) from neuraminidase__InfluenzaA__ABG48327
augaaccccaaucagaagaucauuaccaucggcagcgugucccugacaauugccacgaucugcuuccucaugcaaauugcuauccuggucaccacaguuacccuucacuuuaaacaguacgaguguaacucuccuccgaauaaccaggugaugcugugcgaacccacaaucauugagagaaauaucaccgaaauuguguaucucacaaacaccacgaucgagaaggaaauuuguccuaaacuggccgaguaccggaauuggagcaagccccagugcaaaaucaccggguucgcgccuuuuuccaaggacaacucuauucgccuuagcgcuggaggcgauaucugggucacaagagagcccuauguguccugugacccugggaagugcuaccaauucgcccugggacagggcaccacacucaauaaccggcauucuaaugauaccguucacgaccgcacgccguauagaacacugcugaugaacgaacucggggugcccuuucaucugggaaccaaacaggucuguaucgccuggagcuccagcucuugccacgauggcaaggcuuggcuucauguguguguuacaggccacgacgagaaugccaccgcuuccuucauuuacgaugggcggcugguggacagcaucggaucuugguccaaaaacauucuccgcacccaggaaagcgagugcgucuguaucaauggcacaugcacgguggugaugaccgaugggucugccuccgagagagcggacacaaagauucuguuuaucgaagagggaaaaaucguccacauuagcccucuuuccggcucugcccaacauguugaagagugcagcuguuauccccgguacccuggggugcgcugcguguguagagauaacuggaagggauccaaccggcccaucgucgacauuaaugugaaggauuacagcaucguuucuuccuaugugugcagcggccuggucggcgacaccccgcgcaaaaacgacucuagcuccucuagcuacuguagaaauccuaacaaugaaaaggggucccggggagugaaaggcugggcuuucgaugacgggaacgauguuuggaugggacgcacaauuagcgaggagcucagaucuggcuaugaaaccuuuaaggugaucgggggaugguccaaacccaauagcaagcugcagaucaaccggcaggucauuguggacagaggcaaucgcucuggcuacuccgggaucuucagcgucgagggaaaauccugcauuaaccgguguuuuuauguggaacugaucagaggccgcaagcaggagacggaaguuugguggacaucuaauagcauuguggucuucugcgggaccuccggaaccuacggcacagggucuuggccugauggcgccgacaucaaccucaugcccauuuga

SEQ ID NO: 207257 - RNA, 1410 nt, Artificial Sequence
  derived and/or modified CDS sequence (opt5) from neuraminidase__InfluenzaA__ABG48338
augaaccccaaucagaagaucauuaccaucggcagcgugucccugacaauugccacgaucugcuuccucaugcaaauugcuauccuggucaccacaguuacccuucacuuuaaacaguacgaguguaacucuccuccgaauaaccaggugaugcugugcgaacccacaaucauugagagaaauaucaccgaaauuguguaucucacaaacaccacgaucgagaaggaaauuuguccuaaacuggccgaguaccggaauuggagcaagccccagugcaaaaucaccggguucgcgccuuuuuccaaggacaacucuauucgccuuagcgcuggaggcgauaucugggucacaagagagcccuauguguccugugacccugggaagugcuaccaauucgcccugggacagggcaccacacucaauaaccggcauucuaaugauaccguucacgaccgcacgccguauagaacacugcugaugaacgaacucggggugcccuuucaucugggaaccaaacaggucuguaucgccuggagcuccagcucuugccacgauggcaaggcuuggcuucauguguguguuacaggccacgacgagaaugccaccgcuuccuucauuuacgaugggcggcugguggacagcaucggaucuugguccaaaaacauucuccgcacccaggaaagcgagugcgucuguaucaauggcacaugcacgguggugaugaccgaugggucugccuccgagagagcggacacaaagauucuguuuaucgaagagggaaaaaucguccacauuagcccucuuuccggcucugcccaacauguugaagagugcagcuguuauccccgguacccuggggugcgcugcguguguagagauaacuggaagggauccaaccggcccaucgucgacauuaaugugaaggauuacagcaucguuucuuccuaugugugcagcggccuggucggcgacaccccgcgcaaaaacgacucuagcuccucuagcuacuguagaaauccuaacaaugaaaaggggucccacggagugaaaggcugggcuuucgaugacgggaacgauguuuggaugggacggacaauuagcgaggagcuccgcucuggcuaugaaaccuuuaaggugaucgggggaugguccaaacccaauagcaagcugcagaucaacagacaggucauuguggaccggggcaauagaucuggcuacuccgggaucuucagcgucgagggaaaauccugcauuaaccgcuguuuuuauguggaacugauccggggcagaaagcaggagacggaaguuugguggacaucuaauagcauuguggucuucugcgggaccuccggaaccuacggcacagggucuuggccugauggcgccgacaucaaccucaugcccauuuga

SEQ ID NO: 207258 - RNA, 1410 nt, Artificial Sequence; identical to SEQ ID NO: 207257
  derived and/or modified CDS sequence (opt5) from neuraminidase__InfluenzaA__ABG48349

SEQ ID NO: 207259 - RNA, 1410 nt, Artificial Sequence
  derived and/or modified CDS sequence (opt5) from neuraminidase__InfluenzaA__ABG48360
augaaccccaaucagaagaucauuaccaucggcagcgugucccugacaauugccacgaucugcuuccucaugcaaauugcuauccuggucaccacaguuacccuucacuuuaaacaguacgaguguaacucuccuccgaauaaccaggugaugcugugcgaacccacaaucauugagagaaauaucaccgaaauuguguaucucacaaacaccacgaucgagaaggaaauuuguccuaaacuggccgaguaccggaauuggagcaagccccagugcaaaaucaccggguucgcgccuuuuuccaaggacaacucuauucgccuuagcgcuggaggcgauaucugggucacaagagagcccuauguguccugugacccugggaagugcuaccaauucgcccugggacagggcaccacacucaauaaccggcauucuaaugauaccguucacgaccgcacgccguauagaacacugcugaugagcgaacucggggugcccuuucaucugggaaccaaacaggucuguaucgccugguccucuagcuccugccacgauggcaaggcuuggcuucauguguguguuacaggccacgacgagaacgccaccgcuagcuucauuuacgaugggaaacugguggacucuaucggauccuggagcaagaauauucuccggacccaggaaucugagugcgucuguaucaacggcacaugcacgguggugaugaccgauggguccgccagcgagcgcgcggacacaaaaauucuguuuaucgaagagggaaagaucguccacauuuccccucuuucuggcagcgcccaacauguugaagagugcuccuguuaucccagauacccuggggugcggugcgugugucgcgauaauuggaagggaagcaacagacccaucgucgacauuaacgugaaagaucacucuaucguuuccagcuacgugugcucuggccuggucggcgacaccccgcggaagaaugacagcuccucuagcuccuauugucgcaacccuaauaacgaaaaagggagccauggagugaagggcugggcuuucgaugacgggaaugauguuuggaugggaagaacaauuucugaggagcuccgguccggcuacgaaaccuuuaaagugaucgggggauggagcaagcccaacucuaaacugcagaucaaucgccaggucauuguggacagaggcaaccgguccggcuauagcgggaucuucuccgucgagggaaagucuugcauuaauagauguuuuuacguggaacugauccgcggccggaagcaggagacggaaguuugguggacaagcaacuccauuguggucuucugcgggaccucuggaaccuauggcacagggagcuggccugauggcgccgacaucaaucucaugcccauuuga

SEQ ID NO: 207260 - RNA, 1410 nt, Artificial Sequence; identical to SEQ ID NO: 207257
  derived and/or modified CDS sequence (opt5) from neuraminidase__InfluenzaA__ABG48371

SEQ ID NO: 207261 - RNA, 1410 nt, Artificial Sequence
  derived and/or modified CDS sequence (opt5) from neuraminidase__InfluenzaA__ABG67138
augaaccccaaucagaagaucauuaccaucggcagcgugucccugacaauugccacgaucugcuuccucacccaaauugcuauccuggucacaaccguuacacuucacuuuaaacaguacgaguguaacucuccuccgagcaaucaggugaugcugugcgaacccaccacaaucgagagaaacauuaccgaaaucguguaucucacgaauaccacaauugagaaggaaaucuguccuaaacuggccgaguaccggaacugguccaagccccagugcaaaauuaccggguucgcgccuuuuucuaaggacaauagcauccgccuuuccgcuggaggcgauauuugggucacaagagagcccuaugugucuugugacccugauaagugcuaccaauucgcccuggggcagggaaccacgcucaacaaucggcauagcaacgacacaguucacgaucgcaccccguauagaacacugcugaugaaugaacucggcgugcccuuucaucuggggaccaaacaggucuguaucgccugguccucuagcuccugccacgacggaaaggcuuggcuucauguguguguuaccggccacgaugagaacgccacagcuagcuucaucuacgacggccggcugguggauucuauuggguccuggagcaaaaagauccuccgcacgcaggaaucugagugcgucuguauuaauggaaccugcacaguggugaugaccgacggcuccgccagcgggagagcggauacaaaaauccuguuuauugaggaaggaaagaucguccacaucuccccucuuucuggcagcgcccaacauguugaggaaugcuccuguuauccccgguacccuggggugcgcugcguguguagagacaacuggaagggaagcaaucggcccauugucgauaucaacgugaaagacuacucuauuguuuccagcuaugugugcucuggccuggucggcgacaccccgcgcaagaacgauagcuccucuagcucccacugucucaauccuaacaaugaggaagggggacauggcgugaaagggugggcuuucgacgauggaaacgacguuuggaugggcagaacgaucagcgagaagcugcggucuggguacgagacauuuaaagugauugaaggaugguccaagcccaauagcaaacugcagaucaaccgccaggucaucguggauagaggcaaucggucuggcuauuccgggauuuucagcgucgagggaaaguccugcaucaacagauguuuuuacguggaacucauucgcggccggaagcaggagaccgaaguuugguggaccucuaauagcaucguggucuucugcgggacauccggaaccuauggcacagggucuuggccugacggcgccgauauuaaccugaugcccaucuga

SEQ ID NO: 207262 - RNA, 1410 nt, Artificial Sequence; identical to SEQ ID NO: 206198
  derived and/or modified CDS sequence (opt5) from neuraminidase__InfluenzaA__ABG67149

SEQ ID NO: 207263 - RNA, 1410 nt, Artificial Sequence
  derived and/or modified CDS sequence (opt5) from neuraminidase__InfluenzaA__ABG67160
augaaccccaaucagaagaucauuaccaucggcagcgugucccugacaauugccacgaucugcuuccucaugcaaauugcuauccuggucaccacaguuacccuucacuuuaaacaguacgaguguaacucuccuccgaauaaccaggugaugcugugcgaacccacaaucauugagagaaauaucaccgaaauuguguaucucacaaacaccacgaucgagaaggaaauuuguccuaaacuggccgaguaccggagcugguccaagccccagugcaaaaucaccggguucgcgccuuuuucuaaggacaauagcauucgccuuuccgcuggaggcgauaucugggucacaagagagcccuaugugucuugugacccugggaagugcuaccaauucgcccugggacagggcaccacacucaacaaucggcauagcaacgauaccguucacgaccgcacgccguauagaacacugcugaugaaugaacucggggugcccuuucaucugggaaccaaacaggucuguaucgccugguccucuagcuccugccacgauggcaaggcuuggcuucauguguguguuacaggccacgacgagaacgccaccgcuagcuucauuuacgaugggcggcugguggacucuaucggauccuggagcaaaaauauucuccgcacccaggaaucugagugcgucugugugaacggcacaugcacgguggucaugaccgauggguccgccagcgagagagcggacacaaagauccuguuuauugaagagggaaaaaucguucacaucuccccucuuucuggcagcgcccaacauguggaagagugcuccuguuauccccgguacccuggggugcgcugcgucuguagagauaauuggaagggaagcaaccggcccauuguggacaucaacguuaaggauuacucuauuguguccagcuaugucugcucuggccuggugggcgacaccccgcgcaaaaaugacagcuccucuagcuccuacuguuggaacccuaauaacgaaaaagggggacacggcguuaaggggugggcuuucgaugacggaaaugauguguggaugggcagaacaaucagcgaggagcuccggucuggguaugaaaccuuuaaggucauuggaggcugguccaaacccaacagcaagcugcagaucaaucgccaggugaucgucgacagaggcaaccggucuggguacuccggaauuuucagcguggagggcaaauccugcaucaauagauguuuuuauguugaacugauucgcgggcggaagcaggagacggaagugugguggacaucuaacagcaucgucguguucugcggaaccuccggcaccuacgggacaggcucuuggccugauggagccgacauuaaucucaugcccaucuga

SEQ ID NO: 207264 - RNA, 1410 nt, Artificial Sequence
  derived and/or modified CDS sequence (opt5) from neuraminidase__InfluenzaA__ABG67171
augaaccccaaucagaagaucauuaccaucggcagcgugucccugacaauugccacgaucugcuuccucaugcaaauugcuauccuggucaccacaguuacccuucacuuuaaacaguacgaguguaacucuccuccgaauaaccaggugaugcugugcgaacccacaaucauugagagaaauaucaccgaaauuguguaucucacaaacaccacgaucgagaaggaaauuuguccuaaacuggccgaguaccggaauuggagcaagccccagugcaaaaucaccggguucgcgccuuuuuccaaggacaacucuauucgccuuagcgcuggaggcgauaucugggucacaagagagcccuauguguccugugacccugggaagugcuaccaauucgcccugggacagggcaccacacucaauaaccggcauucuaaugauaccguucacgaccgcacgccguauagaacacugcugaugaacgaacucggggugcccuuucaucugggaaccaaacaggucuguaucgccuggagcuccagcucuugccacgauggcaaggcuuggcuucauguguguguuacaggccacgacaaaaaugccaccgcuuccuucauuuacgaugggcggcugguggacagcaucggaucuugguccaagaacauucuccgcacccaggagagcgaaugcgucuguaucaauggcacaugcacgguggugaugaccgaugggucugccuccgacagagcggauacaaaaauucuguuuaucgaggagggaaagaucguccacauuagcccucuuuccggcucugcccaacauguugaagagugcagcuguuauccccgguacccuggggugcgcugcguguguagagacaacuggaagggauccaaccggcccaucgucgauauuaaugugaaagacuacagcaucguuucuuccuaugugugcagcggccuggucggcgacaccccgcgcaagaacgauucuagcuccucuagcuacuguuggaauccuaacaaugaaaaagggggacacggcgugaaggggugggcuuucgacgauggaaacgacguuuggaugggcagaacaauuuccgaggaaagccggucuggguaugagaccuuuaaagugaucggaggcugguccaagcccaauagcaaacuccagaucaaccgccaggucauuguggauagaggcaaucggucuggguacuccggaaucuucagcgucgagggcaaguccugcauuaacagauguuuuuauguggaacugauccgcgggcggaagcaggagacggaaguuugguggacaucuaauagcauuguggucuucugcggaaccuccggcaccuacgggacaggcucuuggccugacggagccgauaucaaccugaugcccauuuga

SEQ ID NO: 207265 - RNA, 1410 nt, Artificial Sequence; identical to SEQ ID NO: 207185
  derived and/or modified CDS sequence (opt5) from neuraminidase__InfluenzaA__ABG67182

SEQ ID NO: 207266 - RNA, 1410 nt, Artificial Sequence
  derived and/or modified CDS sequence (opt5) from neuraminidase__InfluenzaA__ABG67193
augaaccccaaucagaagaucauuaccaucggcagcgugucccugacaauugccacgaucugcuuccucaugcaaauugcuauccuggucaccacaguuacccuucacuuuaaacaguacgaguguaacucuccuccgaauaaccaggugaugcugugcgaacccacaaccaucgagagaaauauuacagaaaucguguaucucaccaacacgaccauugagaaggaaaucuguccuaaacuggccgaguaccggaauuggagcaagccccagugcaaaauuacaggguucgcgccuuuuuccaaggacaacucuauccgccuuagcgcuggaggcgauauuugggucaccagagagcccuauguguccugugacccugggaagugcuaccaauucgcccugggacagggcacaacccucaauaaccggcauucuaaugauacgguucacgaccgcacaccguauagaacccugcugaugaacgaacucggggugcccuuucaucugggaacaaaacaggucuguaucgccuggagcuccagcucuugccacgauggcaaggcuuggcuucauguguguguuaccggccacgacgagaaugccaccgcuuccuucaucuacgaugggcggcugguggacagcauuggaucuugguccaaaaacauccuccgcacacaggaaagcgagugcgucuguauuaauggcacgugcaccguggugaugacagaugggucugccuccgacagagcggauaccaagauccuguuuauugaggaaggaaaaaucguccacaucagcccucuuuccggcucugcccaacauguugaggaaugcagcuguuauccccgguacccuggggugcgcugcguguguagagacaacuggaagggauccaaccggcccauugucgauaucaaugugaagaacuacagcauuguuucuuccuaugugugcagcggccuggucggcgacacaccgcgcaaaaaugacucuagcuccucuagcuacuguuggaacccuaauaacgagaaagggggacacggcgugaaggggugggcuuucgaugacggaaaugauguuuggaugggcagaaccaucuccgaagagagccggucuggguaugagacguuuaaggugauuggaggcugguccaaacccaacagcaagcuccagaucaaucgccaggucaucguggacagaggcaaccggucuggguacuccggaauuuucagcgucgaaggcaaauccugcaucaauagauguuuuuauguggagcugauucgcgggcggaagcaggaaacagagguuugguggaccucuaacagcaucguggucuucugcggaaccuccggcacauacgggaccggcucuuggccugauggagccgacauuaaucugaugcccaucuga

SEQ ID NO: 207267 - RNA, 1410 nt, Artificial Sequence; identical to SEQ ID NO: 207185
  derived and/or modified CDS sequence (opt5) from neuraminidase__InfluenzaA__ABG67204

SEQ ID NO: 207268 - RNA, 1410 nt, Artificial Sequence
  derived and/or modified CDS sequence (opt5) from neuraminidase__InfluenzaA__ABG67215
augaaccccaaucagaagaucauuaccaucggcagcgugucccugacaauugccacgaucugcuuccucaugcaaauugcuauccuggucaccacaguuacccuucacuuuaaacaguacgaguguaacucuccuccgagcaaucaggugaugcugugcgaacccacaaucauugagagaaacaucaccgaaauuguguaucucacaaauaccacgaucgagaaggaaauuuguccuaaacuggccgaguaccggaacugguccaagccccagugcaaaaucaccggguucgcgccuuuuucuaaggacaauagcauucgccuuuccgcuggaggcgauaucugggucacaagagagcccuaugugucuugugggccuggaaagugcuaccaauucgcccugggccaggggaccacacucaacaaucggcauagcaacgacaccguucacgaucgcacgccguauagaacacugcugaugaaugaacucggagugcccuuucaucugggcaccaaacaggucuguaucgccugguccucuagcuccugccacgacggcaaggcuuggcuucauguguguguuacagggcacgaugagaacgccaccgcuagcuucauuuacgacggacggcugguggauucuaucggcuccuggagcaaaaauauucuccgcacccaggaaucugagugcgucuguaucaacgggacaugcacgguggugaugaccgacggauccgccagcgagagagcggauacaaagauucuguuuaucgaagagggcaaaaucguccacauuuccccucuuucugggagcgcccaacauguugaagagugcuccuguuauccccgguacccuggagugcgcugcguguguagagacaauuggaagggcagcaaccggcccaucgucgauauuaacgugaaggacuacucuaucguuuccagcuaugugugcucuggccuggucggggauaccccgcgcaaaaaugacagcuccucuagcuccuacuguagaaacccuaauaacgaaaagggaagccacggcgugaaagggugggcuuucgacgauggaaaugacguuuggaugggccggacaauuucugaggagcuccgcuccggguaugaaaccuuuaaggugaucggaggcuggagcaaacccaacucuaagcugcagaucaauagacaggucauuguggaucggggcaacagauccggguacagcggaaucuucuccgucgagggcaaaucuugcauuaaucgcuguuuuuauguggaacugauccgggggagaaagcaggagacggaaguuugguggacaagcaacuccauuguggucuucugcggaaccucuggcaccuacgggacaggcagcuggccugacggagccgauaucaaucucaugcccauuuga

SEQ ID NO: 207269 - RNA, 1410 nt, Artificial Sequence; identical to SEQ ID NO: 207173
  derived and/or modified CDS sequence (opt5) from neuraminidase__InfluenzaA__ABG67226

SEQ ID NO: 207270 - RNA, 1410 nt, Artificial Sequence; identical to SEQ ID NO: 207173
  derived and/or modified CDS sequence (opt5) from neuraminidase__InfluenzaA__ABG67248

SEQ ID NO: 207271 - RNA, 1413 nt, Artificial Sequence; identical to SEQ ID NO: 206900
  derived and/or modified CDS sequence (opt5) from neuraminidase__InfluenzaA__ABG67480

SEQ ID NO: 207272 - RNA, 1413 nt, Artificial Sequence; identical to SEQ ID NO: 206468
  derived and/or modified CDS sequence (opt5) from neuraminidase__InfluenzaA__ABG67494

SEQ ID NO: 207273 - RNA, 1410 nt, Artificial Sequence; identical to SEQ ID NO: 206226
  derived and/or modified CDS sequence (opt5) from neuraminidase__InfluenzaA__ABG67505

SEQ ID NO: 207274 - RNA, 1410 nt, Artificial Sequence; identical to SEQ ID NO: 206226
  derived and/or modified CDS sequence (opt5) from neuraminidase__InfluenzaA__ABG67516

SEQ ID NO: 207275 - RNA, 1410 nt, Artificial Sequence; identical to SEQ ID NO: 207239
  derived and/or modified CDS sequence (opt5) from neuraminidase__InfluenzaA__ABG67527

SEQ ID NO: 207276 - RNA, 1410 nt, Artificial Sequence
  derived and/or modified CDS sequence (opt5) from neuraminidase__InfluenzaA__ABG67538
augaaccccaaucagaagaucauuaccaucggcagcgugucccugacaauugccacgaucugcuuccucaugcaaauugcuauccuggucaccacaguuacccuucacuuuaaacaguacgaguguaacucuccuccgaauaaccaggugaugcugugcgaacccacaaccaucgagagaaauacaaccgaaauuguguaucucacgaacaccacaaucgagaaggaaauuuguccuaaacuggccgaguaccggaauuggagcaagccccagugcaacaucaccggguucgcgccuuuuuccaaagacaauucuauucgccuuagcgcuggaggcgauaucugggucacaagagagcccuauguguccugugacccugauaagugcuaccaauucgcccuggggcagggaaccacgcucaacaauggccauucuaacgacacaguucacgaucggaccccguaucgcacacugcugaugaaugaacucggggugcccuuucaucugggaaccagacaggucuguauugccuggagcuccagcucuugccacgacggcaaggcuuggcuucauguguguguuaccggcgaugacgagaacgccacagcuuccuucaucuacaaugggcggcugguggauagcaucggaucuugguccaaaaagauucuccgcacgcaggaaagcgagugcgucuguaucaacgggaccugcacaguggugaugaccgacggcucugccuccggaaaagcggauacaaagauucuguuuaucgaggaaggcaaaauuguccacaucagcacccuuuccgggucugcccaacacguugaggaaugcagcuguuauccuagauaccccggagugcggugcgugugucgcgacaacuggaagggcuccaauagaccuaucauugauaucaacgucaaggacuacagcauugugucuuccuauguuugcagcggccuggugggggacacgccccggaaaaaugauucuuucagcuccucucauugucucgacccgaacaaugaggaaggaggccacggggucaagggaugggcuuuugaugacggcaacgauguguggauggggcgcacaaucagcgagaaacugagauccggauacgagaccuucaagguuauugaaggcuggagcaaaccuaauucuaagcugcagaccaaccgccaggugaucgucgagcggggcaauagauccggguauagcggaaucuuuucuguggaaggcaaauccugcauuaaccgguguuucuacgucgagcucaucagagggcgcaaggaagagacagaggugugguggaccagcaauuccauuguuguguuuugcggaacaucuggcacguaugggaccggcagcuggcccgacggagccgauaucaaccugaugccuauuuga

SEQ ID NO: 207277 - RNA, 1410 nt, Artificial Sequence
  derived and/or modified CDS sequence (opt5) from neuraminidase__InfluenzaA__ABG67549
augaaccccaaucagaagaucauuaccaucggcagcgugucccugacaauugccacgaucugcuuccucaugcaaauugcuauccuggucaccacaguuacccuucacuuuaaacagcaugaguguaacucuccuccgaauaaccaggugaugcugugcgaacccacaaucauugagagaaauaucaccgaaauuguguaccucacaaacaccacgaucgagaaggaaauuuguccuaaacuggucgaguaucggaauuggagcaagccccagugcaacaucaccggguucgccccuuuuuccaaagacaauucuauucgccuuagcgcgggaggcgauaucugggugacaagagagcccuacguuuccugugacccugauaagugcuaucaauucgcucuggggcagggaaccacacucaacaauggccacucuaacgacaccgugcaugaucggacgccguaccgcacacugcugaugaaugaacucgggguccccuuucaccugggaaccagacagguguguaucgccuggagcuccagcucuugccaugacggcaaggccuggcuucacguuugugugacaggcgaugacaaaaacgcuaccgccuccuucauuuauaaugggcggcuggucgauagcaucggaucuugguccaagaaaauucuccgcacccaggagagcgaaugcguguguaucaacggcacaugcacgguggucaugaccgacgggucugcuuccggaaaggccgauacaaaaauucuguuuaucgaggagggcaagaucguucacauuagcacccuuuccgggucugcgcaacauguggaagagugcagcuguuacccuagauaucccggagugcggugcgucugucgcgacaacuggaagggcuccaauagaccuaucguggauauuaacguuaaagacuacagcaucgugucuuccuacgucugcagcggccuggugggggacacaccccggaagaaugauucuuucagcuccucucacugucucgacccgaacaaugaagagggaggccaugggguuaaaggaugggccuuugaugacggcaacgauguguggauggggcgcaccauuagcgaaaagcugagauccggauaugagacguucaaagucaucgagggcuggagcaagccuaauucuaaacugcagaucaaccgccaggugauugucgaacggggcaauagauccggguacagcggaaucuuuucuguggagggcaaguccugcauuaaccgguguuucuauguugaacucaucagagggcgcaaggaggaaaaugaggugugguggacaagcaacuccauugucguguuuugcggaaccucuggcaccuacgggacaggcagcuggcccgacggagcugauaucaaucugaugccuauuuga

SEQ ID NO: 207278 - RNA, 1410 nt, Artificial Sequence; identical to SEQ ID NO: 206663
  derived and/or modified CDS sequence (opt5) from neuraminidase__InfluenzaA__ABG67560

SEQ ID NO: 207279 - RNA, 1410 nt, Artificial Sequence; identical to SEQ ID NO: 206663
  derived and/or modified CDS sequence (opt5) from neuraminidase__InfluenzaA__ABG67571

SEQ ID NO: 207280 - RNA, 1410 nt, Artificial Sequence
  derived and/or modified CDS sequence (opt5) from neuraminidase__InfluenzaA__ABG67582
augaaccccaaucagaagaucauuaccaucggcagcgugucccugacaauugccacgaucugcuuccucaugcaaauugcuauccuggucaccacaguuacccuucacuuuaaacagcaugaguguaacucuccuccgaauaaccaggugaugcugugcgaacccacaaucauugagagaaauaucaccgaaauuguguaccucacaaacaccacgaucgagaaggaaauuuguccuaaacuggucgaguaucggaauuggagcaagccccagugcaacaucaccggguucgccccuuuuuccaaagacaauucuauucgccuuagcgcgggaggcgauaucugggugacaagagagcccuacguuuccugugacccugauaagugcuaucaauucgcucuggggcagggaaccacacucaacaauggccacucuaacgacaccgugcaugaucggacgccguaccgcacacugcugaugaaugaacucgggguccccuuucaccugggaaccagacagguguguaucgccuggagcuccagcucuugccaugacggcaaggccuggcuucacguuugugugacaggcgaugacaaaaacgcuaccgccuccuucauuuauaaugggcggcuggucgauagcaucggaucuugguccaagaaaauucuccgcacccaggagagcgaaugcguguguaucaacggcacaugcacgguggucaugaccgacgggucugcuuccggaaaggccgauacaaaaauucuguuuaucgaggagggcaagaucguucacauuagcacccuuuccgggucugcgaagcauguggaagagugcagcuguuacccuagauaucccggagugcggugcgucugucgcgacaacuggaaaggcuccaauagaccuaucguggauauuaacguuaaggacuacagcaucgugucuuccuacgucugcagcggccuggugggggacacaccccggaaaaaugauucuuucagcuccucucacugucucgacccgaacaaugaagagggaggccaugggguuaagggaugggccuuugaugacggcaacgauguguggauggggcgcaccauuagcgaaaaacugagauccggauaugagacguucaaggucaucgagggcuggagcaaaccuaauucuaagcugcaaaucaaccgccaggugauugucgaacggggcaauagauccggguacagcggaaucuuuucuguggagggcaaguccugcauuaaccgguguuucuauguugaacucaucagagggcgcaaagaggaaacagaggugugguggaccagcaauuccauugucguguuuugcggaaccucuggcacauacgggaccggcagcuggcccgacggagcugauaucaaccugaugccuauuuga

SEQ ID NO: 207281 - RNA, 1410 nt, Artificial Sequence; identical to SEQ ID NO: 207247
  derived and/or modified CDS sequence (opt5) from neuraminidase__InfluenzaA__ABG67593

SEQ ID NO: 207282 - RNA, 1410 nt, Artificial Sequence; identical to SEQ ID NO: 206663
  derived and/or modified CDS sequence (opt5) from neuraminidase__InfluenzaA__ABG67604

SEQ ID NO: 207283 - RNA, 1410 nt, Artificial Sequence; identical to SEQ ID NO: 206663
  derived and/or modified CDS sequence (opt5) from neuraminidase__InfluenzaA__ABG67615

SEQ ID NO: 207284 - RNA, 1410 nt, Artificial Sequence; identical to SEQ ID NO: 206663
  derived and/or modified CDS sequence (opt5) from neuraminidase__InfluenzaA__ABG67626

SEQ ID NO: 207285 - RNA, 1410 nt, Artificial Sequence; identical to SEQ ID NO: 206663
  derived and/or modified CDS sequence (opt5) from neuraminidase__InfluenzaA__ABG67637

SEQ ID NO: 207286 - RNA, 1410 nt, Artificial Sequence; identical to SEQ ID NO: 206663
  derived and/or modified CDS sequence (opt5) from neuraminidase__InfluenzaA__ABG67648

SEQ ID NO: 207287 - RNA, 1410 nt, Artificial Sequence
  derived and/or modified CDS sequence (opt5) from neuraminidase__InfluenzaA__ABG67659
augaaccccaaucagaagaucauuaccaucggcagcgugucccugacaauugccacgaucugcuuccucaugcaaauugcuauccuggucaccacaguuacccuucacuuuaaacagcaugaguguaacucuccuccgaauaaccaggugaugcugugcgaacccacaaucauugagagaaauaucaccgaaauuguguaccucacaaacaccacgaucgagaaggaaauuuguccuaaacuggucgaguaucggaauuggagcaagccccagugcaacaucaccggguucgccccuuuuucccgcgacaauucuauuagacuuagcgcgggaggcgauaucugggugacacgggagcccuacguuuccugugacccugauaaaugcuaucaauucgcucuggggcagggaaccacacucaacaauggccacucuaacgacaccgugcaugaucgcacgccguacagaacacugcugaugaaugaacucgggguccccuuucaccugggaacccgccagguguguaucgccuggagcuccagcucuugccaugacggcaaggccuggcuucacguuugugugacaggcgaugacaagaacgcuaccgccuccuucauuuauaaugggcggcuggucgauagcaucggaucuugguccaaaaagauucucagaacccaggagagcgaaugcguguguaucaacggcacaugcacgguggucaugaccgacgggucugcuuccggaaaagccgauacaaagauucuguuuaucgaggagggcaaaaucguucacauuagcacccuuuccgggucugcgcaacauguggaagagugcagcuguuacccucgguaucccggagugcgcugcgucuguagagacaacuggaagggcuccaaucggccuaucguggauauuaacguuaaggacuacagcaucgugucuuccuacgucugcagcggccuggugggggacacaccccgcaaaaaugauucuuucagcuccucucacugucucgacccgaacaaugaagagggaggccaugggguuaagggaugggccuuugaugacggcaacgauguguggauggggagaaccauuagcgaaaaacugcgguccggauaugagacguucaaggucaucgagggcuggagcaaaccuaauucuaagcugcagaucaaccgccaggugauugucgaaagaggcaaucgguccggguacagcggaaucuuuucuguggagggcaaauccugcauuaacagauguuucuauguugaacucauccgcgggcggaaggaggaaacagaggugugguggaccagcaauuccauugucguguuuugcggaaccucuggcacauacgggaccggcagcuggcccgacggagcugauaucaaccugaugccuauuuga

SEQ ID NO: 207288 - RNA, 1410 nt, Artificial Sequence
  derived and/or modified CDS sequence (opt5) from neuraminidase__InfluenzaA__ABG67670
augaaccccaaucagaagaucauuaccaucggcagcgugucccugacaauugccacgaucugcuuccucaugcaaauugcuauccugaucaccacagucacccuucacuuuaaacaguacgaguguaacucuccuccgaauaaccagguuaugcugugcgaacccacaauuaucgagagaaauauuaccgaaaucguguaucucacaaacaccacgauugagaaggaaaucuguccuaaacuggccgaguaccggaauuggagcaagccccagugcaaaauuaccggguucgcgccuuuuuccaaggacaacucuauccgccuuagcgcuggaggcgauaucugggugacaagagagcccuaugucuccugugacccugggaagugcuaccaauucgcccugggacagggcaccacacucaauaaccggcauucuaaugauaccgugcacgaccgcacgccguauagaacacugcugaugaacgaacucgggguucccuuucaucugggaaccaaacagguguguauugccuggagcuccagcucuugccacgauggcaaggcuuggcuucaugucugugugacaggccacgacgagaaugccaccgcuuccuucaucuacgaugggcggcugguugacagcauuggaucuugguccaaaaacauccuccgcacccaggaaagcgagugcguguguauuaauggcacaugcacggucgugaugaccgaugggucugccuccggcagagcggacacaaagauccuguuuaucgaggaaggaaaaauugugcacaucagcccucuuuccgggucugcccaacaugucgaggaaugcagcuguuauccccgguacccuggaguucgcugcguguguagagauaacuggaagggcuccaaccggcccauuguggacaucaaugucaaggauuacagcauugugucuuccuauguuugcagcggccuggugggggacaccccgcgcaaaaacgacucuagcuccucuagccacugucucaauccuaacaaugaggaaggaggccauggggucaagggaugggcuuucgaugacggcaacgauguguggauggggagaacaaucuccgagaaacugcggagcggauacgagaccuuuaagguuaucggcggcuggucuaaacccaauuccaagcugcagauuaaccgccaggugaucgucgacagagggaaucggagcggauauucuggcauuuucuccguggaagggaaaagcugcaucaacagauguuuuuacgucgagcucauucgcggacggaagcaggaaacggaggugugguggacauccaauucuaucguuguguucugcggcaccagcgggaccuauggcacaggauccuggccugauggcgccgacauuaaccugaugcccaucuga

SEQ ID NO: 207289 - RNA, 1410 nt, Artificial Sequence; identical to SEQ ID NO: 206802
  derived and/or modified CDS sequence (opt5) from neuraminidase__InfluenzaA__ABG79944

SEQ ID NO: 207290 - RNA, 1413 nt, Artificial Sequence; identical to SEQ ID NO: 207131
  derived and/or modified CDS sequence (opt5) from neuraminidase__InfluenzaA__ABG79955

SEQ ID NO: 207291 - RNA, 1410 nt, Artificial Sequence
  derived and/or modified CDS sequence (opt5) from neuraminidase__InfluenzaA__ABG79966
augaaccccaaucagaagaucauuaccaucggcagcgugucccugacaauugccacgaucugcuuccucaugcaaauugcuauccuggucaccacaguuacccuucacuuuaaacaguacgaguguaacucuccuccgagcaaucaggugaugcugugcgaacccacaaucauugagagaaacaucaccgaaauuguguaucucacaaauaccacgaucgagaaggaaauuuguccuaaacuggccgaguaccggaacugguccaagccccagugcaaaaucaccggguucgcgccuuuuucuaaggacaauagcauucgccuuuccgcuggaggcgauaucugggucacaagagagcccuaugugucuugugacccugggaagugcuaccaauucgcccugggacagggcaccacacucaacaaucggcauagcaacgauaccguucacgaccgcacgccguauagaacacugcugaugaaugaacucggggugcccuuucaucugggaaccaaacaggucuguaucgccugguccucuagcuccugccacgauggcaaggcuuggcuucauguguguguuacaggccacgacgagaacgccaccgcuagcuucauuuacgaugggcggcugguggacucuaucggauccuggagcaaaaauauucuccgcacccaggaaucugagugcgucuguaucaacggcacaugcacgguggugaugaccgauggguccgccagcgagagagcggacacaaagauucuguuuaucgaagagggaaaaaucguccacauuuccccucuuucuggcagcgcccaacauguugaagagugcuccuguuauccccgguacccuggggugcgcugcguguguagagauaauuggaagggaagcaaccggcccaucgucgacauuaacgugaaggauuacucuaucguuuccagcuaugugugcucuggccuggucggcgacaccccgcgcaaaaaugacagcuccucuagcuccuacugucagaacccuaauaacgaaaaggggagccacggagugaaaggcugggcuuucgaugacgggaaugauguuuggaugggaagaacaauuucugaggagcuccgguccggcuaugaaaccuuuaaggugaucgggggauggagcaaacccaacucuaagcugcagaucaaucgccaggucauuguggacagaggcaaccgguccggcuacagcgggaucuucuccgucgagggaaaaucuugcauuaauagauguuuuuauguggaacugauccgcggccggaagcaagagacggaaguuugguggacaagcaacuccauuguggucuucugcgggaccucuggaaccuacggcacagggagcuggccugauggcgccgacaucaaucucaugcccauuuga

SEQ ID NO: 207292 - RNA, 1410 nt, Artificial Sequence
  derived and/or modified CDS sequence (opt5) from neuraminidase__InfluenzaA__ABG79977
augaaccccaaucagaagaucauuaccaucggcagcgugucccugacaauugccacgaucugcuuccucaugcaaauugcuauccuggucaccacaguuacccuucacuuuaaacaguacgaguguaacucuccuccgaauaaccaggccaugcugugcgaacccacaaucauugagagaaauaucaccgaaauuguguaucucacaaacaccacgaucgagaaggaaauuuguccuaaacuggcggaguaccggaauuggagcaagccccagugcaaaaucaccggguucgcuccuuuuuccaaggacaacucuauucgccuuagcgccggaggcgauaucugggugacaagagagcccuaugucuccugugacccugggaagugcuaccaauucgcccugggacagggcaccacacucaauaaccggcauucuaaugauaccgugcacgaccgcacgccguauagaacacugcugaugaacgaacucgggguucccuuucaucugggaaccaaacagguguguaucgcuuggagcuccagcucuugccacgauggcaaggccuggcuucaugucugugugacaggccacgacgagaaugcuaccgccuccuucauuuacgaugggcggcugguugacagcaucggaucuugguccaaaaacauucuccgcacccaggaaagcgagugcguguguaucaauggcacaugcacggucgugaugaccgaugggucugcguccgacagagccgauacaaagauucuguuuaucgaggaaggaaaaaucgugcacauuagcccucuuuccggcucugcucaacaugucgaggaaugcagcuguuauccccgguacccugggguucgcugcguguguagagacaacuggaagggauccaaccggcccaucguggauauuaaugucaaggacuacagcaucgugucuuccuauguuugcagcggccuggugggcgacaccccgcgcaaaaacgauucuagcuccucuagcuacuguuggaauccuaacaaugagaaagggggacacggcgucaaggggugggccuucgacgauggaaacgacguguggaugggcagaacaauuuccgaagagagccggucuggguaugagaccuuuaagguuaucggaggcugguccaaacccaauagcaagcuccagaucaaccgccaggugauugucgauagaggcaaucggucuggguacuccggaaucuucagcguggaaggcaaauccugcauuaacagauguuuuuaugucgagcugauccgcgggcggaagcaggaaacggaggugugguggacaucuaauagcauuguuguguucugcggaaccuccggcaccuacgggacaggcucuuggccugacggagcugauaucaaccugaugcccauuuga

SEQ ID NO: 207293 - RNA, 1410 nt, Artificial Sequence; identical to SEQ ID NO: 207185
  derived and/or modified CDS sequence (opt5) from neuraminidase__InfluenzaA__ABG79988

SEQ ID NO: 207294 - RNA, 1410 nt, Artificial Sequence; identical to SEQ ID NO: 207185
  derived and/or modified CDS sequence (opt5) from neuraminidase__InfluenzaA__ABG79999

SEQ ID NO: 207295 - RNA, 1410 nt, Artificial Sequence
  derived and/or modified CDS sequence (opt5) from neuraminidase__InfluenzaA__ABG80010
augaaccccaaucagaagaucauuaccaucggcagcgugucccugacaauugccacgaucugcuuccucaugcaaauugcuauccuggucaccacaguuacccuucacuuuaaacaguacgaguguaacucuccuccgaauaaccaggugaugcugugcgaacccacaaucauugagagaaauaucaccgaaauuguguaucucacaaacaccacgaucgagaaggaaauuuguccuaaacuggccgaguaccggaauuggagcaagccccagugcaaaaucaccggguucgcgccuuuuuccaaggacaacucuauucgccuuagcgcuggaggcgauaucugggucacaagagagcccuauguguccugugacccugggaagugcuaccaauucgcccugggaaaaggcaccacacucaauaaccggcauucuaaugauaccguucacgaccgcacgccguauagaacacugcugaugaacgaacucggggugcccuuucaucugggaaccaagcaggucuguaucgccuggagcuccagcucuugccacgauggcaaggcuuggcuucauguguguguuacaggccacgacgagaaugccaccgcuuccuucauuuacgaugggcggcugguggacagcaucggaucuugguccaaaaacauucuccgcacccaggaaagcgagugcgucuguaucaauggcacaugcacgguggugaugaccgaugggucugccuccgacagagcggauacaaaaauucuguuuaucgaggaaggaaagaucguccacauuagcccucuuuccggcucugcccagcauguugaggaaugcagcuguuauccccgguacccuggggugcgcugcguguguagagacaacuggaagggauccaaccggcccaucgucgauauuaaugugaaagacuacagcaucguuucuuccuaugugugcagcggccuggucggcgacaccccgcgcaagaacgauucuagcuccucuagcuacuguuggaauccuaacaaugagaaagggggacacggcgugaaggggugggcuuucgacgauggaaacgacguuuggaugggcagaacaauuuccgaagagagccggucuggguaugagaccuuuaaagugaucggaggcugguccaagcccaauagcaaacuccaaaucaaccgccaggucauuguggauagaggcaaucggucuggguacuccggaaucuucagcgucgaaggcaaguccugcauuaacagauguuuuuauguggagcugauccgcgggcggaagcaggaaacggagguuugguggacaucuaauagcauuguggucuucugcggaaccuccggcaccuacgggacaggcucuuggccugacggagccgauaucaaccugaugcccauuuga

SEQ ID NO: 207296 - RNA, 1410 nt, Artificial Sequence; identical to SEQ ID NO: 207185
  derived and/or modified CDS sequence (opt5) from neuraminidase__InfluenzaA__ABG80021

SEQ ID NO: 207297 - RNA, 1410 nt, Artificial Sequence
  derived and/or modified CDS sequence (opt5) from neuraminidase__InfluenzaA__ABG80032
augaaccccaaucagaagaucauuaccaucggcagcgugucccugacaauugccacgaucugcuuccucaugcaaauugcuauccuggucaccacaguuacccuucacuuuaaacaguacgaguguaacucuccuccgaauaaccaggugaugcugugcgaacccacaaucauugagagaaauaucaccgaaauuguguaucucacaaacaccacgaucgagaaggaaauuuguccuaaacuggccgaguaccggaauuggagcaagccccagugcaaaaucaccggguucgcgccuuuuuccaaggacaacucuauucgccuuagcgcuggaggcgauaucugggucacaagagagcccuauguguccugugacccugggaagugcuaccaauucgcccugggacagggcaccacacucaauaaccggcauucuaaugauaccguucacgaccgcacgccguauagaacacugcugaugaacgaacucggggugcccuuucaucugggaaccaaacaggucuguaucgccuggagcuccagcucuugccacgauggcaaggcuuggcuucauguguguguuacaggccacgacgagaaugccaccgcuuccauuaucuacgaugggcggcugguggacagcauuucuuccuggagcaaaaacauccuccgcacccaggaaucugagugcgucuguauuaauggaacaugcacgguggugaugaccgauggcuccgccagcgagagagcggacacaaagauccuguucaucgaagaggggaaaauuguccacaucuccccucuuucuggaagcgcccaacauguugaagagugcuccuguuauccccgguacccuggcgugcgcugcguguguagagauaacuggaaggggagcaaccggcccauugucgacaucaaugugaaggauuacucuauuguuuccagcuaugugugcucuggacuggucggcgacaccccgcgcaaaaacgacagcuccucuagcuccuacugucucaauccuaacaaugaagagggcgggcacggagugaagggcugggcuuuugaugacgggaacgauguuuggaugggaagaacaaucagcgagaaacugcggucuggcuaugaaaccuucaaggugaucgggggaugguccaaacccaauagcaagcugcagauuaaccgccaggucaucguggacagaggcaaucggucuggcuacuccgggauuuuuagcgucgagggaaaauccugcgugaacagauguuucuauguugaacucauccgcggccggaagcaggagacggaagugugguggacaucuaauagcauugucguguuuugcgggaccuccggaaccuacggcacagggucuuggccugauggcgccgacaucaaccugaugcccauuuga

SEQ ID NO: 207298 - RNA, 1410 nt, Artificial Sequence; identical to SEQ ID NO: 207172
  derived and/or modified CDS sequence (opt5) from neuraminidase__InfluenzaA__ABG80043

SEQ ID NO: 207299 - RNA, 1410 nt, Artificial Sequence; identical to SEQ ID NO: 207185
  derived and/or modified CDS sequence (opt5) from neuraminidase__InfluenzaA__ABG80054

SEQ ID NO: 207300 - RNA, 1410 nt, Artificial Sequence; identical to SEQ ID NO: 207172
  derived and/or modified CDS sequence (opt5) from neuraminidase__InfluenzaA__ABG80065

SEQ ID NO: 207301 - RNA, 1410 nt, Artificial Sequence
  derived and/or modified CDS sequence (opt5) from neuraminidase__InfluenzaA__ABG80076
augaaccccaaucagaagaucauuaccaucggcagcgugucccugacaauugccacgaucugcuuccucaugcaaauugcuauccuggucaccacaguuacccuucacuuuaaacaguacgaguguaacucuccuccgaauaaccaggugaugcugugcgaacccacaaucauugagagaaauaucaccgaaauuguguaucucacaaacaccacgaucgagaaggaaauuuguccuaaacuggccgaguaccggaauuggagcaagccccagugcaaaaucaccggguucgcgccuuuuuccaaggacaacucuauucgccuuagcgcuggaggcgauaucugggucacaagagagcccuauguguccugugacccugggaagugcuaccaauucgcccugggacagggcaccacacucaauaaccggcauucuaaugauaccguucacgaccgcacgccguauagaacacugcugaugaacgaacucggggugcccuuucaucugggaaccaaacaggucuguaucgccuggagcuccagcucuugccacgauggcaaggcuuggcuucauguguguguuacaggccacgacgagaaugccaccgcuuccuucauuuacgaugggcggcugguggacagcaucggaucuugguccaaaaacauucuccgcacccaggaaagcgagugcgucuguaucaauggcacaugcacgguggugaugaccgaugggucugccuccgagagagcggacacaaagauucuguuuaucgaagagggaaaaaucguccacauuagcccucuuuccggcucugcccaacauguugaagagugcagcuguuauccccgguacccuggggugcgcugcguguguagagauaacuggaagggauccaaccggcccaucgucgacauuaaugugaaggauuacagcaucguuucuuccuaugugugcagcggccuggucggcgacaccccgcgcaaaaacgacucuagcuccucuagcuacuguagaaauccuaacaaugaaaaggggucccacggagugaaaggcugggcuuucgaugacgggaacgauguuuggaugggacggacaauuagcgaggagcuccgcucuggcuaugaaaccuuuaaggugaucgggggaugguccaaacccaauagcaagcugcagaucaacagacaggucauuguggaccggggcaauagaucuggcuacuccgggaucuucagcgucgagggcaaaaacugcauuaaucgcuguuuuuauguggaacugauccggggaagaaagcaggagacggaaguuugguggacauccaacucuauuguggucuucugcgggaccagcggaaccuacggcacaggguccuggccugauggcgccgacaucaaucucaugcccauuuga

SEQ ID NO: 207302 - RNA, 1410 nt, Artificial Sequence
  derived and/or modified CDS sequence (opt5) from neuraminidase__InfluenzaA__ABG80087
augaaccccaaucagaagaucauuaccaucggcagcgugucccugacaauugccacgaucugcuuccucaugcaaauugcuguccugguuaccacagugacccuucacuuuaaacaguacgaguguaacucuccuccgagcaaucaggugaugcugugcgaacccacaaucaucgagagaaacauuaccgaaaucgucuaucucacaaauaccacgauugagaaggaaaucuguccuaaacuggccgaguaccggaacugguccaagccccagugcaaaauuaccggguucgcgccuuuuucuaaggacaauagcauccgccuuuccgcuggaggcgauauuugggugacaagagagcccuauguuucuugugacccugggaagugcuaccaauucgcccugggacagggcaccacacucaacaaucggcauagcaacgauaccgugcacgaccgcacgccguauagaacacugcugaugaaugaacucgggguccccuuucaucugggaaccaaacagguguguauggccugguccucuagcuccugccacgauggcaaggcuuggcuucauguuugugugacaggccacgacgagaacgccaccgcuagcuucaucuacgaugggcggcuggucgacucuaucggauccuggagcaaaaauauucuccgcacccaggaaucugagugcguguguaucaacggcacaugcacgguggucaugaccgauggguccgccagcgagagagcggacacaaagauucuguuuaucgaagagggaaaaauuguucacaucuccccucuuucuggcagcgcccaacauguggaagagugcuccuguuauccccgguacccuggggugcgcugcgucuguagagauaauuggaagggaagcaaccggcccaucguggacauuaacguuaaggauuacucuaucguguccagcuaugucugcucuggccuggugggcgacaccccgcgcaaaaaugacagcuccucuagcuccuacuguagaaacccuaauaacgaaaaggggagccacggaguuaaaggcugggcuuucgaugacgggaaugauguguggaugggacggacaauuucugaggagcuccgcuccggcuaugaaaccuuuaaggucaucgggggauggagcaaacccaacucuaagcugcagauuaauagacaggugaucgucgaccggggcaacagauccggcuacagcgggaucuucuccguggagggaaaaucuugcauuaaucgcuguuuuuauguugaacugauccggggcagaaagcaggagacggaagugugguggacaagcaacuccauugucguguucugcgggaccucuggaaccuacggcacagggagcuggccugauggcgccgacaucaaucucaugcccauuuga

SEQ ID NO: 207303 - RNA, 1410 nt, Artificial Sequence; identical to SEQ ID NO: 207229
  derived and/or modified CDS sequence (opt5) from neuraminidase__InfluenzaA__ABG80098

SEQ ID NO: 207304 - RNA, 1410 nt, Artificial Sequence; identical to SEQ ID NO: 207173
  derived and/or modified CDS sequence (opt5) from neuraminidase__InfluenzaA__ABG80109

SEQ ID NO: 207305 - RNA, 1410 nt, Artificial Sequence
  derived and/or modified CDS sequence (opt5) from neuraminidase__InfluenzaA__ABG80120
augaaccccaaucagaagaucauuaccaucggcagcgugucccugacaauugccacgaucugcuuccucaugcaaauugcuauccuggucaccacaguuacccuucacuuuaaacaguacgaguguaacucuccuccgagcaaucaggugaugcugugcgaacccacaaucauugagagaaacaucaccgaaauuguguaucucacaaauaccacgaucgagaaggaaauuuguccuaaacuggccgaguaccggaacugguccaagccccagugcaaaaucaccggguucgcgccuuuuucuaaggacaauagcauucgccuuuccgcuggaggcgauaucugggucacaagagagcccuaugugucuugugacccugggaagugcuaccaauucgcccugggacagggcaccacacucaacaaucggcauagcaacgauaccguucacgaccgcacgccguauagaacacugcugaugaaugaacucggggugcccuuucaucugggaaccaaacaggucuguaucgccugguccucuagcuccugccacgauggcaaggcuuggcuucauguguguguuacaggccacgacgagaacgccaccgcuagcuucauuuacgaugggcggcugguggacucuaucggauccuggagcaaaaauauucuccgcacccaggaaucugagugcaucuguauuaacggcacaugcacggucgugaugaccgauggguccgccagcgagagagcggacacaaagauccuguuuaucgaagagggaaaaauugugcacaucuccccucuuucuggcagcgcccaacaugucgaagagugcuccuguuauccccgguacccugggguucgcugcguguguagagauaauuggaagggaagcaaccggcccauuguggacaucaacgucaaggauuacucuauuguguccagcuauguuugcucuggccuggugggcgacaccccgcgcaaaaaugacagcuccucuagcuccuacuguagaaacccuaauaacgaaaaggggagccacggagucaaaggcugggcuuucgaugacgggaaugauguguggaugggacggacaaucucugaggagcuccgcuccggcuaugaaaccuuuaagguuaucgggggauggagcaaacccaacucuaagcugcagauuaauagacaggugaucgucgaccggggcaacagauccggcuacagcgggauuuucuccguggagggaaaaucuugcaucaaucgcuguuuuuaugucgaacugauucggggcagaaagcaggagacggaagugugguggacaagcaacuccaucguuguguucugcgggaccucuggaaccuacggcacagggagcuggccugauggcgccgacauuaaucucaugcccaucuga

SEQ ID NO: 207306 - RNA, 1410 nt, Artificial Sequence
  derived and/or modified CDS sequence (opt5) from neuraminidase__InfluenzaA__ABG80131
augaaccccaaucagaagaucauuaccaucggcagcgugucccugacaauugccacgaucugcuuccucaugcaaauugcuaucauggucaccacaguuacccugcacuuuaaacaguacgaguguaacucuccuccgagcaaucaggugaugcuuugcgaacccacaaucauugagagaaacaucaccgaaauuguguaucugacaaauaccacgaucgagaaggaaauuuguccuaaacucgccgaguaccggaacugguccaagccccagugcaaaaucaccggguucgcgccuuuuucuaaggacaauagcauucgccuguccgcuggaggcgauaucugggucacaagagagcccuaugugucuugugacccugggaagugcuaccaauucgcccuuggacagggcaccacacugaacaaucggcauagcaacgauaccguucacgaccgcacgccguauagaacacuccugaugaaugaacugggggugcccuuucaucucggaaccaaacaggucuguaucgccugguccucuagcuccugccacgauggcaaggcuuggcugcauguguguguuacaggccacgacgagaacgccaccgcuagcuucauuuacgaugggcggcuuguggacucuaucggauccuggagcaaaaauauucugcgcacccaggaaucugagugcgucuguaucaacggcacaugcacgguggugaugaccgauggguccgccagcgagagagcggacacaaagauucucuuuaucgaagagggaaaaaucguccacauuuccccucugucuggcagcgcccaacauguugaagagugcuccuguuauccccgguacccuggggugcgcugcguguguagagauaauuggaagggaagcaaccggcccaucgucgacauuaacgugaaggauuacucuaucguuuccagcuaugugugcucuggccuugucggcgacaccccgcgcaaaaaugacagcuccucuagcuccuacuguagaaacccuaauaacgaaaaggggagccacggagugaaaggcugggcuuucgaugacgggaaugauguuuggaugggacggacaauuucugaggagcugcgcuccggcuaugaaaccuuuaaggugaucgggggauggagcaaacccaacucuaagcuccagaucaauagacaggucauuguggaccggggcaacagauccggcuacagcgggaucuucuccgucgagggaaaaucuugcauuaaucgcuguuuuuauguggaacugauccggggcagaaagcaggagacggaaguuugguggacaagcaacuccauuguggucuucugcgggaccucuggaaccuacggcacagggagcuggccugauggcgccgacaucaaucugaugcccauuuga

SEQ ID NO: 207307 - RNA, 1410 nt, Artificial Sequence; identical to SEQ ID NO: 207173
  derived and/or modified CDS sequence (opt5) from neuraminidase__InfluenzaA__ABG80142

SEQ ID NO: 207308 - RNA, 1410 nt, Artificial Sequence; identical to SEQ ID NO: 207229
  derived and/or modified CDS sequence (opt5) from neuraminidase__InfluenzaA__ABG80153

SEQ ID NO: 207309 - RNA, 1410 nt, Artificial Sequence; identical to SEQ ID NO: 207173
  derived and/or modified CDS sequence (opt5) from neuraminidase__InfluenzaA__ABG80164

SEQ ID NO: 207310 - RNA, 1413 nt, Artificial Sequence; identical to SEQ ID NO: 206900
  derived and/or modified CDS sequence (opt5) from neuraminidase__InfluenzaA__ABG80186

SEQ ID NO: 207311 - RNA, 1410 nt, Artificial Sequence; identical to SEQ ID NO: 206133
  derived and/or modified CDS sequence (opt5) from neuraminidase__InfluenzaA__ABG80197

SEQ ID NO: 207312 - RNA, 1410 nt, Artificial Sequence; identical to SEQ ID NO: 206325
  derived and/or modified CDS sequence (opt5) from neuraminidase__InfluenzaA__ABG80219

SEQ ID NO: 207313 - RNA, 1410 nt, Artificial Sequence
  derived and/or modified CDS sequence (opt5) from neuraminidase__InfluenzaA__ABG80230
augaaccccaaucagaagaucauuaccaucggcagcgugucccugacaauugccacgaucugcuuccucaugcaaauugcuauccuggucaccacaguuacccuucacuuuaaacaguacgaguguaacucuccuccgaauaaccaggugaugcugugcgaacccacaaucauugagagaaauaucaccgaaauuguguaucucacaaacaccacgaucgagaaggaaauuuguccuaaacuggccgaguaccggaauuggagcaagccccagugcaacaucaccggguucgcgccuuuuuccaaagacaauucuauucgccuuagcgcuggaggcgauaucugggucacaagagagcccuauguguccugugacccugauaagugcuaccaauucgcccuggggcagggaaccacacucaacaauggccauucuaacgacaccguucacgaucggacgccguaucgcacacugcugaugaaugaacucggggugcccuuucaucugggaaccagacaggucuguaucgccuggagcuccagcucuugccacgacggcaaggcuuggcuucauguguguguuacaggcgaugacgagaacgccaccgcuuccuucauuuacaaugggcggcugguggauagcaucggaucuugguccaaaaacauucuccgcacccaggaaagcgagugcgucuguaucaacggcacaugcacgguggugaugaccgacgggucugccuccggaaaggcggauacaaaaauucuguuuaucgaggaaggcaagaucguccacauuagcacccuuuccgagucugcccaacacguugaagagugcagcuguuauccuagauaccccggggugcggugcgugugucgcgacaauuggaaaggauccaacagaccuaucgucgauauuaaugugaaggacuacagcaucguuucuuccuaugugugcagcggccuggucggcgacacaccccggaagaacgauucuuucagcuccucucauugucucgacccgaauaacgaagaagggggacacggcgugaaagggugggcuuuugaugacggaaaugauguuuggaugggccgcaccauuagcgagaagcugagauccggguacgagacguucaaagugaucgagggauggagcaagccuaacucuaaacugcagacaaaucggcaggucaucguggaacgcggcaacagauccggcuauagcgggaucuuuucugucgagggaaaguccugcauuaaucgguguuucuacguggaacucauuagaggccgcaaagaggagaccgaaguuugguggaccagcaacuccaucguggucuuuugcgggacaucuggaaccuauggcacagggagcuggcccgacggcgccgauauuaaucugaugccuaucuga

SEQ ID NO: 207314 - RNA, 1410 nt, Artificial Sequence; identical to SEQ ID NO: 206663
  derived and/or modified CDS sequence (opt5) from neuraminidase__InfluenzaA__ABG80241

SEQ ID NO: 207315 - RNA, 1410 nt, Artificial Sequence; identical to SEQ ID NO: 206663
  derived and/or modified CDS sequence (opt5) from neuraminidase__InfluenzaA__ABG80252

SEQ ID NO: 207316 - RNA, 1410 nt, Artificial Sequence; identical to SEQ ID NO: 207247
  derived and/or modified CDS sequence (opt5) from neuraminidase__InfluenzaA__ABG80263

SEQ ID NO: 207317 - RNA, 1410 nt, Artificial Sequence; identical to SEQ ID NO: 206808
  derived and/or modified CDS sequence (opt5) from neuraminidase__InfluenzaA__ABG80274

SEQ ID NO: 207318 - RNA, 1410 nt, Artificial Sequence; identical to SEQ ID NO: 206399
  derived and/or modified CDS sequence (opt5) from neuraminidase__InfluenzaA__ABG80285

SEQ ID NO: 207319 - RNA, 1410 nt, Artificial Sequence; identical to SEQ ID NO: 206399
  derived and/or modified CDS sequence (opt5) from neuraminidase__InfluenzaA__ABG80296

SEQ ID NO: 207320 - RNA, 1410 nt, Artificial Sequence; identical to SEQ ID NO: 206399
  derived and/or modified CDS sequence (opt5) from neuraminidase__InfluenzaA__ABG80307

SEQ ID NO: 207321 - RNA, 1410 nt, Artificial Sequence; identical to SEQ ID NO: 206786
  derived and/or modified CDS sequence (opt5) from neuraminidase__InfluenzaA__ABG80318

SEQ ID NO: 207322 - RNA, 1410 nt, Artificial Sequence; identical to SEQ ID NO: 206399
  derived and/or modified CDS sequence (opt5) from neuraminidase__InfluenzaA__ABG80329

SEQ ID NO: 207323 - RNA, 1410 nt, Artificial Sequence; identical to SEQ ID NO: 206399
  derived and/or modified CDS sequence (opt5) from neuraminidase__InfluenzaA__ABG80340

SEQ ID NO: 207324 - RNA, 1410 nt, Artificial Sequence; identical to SEQ ID NO: 207257
  derived and/or modified CDS sequence (opt5) from neuraminidase__InfluenzaA__ABG80351

SEQ ID NO: 207325 - RNA, 1410 nt, Artificial Sequence
  derived and/or modified CDS sequence (opt5) from neuraminidase__InfluenzaA__ABG80373
augaaccccaaucagaagaucauuaccaucggcagcgugucccugacaauugccacgaucugcuuccucaugcaaauugcuauccuggucaccacaguuacccuucacuuuaaacaguacgaguguaacucuccuccgaauaaccaggugaugcugugcgaacccacaaucauugagagaaauaucaccgaaauuguguaucucacaaacaccacgaucgagaaggaaauuuguccuaaacuggccgaguaccggaauuggagcaagccccagugcaaaaucaccggguucgcgccuuuuuccaaggacaacucuauucgccuuagcgcuggaggcgauaucugggucacaagagagcccuauguguccugugacccugggaagugcuaccaauucgcccugggacagggcaccacacucaauaaccggcauucuaaugauaccguucacgaccgcacgccguauagaacacugcugaugaacgaacucggggugcccuuucaucugggaaccaaacaggucuguaucgccuggagcuccagcucuugccacgauggcaaggcuuggcuucauguguguguuacaggccacgacgagaaugccaccgcuuccuucauuuacgaugggcggcugguggacagcaucggaucuugguccaaaaacauucuccgcacccaggaaagcgagugcgucuguaucaauggcacaugcacgguggugaugaccgaugggucugccuccgagagagcggacacaaagauucuguuuaucgaagagggaaaaaucguccacauuagcccucuuuccggcucugcccaacauguugaagagugcagcuguuauccccgguacccuggggugcgcugcguguguagagauaacuggaagggauccaaccggcccaucgucgacauuaaugugaaggaucacagcaucguuucuuccuacgugugcagcggccuggucggcgacaccccgcgcaaaaacgacucuagcuccucuagcuauuguagaaauccuaacaaugaaaaggggucccauggagugaaaggcugggcuuucgaugacgggaacgauguuuggaugggacggacaauuagcgaggagcuccgcucuggcuacgaaaccuuuaaggugaucgggggaugguccaaacccaauagcaagcugcagaucaacagacaggucauuguggaccggggcaauagaucuggcuauuccgggaucuucagcgucgagggaaaauccugcauuaaccgcuguuuuuacguggaacugauccggggcagaaagcaggagacggaaguuugguggacaucuaauagcauuguggucuucugcgggaccuccggaaccuauggcacagggucuuggccugauggcgccgacaucaaccucaugcccauuuga

SEQ ID NO: 207326 - RNA, 1410 nt, Artificial Sequence; identical to SEQ ID NO: 207325
  derived and/or modified CDS sequence (opt5) from neuraminidase__InfluenzaA__ABG80384

SEQ ID NO: 207327 - RNA, 1410 nt, Artificial Sequence
  derived and/or modified CDS sequence (opt5) from neuraminidase__InfluenzaA__ABG80395
augaaccccaaucagaagaucauuaccaucggcagcgugucccugacaauugccacgaucugcuuccucaugcaaauugcuauccuggucaccacaguuacccuucacuuuaaacaguacgaguguaacucuccuccgaauaaccaggugaugcugugcgaacccacaaucauugagagaaauaucaccgaaauuguguaucucacaaacaccacgaucgagaaggaaauuuguccuaaacuggccgaguaccggaauuggagcaagccccagugcaaaaucaccggguucgcgccuuuuuccaaggacaacucuauucgccuuagcgcuggaggcgauaucugggucacaagagagcccuauguguccugugacccugggaagugcuaccaauucgcccugggacagggcaccacacucaauaaccggcauucuaaugauaccguucacgaccgcacgccguauagaacacugcugaugaacgaacucggggugcccuuucaucugggaaccaaacaggucuguaucgccuggagcuccagcucuugccacgauggcaaggcuuggcuucauguguguguuacaggccacgacgagaaugccaccgcuuccuucauuuacgaugggcggcugguggacagcaucggaucuugguccaaaaacauucuccgcacccaggaaagcgagugcgucuguaucaauggcacaugcacgguggugaugaccgaugggucugccuccaagagagcggacacaaaaauucuguuuaucgaggaaggaaagaucguccacauuagcccucuuuccggcucugcccaacauguugaggaaugcagcuguuauccccgguacccuggggugcgcugcguguguagagauaacuggaagggauccaaccggcccaucgucgacauuaaugugaaagauuacagcaucguuucuuccuaugugugcagcggccuggucggcgacaccccgcgcaagaacgacucuagcuccucuagcuacuguagaaauccuaacaaugagaaagggucccacggagugaagggcugggcuuucgaugacgggaacgauguuuggaugggacggacaauuagcgaggaacuccgcucuggcuaugagaccuuuaaagugaucgggggaugguccaagcccaauagcaaacugcagaucaacagacaggucauuguggaccggggcaauaugucuggcuacuccgggaucuucagcgucgaaggaaaguccugcauuaacagauguuuuuauguggagcugauccgcggccggaagcaggaaacggagguuugguggacaucuaauagcauuguggucuucugcgggaccuccggaaccuacggcacagggucuuggccugauggcgccgacaucaaccucaugcccauuuga

SEQ ID NO: 207328 - RNA, 1410 nt, Artificial Sequence; identical to SEQ ID NO: 207257
  derived and/or modified CDS sequence (opt5) from neuraminidase__InfluenzaA__ABG80406

SEQ ID NO: 207329 - RNA, 1410 nt, Artificial Sequence; identical to SEQ ID NO: 207257
  derived and/or modified CDS sequence (opt5) from neuraminidase__InfluenzaA__ABG80417

SEQ ID NO: 207330 - RNA, 1410 nt, Artificial Sequence; identical to SEQ ID NO: 207257
  derived and/or modified CDS sequence (opt5) from neuraminidase__InfluenzaA__ABG80428

SEQ ID NO: 207331 - RNA, 1410 nt, Artificial Sequence; identical to SEQ ID NO: 206198
  derived and/or modified CDS sequence (opt5) from neuraminidase__InfluenzaA__ABG88292

SEQ ID NO: 207332 - RNA, 1413 nt, Artificial Sequence; identical to SEQ ID NO: 207122
  derived and/or modified CDS sequence (opt5) from neuraminidase__InfluenzaA__ABG88314

SEQ ID NO: 207333 - RNA, 1413 nt, Artificial Sequence
  derived and/or modified CDS sequence (opt5) from neuraminidase__InfluenzaA__ABG88325
augaaccccaaucagaagaucauuaccaucggcagcacauccauugccaucgggauuaucucucugauccuccaaauuggaaacaucauuagcaucugggcuucccacucuauucagacgggcagccagaaucauaccgggaucugcaaccagagaauuaucacauacgaaaauuccaccugggugaaccaaacauaugucaauaucaacaauaccucuguuguggccggaaaagacaagacaagcaugacccuggcgggcaacuccagccuuuguccuauucgggggugggcuaucuacacgaaagauaauucuauucgcaucggauccaagggcgacguguucgucauuagagagccguuuaucagcugcucucaccuggagugucggaccuucuuucucacacagggcgcccugcuuaacgauaaacauuccaaugggaccgugaaggaccgcagccccuauagagcccugaugucuugcccucucggagaagcucccuccccuuacaacagccgguucgaguccguugccuggucugcuagcgccugucacgauggccugggguggcugacaaucggaauuuccggccccgacaauggggcgguggccguccucaaguauaacggaaucauuaccgaaacgaucaaaagcuggaagaaacgcauucugagaacacaggagucugagugcguguguaugaacggcuccugcuuuaccaucaugacagauggcccuagcaauggggcugccucuuaccggaucuucaagauugaaaaaggacgcguuaccaagagcaucgagcuugacgcuccgaacuaucauuacgaagaguguuccugcuaccccgauaccggcacagugaugugugucugcagagacaauuggcacgggucuaaccggccuugggugagcuuuaaucagaaccuggauuaucaaacgggauacauuugcuccggcguguucggggacaauccccgcccuaaggauggagagggcagcuguaaccccgucaccgccgacggcgcggacgggguuaaaggauuuucuuauagauacggcaaugggguguggaucggacggacaaaguccaaccgccucagaaaaggcuucgaaaugauuugggauccgaauggguggaccgacacagauagcgacuuuucuaugaagcaggauaucguggccaugaccgacugguccggcuauagcggauccuucguccagcacccugagcugacgggccuugauugcaugcggcccuguuuuuggguggaacugguuagagggcucccucgcgagaacacaaccauuuggaccucuggaagcuccaucucuuucugcggcgugaauagcgacacagcuaacugguccuggcccgauggggccgaacugcccuucaccaucgacaaauga

SEQ ID NO: 207334 - RNA, 1413 nt, Artificial Sequence
  derived and/or modified CDS sequence (opt5) from neuraminidase__InfluenzaA__ABG88336
augaaccccaaucagaagaucauuaccaucggcagcauuugcauggccaucgggauuaucucccugauccuccaaauuggaaacaucauuucuaucugggugagccacuccauucagacaggcaaucagaaccauacggggaucuguaaucagagaauuaucaccuacgagaacucuacaugggucaaucaaaccuauguuaacaucaauaacacaaaugugguggcuggaaaagacaccacaagcgucacccuggccggcaacuccucucuuugcccugugcgggggugggcgauuuacagcaaggauaauuccauccgcauuggaagcaaaggcgacguuuucgugaucagagaaccguuuauuucuuguucccaccuggagugccggacguucuuucucacccagggcgcucugcuuaacgauaagcauagcaaugggacagucaaagaccgcucucccuauagagcccugauguccuguccuaucggagaagcccccagcccuuacaacucucgguucgaguccguggcuuggagcgccuccgcuugccacgauggcaugggguggcucaccaucggaauuucuggccccgacgauggggccguugcggugcugaaguauaacggaaucauuacagaaaccaucaagagcuggcgcaaacggauucugagaacgcaggaguccgagugugucugcgugaauggcagcuguuuuacaaucaugaccgacggcccuucuaacgggccggccuccuacaagaucuucaaaauugaaaagggaaaaaucacaaagagcauugagcucgaugcucccaauucucauuaugaagagugcagcuguuacccugacaccggcaccgugaugugcgucugccgcgauaacuggcacggguccaauagacccuggguuucuuuuaaccagaaucuggacuaccaacuuggauauaucuguagcggcauuuucggggauaacccucggcccaaggacggaaaaggcuccugcggcccggugacaguggacggggccgauggagucaagggcuuuagcuaccgcuaugggaauggaguguggaucggcagaacgaaaucuaacuccagccggaagggguucgagaugauuugggacccuaauggcuggaccgauacagacucuaacuuucugguuaaacaggauguggucgcuaugaccgacugguccggauacagcggcuccuucgugcagcaccccgaacucacagggcuggauuguaugcgcccuugcuuuuggguugagcuuaucagaggacggcccagagaaaccacgacaaucuggaccucuggcagcuccauuucuuucuguggggugaauagcgacaccgucaacugguccuggcccgauggagccgagcugccuuucacaaucgacaaguga

SEQ ID NO: 207335 - RNA, 1413 nt, Artificial Sequence
  derived and/or modified CDS sequence (opt5) from neuraminidase__InfluenzaA__ABG88347
augaaccccaaucagaagaucauuaccaucggcagcauuugcauggccaucgggauuaucggacugauccuccaaauuggcaacaucauuuccaucugggugucucacagcauucagacagggucccagaaucauacgggaaucuguaaccagagaauuaucaccuacgaaaauucuacaugggucaaccaaaccuauguuaauaucaacaauacaaacgugguggcuggcaaagacaccacaagcgucacccuggccggaaauuccucucuuugcccugugcgggggugggcgauuuacagcaaggauaacuccauccgcauuggcagcaaaggcgacguuuucgugaucagagagccguuuauuucuuguucccaccuggagugccggacguucuuucucacccagggggcucugcuuaaugauaagcauagcaacggaacagucaaagaccgcucucccuauagagcccugauguccuguccuaucggcgaagcccccagcccuuacaauucucgguucgaguccguggcuuggagcgccuccgcuugccacgaugggaugggauggcucaccaucggcauuucugggcccgacgauggagccguugcggugcugaaguauaacggcaucauuacagaaaccaucaagagcuggcgcaaacggauucugagaacgcaggaguccgagugugucugcgugaacggcagcuguuuuacaaucaugaccgacgggccuucuaauggaccggccuccuacaagaucuucaaaauugaaaagggcaaaaucacaaagagcauugagcucgaugcucccaacucucauuaugaagagugcagcuguuacccugacaccgggaccgugaugugcgucugccgcgauaauuggcacggauccaacagacccuggguuucuuuuaaucagaaccuggacuaccaacuuggcuauaucuguagcgggauuuucggagauaauccucggcccaaggacggcaaaggcuccugcgggccggugacaguggacggagccgauggcgucaagggguuuagcuaccgcuauggaaacggcguguggaucgggagaacgaaaucuaauuccagccggaagggcuucgagaugauuugggacccuaacggauggaccgauacagacucuaauuuucugguuaaacaggauguggucgcuaugaccgacugguccggcuacagcggguccuucgugcagcaccccgaacucacaggacuggauuguaugcgcccuugcuuuuggguugagcuuaucagaggccggcccagagaaaccacgacaaucuggaccucugggagcuccauuucuuucuguggagugaacagcgacaccgucaauugguccuggcccgauggcgccgagcugccuuucacaaucgacaaguga

SEQ ID NO: 207336 - RNA, 1410 nt, Artificial Sequence
  derived and/or modified CDS sequence (opt5) from neuraminidase__InfluenzaA__ABG88358
augaaccccaaucagaagaucauuaccaucggcagcgugucccugacaauugccacgaucugcuuccucaugcaaauugcuauccuggucaccacaguuacccuucacuuuaaacaguacgaguguaacucuccuccgaauaaccaggugaugcugugcgaacccacaaucauugagagaaauaucaccgaaauuguguaucucacaaacaccacgaucgagaaggaaauuuguccuaaacuggccgaguaccggaauuggagcaagccccagugcaaaaucaccggguucgcgccuuuuuccaaggacaacucuauucgccuuagcgcuggaggcgauaucugggucacaagagagcccuauguguccugugacccugggaagugcuaccaauucgcccugggacagggcaccacacucaauaaccggcauucuaaugauaccguucacgaccgcacgccguauagaacacugcugaugaacgaacucggggugcccuuucaucugggaaccaaacaggucuguaucgccuggagcuccagcucuugccacgauggcaaggcuuggcuucauguguguguuacaggccacgacaaaaaugccaccgcuuccuucauuuacgaugggcggcugguggacagcaucggaucuugguccaagaacauucuccgcacccaggagagcgaaugcgucuguaucaauggcacaugcacgguggugaugaccgaugggucugccuccgacagagcggauacaaaaauucuguuuaucgaggagggaaagaucguccacauucggccucuuagcggcuccgcccaacauguugaagagugcucuuguuauccccgcuacccuggggugagaugcgugugucgggacaacuggaagggaagcaaccgccccaucgucgauauuaaugugaaagacuacuccaucguuagcucuuaugugugcuccggccuggucggcgacaccccgagaaagaacgauagcucuagcuccucuuacuguuggaauccuaacaaugaaaaagggggacacggcgugaaggggugggcuuucgacgauggaaacgacguuuggaugggccggacaauuagcgaggaaucccgcagcggguaugagaccuuuaaagugaucggaggcuggucuaagcccaauuccaaacuccagaucaacagacaggucauuguggaucggggcaauagaagcggguacucuggaaucuucuccgucgagggcaagagcugcauuaaccgcuguuuuuauguggaacugauccgggggagaaagcaggagacggaaguuugguggacauccaauucuauuguggucuucugcggaaccagcggcaccuacgggacaggcuccuggccugacggagccgauaucaaccugaugcccauuuga

SEQ ID NO: 207337 - RNA, 1410 nt, Artificial Sequence; identical to SEQ ID NO: 207185
  derived and/or modified CDS sequence (opt5) from neuraminidase__InfluenzaA__ABG88369

SEQ ID NO: 207338 - RNA, 1410 nt, Artificial Sequence; identical to SEQ ID NO: 207185
  derived and/or modified CDS sequence (opt5) from neuraminidase__InfluenzaA__ABG88380

SEQ ID NO: 207339 - RNA, 1410 nt, Artificial Sequence; identical to SEQ ID NO: 207185
  derived and/or modified CDS sequence (opt5) from neuraminidase__InfluenzaA__ABG88391

SEQ ID NO: 207340 - RNA, 1410 nt, Artificial Sequence; identical to SEQ ID NO: 207172
  derived and/or modified CDS sequence (opt5) from neuraminidase__InfluenzaA__ABG88402

SEQ ID NO: 207341 - RNA, 1410 nt, Artificial Sequence; identical to SEQ ID NO: 207229
  derived and/or modified CDS sequence (opt5) from neuraminidase__InfluenzaA__ABG88413

SEQ ID NO: 207342 - RNA, 1410 nt, Artificial Sequence; identical to SEQ ID NO: 207173
  derived and/or modified CDS sequence (opt5) from neuraminidase__InfluenzaA__ABG88424

SEQ ID NO: 207343 - RNA, 1410 nt, Artificial Sequence; identical to SEQ ID NO: 207173
  derived and/or modified CDS sequence (opt5) from neuraminidase__InfluenzaA__ABG88435

SEQ ID NO: 207344 - RNA, 1410 nt, Artificial Sequence; identical to SEQ ID NO: 207173
  derived and/or modified CDS sequence (opt5) from neuraminidase__InfluenzaA__ABG88446

SEQ ID NO: 207345 - RNA, 1410 nt, Artificial Sequence
  derived and/or modified CDS sequence (opt5) from neuraminidase__InfluenzaA__ABG88457
augaaccccaaucagaagaucauuaccaucggcagcgugucccugacaacggccaccauuugcuuccucaugcaaaucgcuauucuggucacaaccguuacacuucacuuuaaacaguacgaguguaacucuccuccgaauaaccaggugaugcugugcgaacccaccaucaucgagagaaauauuacagaaaucguguaucucaccaacacgaccauugagaaggaaaucuguccuaaacuggccgaguaccggaauuggagcaagccccagugcaaaauuacaggguucgcgccuuuuuccaaggacaacucuauccgccuuagcgcuggaggcgauauuugggucaccagagagcccuauguguccugugacccugggaagugcuaccaauucgcccugggacagggcacaacccucaauaaccggcauucuaaugauacgguucacgaccgcacaccguauagaacccugcugaugaacgaacucggggugcccuuucaucugggaacaaaacaggucuguaucgccuggagcuccagcucuugccacgauggcaaggcuuggcuucauguguguguuaccggccacgacgagaaugccaccgcuuccuucaucuacgaugggcggcugguggacagcauuggaucuugguccaaaaacauccuccgcacacaggaaagcgagugcgucuguauuaauggcacgugcaccguggugaugacagaugggucugccuccgagagagcggacaccaagauccuguuuauuaaagaaggaaagaucguccacaucagcccucuuuccggcucugcccaacauguugaggaaugcagcuguuauccccgguacccuggggugcgcugcguguguagagauaacuggaagggauccaaccggcccauugucgacaucaaugugaaagauuacagcauuguuucuuccuaugugugcagcggccuggucggcgacacaccgcgcaagaacgacucuagcuccucuagcuacugucagaauccuaacaaugagaaagggucccacggagugaagggcugggcuuucgaugacgggaacgauguuuggaugggaagaaccaucagcgaggaacuccggucuggcuaugagacguuuaaagugauugggggaugguccaagcccaauagcaaacugcagaucaaccgccaggucaucguggacagaggcaaucggucuggcuacuccgggauuuucagcgucgaaggaaaguccugcaucaacagauguuuuuauguggagcugauucgcggccggaagcaagaaacagagguuugguggaccucuaauagcaucguggucuucugcgggaccuccggaacauacggcaccgggucuuggccugauggcgccgacauuaaccucaugcccaucuga

SEQ ID NO: 207346 - RNA, 1410 nt, Artificial Sequence; identical to SEQ ID NO: 207173
  derived and/or modified CDS sequence (opt5) from neuraminidase__InfluenzaA__ABG88468

SEQ ID NO: 207347 - RNA, 1410 nt, Artificial Sequence; identical to SEQ ID NO: 207173
  derived and/or modified CDS sequence (opt5) from neuraminidase__InfluenzaA__ABG88479

SEQ ID NO: 207348 - RNA, 1410 nt, Artificial Sequence; identical to SEQ ID NO: 207173
  derived and/or modified CDS sequence (opt5) from neuraminidase__InfluenzaA__ABG88490

SEQ ID NO: 207349 - RNA, 1410 nt, Artificial Sequence; identical to SEQ ID NO: 207173
  derived and/or modified CDS sequence (opt5) from neuraminidase__InfluenzaA__ABG88501

SEQ ID NO: 207350 - RNA, 1410 nt, Artificial Sequence; identical to SEQ ID NO: 207173
  derived and/or modified CDS sequence (opt5) from neuraminidase__InfluenzaA__ABG88512

SEQ ID NO: 207351 - RNA, 1410 nt, Artificial Sequence; identical to SEQ ID NO: 207173
  derived and/or modified CDS sequence (opt5) from neuraminidase__InfluenzaA__ABG88523

SEQ ID NO: 207352 - RNA, 1410 nt, Artificial Sequence
  derived and/or modified CDS sequence (opt5) from neuraminidase__InfluenzaA__ABG88534
augaaccccaaucagaagaucauuaccaucggcagcgugucccugacaauugccacgaucugcuuccucaugcaaauugcuauccuggucaccacaguuacccuucacuuuaaacaguacgaguguaacucuccuccgagcaaucaggugaugcugugcgaacccacaaucauugagagaaacaucaccgaaauuguguaucucacaaauaccacgaucgagaaggaaauuuguccuaaacuggccgaguaccggaacugguccaagccccagugcaaaaucaccggguucgcgccuuuuucuaaggacaauagcauucgccuuuccgcuggaggcgauaucugggucacaagagagcccuaugugucuugugacccugggaagugcuaccaauucgcccugggacagggcaccacacucaacaaucggcauagcaacgauaccguucacgaccgcacgccguauagaacacugcugaugaaugaacucggggugcccuuucaucugggaaccaaacaggucuguaucgccugguccucuagcuccugccacgauggcaaggcuuggcuucauguguguguuacaggccacgacgagaacgccaccgcuagcuucauuuacgaugggcggcugguggacucuaucggauccuggagcaaaaauauucuccgcacccaggaaucugagugcgucuguaucaacggcacaugcacgguggugaugaccgauggguccgccagcgagagagcggacacaaagauucuguuuaucgaagagggaaaaaucguccacauuuccccucuuucuggcagcgcccaacauguugaagagugcuccuguuauccccgguacccuggggugcgcugcguguguagagauaauuggaagggaagcaaccggcccaucgucgacauuaacgugaaggauuacucuaucguuuccagcuaugugugcucuggccuggucggcgacaccccgcgcaaaaaugacagcuccucuagcuccuacuguagaaacccuaauaacgaaaaggggagccacggagugaaaggcugggcuuucgaugacgggaaugauguuuggaugggacggacaauuucugaggagcuccgcuccggcuaugaaaccuuuaaggugaucgggggauggagcaaacccaacucuaagcugcagaucaauagacaggucauuguggaccggggcaacagauccggcuacagcgggaucuucuccgucgagaauaaaucuugcauuaaccgcuguuuuuauguggaacugauccggggaagaaagcaggagacggaaguuugguggacaagcaauuccauuguggucuucugcggcaccucugggaccuacggaacaggcagcuggccugauggggccgacaucaaccucaugcccauuuga

SEQ ID NO: 207353 - RNA, 1410 nt, Artificial Sequence; identical to SEQ ID NO: 206865
  derived and/or modified CDS sequence (opt5) from neuraminidase__InfluenzaA__ABG88567

SEQ ID NO: 207354 - RNA, 1410 nt, Artificial Sequence
  derived and/or modified CDS sequence (opt5) from neuraminidase__InfluenzaA__ABG88600
augaaccccaaucagaagaucauuaccaucggcagcgugucccugacaauugccacgaucugcuuccucaugcaaauugcuauccuggucaccacaguuacccuucacuuuaaacaguacgaguguaacucuccuccgaauaaccaggugaugcugugcgaacccacaaucauugagagaaauaucaccgaaauuguguaucucacaaacaccacgaucgagaaggaaauuuguccuaaacccgccgaguaccggaauuggagcaagccucagugcaacaucaccggguucgcgcccuuuuccaaagacaauucuauucgccugagcgcuggaggcgauaucugggucacaagagagccuuauguguccugugacccggauaagugcuaccaauucgcccuugggcagggaaccacacugaacaauggccauucuaacgacaccguucacgaucggacgcccuaucgcacacuccugaugaaugaacugggggugccuuuucaucucggaaccaagcaggucuguaucgccuggagcuccagcucuugccacgacggcaaagccuggcugcauguguguguuacaggcgaugacgagaacgcuaccgcuuccuucauuuacaaugggagacuuguggauagcaucggaucuugguccaagaaaauucugcggacccaggaaagcgagugcgucuguaucaacggcacaugcacgguggugaugaccgacgggucugccuccggaaaggcggauacaaaaauucucuuuaucgaggaaggcaagaucguccacaccagccugcuuuccgggucugcccaacacguugaggaaugcagcuguuauccccgcuacccuggagugagaugcgugugucgggacaacuggaagggcuccaaucgccccauugucgauaucaacgugaaagacuacagcauuguuucuuccuaugugugcagcggccuggucggggacacaccgagaaagaaugauucuagcuccucuagccauugucucgacccuaacaaugaggaaggaggccacggggugaaaggaugggcuuucgaugacggcaacgauguuuggauggggcggaccaucuccgagaagcugcgcagcggauacgagacguuuaaagugauugaaggcuggucuaagcccaauuccaaacugcagaucaacagacaggucaucguggaccggggcaaucgcagcggguauucuggaauuuucuccgucgagggcaagagcugcaucaacagauguuuuuacguggaacucauucgggggagaaagcaggagacagaaguucuguggaccuccaauucuaucguggucuucugcggaaccagcggcacauaugggaccggcuccuggccugauggagccgacauuaaccuuaugcccaucuga

SEQ ID NO: 207355 - RNA, 1410 nt, Artificial Sequence; identical to SEQ ID NO: 206226
  derived and/or modified CDS sequence (opt5) from neuraminidase__InfluenzaA__ABG88611

SEQ ID NO: 207356 - RNA, 1410 nt, Artificial Sequence; identical to SEQ ID NO: 206238
  derived and/or modified CDS sequence (opt5) from neuraminidase__InfluenzaA__ABG88622

SEQ ID NO: 207357 - RNA, 1410 nt, Artificial Sequence; identical to SEQ ID NO: 206226
  derived and/or modified CDS sequence (opt5) from neuraminidase__InfluenzaA__ABG88633

SEQ ID NO: 207358 - RNA, 1410 nt, Artificial Sequence; identical to SEQ ID NO: 207277
  derived and/or modified CDS sequence (opt5) from neuraminidase__InfluenzaA__ABG88655

SEQ ID NO: 207359 - RNA, 1410 nt, Artificial Sequence; identical to SEQ ID NO: 207277
  derived and/or modified CDS sequence (opt5) from neuraminidase__InfluenzaA__ABG88666

SEQ ID NO: 207360 - RNA, 1410 nt, Artificial Sequence; identical to SEQ ID NO: 206663
  derived and/or modified CDS sequence (opt5) from neuraminidase__InfluenzaA__ABG88677

SEQ ID NO: 207361 - RNA, 1410 nt, Artificial Sequence; identical to SEQ ID NO: 207277
  derived and/or modified CDS sequence (opt5) from neuraminidase__InfluenzaA__ABG88688

SEQ ID NO: 207362 - RNA, 1410 nt, Artificial Sequence; identical to SEQ ID NO: 206663
  derived and/or modified CDS sequence (opt5) from neuraminidase__InfluenzaA__ABG88699

SEQ ID NO: 207363 - RNA, 1410 nt, Artificial Sequence; identical to SEQ ID NO: 206399
  derived and/or modified CDS sequence (opt5) from neuraminidase__InfluenzaA__ABG88710

SEQ ID NO: 207364 - RNA, 1410 nt, Artificial Sequence; identical to SEQ ID NO: 206399
  derived and/or modified CDS sequence (opt5) from neuraminidase__InfluenzaA__ABG88721

SEQ ID NO: 207365 - RNA, 1410 nt, Artificial Sequence
  derived and/or modified CDS sequence (opt5) from neuraminidase__InfluenzaA__ABG88732
augaaccccaaucagaagaucauuaccaucggcagcgugucccugacaauugccacgaucugcuuccucaugcaaauugcuauccuggucaccacaguuacccuucacuuuaaacaguacgaguguaacucuccuccgaauaaccaggugaugcugugcgaacccacaaucauugagagaaauaucaccgaaauuguguaucucacaaacaccacgaucgagaaggaaauuuguccuaaacuggccgaguaccggaauuggagcaagccccagugcaaaaucaccggguucgcgccuuuuuccaaggacaacucuauucgccuuagcgcuggaggcgauaucugggucacaagagagcccuauguguccugugacccugggaagugcuaccaauucgcccugggacagggcaccacacucaauaaccggcauucuaaugauaccguucacgaccgcacgccguauagaacacugcugaugaacgaacucggggugcccuuucaucugggaaccaaacaggucuguaucgccuggagcuccagcucuugccacgauggcaaggcuuggcuucauguguguguuacaggccacgacgagaaugccaccgcuuccuucauuuacgaugggcggcugguggacagcaucggaucuugguccaaaaacauucuccgcacccaggaaagcgagugcgucuguaucaauggcacaugcacgguggugaugaccgaugggucugccuccgagagagcggacacaaagauucuguuuaucgaagagggaaaaaucguccacauuagcccucuuuccggcucugcccaacauguugaagagugcagcuguuauccccgguacccuggggugcgcugcguguguagagauaacuggaagggauccaaccggcccaucgucgacauuaaugugaaggauuacagcaucguuucuuccuaugugugcagcggccuggucggcgacaccccgcgcaaaaacgacucuagcuccucuagcuacuguagaaauccuaacaaugaaaaggggucccacggagugaaaggcugggcuuucgaugacgggaacgauguuuggaugggacggacaauuagcgaggagcuccgcucuggcuaugaaaccuuuaaggugaucgggggaugguccaaacccaauagcaagcugcagaucaacagacaggucauuguggagcggggcaauagaucuggcuacuccgggaucuucagcgucgaaggaaaauccugcauuaaccgcuguuuuuauguggagcugauccggggcagaaagcaggaaacggagguuugguggacaucuaauagcauuguggucuucugcgggaccuccggaaccuacggcacagggucuuggccugacggcgccgauaucaaccucaugcccauuuga

SEQ ID NO: 207366 - RNA, 1410 nt, Artificial Sequence; identical to SEQ ID NO: 207325
  derived and/or modified CDS sequence (opt5) from neuraminidase__InfluenzaA__ABG88743

SEQ ID NO: 207367 - RNA, 1410 nt, Artificial Sequence; identical to SEQ ID NO: 207325
  derived and/or modified CDS sequence (opt5) from neuraminidase__InfluenzaA__ABG88754

SEQ ID NO: 207368 - RNA, 1410 nt, Artificial Sequence; identical to SEQ ID NO: 206591
  derived and/or modified CDS sequence (opt5) from neuraminidase__InfluenzaA__ABG88765

SEQ ID NO: 207369 - RNA, 1410 nt, Artificial Sequence; identical to SEQ ID NO: 207257
  derived and/or modified CDS sequence (opt5) from neuraminidase__InfluenzaA__ABG88776

SEQ ID NO: 207370 - RNA, 1410 nt, Artificial Sequence; identical to SEQ ID NO: 207257
  derived and/or modified CDS sequence (opt5) from neuraminidase__InfluenzaA__ABG88787

SEQ ID NO: 207371 - RNA, 1410 nt, Artificial Sequence
  derived and/or modified CDS sequence (opt5) from neuraminidase__InfluenzaA__ABG88820
augaaccccaaucagaagaucauuaccaucggcagcgugucccugacaauuucuacgaucugcuucuuuaugcaaauugccauccucaucaccacagucacccugcacuucaaacaguacgaguuuaacagcccuccgaauaaccagguuaugcuuugugaacccacaauuaucgagagaaauauuaccgaaaucguguaucugacaaacaccacgauugagaaggaaaaaugcccuaagcucgcugaguaccggaauugguccaaaccccaguguaacaucaccggguucgccccuuuuucuaaggacaauagcauucgccuguccgcgggaggcgauaucugggugacaagagagcccuaugucucuugcgacccugauaaguguuaccaauucgcucuugggcagggaaccacacugaacaaugugcauagcaacgacaccguucgggaucgcacgccguauagaacacuccugaugaaugaacugggcgugcccuuucaccucgggaccaaacaggucugcaucgccugguccagcagcuccugucaugacggaaaggccuggcugcacgugugcguuacaggcgaugacaaaaacgcuaccgccagcuucauuuacaauggccggcuuguggauucuaucgucuccuggagcaaggagauucugcgcacccaggaaucugagugugugugcaucaacgggacauguacgguggucaugaccgacggauccgcuagcggcaaagccgauacaaagauucucuuuaucgaggaagggaagaucguucauaccuccacacugucuggaagcgcgcaacacguggaggaaugcuccugcuauccuagauaccccggcgugcggugugucugccgcgacaacuggaaagggagcaauagaccuauuguggauaucaacauuaaggacuacucuaucguuuccagcuauguguguucuggacuugucggcgacacgccccggaaaaaugauagcuccucuagcucccacugccuggacccgaacaaugaggaaggcgggcauggagugaagggcugggccuucgaugacgggaacgauguuuggaugggacgcaccauuagcgagaaacucagacugggcuacgagacauuuaaggugaucgaaggguggucuaauccuaacuccaaacugcagaccaaucggcaggucaucguggaccgcggaaacagaagcggcuauucuggcauuuucuccgucgaggggaagucuuguaucaaucggugcuuuuacguggaacucauuagaggacgcaaggaggaaaccgagguucuguggacauccaacucuaucguggucuucuguggcaccagcgggacauauggaacgggcuccuggcccgauggggcugacauuaaucuuaugccuaucuga

SEQ ID NO: 207372 - RNA, 1350 nt, Artificial Sequence
  derived and/or modified CDS sequence (opt5) from neuraminidase__InfluenzaA__ABI16506
augaaccccaaucagaagaucauuaccaucggcagcauuugcauggugaucgggauugucucccugaugcuccaaaucggaaacaugguuucucugugggugagccacuccauccagacaggcaaucagcaucagguggagccuauuucuaacacgaauuuccuuaccgaaaaagccgucgcuagcgugacacuggccgggaacuccucucucuguccgaucagaggaugggcgguucacagcaaggacaauuccauucggaucggcagcaaaggggauguguuugucauucgcgagcccuucaucucuugcucccaucuggaauguagaaccuuuuuccuuacacaaggagcucugcucaacgacaagcacagcaauggcaccgugaaagaucggucuccucaucgcacacugauguccugccccguuggcgaggccccuagccccuacaacucuagauuugaauccguggccuggagcgcuuccgccugucacgacgggaccucuuggcugacgauuggaaucagcggcccugauaauggggcugucgccgugcucaaguauaacggaaugaucaccgacacaauuaaguccuggcggaauaacauccugcgcacccaggagagcgagugcgugugugucaauggcucuugcuucacaguuaugaccgaugggccguccaacggacaggcgagcuacaaaauuuuuaagauggaaaaaggcaagguggugaaaucugucgagcuugacgcccccaacuaucacuacgaagaguguagcugcuauccugaugcuggcgagaucacgugugugugcagagacaauuggcauggguccaaccggcccuggguuucuuucaaucagaaccuggaauaccaaauuggauauaucugcagcggcguguuuggggauaauccucgccccaacgacggaacaggcuccugugggccggucagcccuaauggagccuacggcgugaagggcuucucuuuuaaguacgggaacggaguuuggaucggcagaaccaaaucccccagcucucgguccggguucgagaugauuugggauccuaauggauggacagaaaccgacagcuccuuuucugugaagcaggacaucgucgcuauuaccgauuggagcggcuauuccgggucuuucgugcagcaccccgagcucacaggccuggacugcauccgccccuguuucugggucgaacuuauuagaggacggccuaaagagagcacgaucuggaccuccggcagcucuaucuccuuuugcggggugaacagcgauacaguuucuugguccuggccggacggagccgagcugcccuucaccauugauaaguga

SEQ ID NO: 207373 - RNA, 1413 nt, Artificial Sequence; identical to SEQ ID NO: 207037
  derived and/or modified CDS sequence (opt5) from neuraminidase__InfluenzaA__ABI20840

SEQ ID NO: 207374 - RNA, 1413 nt, Artificial Sequence
  derived and/or modified CDS sequence (opt5) from neuraminidase__InfluenzaA__ABI20862
augaaccccaaucagaagaucauuaccaucggcagcauuugcaugacaaucgggauuaucucccugauccuccaaauuggaaacaucauuucuaucugggugagccacuccauucagacgggcucucagaaucauaccgggaucuguaaccagagaauuaucacauacgagaauagcaccugggucaaccaaacauauguuaauaucaacaauaccaacgugguggccggaaaagacacaaccuccgucacgcuggcuggcaauucuagccuuugcccuauucgggggugggccaucuacuccaaggauaacagcauucgcaucggaucuaaaggcgacguguucguuauuagagaaccguuuaucuccuguagccaccuggagugccggaccuucuuucucacacagggcgcgcugcuuaaugauaagcauucuaacgggaccgugaaagaccgcucccccuauagagcucugaugagcuguccuaucggagaagcccccucuccuuacaauucccgguucgagagcgucgccugguccgcuucugccugccacgauggcaugggguggcucacaauuggaaucagcggccccgacgauggggcuguggccguucugaaguauaacggaauuaucaccgaaacgauuaaguccuggcgcaaaagaauccugcggacacaggagagcgagugugugugcgucaacggcucuuguuuuaccaucaugacagacggcccuuccaaugggccggcgagcuaccgcauuuucaagaucgaaaaaggaaagauuaccaaaucuaucgagcucgaugcccccaacagccauuaugaagagugcuccuguuacccugacaccggcacagugaugugcgugugcagagauaauuggcacgggucuaaccggcccugggucagcuuuaaucagaaccuggacuaccaaacgggauauauuuguuccggcguuuucggggauaauccucgccccaaggacggaaagggcagcugcgacccggugaccguggauggcgcugacggggucaaaggauuuucuuacagauauggcaacgggguguggaucggacggacaaaguccaauagcucucgcaaaggcuucgagaugauuugggauccuaacggguggaccgacacagauuccaauuuucuuguuaagcaggacguggucgccaugaccgauuggagcggcuacuccggaucuuucgugcagcaccccgaacugacgggccucgacuguaugagaccuugcuuuuggguugagcugauccgggggagaccccgcgagaaaacaaccaucuggaccagcggauccucuauuagcuucuguggcgugaacuccgauacagcuaauuggagcuggcccgacggggccgaacuuccuuucaccaucgauaaguga

SEQ ID NO: 207375 - RNA, 1413 nt, Artificial Sequence
  derived and/or modified CDS sequence (opt5) from neuraminidase__InfluenzaA__ABI20873
augaaccccaaucagaagaucauuaccaucggcagcauuuccauggccaucgggauuaucucucugacacuccaaaucggaaacauuaucagcauuugggcuucccacucuauccagacgggcagccagaaucauaccgggauuugcaaccagagaaucauuacauacgaaaauuccaccugggugaaccaaacauaugucaauaucaacaauaccaacguuguggccgagaaagacaagacaucugugacccuggcgggaaauagcucccuuuguccuauccggggcugggcuauuuacacgaaagauaacagcauccgcauugggucuaagggagacgucuucgugaucagagagccguuuauuuccugcagccaccuggaaugucggaccuucuuucucacacagggcgcccugcuuaaugauaaacauucuaacggcaccguuaaggaccgcucccccuauagagcccugaugagcugcccucucggggaggcucccucuccuuacaauucccgguucgaaagcguggccugguccgcuacagccugucacgauggaaucggcuggcugaccaucgggauuucuggacccgacaacggcgcggucgccgugcugaaguauaacgggguuaucacggagacaauuaaaagcuggaagaaacagauccuccgcacccaggaguccgaaugcgugugugucaauggaagcugcuuuacaauuaugaccgauggcccuucuaacggcgcugccuccuacagaaucuucaagaucgagaaagggaagauuaccaagagcaucgaacuggacgcuccgaauuuucauuaugaggaguguucuugcuaccccgauacaggaacggugaugugugugugccgggacaacuggcacggcagcaaucgcccuugggucuccuucaaccaaaaucuugauuaccagauuggguauaucugcucuggaguuuuuggcgacaaccccagaccuaaagauggggaaggaagcuguaaucccgugaccguggacggcgccgacggcgucaagggguucuccuaccgguauggaaacggcguguggauugggcgcacaaaaagcaauagacugcggaagggauuugagaucauuugggauccgaacggcuggaccgacacagauucugacuucuccguuaaacaggauguggucgcgaugaccgacuggagcggguacucuggcuccuuugugcagcacccugaacucacgggacuggauugcaugcgccccuguuucuggguugagcuugugagaggccugccucgggaaaaugccacaaucuggaccagcggguccucuaucagcuucugcggagucaacuccgacaccgcuaauuggucuuggcccgauggcgccgagcuccccuuuacaauugacaaguga

SEQ ID NO: 207376 - RNA, 1410 nt, Artificial Sequence; identical to SEQ ID NO: 207172
  derived and/or modified CDS sequence (opt5) from neuraminidase__InfluenzaA__ABI20895

SEQ ID NO: 207377 - RNA, 1410 nt, Artificial Sequence; identical to SEQ ID NO: 207185
  derived and/or modified CDS sequence (opt5) from neuraminidase__InfluenzaA__ABI20906

SEQ ID NO: 207378 - RNA, 1410 nt, Artificial Sequence; identical to SEQ ID NO: 207173
  derived and/or modified CDS sequence (opt5) from neuraminidase__InfluenzaA__ABI20928

SEQ ID NO: 207379 - RNA, 1410 nt, Artificial Sequence; identical to SEQ ID NO: 207173
  derived and/or modified CDS sequence (opt5) from neuraminidase__InfluenzaA__ABI20939

SEQ ID NO: 207380 - RNA, 1410 nt, Artificial Sequence; identical to SEQ ID NO: 207173
  derived and/or modified CDS sequence (opt5) from neuraminidase__InfluenzaA__ABI20950

SEQ ID NO: 207381 - RNA, 1410 nt, Artificial Sequence; identical to SEQ ID NO: 207173
  derived and/or modified CDS sequence (opt5) from neuraminidase__InfluenzaA__ABI20961

SEQ ID NO: 207382 - RNA, 1410 nt, Artificial Sequence; identical to SEQ ID NO: 206899
  derived and/or modified CDS sequence (opt5) from neuraminidase__InfluenzaA__ABI20983

SEQ ID NO: 207383 - RNA, 1410 nt, Artificial Sequence
  derived and/or modified CDS sequence (opt5) from neuraminidase__InfluenzaA__ABI20994
augaaccccaaucagaagaucauuaccaucggcagcgugucccugacaauugccacgaucugcuuccucaugcaaauugcuauccuggucaccacaguuacccuucacuuuaaacaguacgaguguaacucuccuccgaauaaccaggugaugcugugcgaacccacaaucauugagagaaauaucaccgaaauuguguaucucacaaacaccacgaucgagaaggaaauuuguccuaaacuggccgaguaccggaauuggagcaagccccagugcaacaucaccggguucgcgccuuuuuccaaagacaauucuauucgccuuagcgcuggaggcgauaucugggucacaagagagcccuauguguccugugacccugauaagugcuaccaauucgcccuggggcagggaaccacacucaacaauggccauucuaacgacaccguucacaaucggacgccguaucgcacacugcugaugaacgaacucggggugcccuuucaucugggaaccaagcaggucuguaucgccuggagcuccagcucuugccacgauggcaaagccuggcuucauguguguguuacaggcgacgaugagaaugcuaccgcuuccuucauuuacaacgggagacugguggacagcaucggaucuugguccaagaaaauucuccggacccaggaaagcgagugcgucuguaucaacggcacaugcacgguggugaugaccgaugggucugccuccggaaaggcggacacaaaaauucuguuuaucgaggaaggcaagaucguccacaccagcucccuuucugggagcgcccaacacguugaggaaugcuccuguuauccucgcuaccccggagugagaugcgugugucgggauaauuggaagggcagcaaccgcccuauugucgacaucaaugugaaagauuacucuauuguuuccagcuaugugugcucuggccuggucggggacacacccagaaagaacgacagcuccucuagcucccauugucucgauccgaauaacgaggaaggaggccacggggugaaaggaugggcuuucgacgauggcaaugacguuuggauggggcggaccaucagcgagaagcugcgcucuggauacgagacguuuaaagugauugaaggcugguccaagccuaacagcaaacugcagaucaauagacaggucaucguggaucggggcaaccgcucuggguauuccggaauuuucagcgucgaguccaagucuugcaucaauagauguuuuuacguggaacucauucggggcagaaagcaggagacagaaguucuguggaccagcaacuccaucguggucuucugcgggaccucuggaacauauggcaccgggagcuggcccgacggcgccgauauuaaucuuaugccuaucuga

SEQ ID NO: 207384 - RNA, 1410 nt, Artificial Sequence
  derived and/or modified CDS sequence (opt5) from neuraminidase__InfluenzaA__ABI21005
augaaccccaaucagaagaucauuaccaucggcagcgugucccugacaauugccacgaucugcuuccucaugcaaauugcuguccugguuaccacagugacccuucacuuuaaacaguacgaguguaacucuccuccgaauaaccaggugaugcugugcgaacccacaaucaucgagagaaauauuaccgaaaucgucuaucucacaaacaccacgauugagaaggaaaucuguccuaaacuggccgaguaccggaauuggagcaagccccagugcaacauuaccggguucgcgccuuuuuccaaagacaauucuauccgccuuagcgcuggaggcgauauuugggugacaagagagcccuauguuuccugugacccugauaagugcuaccaauucgcccuggggcagggaaccacacucaacaauggccauucuaacgacaccgugcacgaucggacgccguaucgcacacugcugaugaaugaacucgggguccccuuucaucugggaaccaaacagguguguaucgccuggagcuccagcucuugccacgacggcaaggcuuggcuucauguuugugugacaggcgaugacgagaacgccaccgcuuccuucaucuacaaugggagacuggccgauagcauuggaucuugguccaagaaaauccuccggacccaggaaagcgagugcgucuguauuaacggcacaugcacgguggugaugaccgacgggucugcguccggaaaggccgauacaaaaauccuguuuauugaggaaggcaagaucguccacaccagccuucuguccgggucugcucaacacguugaggaaugcagcuguuauccucgcuaccccggagugagaugcgugugucgggacaacuggaagggcuccaaucgcccuaucgucgauauuaacgugaaagacuacagcaucguuucuuccuaugugugcagcggccucgucggggacacacccagaaagaaugauucuagcuccucuagccauugucuggacccgaacaaugaggaaggaggccacggggugaaaggaugggccuucgaugacggcaacgauguuuggauggggcggaccauuuccgagaagcugcgcagcggauacgagacguuuaaagugaucgaaggcuggucuaagccuaauuccaaacuccagauuaacagacaggucaucguggaccggggcaaucgcagcggguauucuggaaucuucuccgucgagggcaagagcugcauuaacagauguuuuuacguggaacugauccgggggagaaagcaggagacagaaguucuuuggaccuccaauucuauuguggucuucugcggaaccagcggcacauaugggaccggcuccuggcccgauggagcugacaucaaccugaugccuauuuga

SEQ ID NO: 207385 - RNA, 1410 nt, Artificial Sequence; identical to SEQ ID NO: 206226
  derived and/or modified CDS sequence (opt5) from neuraminidase__InfluenzaA__ABI21016

SEQ ID NO: 207386 - RNA, 1410 nt, Artificial Sequence
  derived and/or modified CDS sequence (opt5) from neuraminidase__InfluenzaA__ABI21027
augaaccccaaucagagaaucauuaccaucggcagcgugucccugacaauugccacgaucugcuuccucaugcaaauugcuauccuggucaccacaguuacccuucacuuuaagcaguacgaguguaacucuccuccgaauaaccaggugaugcugugcgaacccacaaucauugagcggaauaucaccgaaauuguguaucucacaaacaccacgaucgagaaagaaauuuguccuaagcuggccgaguaccgcaauuggagcaaaccccagugcaacaucaccggguucgcgccuuuuuccaaggacaauucuauuagacuuagcgcuggaggcgauaucugggucacacgggagcccuauguguccugugacccugauaaaugcuaccaauucgcccuggggcagggaaccacacucaacaauggccauucuaacgacaccguucacgaucgcacgccguauagaacacugcugaugaaugaacucggggugcccuuucaucugggaacccggcaggucuguaucgccuggagcuccagcucuugccacgacggcaaggcuuggcuucauguguguguuacaggcgaugacgagaacgccaccgcuuccuucauuuacaaugggcgccugguggauagcaucggaucuugguccaagaaaauucucagaacccaggaaagcgagugcgucuguaucaacggcacaugcacgguggugaugaccgacgggucugccuccggaaaggcggauacaaaaauucuguuuaucgaggaaggcaagaucguccacauuagcacccuuuccgggucugcccaacacguugaggaaugcagcuguuauccucgguaccccggagugcgcugcguguguagagacaacuggaaaggcuccaaucggccuaucgucgauauuaacgugaaggacuacagcaucguuucuuccuaugugugcagcggccuggucggggacacaccccgcaagaaugauucuuucagcuccucucauugucucgacccgaacaaugaggaaggaggccacggggugaaaggaugggcuuuugaugacggcaacgauguuuggauggggagaaccauuagcgagaagcugcgguccggauacgagacguucaaagugaucgaaggcuggagcaagccuaauucuaaacugcagacaaaccgccaggucaucguggagagaggcaaucgguccggguauagcggaaucuuuucugucgaaggcaaguccugcauuaacagauguuucuacguggagcucauucgcgggcggaaagaagagaccgagguuugguggaccagcaauuccaucguggucuuuugcggaacacccggcaccuaugggacaggcucuuggccugacggagccgauauuaaccugaugcccaucuga

SEQ ID NO: 207387 - RNA, 1410 nt, Artificial Sequence; identical to SEQ ID NO: 206663
  derived and/or modified CDS sequence (opt5) from neuraminidase__InfluenzaA__ABI21038

SEQ ID NO: 207388 - RNA, 1410 nt, Artificial Sequence
  derived and/or modified CDS sequence (opt5) from neuraminidase__InfluenzaA__ABI21049
augaaccccaaucagaagaucauuaccaucggcagcgugucccugacaauugccacgaucugcuuccucaugcaaauugcuauccuggucaccacaguuacccuucacuuuaaacagcaugaguguaacucuccuccgaauaaccaggugaugcugugcgaacccacaaucauugagagaaauaucaccgaaauuguguaccucacaaacaccacgaucgagaaggaaauuuguccuaaacuggucgaguaucggaauuggagcaagccccagugcaacaucaccggguucgccccuuuuuccaaagacaauucuauucgccuuagcgcgggaggcgauaucugggugacaagagagcccuacguuuccugugacccugauaagugcuaucaauucgcucuggggcagggaaccacacucaacaauggccacucuaacgacaccgugcaugaucggacgccguaccgcacacugcugaugaaugaacucgggguccccuuucaccugggaaccagacagguguguaucgccuggagcuccagcucuugccaugacggcaaggccuggcuucacguuugugugacaggcgaugacaaaaacgcuaccgccuccuucauuuauaaugggcggcuggucgauagcaucggaucuugguccaagaaaauucuccgcacccaggagagcgaaugcguguguaucaacggcacaugcacgguggucaugaccgacgggucugcuuccggaaaggccgauacaaaaauucuguuuaucgaggagggcaagaucguucacauuagcacccuuuccgggucugcgcaacauguggaagagugcagcuguuacccuagauaucccggagugcggugcgucugucgcgacaacuggaagggcuccaauagaccuaucguggauauuaacguuaaagacuacagcaucgugucuggcuacgucugcuccgggcuggugggagacacaccccggaagaaugauagcuucucuagcucccacugucucgacccgaacaaugaagagggcgggcauggaguuaaaggcugggccuuugaugacgggaacgauguguggaugggacgcaccauuucugaaaagcugagaagcggcuaugagacguucaaagucaucgagggcugguccaagccuaauagcaaacugcagaucaaccgccaggugauugucgaacgggggaauagaucuggauacuccggcaucuuuagcguggaggggaagucuugcauuaaccgguguuucuauguugaacucaucagaggacgcaaggaggaaacagaggugugguggaccuccaauagcauugucguguuuugcggcaccuccgggacauacggcaccggaucuuggcccgacggcgcugauaucaaccugaugccuauuuga

SEQ ID NO: 207389 - RNA, 1410 nt, Artificial Sequence
  derived and/or modified CDS sequence (opt5) from neuraminidase__InfluenzaA__ABI21060
augaaccccaaucagaagaucauuaccaucggcagcgugucccugacaauugccacgaucugcuuccucaugcaaauugcuauccuggucaccacaguuacccuucacuuuaaacagcaugaguguaacucuccuccgaauaaccaggugaugcugugcgaacccacaaucauugagagaaauaucaccgaaauuguguaccucacaaacaccacgaucgagaaggaaauuuguccuaaacccgucgaguaucggaauuggagcaagccucagugcaacaucaccggguucgcccccuuuuccaaagacaauucuauucgccugagcgcgggaggcgauaucugggugacaagagagccuuacguuuccugugacccggauaagugcuaucaauucgcucuugggcagggaaccacacugaacaauggccacucuaacgacaccgugcaugaucggacgcccuaccgcacacuccugaugaaugaacugggggucccuuuucaccucggaaccagacagguguguaucgccuggagcuccagcucuugccaugacggcaaggccuggcugcacguuugugugacaggcgaugacaaaaacgcuaccgccuccuucauuuauaaugggcggcuugucgauagcaucggaucuugguccaagaaaauucugcgcacccaggagagcgaaugcguguguaucaacggcacaugcacgguggucaugaccgacgggucugcuuccggaaaggccgauacaaaaauucucuuuaucgaggagggcaagaucguucacauuagcacccuguccgggucugcgcaacauguggaagagugcagcuguuaccccagauauccuggagugcggugcgucugucgcgacaacuggaagggcuccaauagacccaucguggauauuaacguuaaagacuacagcaucgugucuuccuacgucugcagcggccuugugggggacacaccgcggaagaaugauucuuucagcuccucucacugucuggacccuaacaaugaagagggaggccaugggguuaaaggaugggccuuugaugacggcaacgauguguggauggggcgcaccauuagcgaaaagcucagauccggauaugagacguucaaagucaucgagggcuggagcaagcccaauucuaaacugcagaucaaccgccaggugauugucgaacggggcaauagauccggguacagcggaaucuuuucuguggagggcaaguccugcauuaaccgguguuucuauguugaacugaucagagggcgcaaggaggaaacagaggugugguggaccagcaauuccauugucguguuuugcggaaccucuggcacauacgggaccggcagcuggccugacggagcugauaucaaccucaugcccauuuga

SEQ ID NO: 207390 - RNA, 1410 nt, Artificial Sequence
  derived and/or modified CDS sequence (opt5) from neuraminidase__InfluenzaA__ABI21071
augaaccccaaucagaagaucauuaccaucggcagcgugucccugacaauuucuacgaucugcuucuuuaugcaaauugccauccucaucaccacagucacccugcacuucaaacaguacgaguuuaacagcccuccgaauaaccagguuaugcuuugugaacccacaauuaucgagagaaauauuaccgaaaucguguaucugacaaacaccacgauugagaaggaaaucugcccuaaacucgcugaguaccggaauugguccaagccccagugugacauuaccggguucgccccuuuuucuaaagauaacagcauccgccuguccgcgggaggcgacaucugggugacaagagagcccuaugucucuugcgauccugacaaguguuaccaauucgcucuugggcagggaaccacacugaauaacgugcauagcaaugauaccguucacgaccggacgccguaucgcacacuccugauguccgaacugggcgugcccuuucaucucgggaccaagcaggucugcauugccuggucuagcuccagcugucacgauggaaaagccuggcugcaugugugcguuacaggcgacgauaagaacgcuaccgccucuuucaucuacaauggcagacuuguggacuccauugucagcuggucuaaagagauccugcggacccaggaauccgagugugugugcauuaacgggacauguacgguggucaugaccgauggaagcgcuuccggcaaggccgacacaaaaauccucuuuaucgaggaagggaagauuguucacaccucuacacugagcggauccgcgcaacacguggaggaaugcagcugcuauccucgcuaccccggcgugagaugugucugccgggauaauuggaaggggucuaaccgcccuaucguggacauuaacaucaaagacuacuccauuguuagcucuuauguguguagcggacuugucggcgauacccccagaaagaaugacuccucuagcuccagccauugccuggauccgaacaaugaggaaggcgggcacggagugaaaggcugggccuucgacgaugggaacgacguuuggaugggacggacgaucucugagaagcuccgcuccggcuacgagacauuuaaagugaucgaaggguggagcaauccuaacucuaagcugcagauuaauagacaggucaucguggaucggggaaaccgcuccggcuauagcggcauuuucuccgucgaggggaaaucuuguaucaauagaugcuuuuacguggaacugauucggggaagaaaggaggaaaccgagguucucuggaccagcaacuccaucguggucuucuguggcacaucugggaccuauggaacaggcagcuggcccgacggggcugauauuaaucugaugccuaucuga

SEQ ID NO: 207391 - RNA, 1410 nt, Artificial Sequence
  derived and/or modified CDS sequence (opt5) from neuraminidase__InfluenzaA__ABI21082
augaaccccaaucagaagaucauuaccaucggcagcgugucccugacaauuucuacgaucugcuucuuuaugcaaauugccacccucaucacaaccgucacacugcacuucaaacaguacgaguuuaacagcccuccgaauaaccagguuaugcuuugugaacccaccaucauugagagaaauaucacagaaauuguguaucugaccaacacgaccaucgagaaggaaauuugcccuaaacucgcugaguaccggaauugguccaagccccagugugacaucacaggguucgccccuuuuucuaaagauaacagcauucgccuguccgcgggaggcgacaucugggugaccagagagcccuaugucucuugcgauccugacaaguguuaccaauucgcucuugggcagggaacaacccugaauaacgugcauagcaaugauacgguucacgaccggacaccguaucgcacccuccugaugaacgaacugggcgugcccuuucaucucgggacaaagcaggucugcaucgccugguccucuagcuccugucacgauggaaaagccuggcugcaugugugcguuaccggcgacgauaagaaugcuaccgccagcuucauuuacaacggcagacuuguggacucuaucgucuccuggagcaaagagauucugcggacacaggaaucugagugugugugcaucaaugggacguguaccguggucaugacagauggauccgcuagcggcaaggccgacaccaaaauucucuuuaucgaggaagggaagaucguucacacauccacccugucuggaagcgcgcaacacguggaggaaugcuccugcuauccucgcuaccccggcgugagaugugucugccgggauaacuggaaggggagcaaccgcccuauuguggacaucaauauuaaagacuacucuaucguuuccagcuauguguguucuggacuugucggcgauacgcccagaaagaacgacagcuccucuagcucccauugccuggauccgaauaacgaggaaggcgggcacggagugaaaggcugggccuucgacgaugggaaugacguuuggaugggacggacaauuagcgagaagcuccgcucuggcuacgagaccuuuaaagugaucgaagggugguccaacccuaauagcaagcugcagaucaacagacaggucauuguggaucggggaaaucgcucuggcuauuccggcaucuucagcgucgaggggaaauccuguauuaacagaugcuuuuacguggaacugauccggggaagaaaggaggaaaccgagguucucuggacaucuaauagcauuguggucuucuguggcaccuccgggacauauggaacgggcucuuggcccgacggggcugauaucaaccugaugccuauuuga

SEQ ID NO: 207392 - RNA, 1410 nt, Artificial Sequence; identical to SEQ ID NO: 206808
  derived and/or modified CDS sequence (opt5) from neuraminidase__InfluenzaA__ABI21093

SEQ ID NO: 207393 - RNA, 1410 nt, Artificial Sequence
  derived and/or modified CDS sequence (opt5) from neuraminidase__InfluenzaA__ABI21104
augaaccccaaucagaagaucauuaccaucggcagcgugucccugacaauuucuacgaucugcuucuuuaugcaaauugccauccucaucaccacagucacccugcacuucaaacaguacgaguuuaacagcccuccgaauaaccagguuaugcuuugugaacccacaauuaucgagagaaauauuaccgaaaucguguaucuggcuaacacaaccauugagaaggaaaucugcccuaaacucgccgaguaccggaauugguccaagccccagugugacauuacgggguucgcgccuuuuucuaaagauaacagcauccgccuguccgcuggaggcgacaucugggugaccagagagcccuaugucucuugcgauccugacaaguguuaccaauucgcccuugggcagggaacaacccugaauaacgugcauagcaaugauacaguucacgaccggaccccguaucgcacgcuccugaugaacgaacugggcgugcccuuucaucucgggacaaagcaggucugcauugccugguccucuagcuccugucacgauggaaaggcuuggcugcaugugugcguuaccggcgacgauaaaaaugccacagcuagcuucaucuacaacggcagacuuguggacucuauugucuccuggagcaaagagauccugcggacccaggaaucugagugugugugcauuaaugggaccuguacaguggucaugacggauggauccgccagcggcaaggcggacaccaaaauccucuuuaucgaggaagggaagauuguucacacauccacccugucuggaagcgcccaacacguggaggaaugcuccugcuauccucgcuaccccggcgugagaugugucugccgggauaacuggaaggggagcaaccgcccuaucguggacauuaauaucaaagacuacucuauuguuuccagcuauguguguucuggacuugucggcgauacacccagaaagaacgacagcuccucuagcucccauugccuggauccgaauaacgaggaaggcgggcacggagugaaaggcugggcuuucgacgaugggaaugacguuuggaugggacggaccaucagcgagaagcuccgcucuggcuacgagacguuuaaagugaucgaagggugguccaacccuaauagcaagcugcagauuaacagacaggucaucguggaucggggaaaucgcucuggcuauuccggcauuuucagcgucgaggggaaaaacuguaucaauagaugcuuuuacguggaacugauucggggaagaaaggaggaaacagagguucucuggaccuccaacucuaucguggucuucuguggcaccagcgggacauauggaaccggcuccuggcccgacggggccgauauuaaucugaugccuaucuga

SEQ ID NO: 207394 - RNA, 1410 nt, Artificial Sequence; identical to SEQ ID NO: 206399
  derived and/or modified CDS sequence (opt5) from neuraminidase__InfluenzaA__ABI21115

SEQ ID NO: 207395 - RNA, 1410 nt, Artificial Sequence; identical to SEQ ID NO: 206399
  derived and/or modified CDS sequence (opt5) from neuraminidase__InfluenzaA__ABI21126

SEQ ID NO: 207396 - RNA, 1410 nt, Artificial Sequence; identical to SEQ ID NO: 206808
  derived and/or modified CDS sequence (opt5) from neuraminidase__InfluenzaA__ABI21137

SEQ ID NO: 207397 - RNA, 1410 nt, Artificial Sequence; identical to SEQ ID NO: 206399
  derived and/or modified CDS sequence (opt5) from neuraminidase__InfluenzaA__ABI21148

SEQ ID NO: 207398 - RNA, 1410 nt, Artificial Sequence
  derived and/or modified CDS sequence (opt5) from neuraminidase__InfluenzaA__ABI21159
augaaccccaaucagaagaucauuaccaucggcagcgugucccugacaauuucuacgaucugcuucuuuaugcaaauugccauccucaucaccacagucacccugcacuucaaacaguacgaguuuaacagcccuccgaauaaccagguuaugcuuugugaacccacaauuaucgagagaaauauuaccgaaaucguguaucugacaaacaccacgauugagaaggaaaucugcccuaaacucgcugaguaccggaauugguccaagccccagugugacauuaccggguucgccccuuuuucuaaagauaacagcauccgccuguccgcgggaggcgacaucugggugacaagagagcccuaugucucuugcgauccugacaaguguuaccaauucgcucuugggcagggaaccacacugaauaacgugcauagcaaugauaccguucacgaccggacgccguaucgcacacuccugaugaacgaacugggcgugcccuuucaucucgggaccaagcaggucugcauugccugguccucuagcuccugucacgauggaaaagccuggcugcaugugugcguuacaggcgacgauaagaaugcuaccgccagcuucaucuacaacggcagacuuguggacucuauugucuccuggagcaaagagauccugcggacccaggaaucugagugugugugcauuaaugggacauguacgguggucaugaccgauggauccgcuagcggcaaggccgacacaaaaauccucuuuaucgaggaagggaagauuguucacaccuccacacugucuggaagcgcgcaacacguggaggaaugcuccugcuauccucgcuaccccggcgugagaugugucugccgggauaacuggaaggggagcaaccgcccuaucguggacauuaauaucaaagacuacucuauuguuuccggauauguguguagcggccuugucggcgauacccccagaaagaacgacucuagcuccucuagccauugccuggauccgaauaacgaggaagggggacacggcgugaaagggugggccuucgacgauggaaaugacguuuggaugggccggacgaucuccgagaagcuccgcagcggguacgagacauuuaaagugaucgaaggauggucuaacccuaauuccaagcugcagauuaacagacaggucaucguggaucggggcaaucgcagcggcuauucugggauuuucuccgucgagggaaaaagcuguaucaacagaugcuuuuacguggaacugauucggggcagaaaggaggaaaccgagguucucuggaccuccaauucuaucguggucuucugugggacaagcggaaccuauggcacaggguccuggcccgacggcgcugauauuaaccugaugccuaucuga

SEQ ID NO: 207399 - RNA, 1410 nt, Artificial Sequence; identical to SEQ ID NO: 206399
  derived and/or modified CDS sequence (opt5) from neuraminidase__InfluenzaA__ABI21170

SEQ ID NO: 207400 - RNA, 1410 nt, Artificial Sequence; identical to SEQ ID NO: 206399
  derived and/or modified CDS sequence (opt5) from neuraminidase__InfluenzaA__ABI21181

SEQ ID NO: 207401 - RNA, 1413 nt, Artificial Sequence
  derived and/or modified CDS sequence (opt5) from neuraminidase__InfluenzaA__ABI21192
augaaccccaaucagaagaucauuaccaucggcagcauuuccaucgccauugggaucaucucucugaugcuccaaauuggaaacaucauuagcaucugggcuucccacucuauucagacaggcagccagaaucauacggggaccugcaaccagagaaucauuacauacgaaaauuccaccugggugaaccacacauaugucaauaucaacaauaccaacguuguggccggaaaagacaagacaucugugacccuggcgggcaauagcucccuuuguagcaucucugggugggcuauuuacacgaaagauaacuccauccggauuggaagcaagggcgacgucuucgugauccgcgagccuuuuauuucuugcucccaucuggaguguagaaccuucuuucucacacaaggcgcccugcuuaaugauaaacacagcaacgggaccguuaaggaccggucuccguaucgcgcccugauguccugcccccucggagaagcuccuagccccuacaauuccaaguucgagucuguggccuggagcgcuuccgccugucaugauggcaugggguggcugacaaucggaaucagcggcccugacaacggggcggucgccgugcugaaauauaacggaauuaucaccgaaacgauuaagucuuggagaaaacggauccuccgcacacaggaguccgagugcguuugugugaauggcagcugcuuuaccauuaugacagauggccccucuaacggggcugccagcuacaagaucuucaaaaucgaaaagggaaaggucaccaaauccauugagcugaaugcuccuaacuuucacuaugaagaguguucuugcuacccggacaccggcacagugaugugugugugcagagauaauuggcacgggagcaaccggcccugggucuccuucaaucagaaccuugacuaccagaucggauauauuugcagcggcguuuuuggggauaauccucgccccaaggacggaaaaggcucuuguaacccugugacgguggauggcgccgacggggucaagggauucuccuacaaauauggcaaugggguguggaucggaagaaccaagagcaaccggcugcgcaaaggcuuugagaugauuugggaccccaauggguggacagauaccgacucugauuucuccguuaagcaagacguggucgcgaucacagauuggagcggcuacuccggaucuuuugugcagcauccggaacucaccggccuggacugcauuagaccuuguuucuggguugagcuugugcgggggcugccccgcgaaaacacgacaaucuggaccagcggauccucuaucagcuucugcggcgucgauuccgacaccgccaauuggagcuggccugauggggcugagcuccccuuuauuaucgacaaguga

SEQ ID NO: 207402 - RNA, 1413 nt, Artificial Sequence; identical to SEQ ID NO: 206458
  derived and/or modified CDS sequence (opt5) from neuraminidase__InfluenzaA__ABI21203

SEQ ID NO: 207403 - RNA, 1413 nt, Artificial Sequence
  derived and/or modified CDS sequence (opt5) from neuraminidase__InfluenzaA__ABI21214
augaaccccaaucagaagaucauuaccaucggcagcauuuccaucgccauugggaucaucucucugaugcuccaaauuggaaacaucauuagcaucugggcuucccacucuauucagacaggcagccagaaucauacggggaucugcaaccagagaauuaucaccuacgagaauagcacaugggugaaccacaccuaugucaauaucaacaauacaaacguuguggccggaaaagacauuaccucugugacacuggcgggcaauagcucccuuuguagcaucucugggugggcuauuuacaccaaggauaacuccauccggauuggaagcaaaggcgacgucuucgugauccgcgaaccuuuuaucucuugcucccaucuggaguguagaacguucuuucucacccaaggcgcccugcuuaaugauaagcacagcaacgggacaguuaaagaccggucuccguaucgcgcccugauguccugcccccucggagaagcuccuagccccuacaauuccaaguucgagucuguggccuggagcgcuuccgccugucaugauggcaugggguggcugaccauuggaaucagcggcccugacaacggggcggucgccgugcugaaguauaacggaauuaucacagaaaccauuaaaucuuggaagaaaagaauccuccggacgcaggaguccgagugcguuugugugaauggcagcugcuuuacaaucaugaccgauggccccucuaacggggcugccagcuacaagauuuucaaaaucgaaaagggaaaggucacaaaauccauugagcugaaugcuccuaacuuucacuaugaagaguguucuugcuacccggacaccggcaccgugaugugugugugccgcgauaauuggcacgggagcaacagacccugggucuccuucaaucagaaccuugacuaccagaucggauauauuugcagcggcguuuuuggggauaauccucggcccaaggacggaaaaggcucuuguaacccugugacaguggauggcgccgacggggucaagggauucuccuacaaauauggcaaugggguguggaucggacgcacgaaguccaacagacugcggaaaggcuuugagaugauuugggaccccaauggguggaccgauacagacucugauuucuccguuaagcaagacguggucgcgaucaccgauuggagcggcuacuccggaucuuuugugcagcauccggaacucacaggccuggacugcauccgcccuuguuucuggguugagcuugugagagggcugccccgggaaaacaccacgauuuggacaagcggauccucuaucagcuucugcggcgucgauuccgacaccgccaauuggagcuggccugauggggcugagcuccccuuuaccauugacaaguga

SEQ ID NO: 207404 - RNA, 1410 nt, Artificial Sequence
  derived and/or modified CDS sequence (opt5) from neuraminidase__InfluenzaA__ABI21247
augaaccccaaucagaagaucauuaccaucggcagcgugucccugacaauugccacgaucugcuuccucaugcaaauugcuauccuggucaccacaguuacccuucacuuuaaacaguacgaguguaacucuccuccgaauaaccaggugaugcugugcgaacccacaaucauugagagaaauaucaccgaaauuguguaucucacaaacaccacgaucgagaaggaaaaauguccuaagcuggccgaguaccggaauuggagcaaaccccagugcaagauuaccggguucgcgccuuuuuccaaggacaacucuauccgccuuagcgcuggaggcgauauuugggucacaagagagcccuauguguccugugacccugggaaaugcuaccaauucgcccugggacagggcaccacacucaauaaccggcauucuaaugauaccguucacgaccgcacgccguauagaacacugcugaugaacgaacucggggugcccuuucaucugggaaccaagcaggucuguaucgccuggagcuccagcucuugccacgauggcaaggcuuggcuucauguguguguuacaggccacgacgagaaugccaccgcuuccuucaucuacgaugggcggcugguggacagcauuggaucuugguccaaaaacauccuccgcacccaggaaagcgagugcgucuguauuaauggcacaugcacgguggugaugaccgaugggucugccuccgagagagcggacacaaaaauccuguuuauugaagagggaaagaucguccacaucagcccucuuuccggcucugcccaacauguugaagagugcagcuguuauccccgguacccuggggugcgcugcguguguagagauaacuggaagggauccaaccggcccauugucgacaucaaugugaaagaucacagcauuguuucuuccuacgugugcagcggccuggucggcgacaccccgcgcaagaacgacucuagcuccucuagcuauuguagaaauccuaacaaugaaaaagggucccauggaaugaagggcugggcuuucgaugacgggaacgauguguggaugggacggacaaucagcgaggagcuccgcucuggcuacgaaaccuuuaaaguuauugggggaugguccaagcccaauagcaaacugcagaucaacagacaggugaucgucgaccggggcaauagaucuggcuauuccgggauuuucagcguggagggaaaguccugcaucaaccgcuguuuuuacgucgaacugauucggggcagaaagcaggagacggaagugugguggacaucuaauagcaucguuguguucugcgggaccuccggaaccuauggcacagggucuuggccugauggcgccgacauuaaccucaugcccaucuga

SEQ ID NO: 207405 - RNA, 1410 nt, Artificial Sequence; identical to SEQ ID NO: 207325
  derived and/or modified CDS sequence (opt5) from neuraminidase__InfluenzaA__ABI21258

SEQ ID NO: 207406 - RNA, 1410 nt, Artificial Sequence; identical to SEQ ID NO: 207325
  derived and/or modified CDS sequence (opt5) from neuraminidase__InfluenzaA__ABI21269

SEQ ID NO: 207407 - RNA, 1410 nt, Artificial Sequence; identical to SEQ ID NO: 207325
  derived and/or modified CDS sequence (opt5) from neuraminidase__InfluenzaA__ABI21280

SEQ ID NO: 207408 - RNA, 1410 nt, Artificial Sequence; identical to SEQ ID NO: 207257
  derived and/or modified CDS sequence (opt5) from neuraminidase__InfluenzaA__ABI21302

SEQ ID NO: 207409 - RNA, 1410 nt, Artificial Sequence; identical to SEQ ID NO: 207257
  derived and/or modified CDS sequence (opt5) from neuraminidase__InfluenzaA__ABI21313

SEQ ID NO: 207410 - RNA, 1410 nt, Artificial Sequence; identical to SEQ ID NO: 207257
  derived and/or modified CDS sequence (opt5) from neuraminidase__InfluenzaA__ABI21324

SEQ ID NO: 207411 - RNA, 1410 nt, Artificial Sequence; identical to SEQ ID NO: 207257
  derived and/or modified CDS sequence (opt5) from neuraminidase__InfluenzaA__ABI21335

SEQ ID NO: 207412 - RNA, 1410 nt, Artificial Sequence; identical to SEQ ID NO: 207325
  derived and/or modified CDS sequence (opt5) from neuraminidase__InfluenzaA__ABI21346

SEQ ID NO: 207413 - RNA, 1410 nt, Artificial Sequence
  derived and/or modified CDS sequence (opt5) from neuraminidase__InfluenzaA__ABI21357
augaaccccaaucagaagaucauuaccaucggcagcgugucccugacaauugccacgaucugcuuccucaugcaaauugcuauccuggucaccacaguuacccuucacuuuaaacaguacgaguguaacucuccuccgaauaaccaggugaugcugugcgaacccacaaucauugagagaaauaucaccgaaauuguguaucucacaaacaccacgaucgagaaggaaauuuguccuaaacuggccgaguaccggaauuggagcaagccccagugcaaaaucaccggguucgcgccuuuuuccaaggacaacucuauucgccuuagcgcuggaggcgauaucugggucacaagagagcccuauguguccugugacccugggaagugcuaccaauucgcccugggacagggcaccacacucaauaaccggcauucuaaugauaccguucacgaccgcacgccguauagaacacugcugaugaacgaacucggggugcccuuucaucugggaaccaaacaggucuguaucgccuggagcuccagcucuugccacgauggcaaggcuuggcuucauguguguguuacaggccacgacgagaaugccaccgcuuccuucauuuacgaugggcggcugguggacagcaucggaucuugguccaaaaacauucuccgcacccaggaaagcgagugcgucuguaucaauggcacaugcacgguggugaugaccgaugggucugccuccgagagagcggacacaaagauucuguuuaucgaagagggaaaaaucguccacauuagcccucuuuccggcucugcccaacauguugaagagugcagcuguuauccccgguacccuggggugcgcugcguguguagagauaacuggaagggauccaaccggcccaucgucgacauuaaugugaagaacuacagcaucguuucuuccuaugugugcagcggccuggucggcgauaccccgcgcaaaaaugacucuagcuccucuagcuacuguagaaacccuaauaacgaaaaggggucccacggagugaaaggcugggcuuucgacgaugggaaugacguuuggaugggacggacaauuagcgaggagcuccgcucuggcuaugaaaccuuuaaggugaucgggggaugguccaaacccaacagcaagcugcagaucaauagacaggucauuguggaucggggcaacagaucuggcuacuccgggaucuucagcgucgagggaaaauccugcauuaaucgcuguuuuuauguggaacugauccggggcagaaagcaggaggccgaaguuugguggacgucuaacagcauuguggucuucugcgggacauccggaaccuacggcaccgggucuuggccugacggcgcugauaucaaucucaugcccauuuga

SEQ ID NO: 207414 - RNA, 1410 nt, Artificial Sequence; identical to SEQ ID NO: 207257
  derived and/or modified CDS sequence (opt5) from neuraminidase__InfluenzaA__ABI21368

SEQ ID NO: 207415 - RNA, 1410 nt, Artificial Sequence; identical to SEQ ID NO: 207257
  derived and/or modified CDS sequence (opt5) from neuraminidase__InfluenzaA__ABI21379

SEQ ID NO: 207416 - RNA, 1410 nt, Artificial Sequence; identical to SEQ ID NO: 207257
  derived and/or modified CDS sequence (opt5) from neuraminidase__InfluenzaA__ABI21390

SEQ ID NO: 207417 - RNA, 1410 nt, Artificial Sequence; identical to SEQ ID NO: 207325
  derived and/or modified CDS sequence (opt5) from neuraminidase__InfluenzaA__ABI21401

SEQ ID NO: 207418 - RNA, 1410 nt, Artificial Sequence
  derived and/or modified CDS sequence (opt5) from neuraminidase__InfluenzaA__ABI21412
augaaccccaaucagaagaucauuaccaucggcagcgugucccugacaauugccacgaucugcuuccucaugcaaauugcuauccuggucaccacaguuacccuucacuuuaaacaguacgaguguaacccuccgcccaauaaccaggugaugcugugcgaaccuacaaucauugagagaaauaucaccgaaauuguguaucucacaaacaccacgaucgagaaggaaauuugucccaaacuggccgaguaccggaauuggucuaagccucagugcaaaaucaccggguucgcgcccuuuagcaaggacaacuccauucgccuuucugcuggaggcgauaucugggucacaagagagccuuaugugagcugugacccggggaagugcuaccaauucgcccugggacagggcaccacacucaauaaccggcauuccaaugauaccguucacgaccgcacgcccuauagaacacugcugaugaacgaacucggggugccuuuucaucugggaaccaaacaggucuguaucgccuggucuagcuccagcugccacgauggcaaggcuuggcuucauguguguguuacaggccacgacgagaaugccaccgcuucuuucauuuacgaugggcggcugguggacuccaucggaagcuggucuaaaaacauucuccgcacccaggaauccgagugcgucuguaucaauggcacaugcacgguggugaugaccgaugggagcgccucugagagagcggacacaaagauucuguuuaucgaagagggaaaaaucguccacauuagcccccuuuccggcuccgcccaacauguugaagagugcucuuguuauccucgguaccccggggugcgcugcguguguagagauaacuggaagggaagcaaccggccgaucgucgacauuaaugugaaggauuacuccaucguuagcucuuaugugugcuccggccuggucggcgacaccccucgcaaaaacgacagcucuagcuccucuuacuguagaaaucccaacaaugaaaaggggagccacggagugaaaggcugggcuuucgaugacgggaacgauguuuggaugggacggacaauuuccgaggagcuccgcagcggcuaugaaaccuuuaaggugaucgggggauggucuaaaccuaauuccaagcugcagaucaacagacaggucauuguggaccggggcaauagaagcggcuacucugggaucuucuccgucgagggaaaaagcugcauuaaccgcuguuuuuauguggaacugauccggggcagaaagcaggagacggaaguuugguggacauccaauucuauuguggucuucugcgggaccagcggaaccuacggcacaggguccuggcccgauggcgccgacaucaaccucaugcccauuuga

SEQ ID NO: 207419 - RNA, 1410 nt, Artificial Sequence; identical to SEQ ID NO: 206591
  derived and/or modified CDS sequence (opt5) from neuraminidase__InfluenzaA__ABI21423

SEQ ID NO: 207420 - RNA, 1410 nt, Artificial Sequence; identical to SEQ ID NO: 207257
  derived and/or modified CDS sequence (opt5) from neuraminidase__InfluenzaA__ABI21434

SEQ ID NO: 207421 - RNA, 1410 nt, Artificial Sequence; identical to SEQ ID NO: 207325
  derived and/or modified CDS sequence (opt5) from neuraminidase__InfluenzaA__ABI21445

SEQ ID NO: 207422 - RNA, 1410 nt, Artificial Sequence; identical to SEQ ID NO: 207325
  derived and/or modified CDS sequence (opt5) from neuraminidase__InfluenzaA__ABI21456

SEQ ID NO: 207423 - RNA, 1410 nt, Artificial Sequence; identical to SEQ ID NO: 207418
  derived and/or modified CDS sequence (opt5) from neuraminidase__InfluenzaA__ABI21467

SEQ ID NO: 207424 - RNA, 1410 nt, Artificial Sequence; identical to SEQ ID NO: 207325
  derived and/or modified CDS sequence (opt5) from neuraminidase__InfluenzaA__ABI21478

SEQ ID NO: 207425 - RNA, 1410 nt, Artificial Sequence; identical to SEQ ID NO: 207325
  derived and/or modified CDS sequence (opt5) from neuraminidase__InfluenzaA__ABI21489

SEQ ID NO: 207426 - RNA, 1410 nt, Artificial Sequence; identical to SEQ ID NO: 207325
  derived and/or modified CDS sequence (opt5) from neuraminidase__InfluenzaA__ABI21500

SEQ ID NO: 207427 - RNA, 1410 nt, Artificial Sequence
  derived and/or modified CDS sequence (opt5) from neuraminidase__InfluenzaA__ABI21511
augaaccccaaucagaagaucauuaccaucggcagcgugucccugacaauugccacgaucugcuuccucaugcaaauugcuauccuggucaccacaguuacccuucacuuuaaacaguacgaguguaacucuccuccgaauaaccaggugaugcugugcgaacccgccaucauugagagaaauaucacagaaauuguguaucucaccaacacaaccaucgagaaggaaauguguccuaaacuggcggaguaccggaauuggagcaagccccagugcaacauuacgggguucgcuccuuuuuccaaagacaauucuauccgccuuagcgccggaggcgauauuugggucaccagagagcccuauguguccugugacccugauaagugcuaccaauucgcccuggggcagggaacaacccucaacaauggccauucuaacgacacaguucacgaucggaccccguaucgcacgcugcugaugaaugaacucggggugcccuuucaucugggaacaagacaggucuguaucgcuuggagcuccagcucuugccacgacggcaaggccuggcuucauguguguguuaccggcgaugacgagaacgcuacagccuccuucaucuacgaugggcggcugguggacagcauuggaucuugguccaaaaagauccuccgcacccaggaaagcgagugcgucuguauuaaugggaccugcacaguggugaugacggauggcucugcguccggaaaagccgacaccaagauccuguuuauugaggaaggcaaaaucgucaacaucagcacacuuuccgggucugcucaacacguugaggaaugcagcuguuauccuagauaccccggagugcggugcgugugucgcgauaacuggaagggcuccaauagaccuauugucgacaucaacgugaaggacuacagcauuguuucuuccuaugugugcagcggccuggucggggauacaccccggaaaaaugacucuuucagcuccucucacugucucgauccgaacaaugaggaaggaggccauggggugaagggaugggccuuugacgauggcaacgacguuuggauggggcgcaccaucagcgagaaacugagauccggauacgagaccuucaaggugauugaaggcuggagcaaaccuaauucuaagcugcagaucaaccggcaggucaucguggagcgcggcaauagauccggguauagcggaaucuuuucugucgaaggcaaauccugcauuaaccgguguuucuacguggagcucauuagagggcgcaaggaagagacggagguuugguggacaagcaauuccaucguggucuuuugcggaaccucuggcaccuaugggacaggcagcuggcccgauggagcugacauuaaccugaugccuaucuga

SEQ ID NO: 207428 - RNA, 1413 nt, Artificial Sequence
  derived and/or modified CDS sequence (opt5) from neuraminidase__InfluenzaA__ABI21533
augaaccccaaucagaagaucauuaccaucggcagcauuuccaucgccauugggaucaucucucugaugcuccaaauuggaaacaucauuagcaucugggcuucccacucuauucagacaggcagccagaaucauacggggaucugcaaccagagaauuaucaccuacgagaauagcacaugggugaaccacaccuaugucaauaucaacaauacaaacguuguggccggaaaagacaagaccucugugacacuggcgggcaauagcucccuuuguagcauuucugggugggcuaucuacaccaaagauaacuccauucggaucggaagcaagggcgacgucuucgugaugcgcgaaccuuuuauuucuugcucccaucuggaguguagaacguucuuucucacccaaggcgcccugcuuaaugauaaacacagcaacgggacaguuaaggaccggucuccguaucgcgcccugauguccugcccccucggagaagcuccuagccccuacaauuccaaguucgagucuguggccuggagcgcuuccgccugucaugauggcaugggguggcugaccaucggaaucagcggcccugacaacggggcggucgccgugcugaaauauaacggaauuaucacagaaaccauuaagucuuggaaaaagagaauccuccggacgcaggaguccgagugcguuugugugaauggcagcugcuuuacaauuaugaccgauggccccucuaacggggcugccagcuacaaaaucuucaagaucgaaaagggaaaagucauuaaguccaucgagcugaaugcuccuaacucucacuaugaagaguguagcugcuacccggacacaggcaccgugaugugugugugccgcgauaauuggcacggguccaacagacccugggucagcuuuaaucagaaccuugacuaccagauuggauauaucugcucuggcguuuucggggauaauccucggcccaaagacggagagggcuccuguaacccugugaccguggauggcgccgacggggucaagggauuuagcuacaaauauggcaaugggguguggauuggacgcacaaagucuaacagacugcggaaaggcuucgaaaugaucugggaccccaauggguggacggauaccgacuccgauuuuagcguuaagcaagacguggucgcgauuacagauugguccggcuacucuggauccuucgugcagcauccggagcucaccggccuggacugcauccgcccuuguuuuuggguugaacuugugagagggcggccccgcgagaacacaaccaucuggacguccggaucuagcauuuccuucugcggcgucaauagcgauacagccaacuggucuuggccugacggggcugaacugcccuucaccaucgauaaguga

SEQ ID NO: 207429 - RNA, 1413 nt, Artificial Sequence; identical to SEQ ID NO: 207428
  derived and/or modified CDS sequence (opt5) from neuraminidase__InfluenzaA__ABI21544

SEQ ID NO: 207430 - RNA, 1413 nt, Artificial Sequence; identical to SEQ ID NO: 207428
  derived and/or modified CDS sequence (opt5) from neuraminidase__InfluenzaA__ABI21555

SEQ ID NO: 207431 - RNA, 1413 nt, Artificial Sequence; identical to SEQ ID NO: 207428
  derived and/or modified CDS sequence (opt5) from neuraminidase__InfluenzaA__ABI21566

SEQ ID NO: 207432 - RNA, 1413 nt, Artificial Sequence; identical to SEQ ID NO: 207428
  derived and/or modified CDS sequence (opt5) from neuraminidase__InfluenzaA__ABI21577

SEQ ID NO: 207433 - RNA, 1413 nt, Artificial Sequence
  derived and/or modified CDS sequence (opt5) from neuraminidase__InfluenzaA__ABI22112
augaaccccaaucagaagaucauuaccaucggcagcauuuccaucgccauugggaucaucucucugaugcuccaaauuggaaacaucauuagcaucugggcuucccacucuauucagacaggcagccagaaucauacggggaucugcaaccagagaauuaucaccuacgaaaauuccacaugggugaaccacaccuaugucaauaucaacaauacaaacguuguggccggaaaagacaagaccucugugacacuggcgggcaauagcucccuuuguagcauuucugggugggcuaucuacaccaaagauaacuccauucggaucggaagcaagggcgacgucuucgugauucgcgagccuuuuaucucuugcucccaucuggaguguagaacguucuuucucacccaaggcgcccugcuuaaugauaaacacagcaacgggacaguuaaggaccggucuccguaucgcgcccugauguccugcccccucggagaagcuccuagccccuacaauuccaaguucgagucuguggccuggagcgcuuccgccugucaugauggcaugggguggcugaccaucggaauuagcggcccugacaacggggcggucgccgugcugaaauauaacgaaaucauuacagagaccaucaagucuuggaaaaagcggauucucagaacgcaggaguccgaaugcguuugugugaauggaagcugcuuuacaaucaugaccgauggccccucuaacggcgcugccagcuacaaaaucuucaagauugagaaggggaaagucacaaaguccaucgaacugaaugcuccuaacuuucacuaugaggaguguucuugcuacccggacaccggaaccgugaugugugugugccgcgauaauuggcacggcagcaacagacccugggucuccuucaaucagaaccuugacuaccagauuggguauaucugcagcggaguuuuuggcgauaauccucggcccaaagacgggaagggaucuuguaacccugugacaguggauggcgccgacggcgucaaaggguucuccuacaaguauggaaauggcguguggauugggcgcacgaaaagcaacagacugcggaagggauuugaaaugaucugggaccccaauggcuggaccgauacagacucugauuucuccguuaagcaagacguggucgcgauuaccgauuggagcggguacuccggcucuuuugugcagcauccggagcucacaggacuggacugcauccgcccuuguuucuggguugaacuugugagaggccugccccgggagaacaccacgaucuggacaagcggguccucuauuagcuucugcggagucgauuccgacaccgccaauuggagcuggccugauggcgcugaacuccccuuuaccaucgacaaauga

SEQ ID NO: 207434 - RNA, 1410 nt, Artificial Sequence
  derived and/or modified CDS sequence (opt5) from neuraminidase__InfluenzaA__ABI22162
augaaccccaaucagaagaucauuaccaucggcagcgugucccugacaauuucuacgaucugcuucuuuaugcaaauugccauccucaucaccacagucacccugcacuucaaacaguacgaguuuaacagcccuccgaauaaccagguuaugcuuugugaacccacaauuaucgagagaaauauuaccgaaaucguguaucugacaaacaccacgauugagaaggaaaucugcccuaaacucgcugaguaccggaauugguccaagccccaguguaacauuaccggguucgccccuuuuucuaaagacaauagcauccgccuguccgcgggaggcgauaucugggugacaagagagcccuaugucucuugcgacccugauaaguguuaccaauucgcucuugggcagggaaccacacugaacaaugugcauagcaacgacaccguucacgaucggacgccguaucgcacacuccugaugaaugaacugggcgugcccuuucaucucgggaccaagcaggucugcauugccugguccucuagcuccugucacgacggaaaagccuggcugcaugugugcguuacaggcgaugacaagaacgcuaccgccagcuucaucuacaauggcagacuuguggauucuauugucuccuggagcaaagagauccugcggacccaggaaucugagugugugugcauuaacgggacauguacgguggucaugaccgacggauccgcuagcggcaaggccgauacaaaaauccucuuuaucgaggaagggaagauuguucacaccuccacacugucuggaagcgcgcaacacguggaggaaugcuccugcuauccucgcuaccccggcgugagaugugucugccgggacaacuggaaggggagcaaucgcccuaucguggauauuaacaucaaagacuacucuauuguuuccagcuauguguguucuggacuugucggcgacacccccagaaagaaugauagcuccucuagcucccauugccuggacccgaacaaugaggaaggcgggcacggagugaaaggcugggccuucgaugacgggaacgauguuuggaugggacggacgaucagcgagaagcuccgcucuggcuacgagacauuuaaagugaucgaagggugguccaauccuaacagcaagcugcagaccaauagacaggucauuguggaccggggaaaccgcucuggcuauuccggcaucuucagcgucgaggggaaauccuguauuaauagaugcuuuuacguggaacugauccggggaagaaaggaggaaaccgagguucucuggacaucuaacagcauuguggucuucuguggcaccuccgggacauauggaacgggcucuuggcccgauggggcugacaucgaucugaugccuauuuga

SEQ ID NO: 207435 - RNA, 1350 nt, Artificial Sequence
  derived and/or modified CDS sequence (opt5) from neuraminidase__InfluenzaA__ABI23981
augaaccccaaucagaagaucauuaccaucggcagcauuugcauggugaucgggauugucucccugaugcuccaaaucggaaacaugaucucuauuuggguuagccacuccauccagacaggcaaucagagacaggccgagucuauuagcaacacgaaauuccugaccgaaaaggcuguggccuccgugacacuugcgggaaauucuagccuguguccuaucuccgggugggcugucuacagcaaagacaacucuauucggaucggcucccgcggggauguguuuguuauuagagagccguucaucagcugcucucaucucgaaugucggaccuuuuuccugacacaaggagcccuucugaaugacaagcacuccaacggcaccgugaaagaucgcagccccuauagaacacucaugucuuccccugucggcgaggcccccagcccuuacaauucccgguuugaaucuguggcuuggagcgccuccgcuugccaugacgggaccagcuggcugacgaucggaauuucuggccccgauaacggggccguugcggugcugaaguauaauggaaucauuaccgacacaaucaaguccuggcgcaacaauauucucagaacccaggagagcgagugugccugcgucaacggcucuuguuucacagugaugaccgaugggccuagcaauggacaggcuuccuacaaaaucuuuaagauggaaaaaggcaagguggucaaaucuguugagcuggacgccccgaacuaucacuacgaagagugcagcuguuaucccgaugcuggcgagaucacgugcgugugucgggacaacuggcauggguccaaucgcccuugggugagcuucaaccagaaucuugaauaccaaauuggauacaucugcucuggcgucuuuggggauaaccccagaccuaaugacggaacaggcuccugcgggcccgugagccugaacggagccuauggcguuaagggcuucucuuuuaaguacgggaauggaguguggauuggccggaccaaauccacaaacagccgcuccggguucgagaugaucugggauccgaauggauggaccggcaccgacucuagcuuuuccgucaagcaggacauuguggcgaucacagauuggucuggguauagcggcuccuucguucagcacccugaacucacgggacuggacuguaucagacccugcuucuggguggagcuuauucggggccgcccuaaagaaagcaccaucuggacaucuggguccagcauuucuuuuuguggagucaacuccgauaccgugagcuggucuuggcccgacggcgccgagcugcccuucacaaucgauaaguga

SEQ ID NO: 207436 - RNA, 1410 nt, Artificial Sequence; identical to SEQ ID NO: 206399
  derived and/or modified CDS sequence (opt5) from neuraminidase__InfluenzaA__ABI26649

SEQ ID NO: 207437 - RNA, 1413 nt, Artificial Sequence; identical to SEQ ID NO: 207122
  derived and/or modified CDS sequence (opt5) from neuraminidase__InfluenzaA__ABI30370

SEQ ID NO: 207438 - RNA, 1410 nt, Artificial Sequence; identical to SEQ ID NO: 207173
  derived and/or modified CDS sequence (opt5) from neuraminidase__InfluenzaA__ABI30392

SEQ ID NO: 207439 - RNA, 1410 nt, Artificial Sequence; identical to SEQ ID NO: 206802
  derived and/or modified CDS sequence (opt5) from neuraminidase__InfluenzaA__ABI30403

SEQ ID NO: 207440 - RNA, 1410 nt, Artificial Sequence; identical to SEQ ID NO: 206802
  derived and/or modified CDS sequence (opt5) from neuraminidase__InfluenzaA__ABI30414

SEQ ID NO: 207441 - RNA, 1410 nt, Artificial Sequence; identical to SEQ ID NO: 206399
  derived and/or modified CDS sequence (opt5) from neuraminidase__InfluenzaA__ABI30425

SEQ ID NO: 207442 - RNA, 1410 nt, Artificial Sequence; identical to SEQ ID NO: 206399
  derived and/or modified CDS sequence (opt5) from neuraminidase__InfluenzaA__ABI30436

SEQ ID NO: 207443 - RNA, 1410 nt, Artificial Sequence; identical to SEQ ID NO: 206399
  derived and/or modified CDS sequence (opt5) from neuraminidase__InfluenzaA__ABI30447

SEQ ID NO: 207444 - RNA, 1410 nt, Artificial Sequence; identical to SEQ ID NO: 206399
  derived and/or modified CDS sequence (opt5) from neuraminidase__InfluenzaA__ABI30458

SEQ ID NO: 207445 - RNA, 1410 nt, Artificial Sequence; identical to SEQ ID NO: 206399
  derived and/or modified CDS sequence (opt5) from neuraminidase__InfluenzaA__ABI30469

SEQ ID NO: 207446 - RNA, 1410 nt, Artificial Sequence; identical to SEQ ID NO: 206399
  derived and/or modified CDS sequence (opt5) from neuraminidase__InfluenzaA__ABI30480

SEQ ID NO: 207447 - RNA, 1410 nt, Artificial Sequence
  derived and/or modified CDS sequence (opt5) from neuraminidase__InfluenzaA__ABI30491
augaaccccaaucagaagaucauuaccaucggcagcgugucccugacaauuucuacgaucugcuucuuuaugcaaauugccauccucaucaccacagucacccugcacuucaaacaguacgaguuuaacagcccuccgaauaaccagguuaugcuuugugaacccacaauuaucgagagaaauauuaccaagaucguguaucugacaaacaccacgauugaaaaagagaucugcccuaagcucgcugaauaccggaauugguccaaaccccagugugacauuaccggguucgccccuuuuucuaaggauaacagcauccgccuguccgcgggaggcgacaucugggugacaagagagcccuaugucucuugcgauccugacaaguguuaccaauucgcucuugggcagggaaccacacugaauaacgugcauagcaaugauaccguucacgaccggacgccguaucgcacacuccugaugaacgagcugggcgugcccuuucaucucgggaccaaacaggucugcauugccugguccucuagcuccugucacgauggaaaggccuggcugcaugugugcguuacaggcgacgauaaaaaugcuaccgccagcuucaucuacaacggcagacuuguggacucuauugucuccuggagcaaggaaauccugcggacccaggagucugaaugugugugcauuaaugggacauguacgguggucaugaccgauggauccgcuagcggcaaagccgacacaaagauccucuuuaucgaggaggggaagauuguucacaccuccacacugucuggaagcgcgcaacacguggaagagugcuccugcuauccucgcuaccccggcgugagaugugucugccgggauaacuggaaagggagcaaccgcccuaucguggacauuaauaucaaggacuacucuauuguuuccagcuauguguguucuggacuugucggcgauacccccagaaagaacgacagcuccucuagcucccauugccuggauccgaauaacgaagagggcgggcacggagugaaaggcugggccuucgacgaugggaaugacguuuggaugggacggacgaucagcgaaaaacuccgcucuggcuacgagacauuuaaggugaucgaggggugguccaacccuaauagcaaacugcagauuaacagacaggucaucguggaucggggaaaucgcucuggcuauuccggcauuuucagcgucgaagggaaguccuguaucaacagaugcuuuuacguggagcugauucggggaagaaaggaagagaccgaaguucucuggaccucuaauagcaucguggucuucuguggcacauccgggaccuauggaacaggcucuuggcccgacggggcugauauuaaccugaugccuaucuga

SEQ ID NO: 207448 - RNA, 1410 nt, Artificial Sequence; identical to SEQ ID NO: 206399
  derived and/or modified CDS sequence (opt5) from neuraminidase__InfluenzaA__ABI30502

SEQ ID NO: 207449 - RNA, 1410 nt, Artificial Sequence
  derived and/or modified CDS sequence (opt5) from neuraminidase__InfluenzaA__ABI30513
augaaccccaaucagaagaucauuaccaucggcagcgugucccugacaauuucuacgaucugcuucuuuaugcaaauugccauccucaucaccacagucacccugcacuucaaacaguacgaguuuaacagcccuccgaauaaccagguuaugcuuugugaacccacaauuaucgagagaaauauuaccgaaaucguguaucugacaaacaccacgauugagaaggaaaucugcccuaaacucgcugaguaccggaauugguccaagccccagugugacauuaccggguucgccccuuuuucuaaagauaacagcauccgccuguccgcgggaggcgacaucugggugacaagagagcccuaugucucuugcgauccugacaaguguuaccaauucgcucuugggcagggaaccacacugaauaacgugcauagcaaugauaccguucacgaccggacgccguaucgcacacuccugaugaacgaacugggcgugcccuuucaucucgggaccaagcaggucugcauugccugguccucuagcuccugucacgauggaaaagccuggcugcaugugugcguuacaggcgacgauaagaaugcuaccgccagcuucaucuacaacggcagacuuguggacucuauugucuccuggagcaaagagauccugcggacccaggaaucugagugugugugcauuaaugggacauguacgguggucaugaccgauggauccgcuagcggcaaggccgacacaaaaauccucuuuaucgaggaagggaagauuguucacaccuccacacugucuggaagcgcgcaacacguggaggaaugcuccugcuauccucgcuaccccggcgugagaugugucugccgggauaacuggaaggggagcaaccgcccuaucguggacauuaauaucaaagacuacucuauuguuuccagcuauguguguucuggacuugucggcgauacccccagaaagaacgacagcuccucuagcucccauugccuggauccgaauaacgaggaaggcgggcacggagugaaaggcugggccuucgacgaugggaaugacguuuggaugggacggacgaucagcgagaagcuccgcucuggcuacgagacauuuaaagugaucgaagggugguccaacccuaauagcaagcugcagaccaacagacaggucauuguggaucggggaaaucgcucuggcuauuccggcaucuucagcgucgaggggaaauccuguauuaacagaugcuuuuacguggaacugauccggggaagaaaggaggaaaccgagguucucuggacaucuaauagcauuguggucuucuguggcaccuccgggacauauggaacgggcucuuggcccgacggggcugauaucaaccugaugccuauuuga

SEQ ID NO: 207450 - RNA, 1410 nt, Artificial Sequence; identical to SEQ ID NO: 206399
  derived and/or modified CDS sequence (opt5) from neuraminidase__InfluenzaA__ABI30524

SEQ ID NO: 207451 - RNA, 1410 nt, Artificial Sequence; identical to SEQ ID NO: 206399
  derived and/or modified CDS sequence (opt5) from neuraminidase__InfluenzaA__ABI30535

SEQ ID NO: 207452 - RNA, 1410 nt, Artificial Sequence
  derived and/or modified CDS sequence (opt5) from neuraminidase__InfluenzaA__ABI30546
augaaccccaaucagaagaucauuaccaucggcagcgugucccugacaauuucuacgaucugcuucuuuaugcaaauugccauccucaucaccacagucacccugcacuucaaacaguacgaguuuaacagcccuccgaauaaccagguuaugcuuugugaacccacaauuaucgagagaaauauuaccgaaaucguguaucugacaaacaccacgauugagaaggaaaucugcccuaaacucgcugaguaccggaauugguccaagccccagugugacauuaccggguucgccccuuuuucuaaagauaacagcauccgccuguccgcgggaggcgacaucugggugacaagagagcccuaugucucuugcgauccugacaaguguuaccaauucgcucuugggcagggaaccacacugaauaaccuccauagcaaugauaccgugcacgaccggacgccguaucgcacacugcugauguccgaacucggcguucccuuucaucuggggaccaaacaggugugcauugccuggucuagcuccagcugucacgauggaaaggccuggaugcaugucugcgugacaggcgacgauaagaacgcuaccgccucuuucaucuacaauggcagacuuguugacuccauugugagcuggucuaaagagauccugcggacccaggaauccgagugugucugcauuaacgggacauguacgguggugaugaccgauggaagcgcuuccggcaaggccgacacaaaaauccucuuuaucgaggaagggaagauuguccacaccucuacacugagcggauccgcgcaacacguugaggaaugcagcugcuauccucgcuaccccggcgugagaugugugugccgggauaauuggaaggggucuaaccgcccuaucgucgacauuaacaucaaagacuacuccauugugagcucuuauguuuguagcggacuugugggcgauacccccagaaagaaugacuccucuagcuccagccauugccuggauccgaacaaugaggaaggcgggcacggagucaaaggcugggccuucgacgaugggaacgacguguggaugggacggacgaucucugagaagcuccgcuccggcuacgagacauuuaaaguuaucgaaggguggagcaauccuaacucuaagcugcagauuaauagacaggugaucgucgaucggggaaaccgcuccggcuauagcggcauuuucuccguggaggggaaaaauuguaucaacagaugcuuuuacgucgaacugauucggggaagaaaggaggaaaccgaggugcucuggaccucuaauagcaucguuguguucuguggcacauccgggaccuauggaacaggcucuuggcccgacggggcugauauuaaccugaugccuaucuga

SEQ ID NO: 207453 - RNA, 1410 nt, Artificial Sequence; identical to SEQ ID NO: 206399
  derived and/or modified CDS sequence (opt5) from neuraminidase__InfluenzaA__ABI30557

SEQ ID NO: 207454 - RNA, 1410 nt, Artificial Sequence; identical to SEQ ID NO: 206786
  derived and/or modified CDS sequence (opt5) from neuraminidase__InfluenzaA__ABI30579

SEQ ID NO: 207455 - RNA, 1410 nt, Artificial Sequence
  derived and/or modified CDS sequence (opt5) from neuraminidase__InfluenzaA__ABI30590
augaaccccaaucagaagaucauuaccaucggcagcgugucccugacaauuucuacgaucugcuucuuuaugcaaauugccauccucaucaccacagucacccugcacuucaaacaguacgaguuuaacagcccuccgaauaaccagguuaugcuuugugaacccacaauuaucgagagaaauauuaccgaaaucguguaucugacaaacaccacgauugagaaggaaaucugcccuaaacucgcugaguaccggaauugguccaagccccagugugacauuaccggguucgccccuuuuucuaaagauaacagcauccgccuguccgcgggaggcgacaucugggugacaagagagcccuaugucucuugcgauccugacaaguguuaccaauucgcucuugggcagggaaccacacugaauaacgugcauagcaaugauaccguucacgaccggacgccguaucgcacacuccugaugaacgaacugggcgugcccuuucaucucgggaccaagcaggucugcauugccugguccucuagcuccugucacgauggaaaagccuggcugcaugugugcguuacaggcgacgauaagaaugcuaccgccagcuucaucuacaacggcagacuuguggacucuauugucuccuggagcaaaaagauccugcggacccaggagucugaaugugugugcauuaaugggacauguacgguggucaugaccgauggauccgcuagcggcaaagccgacacaaagauccucuuuaucgaggaggggaagauuguucacaccuccacacugucuggaagcgcgcaacacguggaagagugcuccugcuauccucgcuaccccggcgugagaugugucugccgggauaacuggaaagggagcaaccgcccuaucguggacauuaauaucaaggacuacucuauuguuuccagcuauguguguucuggacuugucggcgauacccccagaaagaacgacagcuccucuagcucccauugccuggauccgaauaacgaagagggcgggcacggagugaaaggcugggccuucgacgaugggaaugacguuuggaugggacggacgaucagcgaaaaacuccgcucuggcuacgagacauuuaaggugaucgaggggugguccaacccuaauagcaaacugcagauuaacagacaggucaucguggaucggggaaaucgcucuggcuauuccggcauuuucagcgucgaagggaagggauguaucaacagaugcuuuuacguggagcugauucggggcagaaaggaagagaccgaaguucucuggaccuccaauucuaucguggucuucugugggacaagcggaaccuauggcacaggguccuggcccgacggcgcugauauuaaccugaugccuaucuga

SEQ ID NO: 207456 - RNA, 1410 nt, Artificial Sequence; identical to SEQ ID NO: 206879
  derived and/or modified CDS sequence (opt5) from neuraminidase__InfluenzaA__ABI30601

SEQ ID NO: 207457 - RNA, 1410 nt, Artificial Sequence
  derived and/or modified CDS sequence (opt5) from neuraminidase__InfluenzaA__ABI30612
augaaccccaaucagaagaucauuaccaucggcagcgugucccugacaauuucuacgaucugcuucuuuaugcaaauugccauccucaucaccacagucacccugcacuucaaacaguacgaguuuaacagcccuccgaauaaccagguuaugcuuugugaacccacaauuaucgagagaaauauuaccgaaaucguguaucugacaaacaccacgauugagaaggaaaucugcccuaaacucgcugaguaccggaauugguccaagccccaguguaacauuaccggguucgccccuuuuucuaaagacaauagcauccgccuguccgcgggaggcgauaucugggugacaagagagcccuaugucucuugcgacccugauaaguguuaccaauucgcucuugggcagggaaccacacugaacaaugugcauagcaacgacaccguucacgaucggacgccguaucgcacacuccugaugaaugaacugggcgugcccuuucaucucgggaccaagcaggucugcauugccugguccucuagcuccugucacgacggaaaagccuggcugcaugugugcguuacaggcgaugacaagaacgcuaccgccagcuucaucuacaauggcagacuuguggauucuauugucuccuggagcaaagagauccugcggacccaggaaucugagugugugugcauuaacgggacauguacgguggucaugaccgacggauccgcuagcggcaaggccgauacaaaaauccucuuuaucgaggaagggaagauuauccacaccuccacacugucuggaagcgcgcaacacguugaggaaugcuccugcuauccucgcuaccccggcgugagaugugugugccgggacaacuggaaggggagcaaucgcccuauugucgauaucaacauuaaagacuacucuaucguguccagcuauguuuguucuggacuugugggcgacacccccagaaagaaugauagcuccucuagcucccauugccuggacccgaacaaugaggaaggcgggcacggagucaaaggcugggccuucgaugacgggaacgauguguggaugggacggacgaucagcgagaagcuccgcucuggcuacgagacauuuaaaguuauugaagggugguccaauccuaacagcaagcugcagaucaauagacaggugauugucgaccggggaaaccgcucuggcuauuccggcaucuucagcguggaggggaaauccuguauuaauagaugcuuuuacgucgaacugauccggggaagaaaggaggaaaccgaggugcucuggaccucuaacagcauuguuguguucuguggcacauccgggaccuauggaacaggcucuuggcccgauggggcugacaucaaucugaugccuaucuga

SEQ ID NO: 207458 - RNA, 1410 nt, Artificial Sequence; identical to SEQ ID NO: 206879
  derived and/or modified CDS sequence (opt5) from neuraminidase__InfluenzaA__ABI30623

SEQ ID NO: 207459 - RNA, 1410 nt, Artificial Sequence
  derived and/or modified CDS sequence (opt5) from neuraminidase__InfluenzaA__ABI30736
augaaccccaaucagaagaucauuaccaucggcagcgugucccugacaauuucuacgaucugcuucuuuaugcaaauugccauccucaucaccacagucacccugcacuucaaacaguacgaguuuaacagcccuccgaauaaccagguuaugcuuugugaacccacaauuaucgagagaaauauuaccgaaaucguguaucugacaaacaccacgauugagaaggaaaucugcccuaaacucgcugaguaccggaauugguccaagccccagugugacauuaccggguucgccccuuuuucuaaagauaacagcauccgccuguccgcgggaggcgacaucugggugacaagagagcccuaugucucuugcgauccugacaaguguuaccaauucgcucuugggcagggaaccacacugaauaacgugcauagcaaugauaccguucacgaccggacgccguaucgcacacuccugaugaacgaacugggcgugcccuuucaucucgggaccaagcaggucugcauugccugguccucuagcuccugucacgauggaaaagccuggcugcaugugugcguuacaggcgacgauaagaaugcuaccgccagcuucaucuacaacggcagacuuguggacucuauugucuccuggagcaaaaagauccugcggacccaggagucugaaugugugugcauuaaugggacauguacgguggucaugaccgauggauccgcuagcggcaaagccgacacaaagauccucuuuaucgaggaggggaagauuguucacaccuccacacugucuggaagcgcgcaacacguggaagagugcuccugcuauccucgcuaccccggcgugagaugugucugccgggauaacuggaaagggagcaaccgcccuaucguggacauuaauaucaaggacuacucuguuguguccagcuaugucuguucuggacuugugggcgauacccccagaaagaacgacagcuccucuagcucccauugccuggauccgaauaacgaagagggcgggcacggaguuaaaggcugggccuucgacgaugggaaugacguguggaugggacggacgauuagcgaaaaacuccgcucuggcuacgagacauuuaaggucaucgaggggugguccaacccuaauagcaaacugcagaucaacagacaggugauugucgaucggggaaaucgcucuggcuauuccggcaucuucagcguggaagggaaguccuguauuaacagaugcuuuuacguugagcugauccggggaagaaaggaagagaccgaagugcucuggaccucuaauagcauugucguguucuguggcacauccgggaccuauggaacaggcucuuggcccgacggggcugauaucaaccugaugccuauuuga

SEQ ID NO: 207460 - RNA, 1410 nt, Artificial Sequence
  derived and/or modified CDS sequence (opt5) from neuraminidase__InfluenzaA__ABI30758
augaaccccaaucagaagaucauuaccaucggcagcgugucccugacaauuucuacgaucugcuucuuuaugcaaauugccauccucaucaccacagucacccugcacuucaaacaguacgaguuuaacagcccuccgaauaaccagguuaugcuuuaugaacccacaauuaucgagagaaauauuaccgaaaucguguaccugacaaacaccacgauugagaaggaaaucuguccuaaacucgcugaguaucggaauugguccaagccccagugcgacauuaccggguucgccccuuuuucuaaagauaacagcauccgccuguccgcgggaggcgacaucugggugacaagagagcccuacgucucuugugauccugacaagugcuaucaauucgcucuugggcagggaaccacacugaauaacgugcauagcaaugauaccguucacgaccggacgccguaccgcacacuccugaugaacgaacugggcgugcccuuucaucucgggaccaagcaggucuguauugccugguccucuagcuccugccacgauggaaaagccuggcugcauguguguguuacaggcgacgauaagaaugcuaccgccagcuucaucuauaacggcagacuuguggacucuauugucuccuggagcaaaaagauccugcggacccaggagucugaaugcguguguauuaaugggacaugcacgguggucaugaccgauggauccgcuagcggcaaagccgacacaaagauccucuuuaucgaggaggggaagauuguucacaccuccacacugucuggaagcgcgcaacacguggaagaguguuccugcuacccucgcuaccccggcgugagaugcgucugucgggauaacuggaaagggagcaaccgcccuaucguggacauuaauaucaaggacuauucuauuguuuccagcuacgugugcucuggacuugucggcgauacccccagaaagaacgacagcuccucuagcucccauugucuggauccgaauaacgaagagggcgggcacggagugaaaggcugggccuucgacgaugggaaugacguuuggaugggacggacgaucagcgaaaaacuccgcucuggcuaugagacauuuaaggugaucgaggggugguccaacccuaauagcaaacugcagauuaacagacaggucaucguggaucggggaaaucgcucuggcuacuccggcauuuucagcgucgaagggaaguccugcaucaacagauguuuuuauguggagcugauucggggaagaaaggaagagaccgaaguucucuggaccucuaauagcaucguggucuucugcggcacauccgggaccuacggaacaggcucuuggcccgacggggcugauauuaaccugaugccuaucuga

SEQ ID NO: 207461 - RNA, 1410 nt, Artificial Sequence; identical to SEQ ID NO: 206786
  derived and/or modified CDS sequence (opt5) from neuraminidase__InfluenzaA__ABI30769

SEQ ID NO: 207462 - RNA, 1410 nt, Artificial Sequence; identical to SEQ ID NO: 206786
  derived and/or modified CDS sequence (opt5) from neuraminidase__InfluenzaA__ABI30780

SEQ ID NO: 207463 - RNA, 1410 nt, Artificial Sequence; identical to SEQ ID NO: 206786
  derived and/or modified CDS sequence (opt5) from neuraminidase__InfluenzaA__ABI30791

SEQ ID NO: 207464 - RNA, 1410 nt, Artificial Sequence; identical to SEQ ID NO: 206786
  derived and/or modified CDS sequence (opt5) from neuraminidase__InfluenzaA__ABI30802

SEQ ID NO: 207465 - RNA, 1410 nt, Artificial Sequence; identical to SEQ ID NO: 206786
  derived and/or modified CDS sequence (opt5) from neuraminidase__InfluenzaA__ABI30813

SEQ ID NO: 207466 - RNA, 1410 nt, Artificial Sequence; identical to SEQ ID NO: 206786
  derived and/or modified CDS sequence (opt5) from neuraminidase__InfluenzaA__ABI30824

SEQ ID NO: 207467 - RNA, 1410 nt, Artificial Sequence; identical to SEQ ID NO: 206786
  derived and/or modified CDS sequence (opt5) from neuraminidase__InfluenzaA__ABI30835

SEQ ID NO: 207468 - RNA, 1410 nt, Artificial Sequence; identical to SEQ ID NO: 206786
  derived and/or modified CDS sequence (opt5) from neuraminidase__InfluenzaA__ABI30846

SEQ ID NO: 207469 - RNA, 1410 nt, Artificial Sequence; identical to SEQ ID NO: 207257
  derived and/or modified CDS sequence (opt5) from neuraminidase__InfluenzaA__ABI30857

SEQ ID NO: 207470 - RNA, 1410 nt, Artificial Sequence; identical to SEQ ID NO: 207257
  derived and/or modified CDS sequence (opt5) from neuraminidase__InfluenzaA__ABI30868

SEQ ID NO: 207471 - RNA, 1350 nt, Artificial Sequence
  derived and/or modified CDS sequence (opt5) from neuraminidase__InfluenzaA__ABI36157
augaaccccaaucagaagaucauuaccaucggcagcauuugcauggccaucgggacagugucccugaugcuccaaauuggaaacaugaucucuaucugggucagccacuccauucagacgggcaaucagcaucaggcugagucuaucagcaacaccaauccucugacagaaaaagccguugcguccgugacccuugcugggaacucuagccuguguccgauuagaggaugggccgugcacuccaaggacaauagcauccggauuggcucuaaaggggaugucuucgugauccgcgagcccuuuauuuccugcagccauucugaauguagaacauucuuucucacccaaggagcccugcuuaacgacaagcacuccaaugagacaguuaaagaucggagcccucaucgcacccugaugucuugccccgugggcgaagcuccuucccccuacaacagcagauucgaguccgucgccuggucugcuagcgccugucacgacggcacguccuggcucaccaucgggaucagcggaccugauaauggcgcgguggccguucugaaguauaacgggauuaucacagacaccauuaagucuuggcggaauaacauccugcgcacacaggaguccgaaugcgcuugugugaauggaagcugcuuuaccgucaugacggauggcccgucuaacgggcaggccagcuacaaaauuuucaagauggagaaaggaaagguggugaaauccgucgaacucgacgcucccaacuaucacuacgaggaguguucuugcuauccugaugccggcgaaaucacauguguuugcagagacaauuggcauggcagcaaccggcccuggguguccuuuaaucagaaccuggaguaccaaaucggguauauuugcagcggaguguucggcgauaauccucgccccaacgacgggaccggaucuuguggcccgauguccagcaauggggcguacggagucaagggcuuuucuuucaaguacggcaacgggguguggaucggaagaacaaaauccaccaauagccgguccggcuuugaaaugauuugggauccuaacggguggaccggaacagacucuagcuucuccguuaagcaggacaucguggccauuacggauuggucuggcuauagcggguccuuuguccagcaccccgagcuuaccggccuggacugcauccgcccuuguuucuggguggaacucaucagaggacggcccaaagagagcacaauuuggaccucuggcuccagcaucucuuucugcgggguuaauuccgauacagugagcuggucuuggcccgacggagcugagcugccuuuuaccauugauaaguga

SEQ ID NO: 207472 - RNA, 1350 nt, Artificial Sequence; identical to SEQ ID NO: 207471
  derived and/or modified CDS sequence (opt5) from neuraminidase__InfluenzaA__ABI36168

SEQ ID NO: 207473 - RNA, 1350 nt, Artificial Sequence; identical to SEQ ID NO: 207471
  derived and/or modified CDS sequence (opt5) from neuraminidase__InfluenzaA__ABI36179

SEQ ID NO: 207474 - RNA, 1350 nt, Artificial Sequence; identical to SEQ ID NO: 207471
  derived and/or modified CDS sequence (opt5) from neuraminidase__InfluenzaA__ABI36189

SEQ ID NO: 207475 - RNA, 1350 nt, Artificial Sequence
  derived and/or modified CDS sequence (opt5) from neuraminidase__InfluenzaA__ABI36278
augaaccccaaucagaagaucauuaccaucggcagcauuugcauggugaucgggauugucucccugaugcuccaaaucggaaacaugaucucuauuuggguuagccacuccauccagaaaggcaaucagcaucaggccgagucuauuagcaacacaaauccucugacggaaaaggcuguggccuccgugacccuugcggggaacucuagccuguguccgaucagaggaugggcuguccacuccaaagacaauaacauucggaucggcagcaagggggauguguucguuauucgcgagcccuuuaucucuugcucccaucucgaauguagaacauucuuucugacccaaggagcccuucugaaugacaaacacagcaacggcacagugaaggaucggucuccucaucgcacccucauguccugccccgucggcgaggccccuagccccuacaauucuagauucgaauccguggcuuggagcgccuccgcuugucacgacgggacaucuuggcugaccaucggaauuagcggcccugauaacgaggccguugcggugcugaaguauaaugggaucauuacggacaccaucaaauccuggcggaacaauauucuccgcacacaggagagcgaaugcgccugugucaacggaucuugcuuuaccgugaugacagauggcccguccaacgggcaggcuagcuacaagaucuucaaaauggagaagggaaaaguggucaagucuguugaacuggacgcccccaauuaucacuacgaggaguguagcugcuauccugaugcuggcgaaaucaccugugugugcagagacaacuggcauggcuccaaucggcccugggugucuuuuaaccagaaucuugaguaccaaauuggguauaucugcagcggagucuucggcgauaacccucgccccaaugacgggacgggauccuguggcccgaugagcccuaacggggccuacggagugaagggcuuuucuuucaaauacggcaaugggguuuggauuggaagaacaaaguccaccaacagccggucuggcuuugaaaugaucugggaucccaauggguggacaggaaccgacuccagcuucuccgugaaacaggacauugucgcgaucaccgauuggucuggcuauagcggguccuuugugcagcacccugagcugacaggccucgacugcauccgccccuguuucuggguugaacugauuagaggacggcccaaggagucuacgaucuggaccagcggcuccagcauuucuuucugcggggugaacuccgauacagucagcuggucuuggccugacggagccgagcuuccguuuaccaucgauaaauga

SEQ ID NO: 207476 - RNA, 1350 nt, Artificial Sequence; identical to SEQ ID NO: 207475
  derived and/or modified CDS sequence (opt5) from neuraminidase__InfluenzaA__ABI36287

SEQ ID NO: 207477 - RNA, 1350 nt, Artificial Sequence; identical to SEQ ID NO: 207475
  derived and/or modified CDS sequence (opt5) from neuraminidase__InfluenzaA__ABI36298

SEQ ID NO: 207478 - RNA, 1350 nt, Artificial Sequence
  derived and/or modified CDS sequence (opt5) from neuraminidase__InfluenzaA__ABI36314
augaaccccaaucagaagaucauuaccaucggcagcauuugcauggugaucgggauugucucccugaugcuccaaaucggaaacaugaucucuauuuggguuagccacuccauccagacaggcaaucagcaucaggccgagucuauuagcaacacgaauccucugaccgaaaaagcuguggccuccgugacacuugcggggaacucuagccuguguccgaucagaggaugggcuguccacuccaaggacaauaacauucggaucggcagcaaaggggauguguucguuauucgcgagcccuuuaucucuugcucccaucucgaauguagaaccuucuuucugacacaaggagcccuucugaaugacaagcacagcaacggcaccgugaaagaucggucuccucaucgcacacucauguccugccccgucggcgaggccccuagccccuacaauucuagauucgaauccguggcuuggagcgccuccgcuugucacgacgggaacucuuggcugaccaucggaauuagcggcccugauaaugaggccguugcggugcugaaguauaacgggaucauuacggacaccaucaaguccuggcggaauaacauucuccgcacacaggagagcgaaugcgccugugucaacggaucuugcuuuaccgugaugacagauggcccguccaaugggcaggcuagcuacaaaaucuucaagauggagaaaggaaagguggucaaaucuguugaacuggacgcccccaacuaucacuacgaggaguguagcugcuauccugaugcuggcgaaaucaccugugugugcagagacaauuggcauggcuccaaccggcccugggugucuuuuaaucagaaccuugaguaccaaauuggguauaucugcagcggagucuucggcgauaauccucgccccaacgacgggacgggauccuguggcccgaugagcccuaauggggccuacggagugaagggcuuuucuuucaaguacggcaacgggguuuggauuggaagaacaaaauccaccaauagccggucuggcuuugaaaugaucugggaucccaacggguggacaggaaccgacuccagcuucuccgugaagcaggacauugucgcgaucaccgauuggucuggcuauagcggguccuuugugcagcacccugagcugacaggccucgacugcauccgccccuguuucuggguugaacugauuagaggacggcccaaagagucuacgaucuggaccagcggcuccagcauuucuuucugcggggucaauuccgauacagugagcuggucuuggccugacggagccgagcuuccguuuaccaucgauaaguga

SEQ ID NO: 207479 - RNA, 1350 nt, Artificial Sequence
  derived and/or modified CDS sequence (opt5) from neuraminidase__InfluenzaA__ABI36336
augaaccccaaucagaagaucauuaccaucggcagcauuugcauggugaucgggauugucucccugaugcuccaaaucggaaacaugaucucuauuuggguuagccacuccgugcagacaggcaaucagcaucaggccgagucuaucagcaacacgaauccucugaccgaaaaagcuguggccuccgucacacuugcggggaacucuagccuguguccgauuagaggaugggcugugcacuccaaggacaauaacauccggauuggcagcaaaggggauguuuucgugauccgcgagcccuuuauuucuugcucccaucucgaauguagaaccuucuuucugacacaaggagcccuucugaaugacaagcacagcaacggcaccgucaaagaucggucuccucaucgcacacucauguccugcccccugggcgaggccccuagccccuacaauucuagauucgaauccgugagcugguccgcuucugccugucacgacgggaccagcuggcugacgaucggaaucuccggcccugauaacgaggcuguugccgugcucaaguauaaugggauuaucaccgacacaauuaagagcuggcggaacaauauccugcgcacccaggagucugaaugcgcgugugucaacggauccugcuuuacagugaugaccgauggcccgagcaacgggcaggccucuuacaaaauuuucaagauggagaaaggaaagguggucaaaagcguugaacuugacgcucccaauuaucacuacgaggaguguuccugcuauccugaugccggcgaaaucacgugugugugcagagacaacuggcauggcucuaaucggcccugggugagcuuuaaccagaaucuggaguaccaaaucggguauauuugcuccggagucuucggcgauaacccucgccccaaugacgggacaggaagcuguggcccgaugucuccuaacggggcuuacggagugaagggcuuuuccuucaaguacggcaaugggguuuggaucggaagaaccaaaagcacaaacucucgguccggcuuugaaaugauuugggaucccaauggguggaccggaaccgacagcuccuucucugugaagcaggacaucgucgccauuacagauuggagcggcuauuccgggucuuuugugcagcacccugagcucacgggccuggacugcauccgccccuguuucuggguugaacuuaucagaggacggcccaaagagagcaccauuuggacauccggcagcaucauuucuuucugcggggugaacuccgauaccgucagcuggucuuggccugacggagcggagcugccguuuacaaucgauaaguga

SEQ ID NO: 207480 - RNA, 1350 nt, Artificial Sequence
  derived and/or modified CDS sequence (opt5) from neuraminidase__InfluenzaA__ABI36358
augaaccccaaucagaagaucauuaccaucggcagcauuugcauggugaucgggauugucucccugaugcuccaaaucggaaacaugaucucuauuuggguuagccacuccgugcagacaggcaaucagcaucaggccgagucuaucagcaacacgaauccucugaccgaaaaagcuguggccuccgucacacuugcggggaacucuagccuguguccgauuagaggaugggcugugcacuccaaggacaauaacauccggauuggcagcaaaggggauguuuucgugauccgcgagcccuuuauuucuugcucccaucucgaauguagaaccuucuuucugacacaaggagcccuucugaaugacaagcacagcaacggcaccgucaaagaucggucuccucaucgcacacucauguccugccccgugggcgaggccccuagccccuacaauucuagauucgaauccguugcuuggagcgccuccgcuugucacgacgggaccucuuggcugacgaucggaaucagcggcccugauaacgaggccguggcgguccugaaguauaaugggauuaucaccgacacaauuaaguccuggcggaacaauauccuccgcacccaggagagcgaaugcgccugugugaacggaucuugcuuuacagugaugaccgauggcccguccaacgggcaggcuagcuacaaaauuuucaagauggagaaaggaaaggucguuaaaucuguggaacuggacgcccccaauuaucacuacgaggaguguagcugcuauccugaugcuggcgaaaucacgugugugugcagagacaacuggcauggcuccaaucggcccugggucucuuuuaaccagaaucuugaguaccaaaucggguauauuugcagcggaguguucggcgauaacccucgccccaaugacgggacaggauccuguggcccgaugagcccuaacggggccuacggaguuaagggcuuuucuuucaaguacggcaaugggguguggaucggaagaaccaaauccacaaacagccggucuggcuuugaaaugauuugggaucccaauggguggaccggaaccgacuccagcuucuccgucaagcaggacaucguggcgauuacagauuggucuggcuauagcggguccuuuguucagcacccugagcugacgggccucgacugcauccgccccuguuucuggguggaacugaucagaggacggcccaaagagucuaccauuuggacaagcggcuccagcaucucuuucugcggggucaacuccgauaccgugagcuggucuuggccugacggagccgagcuuccguuuacaauugauaaguga

SEQ ID NO: 207481 - RNA, 1350 nt, Artificial Sequence; identical to SEQ ID NO: 207471
  derived and/or modified CDS sequence (opt5) from neuraminidase__InfluenzaA__ABI36369

SEQ ID NO: 207482 - RNA, 1350 nt, Artificial Sequence
  derived and/or modified CDS sequence (opt5) from neuraminidase__InfluenzaA__ABI36391
augaaccccaaucagaagaucauuaccaucggcagcauuugcauggugaucgggauugucucccugaugcuccaaaucggaaacaugaucucuauuuggguuagccacuccacacagaaaggcaaucagcaucaggccgagucuaucagcaacacgaauccucugaccgaaaaggcuguggccuccgugacacuugcggggaacucuagccuguguccgauuagaggaugggcuguccacuccaaagacaauaacauccggauuggcagcaagggggauguguucguuauccgcgagcccuuuauuucuugcucccaucucgaauguagaaccuucuuucugacacaaggagcccuucugaaugacaaacacagcaacggcaccgugaaggaucggucuccucaucgcacacucauguccugccccgucggcgaggccccuagccccuacaauucuagauucgaauccguggcuuggagcgccuccgcuugucacgacgggaccucuuggcugacgaucggaaucagcggcccugauaacgaggccguugcggugcugaaguauaaugggauuaucaccgacacaauuaaauccuggcggaacaauauccuccgcacccaggagagcgaaugcgccugugucaacggaucuugcuuuacagugaugaccgauggcccguccaacgggcaggcuagcuacaagauuuucaaaauggagaagggaaaaguggucaagucuguugaacuggacgcccccaauuaucacuacgaggaguguagcugcuauccugaugcuggcgaaaucacgugugugugcagagacaacuggcauggcuccaaucggcccugggugucuuuuaaccagaaucuugaguaccaaaucggguauauuugcagcggaaucuucggcgauaacccucgccccaaugacgggacaggauccuguggcccgauguuuccuaacggggccuacggagucaagggcuucagcuuuaaauacggcaaugggguguggauuggaagaaccaagucuacaaacucccggagcggcuucgaaaugaucugggaucccaauggguggaccggaaccgacucuuccuuuagcguuaaacaggacauuguggcgaucacagauugguccggcuauucugggagcuucguccagcacccugagcugacgggccucgacugcauccgccccuguuucuggguggaacugauuagaggacggcccaaggaguccaccaucuggacaucuggcagcuccauuagcuuuugcgggguuaacucugauaccguguccuggagcuggccugacggagccgagcuuccguucacaaucgauaaauga

SEQ ID NO: 207483 - RNA, 1350 nt, Artificial Sequence; identical to SEQ ID NO: 207482
  derived and/or modified CDS sequence (opt5) from neuraminidase__InfluenzaA__ABI36402

SEQ ID NO: 207484 - RNA, 1350 nt, Artificial Sequence; identical to SEQ ID NO: 207471
  derived and/or modified CDS sequence (opt5) from neuraminidase__InfluenzaA__ABI36413

SEQ ID NO: 207485 - RNA, 1350 nt, Artificial Sequence
  derived and/or modified CDS sequence (opt5) from neuraminidase__InfluenzaA__ABI36446
augaaccccaaucagaagaucauuaccaucggcagcauuugcauggugaucgggauugucucccugaugcuccaaaucggaaacaugaucucuauuuggguuagccacuccauccagacaggcaaucagcaucaggccgagucuauuagcaacacgaauccucugaccgaaaaagcuguggccuccgugacacuugcggggaacucuagccuguguccgaucagaggaugggcuguccacuccaaggacaauaacauucggaucggcagcaaaggggauguguucguuauucgcgagcccuuuaucucuugcucccaucucgaauguagaaccuucuuucugacacaaggagcccuucugaaugacaagcacagcaacggcaccgugaaagaucggucuccucaucgcacacucauguccugccccgucggcgaggccccuagccccuacaauucuagauucgaauccguggcuuggagcgccuccgcuugucacgacgggaccucuuggcugacgaucggaauuagcggcccugauaacgaggccguugcggugcugaaguauaaugggaucauuaccgacacaaucaaguccuggcggaacaauauucuccgcacccaggagagcgaaugcgccugugucaacggaucuugcuuuacagugaugaccgauggcccguccaacgggcaggcuagcuacaaaaucuucaagauggagaaaggaaagguggucaaaucuguugaacuggacgcccccaauuaucacuacgaggaguguagcugcuauccugaugcuggcgaaaucacgugugugugcagagacaacuggcauggcuccaaucggcccuggauuucuuuuaaccagaaucuugaguaccaaaucggguauauuugcagcggaguguucggcgauaacccucgccccaaugacgggacaggauccuguggcccgaugagcccuaacggggccuacggagucaagggcuuuucuuucaaguacggcaaugggguguggaucggaagaaccaaauccacaaacagccggucuggcuuugaaaugauuugggaucccaauggguggaccggaaccgacuccagcuucuccguuaagcaggacaucguggcgaucacagauuggucuggcuauagcggguccuuuguccagcacccugagcugacgggccucgacugcauucgccccuguuucuggguggaacugaucagaggacggcccaaagagucuaccauuuggacaagcggcuccagcaucucuuucugcgggguuaacuccgauaccgugagcuggucuuggccugacggagccgagcuuccguuuacaauugauaaguga

SEQ ID NO: 207486 - RNA, 1350 nt, Artificial Sequence; identical to SEQ ID NO: 207475
  derived and/or modified CDS sequence (opt5) from neuraminidase__InfluenzaA__ABI36457

SEQ ID NO: 207487 - RNA, 1350 nt, Artificial Sequence
  derived and/or modified CDS sequence (opt5) from neuraminidase__InfluenzaA__ABI36476
augaaccccaaucagaagaucauuaccaucggcagcauuugcauggugaucgggauugucucccugaugcuccaaaucggaaacaugaucucuauuuggguuagccacuccacacagaaaggcaaucagcaucaggccgagucuaucagcaacacgaauccucugaccgaaaaggcuguggccuccgugacacuugcggggaacucuagccuguguccgauuagaggaugggcuguccacuccaaagacaauaacauccggauuggcagcaagggggauguguucguuauccgcgagcccuuuauuucuugcucccaucucgaauguagaaccuucuuucugacacaaggagcccuucugaaugacaaacacagcaacggcaccgugaaggaucggucuccucaucgcacacucauguccugccccgucggcgaggccccuagccccuacaauucuagauucgaauccguggcuuggagcgccuccgcuugucacgacgggaccucuuggcugacgaucggaaucagcggcccugauaacgaggccguugcggugcugaaguauaaugggauuaucaccgacacaauuaaauccuggcggaacaauauccuccgcacccaggagagcgaaugcgccugugucaacggaucuugcuuuacagugaugaccgauggcccguccaacgggcaggcuagcuacaagauuuucaaaauggagaagggaaaaguggucaagucuguugaacuggacgcccccaauuaucacuacgaggaguguagcugcuauccugaugcuggcgaaaucacgugugugugcagagacaacuggcauggcuccaaucggcccugggugucuuuuaaccagaaucuugaguaccaaaucggguauauuugcagcggagucuucggcgauaacccucgccccaaugacgggacaggauccuguggcccgaugagcccuaacggggccuacggagugaagggcuuuucuuucaaauacggcaaugggguuuggaucggaagaaccaaguccacaaacagccggucuggcuuugaaaugauuugggaucccaauggguggaccggaaccgacuccagcuucuccgugaaacaggacaucgucgcgauuacagauuggucuggcuauagcggguccuuugugcagcacccugagcugacgggccucgacugcauccgccccuguuucuggguugaacugaucagaggacggcccaaggagucuaccauuuggacaagcggcuccagcaucucuuucugcggggugaacuccgauaccgucagcuggucuuggccugacggagccgagcuuccguuuacaauugauaaauga

SEQ ID NO: 207488 - RNA, 1350 nt, Artificial Sequence
  derived and/or modified CDS sequence (opt5) from neuraminidase__InfluenzaA__ABI49409
augaaccccaauagaaagaucauuaccaucggcagcauuugcauggugaucgggauggucucccugaugcuccagauuggaaacaugaucucuaucuggguuagccacuccauucaaacaggcaaucagcaucaggccgagucuaucagcaacacgaauccucugaccgaaaaagcuguggccuccgugacacuugcggggaacucuagccuguguccgauucggggaugggcuguccacuccaaggacaauaacauccgcauuggcagcaaaggggauguguucguuaucagagagcccuuuauuucuugcucccaucucgaaugucggaccuucuuucugacacagggagcccuucugaaugacaagcacagcaacggcaccgugaaagaucgcucuccucauagaacacucauguccugccccgucggcgaggccccuagccccuacaauucucgguucgaauccguggcuuggagcgccuccgcuugucacgacgggaccucuuggcugacgaucggaaucagcggcccugauaacgaggccguugcggugcugaaguauaaugggauuaucaccgacacaauuaaguccuggcgcaacaauauccucagaacccaagagagcgaaugcgccugugucaacggaucuugcuuuacagugaugaccgauggcccguccaacgggcaggcuagcuacaaaauuuucaagauggagaaaggaaagguggucaaaucuguugaacugguggcccccaauuaucacuacgaggaguguagcugcuauccugacgcuggcgaaaucacgugugugugccgggauaacuggcauggcuccaaucgccccugggucucuuuuaaccagaaucuugaguaccagaucggguauauuugcagcggaguguucggcgacaacccuagacccaaugaugggacaggauccuguggcccgaugagcccuaacggggccuacggaguuaagggcuuuucuuucaaguacggcaaugggguguggaucggacggaccaaauccacaaacagccgcucuggcuuugaaaugauuugggaccccaauggguggaccggaaccgauuccagcuucuccgucaagcaagacaucguggcgauuacagacuggucuggcuauagcggguccuuuguucagcacccugagcugacgggccucgauugcaucagacccuguuucuggguggaacugauccggggacgccccaaagagucuaccauuuggacaagcggcuccagcaucucuuucugcggggucaacuccgacaccgccagcuggucuuggccugauggagcugagcuuccguuuacaauugacaaguga

SEQ ID NO: 207489 - RNA, 1350 nt, Artificial Sequence
  derived and/or modified CDS sequence (opt5) from neuraminidase__InfluenzaA__ABI49417
augaaccccaaucagaagaucauuaccaucggcagcauuugcauggugaucgggauugucucccugaugcuccaaaucggaaacaugaucucuauuuggguuagccacuccauccagacaggcaaucagcaucaggccgagucuauuagcaacacgaauccucugaccgaaaaagcuguggccuccgugacacuugcggggaacucuagccuguguccgaucagaggaugggcuguccacuccaaggacaauaacauucggaucggcagcaaaggggauguguucguuauucgcgagcccuuuaucucuugcucccaucucgaauguagaaccuucuuucugacacggggagcccuucugaaugacaagcacagcaacggcaccgugaaagaucgcucuccucauagaacacucauguccugccccgucggcgaggccccuagccccuacaauucucgguucgaauccguggcuuggagcgccuccgcuugucacgacgggaccucuuggcugacgaucggaauuagcggcccugauaacgaggccguugcggugcugaaguauaaugggaucauuaccgacacaaucaaguccuggcgcaacaauauucucagaacccaagagagcgaaugcgccugugucaacggaucuugcuuuacagugaugaccgauggcccguccaacgggcaggcuagcuacaaaaucuucaagauggagaaaggaaagguggucaaaucuguugaacuggacgcccccaauuaucacuacgaggaguguagcugcuauccugaugcuggcgaaaucacgugugugugccgggacaacuggcauggcuccaaucgccccugggugucuuuuaaccagaaucuugaguaccagauuggguauaucugcagcggagucuucggcgauaacccuagacccaaugacgggacaggauccuguggcccgaugagcccuaacggggccuacggagugaagggcuuuucuuucaaguacggcaaugggguuuggauuggacggaccaaauccacaaacagccgcucuggcuuugaaaugaucugggaucccaauggguggaccggaaccgacuccagcuucuccgugaagcaagacauugucgcgaucacagauuggucuggcuauagcggguccuuugugcagcacccugagcugacgggccucgacugcaucagacccuguuucuggguugaacugauucggggacagcccaaagagucuaccaucuggacaagcggcuccagcauuucuuucugcggggugaacuccgauaccgucagcuggucuuggccugacggagccgagcuuccguuuacaaucgauaaguga

SEQ ID NO: 207490 - RNA, 1410 nt, Artificial Sequence
  derived and/or modified CDS sequence (opt5) from neuraminidase__InfluenzaA__ABI84962
augaaccccaaucagaagaucauuaccaucggcagcgugucccugacaauugccacggucugcuuccucaugcaaaucgcuauucuggccaccacaguuacccuucacuuuaaacagcaugagugugacucuccugcgagcaaccaggugaugccgugcgaacccaucaucauugagagaaauaucacagaaauuguguaccugaacaauaccacaaucgagaaggaaauuuguccugaggucguggaguaucggaacugguccaaaccccagugccaaaucaccggguucgcuccuuuuucuaaggauaauagcauucgccucuccgccggaggcgacaucuggguuacgagagaacccuacgugucuugugauccugggaaaugcuaucaguucgcccugggacagggcaccacacuugacaacaagcacagcaaugggaccauccaugaucggauuccgcaccgcacacugcucaugaacgagcugggaguccccuuucaucugggcaccaaacagguguguguugcuugguccucuagcuccugccacgacggcaaggccuggcuccacgugugugucacgggggaugacagaaaugcuacagccagcuucaucuacgauggacggcugguggacucuauuggcuccuggagccaaaacauccuucgcacccaggaaucugagugcguguguauuaaugggacaugcaccgucguuaugaccgauggauccgcgagcggcagagccgacacacggauccuguuuaucaaggaggggaaaauugugcauaucuccccucucucuggaagcgcucagcacauugaagagugcuccuguuauccccgcuacccugaugugagaugcaucugucgggacaacuggaagggcagcaaucgccccgucauugacaucaacauggaagauuauucuaucgacuccagcuacgugugcucuggccugguuggggauacgccgagaaacgacgauagcuccucuaauagcaacugucgggacccuaauaacgagcgcggaaaucccggcgugaaagggugggccuucgauaacggagacgaugucuggaugggcagaaccauuuccaaggacagccggucuggguacgaaacauuuaaggugaucggaggcugguccaccccuaauagcaaaucucagguuaacagacaagugauugucgauaauaacaauugguccggcuauagcgggaucuucuccguggagggaaagucuugcauuaaccgcuguuuuuacgucgagcuuauccggggcagaccccaggaaacacgcgugugguggaccagcaauuccauuguuguguucugcgggacgucuggaacauauggcaccgggagcuggcccgacggcgcuaacaucaauuuuaugccuaucuga

SEQ ID NO: 207491 - RNA, 1410 nt, Artificial Sequence
  derived and/or modified CDS sequence (opt5) from neuraminidase__InfluenzaA__ABI85003
augaaccccaaucagaagaucauuaccaucggcguggucaacacaacgcugagcaccauugcccuccugaucgggguuggaaaucuuguguucaacacagugauucacgagaaaaucggcgaccaucaaaucgucacccacccuacaauuaugaccccggaagugcccaauugcuccgauacaaucauuaccuacaacaauacgguuaucaacaauauuaccacaaccaucauuacagaggcugaaagaccuuuuaagucuccccugccucucugucccuuccggggguuuuucccuuuucauaaagacaacgccauccgccugggagagaauaaggaugugaucgucaccagagaaccguaugugagcugcgacaacgauaauuguugguccuucgcgcuugcucagggcgcccugcucgggacgaaacacucuaacggaacaauuaaggaccggacccccuaccgcagccugaucagauuuccuauuggcacagcccccguucugggcaauuauaaggagaucugcauugcuugguccucuagcuccuguuucgaugggaaagaguggaugcaugugugcaugaccggaaacgacaacgaugccagcgcucagaucaucuacggcgggcggaugaccgacucuauuaaguccuggcgcaaagauauccucagaacacaggaaagcgagugucaaugcauugacggaacgugugucguggccgugaccgauggcccugcggccaauucugcugaccaccgggucuauuggauccgcgaagggagaauuaucaaguacgagaacguucccaaaacaaagauccagcaccuggaggaaugcuccuguuauguggacauugauguguacugcaucugccgggacaauuggaagggaagcaaccgcccguggaugagaauuaauaacgagaccauccuugaaacaggcuacgucuguucuaaauuucauuccgauaccccucggcccgccgacccuagcauuauguccugcgauucucccagcaaugugaacggcgggcccggaguuaagggcuucggguuuaaagcuggaaaugacguguggcugggccgcacggucuccacaagcgggagaucuggauucgagaucauuaaggugaccgaaggcuggaucaacuccccuaaucacguuaaaagcaucacccagacacucgugucuaacaaugauuggagcggcuauuccgggucuuuuauugucaaggccaaagacuguuuccagccgugcuucuacguggagcugauccggggaagacccaacaagaaugaugacgucagcuggaccuccaacagcauugugacauuuuguggccuugauaacgagccugggucuggaaauuggcccgacggcuccaacaucggguucaugccuaaguga

SEQ ID NO: 207492 - RNA, 1410 nt, Artificial Sequence; identical to SEQ ID NO: 207162
  derived and/or modified CDS sequence (opt5) from neuraminidase__InfluenzaA__ABI92294

SEQ ID NO: 207493 - RNA, 1413 nt, Artificial Sequence
  derived and/or modified CDS sequence (opt5) from neuraminidase__InfluenzaA__ABI92305
augaaccccaaucagaagaucauuaccaucggcagcauuugcauggccaucgggauuaucucccugauccuccaaauuggaaacaucauuucuaucugggugagccaccugauucagacaggcucccagaaucauacggggaucuguaaccagagaauuaucaccuacgaaaauucuacaugggucaaccaaaccuauguuaauaucaacaauacaaacgugguggcuggaaaagacaccacaagcgucacccuugccggcaauuccucucugugcccugugcgggggugggcgauuuacagcaaggauaacuccauccgcauuggaagcaaaggcgacguuuucgugaucagagaaccguuuauuucuuguucccaccucgagugccggacguucuuucugacccagggcgcccuucugaaugauaagcauagcaacgggacagucaaagaccgcucucccuauagagcucucauguccuguccuaucggagaagcccccagcccuuacaauucucgguucgaguccguggcuuggagcgccuccgcuugccacgauggcaugggguggcugaccaucggaauuucuggccccgacgauggggccguugcggugcugaaguauaacggaaucauuacagaaaccaucaagagcuggcgcaaacggauucucagaacgcaggaguccgagugugucugcaucaacggcagcuguuuuacaaucaugaccgacggcccuucuaaugggccggccuccuaccgcauuuucaagaucgaaaaaggaaagauuacaaaaagcaucgagcuggaugcucccaacucucauuaugaagagugcagcuguuacccugacaccggcaccgugaugugcgugugcagagauaauuggcacggguccaaccggcccugggucucuuuuaaucagaaccuugacuaccaaauuggauauaucuguagcggcguuuucggggauaauccucgccccaaggacggaaagggcuccugcggcccggugacaguggacggggccgauggagucaaaggcuuuagcuacagauaugggaacggaguguggauuggccggacgaagucuaauuccagccgcaaaggguucgagaugaucugggacccuaacggcuggaccgauacagacucuaauuuucugguuaagcaggauguggucgcuaugaccgacugguccggauacagcggcuccuucgugcagcaccccgaacucacagggcuggauuguaugagaccuugcuuuuggguugagcuuauccggggaagaccccgcgagaaaaccacgauuuggacaucuggcagcuccaucucuuucuguggggugaacagcgacaccgucaauugguccuggcccgauggagccgagcugccuuucaccauugacaaguga

SEQ ID NO: 207494 - RNA, 1413 nt, Artificial Sequence
  derived and/or modified CDS sequence (opt5) from neuraminidase__InfluenzaA__ABI92316
augaaccccaaucagaagaucauuaccaucggcagcauuuccaucgccauuggggugaucucucugauccuccaaauuggaaacaucauuagcaucugggcuucccacucuauucagacaggcagccagaaucauacggggaucugcaaccagagaauuaucaccuacgagaauagcacaugggucaaccaaaccuauguuaauaucaacaauacaaacgugguggccggaaaagacaagaccucuaugacacuggcgggcaauagcucccuuuguccuauucgggggugggcuaucuacaccaaagauaacagcauucgcaucggaucuaagggcgacgucuucgugauuagagaaccguuuaucuccugcagccaccuggagugucggacguucuuucucacccagggcgcccugcuuaaugauaaacauucuaacgggacaguuaaggaccgcucccccuauagagcccugaugagcugcccucucggagaagcucccucuccuuacaauucccgguucgagagcguggccugguccgcuucugccugucacgauggccugggguggcugaccaucggaauuagcggccccgacaacggggcggucgccgugcucaaguauaacggaaucauuacagaaaccaucaaauccuggaagaaacgcauucugagaacgcaggagagcgagugcguuugugugaauggcucuugcuuuacaaucaugaccgauggcccuuccaacggggcugccagcuaccggaucuucaagauugaaaaaggacgcgucacaaagucuaucgagcuugacgcuccgaauuaucauuacgaagaguguagcugcuaccccgauaccggcaccgugaugugugugugcagagacaacuggcacggguccaaucggccuugggucucuuuuaaccagaaucuggauuaucaaauuggauacaucugcagcggcguuuucggggacaacccccgcccuaaggauggagagggcuccuguaaucccgugacaguggacggcgccgacggggucaaaggauuuagcuauagauacggcaacgggguguggauuggacggacgaagucuaaucgccucagaaaaggcuucgaaaugaucugggauccgaacggguggaccgacacagauuccgacuuuagcaugaagcaggauauuguugcgaugaccgacuggucuggcuauuccggauccuucgugcagcacccugagcugacaggccuugauugcaugcggcccuguuuuugggucgaacuggugagagggcucccucgcgagaauaccacgaucuggacauccggaucuagcaucuccuucugcggcguuaacucugacaccgccaauuggagcuggcccgauggggcugaacugcccuucaccauugacaaauga

SEQ ID NO: 207495 - RNA, 1410 nt, Artificial Sequence; identical to SEQ ID NO: 207173
  derived and/or modified CDS sequence (opt5) from neuraminidase__InfluenzaA__ABI92327

SEQ ID NO: 207496 - RNA, 1410 nt, Artificial Sequence
  derived and/or modified CDS sequence (opt5) from neuraminidase__InfluenzaA__ABI92338
augaaccccaaucagaagaucauuaccaucggcagcgugucccugacaauugccacgaucugcuuccucaugcaaauugcuauccuggucaccacaguuacccuucacuuuaaacaguacgaguguaacucuccuccgaauaaccaggugaugcugugcgaacccgccaucauugagagaaauaucacagaaauuguguaucucaccaacacaaccaucgagaaggaaauuuguccuaaacuggcggaguaccggaauuggagcaagccccagugcaacaucacgggguucgcuccuuuuuccaaagacaauucuauucgccuuagcgccggaggcgauaucugggucaccagagagcccuauguguccugugacccugauaagugcuaccaauucgcccuggggcagggaacaacccucaacaauggccauucuaacgacacaguucacgaucggaccccguaucgcacgcugcugaugaaugaacucggggugcccuuucaucugggaacaagacaggucuguaucgcuuggagcuccagcucuugccacgacggcaaggccuggcuucauguguguguuaccggcgaugacgagaacgcuacagccuccuucauuuacaaugggcggcugguggauagcaucggaucuugguccaaaaagauucuccgcacccaggaaagcgagugcgucuguaucaacgggaccugcacaguggugaugacggacggcucugcguccggaaaagccgauaccaagauucuguuuaucgaggaaggcaaaaucgucaacauuagcacacuuuccgggucugcucaacacguugaggaaugcagcuguuauccuagauaccccggagugcggugcgugugucgcgacaauuggaagggcuccaacagaccuaucauugauaucaaugucaaggacuacagcauugugucuuccuauguuugcagcggccuggugggggacacaccccggaaaaacgauucuuucagcuccucucacugucucgacccgaauaacgaggaaggaggccauggggucaagggaugggccuuugaugacggcaaugauguguggauggggcgcaccaucagcgagaaacugagauccggauacgagaccuucaagguuaucgaaggcuggagcaaaccuaacucuaagcugcagauuaaucgccaggugaucgucgagcggggcaacagauccggguauagcggaaucuuuucuguggaaggcaaauccugcauuaaucgguguuucuacgucgagcucauuagagggcgcaaggaagagacggaggugugguggacaagcaacuccaucguuguguuuugcggaaccucuggcaccuaugggacaggcagcuggcccgacggagcugauauuaaucugaugccuaucuga

SEQ ID NO: 207497 - RNA, 1410 nt, Artificial Sequence
  derived and/or modified CDS sequence (opt5) from neuraminidase__InfluenzaA__ABI92349
augaaccccaaucagaagaucauuaccaucggcagcgugucccugacaauugccacgaucugcuuccucaugcaaauugcuauccuggucaccacaguuacccuucacuuuaaacaguacgaguguaacucuccuccgaauaaccaggugaugcugugcgaacccacaaucauugagagaaauaucaccgaaauuguguaucucacaaacaccacgaucgagaaggaaauuuguccuaaacuggccaaguaccggaauuggagcaaaccccagugcaacaucaccggguucgcgccuuuuuccaaggacaauucuauucgccuuagcgcuggaggcgauaucugggucacaagagagcccuauguguccugugacccugauaagugcuaccaauucgcccuggggcagggaaccacacucaacaauggccauucuaacgacaccguucacgaucggacgccguaucgcacacugcugaugaaugagcucggggugcccuuucaucugggaaccagacaggucuguaucgccuggagcuccagcucuugccacgacggcaaagccuggcuucauguguguguuacaggcgaugacgaaaacgcuaccgcuuccuucauuuacaaugggcggcugguggauagcaucggaucuugguccaagaaaauucuccgcacccaggagagcgaaugcgucuguaucaacggcacaugcacgguggugaugaccgacgggucugccuccggaaaggcggauacaaaaauucuguuuaucgaggagggcaagaucguccacauuagcacccuuuccgggucugcccaacacguugaagagugcagcuguuauccuagauaccccggagugcggugcgugugucgcgacaacuggaagggcuccaauagaccuaucgucgauauuaacgugaaagacuacagcaucguuucuuccuaugugugcagcggccuggucggggacacaccccggaagaaugauucuuucagcuccucucauugucucgacccgaacaaugaagagggaggccacggggugaaaggaugggcuuuugaugacggcaacgauguuuggauugggcgcaccaucagcgaaaagcugagauccggauacgagacguucaaagugaucgagggcuggagcaagccuaauucuaaacugcagacaaaccggcaggucauuguggaacgcggcaauagauccggguauagcggaaucuuuucugucgagggcaaguccugcauuaaccgguguuucuacguggaacucaucagagggcgcaaggaggaaaccgagguuugguggaccagcaauuccauuguggucuuuugcggaacaucuggcaccuaugggacaggcagcuggcccgacggagccgauaucaaccugaugccuauuuga

SEQ ID NO: 207498 - RNA, 1410 nt, Artificial Sequence; identical to SEQ ID NO: 206399
  derived and/or modified CDS sequence (opt5) from neuraminidase__InfluenzaA__ABI92360

SEQ ID NO: 207499 - RNA, 1410 nt, Artificial Sequence; identical to SEQ ID NO: 206399
  derived and/or modified CDS sequence (opt5) from neuraminidase__InfluenzaA__ABI92371

SEQ ID NO: 207500 - RNA, 1413 nt, Artificial Sequence; identical to SEQ ID NO: 206458
  derived and/or modified CDS sequence (opt5) from neuraminidase__InfluenzaA__ABI92382

SEQ ID NO: 207501 - RNA, 1410 nt, Artificial Sequence; identical to SEQ ID NO: 206786
  derived and/or modified CDS sequence (opt5) from neuraminidase__InfluenzaA__ABI92393

SEQ ID NO: 207502 - RNA, 1410 nt, Artificial Sequence; identical to SEQ ID NO: 206399
  derived and/or modified CDS sequence (opt5) from neuraminidase__InfluenzaA__ABI92404

SEQ ID NO: 207503 - RNA, 1410 nt, Artificial Sequence
  derived and/or modified CDS sequence (opt5) from neuraminidase__InfluenzaA__ABI92415
augaaccccaaucagaagaucauuaccaucggcagcgugucccugacaauuucuacgaucugcuucuuuaugcaaauugccauccucaucaccacagucacccugcacuucaaacaguacgaguuuaacagcccuccgaauaaccagguuaugcuuugugaacccacaauuaucgagagaaauauuaccgaaaucguguaucugacaaacaccacgauugagaaggaaaucugcccuaaacucgcugaguaccggaauugguccaagccccagugugacauuaccggguucgccccuuuuucuaaagauaacagcauccgccuguccgcgggaggcgacaucugggugacaagagagcccuaugucucuugcgauccugacaaguguuaccaauucgcucuugggcagggaaccacacugaauaacgugcauagcaaugauaccguucacgaccggacgccguaucgcacacuccugaugaacgaacugggcgugcccuuucaucucgggaccaagcaggucugcauugccugguccucuagcuccugucacgauggaaaagccuggcugcaugugugcguuacaggcgacgauaagaaugcuaccgccagcuucaucuacaacggcagacuuguggacucuauugucuccuggagcaaaaagauccugcggacccaggagucugaaugugugugcauuaaugggacauguacgguggucaugaccgauggauccgcuagcggcaaagccgacacaaagauccucuuuaucgaggaggggaagauuguucacaccuccacacugucuggaagcgcgcaacacguggaagagugcuccugcuauccucgcuaccccggcgugagaugugucugccgggauaacuggaaagggagcaaccgcccuaucguggacauuaauaucaaggacuacucuauuguuuccagcuauguguguucuggacuugucggcgauacccccagaaagaacgacagcuccucuagcucccauugccuggauccgaauaacgaagagggcgggcacggagugaaaggcugggccuucgacgaugggaaugacguuuggaugggacggacgaucagcgaaaaacuccgcucuggcuacgagacauuuaaggugaucgaggggugguccaacccuaauagcaaacugcagauuaacagacaggucaucguggaucggggaaaucgcucuggcuauuccggcauuuucagcgucgaagggaaguccuguaucaacagaugcuuuuacguggagcugauucggggaagaaaggaagagaccgaaguucucuggaccucuaauagcaucguggucuucuguggcacauccgggaccuauggaacaggcucuuggcccgacggggcugauauuaacuucaugccuaucuga

SEQ ID NO: 207504 - RNA, 1410 nt, Artificial Sequence; identical to SEQ ID NO: 206786
  derived and/or modified CDS sequence (opt5) from neuraminidase__InfluenzaA__ABI92426

SEQ ID NO: 207505 - RNA, 1410 nt, Artificial Sequence; identical to SEQ ID NO: 206786
  derived and/or modified CDS sequence (opt5) from neuraminidase__InfluenzaA__ABI92437

SEQ ID NO: 207506 - RNA, 1410 nt, Artificial Sequence; identical to SEQ ID NO: 206786
  derived and/or modified CDS sequence (opt5) from neuraminidase__InfluenzaA__ABI92448

SEQ ID NO: 207507 - RNA, 1410 nt, Artificial Sequence; identical to SEQ ID NO: 206786
  derived and/or modified CDS sequence (opt5) from neuraminidase__InfluenzaA__ABI92459

SEQ ID NO: 207508 - RNA, 1410 nt, Artificial Sequence
  derived and/or modified CDS sequence (opt5) from neuraminidase__InfluenzaA__ABI92470
augaaccccaaucagaagaucauuaccaucggcagcgugucccugacaauugccacgaucugcuuccucaugcaaauugcuauccuggucaccacaguuacccuucacuuuaaacaguacgaguguaacucuccuccgaauaaccaggugaugcugugcgaacccacaaucauugagagaaauaucaccgaaauuguguaucucacaaacaccacgaucgagaaggaaauuuguccuaaacuggccgaguaccggaauuggagcaagccccagugcaacaucaccggguucgcgccuuuuuccaaagacaauucuauucgccuuagcgcuggaggcgauaucugggucacaagagagcccuauguguccugugacccugauaagugcuaccaauucgcccuggggcagggaaccacacucaacaauggccauucuaacgacaccguucacgaucggacgccguaucgcacacugcugaugaaugaacucggggugcccuuucaucugggaaccaagcaggucuguaucgccuggagcuccagcucuugccacgacggcaaagccuggcuucauguguguguuacaggcgaugacgagaacgcuaccgcuuccuucauuuacaaugggagacugguggauagcaucggaucuugguccaagaaaauucuccggacccaggaaagcgagugcgucuguaucaacggcacaugcacgguggugaugaccgacgggucugccuccgagaaggcggauacaaaaauucuguuuaucgaagagggaaagaucguccacaccagcucccuuucuggcagcgcccaacacguugaagagugcuccuguuauccucgcuaccccggggugagaugcgugugucgggacaacuggaagggaagcaaucgcccuauugucgauaucaacgugaaagacuacucuauuguuuccagcuaugugugcucuggccuggucggcgacacacccagaaagaaugauagcuccucuagcucccauugucucgacccgaacaaugaagaagggggacacggcgugaaagggugggcuuucgaugacggaaacgauguuuggaugggccggaccaucagcgagaagcugcgcucuggguacgagacguuuaaagugauugagggaugguccaagccuaauagcaaacugcagaucaacagacaggucaucguggaccggggcaaucgcucuggcuauuccgggauuuucagcgucgaauccaagucuugcaucaacagauguuuuuacguggagcucauucggggaagaaagcaggaaacagagguucuguggaccagcaauuccaucguggucuucugcggcaccucugggacauauggaaccggcagcuggcccgauggggccgacauuaaccuuaugccuaucuga

SEQ ID NO: 207509 - RNA, 1410 nt, Artificial Sequence; identical to SEQ ID NO: 206802
  derived and/or modified CDS sequence (opt5) from neuraminidase__InfluenzaA__ABI92481

SEQ ID NO: 207510 - RNA, 1410 nt, Artificial Sequence; identical to SEQ ID NO: 206802
  derived and/or modified CDS sequence (opt5) from neuraminidase__InfluenzaA__ABI92492

SEQ ID NO: 207511 - RNA, 1410 nt, Artificial Sequence
  derived and/or modified CDS sequence (opt5) from neuraminidase__InfluenzaA__ABI92503
augaaccccaaucagaagaucauuaccaucggcagcgugucccugacaauugccacgaucugcuuccucaugcaaauugcuauccuggucaccacaguuacccuucacuuuaaacaguacgaguguaacucuccuccgaauaaccaggugaugcugugcgaacccacaaucauugagagaaauaucaccgaaauuguguaucucacaaacaccacgaucgagaaggaaauuuguccuaaacuggaggaguaccggaauuggagcaagccccagugcaacaucaccggguucgccccuuuuuccaaagacaauucuauucgccuuagcgcgggaggcgauaucugggucacaagagaacccuauguguccugugacccugauaagugcuaccaauucgcucuggggcagggaaccacacucaacaauggccauucuaacgacaccguucacgaucggacgccguaucgcacacugcugaugaaugagcucggggugcccuuucaucugggaaccaagcaggucuguaucgccuggagcuccagcucuugccacgacggcaaagccuggcuucauguguguguuacaggcgaugacgaaaacgcuaccgccuccuucauuuacaaugggagacugguggauagcaucggaucuugguccaagaaaauucuccggacccaggagagcgagugcgucuguaucaacggcacaugcacgguggugaugaccgacgggucugcuuccggaaaggccgauacaaaaauucuguuuaucgaagagggcaagaucguccacaccagcucccuuucugggagcgcgcaacacguugaagagugcuccuguuauccucgcuaccccggagugagaugcgugugucgggacaacuggaagggcagcaaucgcccuauugucgauaucaacgugaaagacuacucuauuguuuccagcuaugugugcucuggccuggucggggacacacccagaaagaaugauagcuccucuagcucccauugucucgacccgaacaaugaagagggaggccacggggugaaaggaugggccuucgaugacggcaacgauguuuggauggggcggaccaucagcgagaagcugcgcucuggauacgaaacguuuaaagugauugagggcugguccaagccuaauagcaaacugcagaucaacagacaggucaucguggaccggggcaaucgcucuggguauuccggaauuuucagcgucgaauccaagucuugcaucaacagauguuuuuacguggagcucauucggggcagaaagcaggaaacagagguucuguggaccagcaauuccaucguggucuucugcgggaccucuggaacauauggcaccgggagcuggcccgauggcgcugacauuaaccuuaugccuaucuga

SEQ ID NO: 207512 - RNA, 1410 nt, Artificial Sequence
  derived and/or modified CDS sequence (opt5) from neuraminidase__InfluenzaA__ABI92514
augaaccccaaucagaagaucauuaccaucggcagcgugucccugacaauugccacgaucugcuuccucguccaaauugcuauccugguuaccacagugacccuucacuuuaaacaguacgaguguaacucuccuccgaauaaccaggugaugcugugcgaacccacaaucauugagagaaauaucaccgaaauugucuaucucacaaacaccacgaucgagaaggaaauuuguccuaaacuggccgaguaccggaauuggagcaagccccagugcaaaaucaccggguucgcgccuuuuuccaaggacaacucuauucgccuuagcgcuggaggcgauaucugggugacaagagagcccuauguuuccugugacccugauaagugcuaccaauucgcccuggggcagggaaccacacucaauaaccggcauucuaaugacaccgugcacgaucgcacgccguauagaacacugcugaugaacgaacucggcguccccuuucaucuggggaccaaacagguguguaucgccuggagcuccagcucuugccacgacggaaaggcuuggcuucauguuugugugacaggcgaugacgagaaugccaccgcuuccuucauuuacgauggccggcuggucgacagcaucgggucuugguccaaaaagauucuccgcacccaggaaagcgagugcguguguaucaacggaacaugcacgguggucaugaccgauggcucugccuccgggagagcggacacaaaaauucuguuuaucgaggaaggaaagaucguucacaccagcaaacuuuccggcucugcccaacacguggaggaaugcagcuguuauccucgguaccccggggugcgcugcgucuguagagauaauuggaagggauccaaccggccuauuguggacaucaacguuaaggacuacagcauugugucuuccuaugucugcagcggccuggugggcgauacaccccgcaaaaaugacucuagcuccucuagccauugucucgauccgaacaaugaggaagggggacacggcguuaaggggugggcuuucgacgauggagacgauguguggaugggcagaaccaucuccgagaaaagccggucuggguacgagacguuuaaggucauugaaggaugguccaaaccuaacagcaagcugcagaucaaucgccaggugaucgucgagagaggcaacaugucuggcuauuccgggauuuucagcguggaaggaaaguccugcaucaaucgguguuuuuacguugagcugauuagaggccgcaaacaggaaacagaggugugguggaccucuaacagcaucgucguguucugcgggaccuccggaacauauggcaccgggucuuggcccgacggcgccgauauuaaucucaugccuaucuga

SEQ ID NO: 207513 - RNA, 1410 nt, Artificial Sequence
  derived and/or modified CDS sequence (opt5) from neuraminidase__InfluenzaA__ABI92525
augaaccccaaucagaagaucauuaccaucggcagcgugucccugacaauugccacgaucugcuuccucaugcaaauugcuauccuggucaccacaguuacccuucacuuuaaacaguacgaguguaacucuccuccgaauaaccaggugaugcugugcgaacccacaaucauugagagaaauaucaccgaaauuguguaucucacaaacaccacgaucgagaaggaaauuuguccuaaacuggccgaguaccggaauuggagcaagccccagugcaacaucaccggguucgcgccuuuuuccaaagacaauucuauucgccuuagcgcuggaggcgauaucugggucacaagagagcccuauguguccugugacccugauaagugcuaccaauucgcccuggggcagggaaccacacucaacaauggccauucuaacgacaccguucacgaucggacgccguaucgcacacugcugaugaaugaacucggggugcccuuucaucugggaaccaagcaggucuguaucgccuggagcuccagcucuugccacgacggcaaagccuggcuucauguguguguuacaggcgaugacgagaacgcuaccgcuuccuucauuuacaaugggagacugguggauagcaucggaucuugguccaagaaaauucuccggacccaggaaagcgagugcgucuguaucaacggcacaugcacgguggugaugaccgacgggucugccuccggaaaggcggauacaaaaauucuguuuaucgaggaaggcaagaucguccacauuagcacccuuuccgggucugcccaacacguugaggaaugcagcuguuauccucgcuaccccggagugagaugcgugugucgggacaacuggaagggcuccaaucgcccuaucgucgauauuaacgugaaagacuacagcaucguuucuuccuaugugugcagcggccuggucggggacacacccagaaagaaugauucuuucagcuccucucauugucucgacccgaacaaugaggaaggaggccacggggugaaaggaugggcuuuugaugacggcaacgauguuuggauggggcggaccauuagcgagaagcugcgcuccggauacgagacguucaaagugaucgaaggcuggagcaagccuaauucuaaacugcagaucaacagacaggucauuguggagcggggcaaucgcuccggguauagcggaaucuuuucugucgaaggcaaguccugcauuaacagauguuucuacguggagcucauccgggggagaaaggaagagacagagguuugguggaccagcaauuccauuguggucuuuugcggaaccucuggcacauaugggaccggcagcuggcccgacggagccgauaucaaccugaugccuauuuga

SEQ ID NO: 207514 - RNA, 1410 nt, Artificial Sequence
  derived and/or modified CDS sequence (opt5) from neuraminidase__InfluenzaA__ABI92536
augaaccccaaucagaagaucauuaccaucggcagcgugucccugacaauugccacgaucugcuuccucaugcaaauugcuauccuggucaccacaguuacccuucacuuuaaacaguacgaguguaacucuccuccgaauaaccaggugaugcugugcgaacccacaaucauugagagaaauaucaccgaaauuguguaucucacaaacaccacgaucgagaaggaaaaauguccuaagcuggccgaguaccggaauuggagcaaaccccagugcaacauuaccggguucgcgccuuuuuccaaggacaauucuauccgccuuagcgcuggaggcgauauuugggucacaagagagcccuauguguccugugacccugauaagugcuaccaauucgcccuggggcagggaaccacacucaacaauggccauucuaacgacaccguucacgaucggacgccguaucgcacacugcugaugaaugaacucggggugcccuuucaucugggaaccagacaggucuguaucgccuggagcuccagcucuugccacgacggcaaagccuggcuucauguguguguuacaggcgaugacgagaacgcuaccgcuuccuucaucuacaaugggcggcugguggauagcauuggaucuugguccaagaaaauccuccgcacccaggaaagcgagugcgucuguauuaacggcacaugcacgguggugaugaccgacgggucugccuccggaaaggcggauacaaaaauccuguuuauugaggaaggcaagaucguccacaucagcacccuuuccgggucugcccaacacguugaggaaugcagcuguuauccuagauaccccggagugcggugcgugugucgcgacaacuggaagggcuccaauagaccuauugucgauaucaacgugaaagacuacagcauuguuucuuccuaugugugcagcggccuggucggggacacaccccggaagaaugauucuuucagcuccucucauugucucgacccgaacaaugaggaaggaggccacggggugaaaggaugggcuuuugaugacggcaacgauguuuggauggggcgcaccaucagcgagaagcugagauccggauacgagacguucaaagugauugaaggcuggagcaagccuaauucuaaacugcagaucaaccggcaggucaucguggagcgcggcaauagauccggguauagcggaaucuuuucugucgaaggcaaguccugcauuaaccgguguuucuacguggagcucauuagagggcgcaaggaagagacagagguuugguggaccagcaauuccaucguggucuuuugcggaaccucuggcacauauggggccggcagcuggcccgacggagcugauauuaaccugaugccuaucuga

SEQ ID NO: 207515 - RNA, 1410 nt, Artificial Sequence
  derived and/or modified CDS sequence (opt5) from neuraminidase__InfluenzaA__ABI92547
augaaccccaaucagaagaucauuaccaucggcagcgugucccugacaauugccacgaucugcuuccucaugcaaauugcuauccuggucaccacaguuacccuucacuuuaaacaguacgaguguaacucuccuccgaauaaccaggugaugcugugcgaacccacaaucauugagagaaauaucaccgaaauuguguaucucacaaacaccacgaucgagaaggaaauguguccuaaacuggccgaguaccggaauuggagcaagccccagugcaacauuaccggguucgcgccuuuuuccaaagacaauucuauccgccuuagcgcuggaggcgauauuugggucacaagagagcccuauguguccugugacccugauaagugcuaccaauucgcccuggggcagggaaccacacucaacaauggccauucuaacgacaccguucacgaucggacgccguaucgcacacugcugaugaaugaacucggggugcccuuucaucugggaaccagacaggucuguaucgccuggagcuccagcucuugccacgacggcaaggcuuggcuucauguguguguuacaggcgaugacgagaacgccaccgcuuccuucaucuacaaugggcggcugguggauagcauuggaucuugguccaaaaagauccuccgcacccaggaaagcgagugcgucuguauuaacggcacaugcacgguggugaugaccgacgggucugccuccggaaaagcggauacaaagauccuguuuauugaggaaggcaaaaucguccacaucagcacccuuuccgggucugcccaacacguugaggaaugcagcuguuauccuagauaccccggagugcggugcgugugucgcgacaacuggaagggcuccaauagaccuauugucgauaucaacgugaaggacuacagcauuguuucuuccuaugugugcagcggccuggucggggacacaccccggaaaaaugauucuuucagcuccucucauugucucgacccgaacaaugaggaaggaggccacggggugaagggaugggcuuuugaugacggcaacgauguuuggauggggcgcaccaucagcgagaaacugagauccggauacgagacguucaaggugauugaaggcuggagcaaaccuaauucuaagcugcagaucaaccggcaggucaucguggagcgcggcaauagauccggguauagcggaaucuuuucugucgaaggcaaauccugcauuaaccgguguuucuacguggagcucauuagagggcgcaaggaagagacagagguuugguggaccagcaauuccaucguggucuuuugcggaaccucuggcacauauggggccggcagcuggcccgacggagcugauauuaaccugaugccuaucuga

SEQ ID NO: 207516 - RNA, 1410 nt, Artificial Sequence
  derived and/or modified CDS sequence (opt5) from neuraminidase__InfluenzaA__ABI92558
augaaccccaaucagaagaucauuaccaucggcagcgugucccugacaauugccacgaucugcuuccucaugcaaauugcuauccuggucaccacaguuacccuucacuuuaaacaguacgaguguaacucuccuccgaauaaccaggugaugcugugcgaacccacaaucauugagagaaauaucaccgaaauuguguaucucacaaacaccacgaucgagaaggaaauuuguccuaaacuggccgaguaccggaauuggagccgcccccagugcaacaucaccggguucgcgccuuuuuccaaggacaauucuauuagacuuagcgcuggaggcgauaucugggucacacgggagcccuauguguccugugacccugauaaaugcuaccaauucgcccuggggcagggaaccacacucaacaauggccauucuaacgacaccguucacgaucgcacgccguauagaacacugcugaugaaugaacucggggugcccuuucaucugggaacccggcaggucuguaucgccuggagcuccagcucuugccacgacggcaaggcuuggcuucauguguguguuacaggcgaugacgagaacgccaccgcuuccuucauuuacaaugggcgccugguggauagcaucggaucuugguccaagaaaauucucagaacccaggaaagcgagugcgucuguaucaacggcacaugcacgguggugaugaccgacgggucugccuccggaaaggcggauacaaaaauucuguuuaucgaggaaggcaagaucguccacauuagcacccuuuccgggucugcccaacacguugaggaaugcagcuguuauccucgguaccccggagugcgcugcguguguagagacaacuggaaaggcuccaaucggccuaucgucgauauuaacgugaaggacuacagcaucguuucuuccuaugugugcagcggccuggucggggacacaccccgcaagaaugauucuuucagcuccucucauugucucgacccgaacaaugaggaaggaggccacggggugaaaggaugggcuuuugaugacggcaacgauguuuggauggggagaaccauuagcgagaagcugcgguccggauacgagacguucaaagugaucgaaggcuggagcaagccuaauucuaaacugcagaucaaccgccaggucauuguggagagaggcaaucgguccggguauagcggaaucuuuucugucgaaggcaaguccugcauuaacagauguuucuacguggagcucauccgcgggcggaaagaagagacagagguuugguggaccagcaauuccauuguggucuuuugcggaaccucuggcacauaugggaccggcagcuggcccgacggagccgauaucaaccugaugccuauuuga

SEQ ID NO: 207517 - RNA, 1410 nt, Artificial Sequence
  derived and/or modified CDS sequence (opt5) from neuraminidase__InfluenzaA__ABI92569
augaaccccaaucagaagaucauuaccaucggcagcgugucccugacaauugccacgaucugcuuccucaugcaaauugcuauccuggucaccacaguuacccuucacuuuaaacaguacgaguguaacucuccuccgaauaaccaggugaugcugugcgaacccacaaucauugagagaaauaucaccgaaauuguguaucucacaaacaccacgaucgagaaggaaauuuguccuaaacuggccgaguaccggaauuggagcaagccccagugcaacaucaccggguucgcgccuuuuuccaaagacaauucuauucgccuuagcgcuggaggcgauaucugggucacaagagagcccuauguguccugugacccugauaagugcuaccaauucgcccuggggcagggaaccacacucaacaauggccauucuaacgacaccguucacgaucggacgccguaucgcacacugcugaugaaugaacucggggugcccuuucaucugggaaccagacaggucuguaucgccuggagcuccagcucuugccacgacggcaaggcuuggcuucauguguguguuacaggcgaugacgagaacgccaccgcuuccuucauuuacaaugggaaacugguggauagcaucggaucuugguccaagaaaauucuccggacccaggaaagcgagugcgucuguaucaacggcacaugcgccguggugaugacggacgggucugcguccggaaaggccgauaccaaaauucuguuuaucgaggaaggcaagaucguccacauuagcacacuuuccgggucugcucaacacguugaggaaugcagcuguuauccucgcuaccccggagugagaugcgugugucgggacaacuggaagggcuccaaucgcccuaucgucgauauuaacgugaaagacuacagcaucguuucuuccuaugugugcagcggccuggucggggacacccccagaaagaaugauucuuucagcuccucucauugucucgacccgaacaaugaggaaggaggccacggggugaaaggaugggccuuugaugacggcaacgauguuuggauggggcggacaauuagcgagaagcugcgcuccggauacgagaccuucaaagugaucgaaggcuggagcaagccuaauucuaaacugcagacgaacagacaggucaucguggagcggggcaaucgcuccggguauagcggaaucuuuucugucgaaggcaaguccugcauuaacagauguuucuacguggagcucauucgggggagaaaggaagagacagagguuugguggaccagcaauuccaucguggucuuuugcggaaccucuggcacauaugggaccggcagcuggcccgacggagcugauauuaaccugaugccuaucuga

SEQ ID NO: 207518 - RNA, 1410 nt, Artificial Sequence
  derived and/or modified CDS sequence (opt5) from neuraminidase__InfluenzaA__ABI92580
augaaccccaaucagaagaucauuaccaucggcagcgugucccugacaauugccacgaucugcuuccucaugcaaauugcuauccuggucaccacaguuacccuucacuuuaaacaguacgaguguaacucuccuccgaauaacaaggugaugcugugcgaacccacaaucauugagagaaauaucaccgaaauuguguaucucacaaacaccacgaucgagaaagaaauuuguccuaagcuggccgaguaccggaauuggagcaaaccccagugcaacaucaccggguucgcgccuuuuuccaaggacaauucuauucgccuuagcgcuggaggcgauaucugggucacaagagagcccuauguguccugugacccugauaagugcuaccaguucgcccuggggcaaggaaccacacucaacaauggccauucuaacgacaccguucacgaucggacgccguaucgcacacugcugaugaaugaacucggggugcccuuucaucugggaaccagacaggucuguaucgccuggagcuccagcucuugccacgacggcaaagccuggcuucauguguguguuacaggcgaugacgagaacgcuaccgcuuccuucauuuacaaugggcggcugguggauagcaucggaucuugguccaagaaaauucuccgcacccaggaaagcgagugcgucuguaucaacggcacaugcacgguggugaugaccgacgggucugccuccggaaaggcggauacaaaaauucuguuuaucgaggaaggcaagaucguccacauuagcacccuuuccgggucugcccagcacguugaggaaugcagcuguuauccuagauaccccggagugcggugcgugugucgcgacaacuggaagggcuccaauagaccuaucgucgauauuaacgugaaagacuacagcaucguuucuuccuaugugugcagcggccuggucggggacacaccccggaagaaugauucuuucagcuccucucauugucucgacccgaacaaugaggaaggaggccacggggugaaaggaugggcuuuugaugacggcaacgauguuuggauggggcgcaccauuagcgagaagcugagauccggauacgagacguucaaagugaucgaaggcuggagcaagccuaauucuaaacugcaaaucaaccggcaggucauuguggagcgcggcaauagauccggguauagcggaaucuuuucugucgaaggcaaggggugcauuaaccgguguuucuacguggagcucaucagaggacgcaaggaagagacagagguuugguggaccuccaauagcauuguggucuuuugcggcaccuccgggacauauggcaccggaucuuggcccgacggcgccgauaucaaccugaugccuauuuga

SEQ ID NO: 207519 - RNA, 1410 nt, Artificial Sequence
  derived and/or modified CDS sequence (opt5) from neuraminidase__InfluenzaA__ABI92591
augaaccccaaucagaagaucauuaccaucggcagcgugucccugacaauugccacgaucugcuuccucaugcaaauugcuauccuggucaccacaguuacccuucacuuuaaacaguacgaguguaacucuccuccgaauaaccaggugaugcugugcgaacccacaaucauugagagaaauaucaccgaaauuguguaucucacaaacaccacgaucgagaaggaaauuuguccuaaacuggccgaguaccggaauuggagcaagccccagugcaacaucaccggguucgcgccuuuuuccaaagacaauucuauucgccuuagcgcuggaggcgauaucugggucacaagagagcccuauguguccugugacccugauaagugcuaccaauucgcccuggggcagggaaccacacucaacaauggccauucuaacgacaccguucacgaucggacgccguaucgcacacugcugaugaaugaacucggggugcccuuucaucugagaacccggcaggucuguaucgccuggagcuccagcucuugccacgacggaaaggcuuggcuucauguguguguuacaggcgaugacgagaacgccaccgcuuccuucauuuacaauggccgccugguggauagcaucgggucuugguccaaaaagauucucagaacccaggaaagcgagugcgucuguaucaacggaacaugcacgguggugaugaccgacggcucugccuccgggaaagcggauacaaagauucuguuuaucgaggaaggaaaaaucguccacauuagcacccuuuccggcucugcccaacacguugaggaaugcagcuguuauccucgguaccccggggugcgcugcguguguagagacaacuggaagggauccaaucggccuaucgucgauauuaacgugaaggacuacagcaucguuucuuccuaugugugcagcggccuggucggcgacacaccccgcaaaaaugauucucucagcuccucucauugucuggacccgaacaaugaggaagggggacacggcgugaaggggugggcuuucgaugacggaaacgauguuuggaugggcagaaccauuagcgagaaacugcgguccggguacgagacguuuaaggugaucgaaggauggagcaaaccuaauucuaagcuccagaucaaccgccaggucauuguggagagaggcaaucgguccggcuauagcgggaucuucucugucgaaggaaaaggcugcauuaacagauguuuuuacguggagcugauccgcgggcggaaggaagagacagagguuugguggaccuccaauagcauuguggucuucugcggaaccuccggcacauaugggaccggcucuuggcccgacggagccgauaucaaccuuaugccuauuuga

SEQ ID NO: 207520 - RNA, 1410 nt, Artificial Sequence
  derived and/or modified CDS sequence (opt5) from neuraminidase__InfluenzaA__ABI92602
augaaccccaaucagaagaucauuaccaucggcagcgugucccugacaauugccacgaucugcuuccucaugcaaauugcuauccuggucaccacaguuacccuucacuuuaaacaguacgaguguaacucuccuccgaauaaccaggugaugcugugcgaacccacaaucauugagagaaauaucaccgaaauuguguaucucacaaacaccacgaucgagaaggaaauuuguccuaaacuggccgaguaccggaauuggagcaagccccagugcaacaucaccggguucgcgccuuuuuccaaagacaauucuauucgccuuagcgcuggaggcgauaucugggucacaagagagcccuauguguccugugacccugauaagugcuaccaauucgcccuggggcagggaaccacacucaacaauggccauucuaacgacaccguucacgaucggacgccguaucgcacacugcugaugaaugaacucggggugcccuuucaucugggaaccagacaggucuguaucgccuggagcuccagcucuugccacgacggcaaggcuuggcuucauguguguguuacaggcgaugacgagaacgccaccgcuucccugauuuacaaugggcggcucguggauagcaucggaucuugguccaaaaagauucugcgcacccaggaaagcgagugcgucuguaucaacggcacaugcacgguggugaugaccgacgggucugccuccggaaaagcggauacaaagauucuuuucaucgaggaaggcaaaaucguccacauuagcacccuguccgggucugcccaacacguugaggaaugcagcuguuauccuagauaccccggagugcggugcgugugucgcgacaacuggaagggcuccaauagaccuaucgucgauauuaacgugaaggacuacagcaucguuucuuccuaugugugcagcggccucgucggggacacaccccggaaaaaugauucuuuuagcuccucucauugucuggacccgaacaaugaggaaggaggccacggggugaagggaugggcuuucgaugacggcaacgauguuuggauggggcgcaccauuagcgagaaacugagauccggauacgagacguuuaaggugaucgaaggcuggagcaaaccuaauucuaagcuccaggucaaccgccaggugaucgucgagcggggcaauagauccggguauagcggaauuuucucuguggaaggcaaauccugcaucaaccgguguuuuuacguugagcugauuagagggcgcaaggaagagacagaggugugguggaccagcaauuccaucgucguguucugcggaaccucuggcacauaugggaccggcagcuggcccgacggagccgauauuaaccuuaugccuaucuga

SEQ ID NO: 207521 - RNA, 1410 nt, Artificial Sequence
  derived and/or modified CDS sequence (opt5) from neuraminidase__InfluenzaA__ABI92613
augaaccccaaucagaagaucauuaccaucggcagcgugucccugacaauugccacgaucugcuuccucaugcaaauugcuauccuggucaccacaguuacccuucacuuuaaacaguacgaguguaacucuccuccgaauaaccaggugaugcugugcgaacccacaaucauugagagaaauaucaccgaaauuguguaucucacaaacaccacgaucgagaaggaaauuuguccuaaacuggccgaguaccggaauuggagcaagccccagugcaacaucaccggguucgcgccuuuuuccaaagacaauucuauucgccuuagcgcuggaggcgauaucugggucacaagagagcccuauguguccugugacccugauaagugcuaccaauucgcccuggggcagggaaccacacucaacaauggccauucuaacgacaccguucacgaucggacgccguaucgcacacugcugaugaaugaacucggggugcccuuucaucugggaaccagacaggucuguaucgccuggagcuccagcucuugccacgacggcaaggcuuggcuucauguguguguuacaggcgauaacgagaaugccaccgcuuccuucauuuacaacgggaaacugguggacagcaucggaucuugguccaagaaaauucuccggacccaggaaagcgagugcgucuguaucaacggcacaugcgccguggugaugacggaugggucugcguccggaaaggccgacaccaaaauucuguuuaucgaggaaggcaagaucguccacauuagcacacuuuccgggucugcucaacacguugaggaaugcagcuguuauccucgcuaccccggagugagaugcgugugucgggauaauuggaagggcuccaaccgcccuaucgucgacauuaaugugaaagauuacagcaucguuucuuccuaugugugcagcggccuggucggggacacccccagaaagaacgacucuuucagcuccucucauugucucgauccgaauaacgaggaaggaggccacggggugaaaggaugggccuuugacgauggcaaugacguuuggauggggcggacaauuagcgagaagcugcgcuccggauacgagaccuucaaagugaucgaaggcuggagcaagccuaacucuaaacugcagacgaauagacaggucaucguggagcggggcaaccgcuccggguauagcggaaucuuuucugucgaaggcaaguccugcauuaauagauguuucuacguggagcucauucgggggagaaaggaagagacagagguuugguggaccagcaacuccaucguggucuuuugcggaaccucuggcacauaugggaccggcagcuggcccgauggagcugacauuaaucugaugccuaucuga

SEQ ID NO: 207522 - RNA, 1410 nt, Artificial Sequence
  derived and/or modified CDS sequence (opt5) from neuraminidase__InfluenzaA__ABI92624
augaaccccaaucagaagaucauuaccaucggcagcgugucccugacaauugccacgaucugcuuccucaugcaaauugcuauccuggucaccacaguuacccuucacuuuaaacaguacgaguguaacucuccuccgaauaaccaggugaugcugugcgaacccacaaucauugagagaaauaucaccgaaauuguguaucucacaaacaccacgaucgagaaggaaauuuguccuaaacuggccgaguaccggaauuggagcaagccccagugcaacaucaccggguucgcgccuuuuuccaaagacaauucuauucgccuuagcgcuggaggcgauaucugggucaucagagagcccuauguguccugugacccugauaagugcuaccaauucgcccuggggcagggaacaacccucaacaauggccauucuaacgacacaguucacgaucggaccccguaucgcacgcugcugaugaaugaacucggggugcccuuucaucugggaacaagacaggucuguauugccuggagcuccagcucuugccacgacggcaaggcuuggcuucauguguguguuaccggcgaugacgagaacgccacagcuuccuucaucuacaaugggcggcugguggauagcauuggaucuugguccaaaaagauccuccgcacccaggaaagcgagugcgucuguauuaacgggaccugcacaguggugaugacggacggcucugccuccggaaaagcggauaccaagauccuguuuaucgaggaaggcaaaauuguccacaucagcacacuuuccgggucugcccaacacguugaggaaugcagcuguuauccuagauaccccggagugcggugcgugugucgcgacaacuggaagggcuccaauagaccuauugucgauaucaacgugaaggaccauagcauuguuucuuccuacgugugcagcggccuggucggggacacaccccggaaaaaugauucuuucagcuccucucacugucucgacccgaacaaugaggaaggaggccauggggugaagggaugggcuuuugaugacggcaacgauguuuggauggggcgcaccaucagcgagaaacugagauccggauaugagaccuucaaggugaucgaaggcuggagcaaaccuaauucuaagcugcagauuaaccggcaggucaucguggagcgcggcaauagauccggguacagcggaaucuuuucugucgaaggcaaauccugcauuaaccgguguuucuauguggagcucauuagagggcgcaaggaagagacggagguuugguggacaagcaauuccaucguggucuuuugcggaaccucuggcaccuacgggacaggcagcuggcccgacggagccgauauuaaccugaugccuaucuga

SEQ ID NO: 207523 - RNA, 1410 nt, Artificial Sequence
  derived and/or modified CDS sequence (opt5) from neuraminidase__InfluenzaA__ABI92635
augaaccccaaucagaagaucauuaccaucggcagcgugucccugacaauugccacgaucugcuuccucaugcaaauugcuauccuggucaccacaguuacccuucacuuuaaacaguacgaguguaacccuccgcccaauaaccaggugaugcugugcgaaccuacaaucauugagagaaauaucaccgaaauuguguaucucacaaacaccacgaucgagaaggaaauuugucccaaacuggccgaguaccggaauuggucuaagccucagugcaaccuuaccggguucgcgcccuuuagcaaagacaauuccauccgccugucugcuggaggcgauauuugggucacaagagagccuuaugugagcugugacccggauaagugcuaccaauucgcccucgggcagggaaccacacugaacaauggccauuccaacgacaccguucacgaucggacgcccuaucgcacacugcucaugaaugaacugggggugccuuuucaucuuggaaccagacaggucuguaucgccuggucuagcuccagcugccacgacggcaaggcuuggcugcauguguguguuacaggcgaugacgagaacgccaccgcuucuuucaucuacaaugggcggcucguggauuccauuggaagcuggucuaaaaagauccugcgcacccaggaauccgagugcgucuguauuaacggcacaugcacgguggugaugaccgacgggagcgccucuggaaaagcggauacaaagaucauuuuuaucgaggaaggcaaaaucguccacaccuccacacuuagcggguccgcccaacacguugaggaaugcucuuguuaucccagauacccuggagugcggugcgugugucgcgacaacuggaagggcagcaauagacccauugucgauaucaacgugaaggacuacuccauuguuagcucuuaugugugcuccggccuggucggggacaccccgcggaaaaaugauagcuucucuagcucccauugucucgacccuaacaaugaggaaggaggccacggggugaagggaugggcuuuugaugacggcaacgauguuuggauggggcgcacgaucucugagaaacugagaagcggauacgagacauucaaggugauugaaggcugguccaaacccaauagcaagcugcagaccaaccggcaggucaucguggagcgcggcaauagaucuggguauuccggaaucuuuagcgucgaaggcaaaucuugcauuaaccgguguuucuacguggagcucaucagagggcgcaaggaagagaccgagguuugguggacauccaauagcauuguggucuuuugcggaaccuccggcacauaugggacgggcucuuggccugacggagccgauaucaaccugaugcccauuuga

SEQ ID NO: 207524 - RNA, 1410 nt, Artificial Sequence; identical to SEQ ID NO: 206217
  derived and/or modified CDS sequence (opt5) from neuraminidase__InfluenzaA__ABI92646

SEQ ID NO: 207525 - RNA, 1410 nt, Artificial Sequence; identical to SEQ ID NO: 206217
  derived and/or modified CDS sequence (opt5) from neuraminidase__InfluenzaA__ABI92657

SEQ ID NO: 207526 - RNA, 1410 nt, Artificial Sequence
  derived and/or modified CDS sequence (opt5) from neuraminidase__InfluenzaA__ABI92668
augaaccccaaucagaagaucauuaccaucggcagcgugucccugacaauugccacgaucugcuuccucaugcaaauugcuauccuggucaccacaguuacccuucacuuuaaacagcaugaguguaacucuccuccgaauaaccaggugaugcugugcgaacccacaaucauugagagaaauaucaccgaaauuguguaccucacaaacaccacgaucgagaaggaaauuuguccuaaacuggccgaguaucggaauuggagcaagccccagugcaacaucaccggguucgcgccuuuuuccaaagacaauucuauucgccuuagcgcuggaggcgauaucugggucacaagagagcccuacguguccugugggccugacaagugcuaucaauucgcccugggacagggcaccacacucaacaaugggcacucuaacgauaccguucaugaccggacgccguaccgcacacugcugaugaaugaacucggagugcccuuucaccugggcaccagacaggucuguaucgccuggagcuccagcucuugccaugauggcaaggcuuggcuucacguguguguuacaggggacgauaaaaacgccaccgcuuccuucauuuauaauggacggcugguggacagcaucggcucuugguccaagaaaauucuccgcacccaggagagcgaaugcgucuguaucaacgggacaugcacgguggugaugaccgauggaucugccuccggcaaggcggacacaaaaauucuguuuaucgaggaggggaagaucguccacauuagcacccuuuccggaucugcccaacauguugaagagugcagcuguuacccuagauaucccggcgugcggugcgugugucgcgauaacuggaagggcuccaauagaccuaucgucgacauuaacgugaaagauuacagcaucguuucuuccuacgugugcagcgggcuggucggagacacaccccggaagaaugacucuuucagcuccucucacugucucgauccgaacaaugaagagggcgggcauggagugaaaggcugggcuuuugacgaugggaacgacguuuggaugggacgcaccauuagcgaaaagcugagauccggcuaugagacguucaaagugaucgagggcuggagcaagccuaauucuaaacugcagaucaaccggcaggucauuguggaacgcgggaauagauccggauacagcggcaucuuuucugucgaggggaaguccugcauuaaccgguguuucuauguggaacucaucagaggacgcaaggaggaaacagagguuugguggaccagcaauuccauuguggucuuuugcggcaccucugggacauacggcaccggaagcuggcccgauggcgccgacaucaaccugaugccuauuuga

SEQ ID NO: 207527 - RNA, 1410 nt, Artificial Sequence; identical to SEQ ID NO: 206663
  derived and/or modified CDS sequence (opt5) from neuraminidase__InfluenzaA__ABI92679

SEQ ID NO: 207528 - RNA, 1410 nt, Artificial Sequence; identical to SEQ ID NO: 206217
  derived and/or modified CDS sequence (opt5) from neuraminidase__InfluenzaA__ABI92701

SEQ ID NO: 207529 - RNA, 1410 nt, Artificial Sequence
  derived and/or modified CDS sequence (opt5) from neuraminidase__InfluenzaA__ABI92712
augaaccccaaucagaagaucauuaccaucggcagcgugucccugacaauugccacgaucugcuuccucaugcaaauugcuauccuggucaccacaguuacccuucacuuuaaacagcaugaguguaacucuccuccgaauaaccaggccaugcugugcgaacccacaaccacagagagaaauaccacggaaaucguguaccucaccaacacaaccauugagaaggaaaucuguccuaaacugguggaguaucggaauuggagcaagccccagugcaacauuacaggguucgcgccuuuuuccaaagacaauucuauccgccuuagcgcuggaggcgauauuugggucaccagagagcccuacguguccugugacccugauaagugcuaucaauucgcccuggggcagggaacgacacucaacaauggccacucuaacgacaccguucaugaucggacaccguaccgcacccugcugaugaaugaacucggggugcccuuucaccugggaaccagacaggucuguaucgccuggagcuccagcucuugccaugacggcaaggcuuggcuucacguguguguuacaggcgaugacaaaaacgccacggcuuccuucauuuauaaugggcggcugguggauagcaucggaucuugguccaagaaaauccuccgcacccaggagagcgaaugcgucuguauuaacggcacaugcaccguggugaugacagacgggucugccuccggaaaggcggauaccaaaauccuguuuauugaggagggcaagaucguccacauuagcacgcuuuccgggucugcccaacauguugaagagugcagcuguuacccuagauaucccggagugcggugcgugugucgcgacaacuggaagggcuccaauagaccuaucgucgauaucaacgugaaagacuacagcauuguuucuuccuacgugugcagcggccuggucggggacacaccccggaagaaugauucuuucagcuccucucacugucucgacccgaacaaugaagagggaggccauggggugaaaggaugggcuuuugaugacggcaacgauguuuggauggggcgcaccaucagcgaaaagcugagauccggauaugagaccuucaaagugauugagggcuggagcaagccuaauucuaaacugcagaucaaccggcaggucauuguggaacgcggcaauagauccggguacagcggaaucuuuucugucgagggcaaguccugcaucaaccgguguuucuauguggaacucauuagagggcgcaaggaggaaacagagguuugguggaccagcaauuccaucguggucuuuugcggaacaucuggcacguacgggaccggcagcuggcccgacggagccgauauuaaccugaugccuaucuga

SEQ ID NO: 207530 - RNA, 1410 nt, Artificial Sequence
  derived and/or modified CDS sequence (opt5) from neuraminidase__InfluenzaA__ABI92723
augaaccccaaucagaagaucauuaccaucggcagcgugucccugacaauugccacgaucugcuuccucaugcaaauugcuauccuggucaccacaguuacccuucacuuuaaacagcaugaguguaacucuccuccgaauaaccaggugaugcugugcgaacccacaaucauugagagaaauaucaccgaaauuguguaccucacaaacaccacgaucgagaaggaaauuuguccuaaacuggucgaguaucggaauuggagcaagccccagugcaacaucaccggguucgccccuuuuuccaaagacaauucuauucgccuuagcgcgggaggcgauaucugggugacaagagagcccuacguuuccugugacccugauaagugcuaucaauucgcucuggggcagggaaccacacucaacaauggccacucuaacgacaccgugcaugaucggacgccguaccgcacacugcugaugaaugaacucgggguccccuuucaccugggaaccaaacagguguguaucgccuggagcuccagcucuugccaugacggcaaagccuggcuucacguuugugugacaggcgaugacaagaacgcuaccgccuccuucauuuauaaugggagacuggucgauagcaucggaucuugguccaaaaagauucuccggacccaggagagcgaaugcguguguaucaacggcacaugcacgguggucaugaccgacgggucugcuuccggaaaagccgauacaaagauucuguuuaucgaggagggcaagaucguucacauuagcacccuuuccgggucugcgcaacauguggaagagugcagcuguuacccucgcuaucccggagugagaugcgucugucgggacaacuggaaaggcuccaaucgcccuaucguggauauuaacguuaaggacuacagcaucgugucuuccuacgucugcagcggccuggugggggacacacccagaaagaaugauucuuucagcuccucucacugucucgacccgaacaaugaagagggaggccaugggguuaagggaugggccuuugaugacggcaacgauguguggauggggcggaccauuagcgaaaaacugcgcuccggauaugagacguucaaggucaucgagggcuggagcaaaccuaauucuaagcugcagaucaacagacaggugauugucgaacggggcaaucgcuccggguacagcggaaucuuuucuguggagggcaaguccugcauuaacagauguuucuauguugaacucauccgggggagaaaagaggaaacagaggugugguggaccagcaauuccauugucguguuuugcggaaccucuggcacauacgggaccggcagcuggcccgacggagcugauaucaaccugaugccuauuuga

SEQ ID NO: 207531 - RNA, 1410 nt, Artificial Sequence; identical to SEQ ID NO: 206217
  derived and/or modified CDS sequence (opt5) from neuraminidase__InfluenzaA__ABI92734

SEQ ID NO: 207532 - RNA, 1410 nt, Artificial Sequence; identical to SEQ ID NO: 206663
  derived and/or modified CDS sequence (opt5) from neuraminidase__InfluenzaA__ABI92745

SEQ ID NO: 207533 - RNA, 1410 nt, Artificial Sequence
  derived and/or modified CDS sequence (opt5) from neuraminidase__InfluenzaA__ABI92756
augaaccccaaucagaagaucauuaccaucggcagcgugucccugacaauugccacgaucugcuuccucaugcaaauugcuauccuggucaccacaguuacccuucacuuuaaacagcaugaguguaacucuccuccgaauaaccaggugauccugugcgaacccacaauuaucgagagaaauauuaccgaaaucguguaccucacaaacaccacgauugagaaggaaaucuguccuaaacuggccgaguaucggaauuggagcaagccccagugcaacauuaccggguucgcgccuuuuuccaaagacaauucuauccgccuuagcgcuggaggcgauaucugggucacaagagagcccuacguguccugugacccugauaagugcuaucaauucgcccuggggcagggaaccacacucaacaauggccacucuaacgacaccguucaugaucggacgccguaccgcacacugcugaugaaugaacucggggugcccuuucaccugggaaccagacaggucuguauugccuggagcuccagcucuugccaugacggcaaggcuuggcuucacguguguguuacaggcgaugacaaaaacgccaccgcuuccuucaucuauaaugggcggcugguggauagcauuggaucuugguccaagaaaauccuccgcacccaggagagcgaaugcgucuguauuaacggcacaugcacgguggugaugaccgacgggucugccuccggaaaggcggauacaaaaauccuguuuaucgaggagggcaagauuguccacaucagcacccuuuccgggucugcccaacauguugaagagugcagcuguuacccuagauaucccggagugcggugcgugugucgcgacaacuggaagggcuccaauagaccuauugucgauaucaacgugaaagacuacagcauuguuucuuccuacgugugcagcggccuggucggggacacaccccggaagaaugauucuuucagcuccucucacugucucgacccgaacaaugaagagggaggccauggggugaaaggaugggcuuuugaugacggcaacgauguuuggauggggcgcaccaucagcgaaaagcugagauccggauaugagacguucaaagugaucgagggcuggagcaagccuaauucuaaacugcagauuaaccggcaggucaucguggaacgcggcaauagauccggguacagcggaaucuuuucugucgagggcaaguccugcauuaaccgguguuucuauguggaacucauuagagggcgcaaggaggaaacagagguuugguggaccagcaauuccaucguggucuuuugcggaaccucuggcacauacgggaccggcagcuggcccgacggagccgauauuaaccugaugccuaucuga

SEQ ID NO: 207534 - RNA, 1410 nt, Artificial Sequence
  derived and/or modified CDS sequence (opt5) from neuraminidase__InfluenzaA__ABI92767
augaaccccaaucagaagaucauuaccaucggcagcgugucccugacaauugccacgaucugcuuccucaugcaaauugcuauccuggucaccacaguuacccuucacuuuaaacagcaugaguguaacucuccuccgaauaaccaggugaugcugugcgaacccacaaucauugagagaaauaucaccgaaauuguguaccucacaaacaccacgaucgagaaggaaauuuguccuaaacuggccgaguaucggaauuggagcaagccccagugcaacaucaccggguucgcgccuuuuuccaaagacaauucuauucgccuuagcgcuggaggcgauaucugggucacaagagagcccuacguguccugugacccugauaagugcuaucaauucgcccuggggcagggaaccacacucaacaauggccacucuaacgacaccguucaugaucggacgccguaccgcacacugcugaugaaugaacucggggugcccuuucaccugggaaccagacaggucuguaucgccuggagcuccagcucuugccaugacggcaaggcuuggcuucacguguguguuacaggcgaugacaaaaacgccaccgcuuccuucauuuauaaugggcggcugguggauagcaucggaucuugguccaagaaaauucuccgcacccaggagagcgaaugcgucuguaucaacggcacaugcacgguggugaugaccgacgggucugccuccggaaaggcggauacaaaaauucuguuuaucgaggagggcaagaucguccacauuagcacccuuuccgggucugcccaacauguugaagagugcagcuguuacccuagauaucccggagugcggugcgugugucgcgacaacuggaagggcuccaauagaccuaucgucgauauuaacgugaaagacuacagcaucguuucuuccuacgugugcagcggccuggucggggacacaccccggaagaaugauucuuucagcuccucucacugucucgacccgaacaaugaagagggaggccauggggugaaaggaugggcuuuugaugacggcaacgauguuuggauggggcgcaccauuagcgaaaagcugagauccggauaugagacguucaaagugaucgagggcuggagcaagccuaauucuaaacugcagaucaaccggcaggucauuguggaacgcggcaauagauccggguacagcggaaucuuuucugucgagggcaaguccugcauuaaccgguguuucuauguggaacucaucagagggcgcaaggagaaaacagaaguuugguggaccagcaauuccauuguggucuuuugcggaaccucuggcacauacgggaccggcagcuggcccgacggagccgauaucaaccugaugccuauuuga

SEQ ID NO: 207535 - RNA, 1410 nt, Artificial Sequence; identical to SEQ ID NO: 206217
  derived and/or modified CDS sequence (opt5) from neuraminidase__InfluenzaA__ABI92778

SEQ ID NO: 207536 - RNA, 1410 nt, Artificial Sequence; identical to SEQ ID NO: 206399
  derived and/or modified CDS sequence (opt5) from neuraminidase__InfluenzaA__ABI92789

SEQ ID NO: 207537 - RNA, 1410 nt, Artificial Sequence; identical to SEQ ID NO: 206399
  derived and/or modified CDS sequence (opt5) from neuraminidase__InfluenzaA__ABI92800

SEQ ID NO: 207538 - RNA, 1410 nt, Artificial Sequence; identical to SEQ ID NO: 206399
  derived and/or modified CDS sequence (opt5) from neuraminidase__InfluenzaA__ABI92811

SEQ ID NO: 207539 - RNA, 1410 nt, Artificial Sequence; identical to SEQ ID NO: 206399
  derived and/or modified CDS sequence (opt5) from neuraminidase__InfluenzaA__ABI92822

SEQ ID NO: 207540 - RNA, 1410 nt, Artificial Sequence; identical to SEQ ID NO: 206399
  derived and/or modified CDS sequence (opt5) from neuraminidase__InfluenzaA__ABI92844

SEQ ID NO: 207541 - RNA, 1410 nt, Artificial Sequence; identical to SEQ ID NO: 206399
  derived and/or modified CDS sequence (opt5) from neuraminidase__InfluenzaA__ABI92855

SEQ ID NO: 207542 - RNA, 1410 nt, Artificial Sequence
  derived and/or modified CDS sequence (opt5) from neuraminidase__InfluenzaA__ABI92866
augaaccccaaucagaagaucauuaccaucggcagcgccucccugacaauugcuacgaucugcuuccucauucaaaucgccauccugguuaccacagucacccuucacuuuaaacagcaugaguguaacucucugccuaauaaccagguuaugcucugcgaaccgacaauuaucgagagaaauauuaccgaaaucguguaccugacaaacaccacgauugagaaggaaaucugucccaaacuugcggaguaucggaauuggagcaagccucagugcaacauuaccggguucgcucccuuuuccaaagacaauucuauccgccugagcgccggaggcgauaucugggugacaagagagccuuacgucuccugugaccccgauaagugcuaucaauucgcccucgggcagggaaccacacugaacaauggccacucuaacgacaccgugcaugaucggacgccuuaccgcacacugcucaugaaugaacuggggguuccguuucaccuuggaaccagacagguguguauugcuuggagcuccagcucuugccaugacggcaaggccuggcugcacgucugugugacaggcgaugacaaaaacgcuaccgccuccuucaucuauaaugggcggcucguugauagcauuucuuccuggagcaagaaaauccugcgcacccaggagucugaaugcguguguauuaacggaacaugcacggucgugaugaccgacggcuccgcgagcgggaaggccgauacaaaaauccuuuuuaucgaggagggaaagauuauccacauuuccacccugucuggcagcgcucaacauguggaagagugcuccuguuaccccagauauccugggguccggugcguuugucgcgacaacuggaagggaagcaauagacccaucguggauauuaacgugaaagacuacucuaucgucuccagcuacgugugcucuggccucguuggcgacacaccucggaagaaugauagcuucuccucuagccacugucuggaccccaacaaugaagaagggggacauggcgugaaagggugggccuuugaugacggaaacgaugucuggaugggccgcaccaucuccgagaagcugagaagcggguaugagacguucaaagugauugagggauggucuaauccgaacuccaagcuccagaucaaucggcagguuauuguggaacgcggcaacagaagcggcuacucugggaucuuuuccgucgagggaaaaagcugcauuaaucgguguuucuauguggaacugaucagaggccgcaaggaggaaacagaggucugguggaccuccaacucuauugugguguuuugcgggaccagcggaacauacggcaccggguccuggccugacggcgcugauaucaaucuuaugcccaucuga

SEQ ID NO: 207543 - RNA, 1410 nt, Artificial Sequence; identical to SEQ ID NO: 206399
  derived and/or modified CDS sequence (opt5) from neuraminidase__InfluenzaA__ABI92877

SEQ ID NO: 207544 - RNA, 1410 nt, Artificial Sequence; identical to SEQ ID NO: 206399
  derived and/or modified CDS sequence (opt5) from neuraminidase__InfluenzaA__ABI92888

SEQ ID NO: 207545 - RNA, 1410 nt, Artificial Sequence; identical to SEQ ID NO: 206399
  derived and/or modified CDS sequence (opt5) from neuraminidase__InfluenzaA__ABI92899

SEQ ID NO: 207546 - RNA, 1410 nt, Artificial Sequence; identical to SEQ ID NO: 206399
  derived and/or modified CDS sequence (opt5) from neuraminidase__InfluenzaA__ABI92910

SEQ ID NO: 207547 - RNA, 1410 nt, Artificial Sequence; identical to SEQ ID NO: 206399
  derived and/or modified CDS sequence (opt5) from neuraminidase__InfluenzaA__ABI92921

SEQ ID NO: 207548 - RNA, 1410 nt, Artificial Sequence; identical to SEQ ID NO: 206399
  derived and/or modified CDS sequence (opt5) from neuraminidase__InfluenzaA__ABI92932

SEQ ID NO: 207549 - RNA, 1410 nt, Artificial Sequence; identical to SEQ ID NO: 206786
  derived and/or modified CDS sequence (opt5) from neuraminidase__InfluenzaA__ABI92943

SEQ ID NO: 207550 - RNA, 1410 nt, Artificial Sequence; identical to SEQ ID NO: 206786
  derived and/or modified CDS sequence (opt5) from neuraminidase__InfluenzaA__ABI92954

SEQ ID NO: 207551 - RNA, 1410 nt, Artificial Sequence
  derived and/or modified CDS sequence (opt5) from neuraminidase__InfluenzaA__ABI92965
augaaccccaaucagaagaucauuaccaucggcagcgugucccugacaauuucuacgaucugcuucuuuaugcaaauugccauccucaucaccacagucacccugcacuucaaacaguacgaguuuaacagcccuccgaauaaccagguuaugcuuugugaacccacaauuaucgagagaaauauuaccgaaaucguguaucugacaaacaccacgauugagaaggaaaucugcccuaaacucgcugaguaccggaauugguccaagccccagugugacauuaccggguucgccccuuuuucuaaagauaacagcauccgccuguccgcgggaggcgacaucugggugacaagagagcccuaugucucuugcgauccugacaaguguuaccaauucgcucuugggcagggaaccacacugaauaacgugcauagcaaugauaccguucacgaccggacgccguaucgcacacuccugaugaacgaacugggcgugcccuuucaucucgggaccaagcaggucugcauugccugguccucuagcuccugucacgauggaaaagccuggcugcaugugugcguuacaggcgacgauaagaaugcuaccgccagcuucaucuacaacggcagacuuguggacucuauugucuccuggagcaaaaagauccugcggacccaggagucugaaugugugugcauuaaugggacauguacgguggucaugaccgauggauccgcuagcggcaaagccgacacaaagauccucuuuaucgaggaggggaagauuguucacaccuccacacugucuggaagcgcgcaacacguggaagagugcuccugcuauccucgcuaccccggcgugagaugugucugccgggauaacuggaaagggagcaaccgcccuaucguggacauuaauaucaaggacuacucuauuguuuccagcuauguguguucuggacuugucggcgauacccccagaaagaacgaccggagcuccucuagccauugccuggauccgaauaacgaagagggcgggcacggagugaagggcugggccuucgacgaugggaaugacguuuggaugggacgcacgaucuccgaaaaacucagaagcggcuacgagacauuuaaggugaucgagggguggucuaacccuaauuccaaacugcagauuaaccggcaggucaucguggaucgcggaaauagaagcggcuauucuggcauuuucuccgucgaagggaaaagcuguaucaaccggugcuuuuacguggagcugauuagaggacgcaaggaagagaccgaaguucucuggaccuccaauucuaucguggucuucuguggcacaagcgggaccuauggaacaggcuccuggcccgacggggcugauauuaaccugaugccuaucuga

SEQ ID NO: 207552 - RNA, 1410 nt, Artificial Sequence; identical to SEQ ID NO: 206786
  derived and/or modified CDS sequence (opt5) from neuraminidase__InfluenzaA__ABI92976

SEQ ID NO: 207553 - RNA, 1410 nt, Artificial Sequence; identical to SEQ ID NO: 206786
  derived and/or modified CDS sequence (opt5) from neuraminidase__InfluenzaA__ABI92987

SEQ ID NO: 207554 - RNA, 1410 nt, Artificial Sequence; identical to SEQ ID NO: 206786
  derived and/or modified CDS sequence (opt5) from neuraminidase__InfluenzaA__ABI92998

SEQ ID NO: 207555 - RNA, 1410 nt, Artificial Sequence; identical to SEQ ID NO: 206990
  derived and/or modified CDS sequence (opt5) from neuraminidase__InfluenzaA__ABI93009

SEQ ID NO: 207556 - RNA, 1410 nt, Artificial Sequence; identical to SEQ ID NO: 206786
  derived and/or modified CDS sequence (opt5) from neuraminidase__InfluenzaA__ABI93020

SEQ ID NO: 207557 - RNA, 1413 nt, Artificial Sequence; identical to SEQ ID NO: 207428
  derived and/or modified CDS sequence (opt5) from neuraminidase__InfluenzaA__ABI93031

SEQ ID NO: 207558 - RNA, 1410 nt, Artificial Sequence; identical to SEQ ID NO: 207183
  derived and/or modified CDS sequence (opt5) from neuraminidase__InfluenzaA__ABI93042

SEQ ID NO: 207559 - RNA, 1410 nt, Artificial Sequence; identical to SEQ ID NO: 206356
  derived and/or modified CDS sequence (opt5) from neuraminidase__InfluenzaA__ABI93053

SEQ ID NO: 207560 - RNA, 1410 nt, Artificial Sequence
  derived and/or modified CDS sequence (opt5) from neuraminidase__InfluenzaA__ABI93064
augaaccccaaucagaagaucauuaccaucggcagcgugucccugacaauugccacgaucugcuuccucaugcaaauugcuauccuggucaccacaguuacccuucacuuuaaacaguacgaguguaacucuccuccgaauaaccaggugaugcugugcgaacccacaaucauugagagaaauaucaccgaaauuguguaucucacaaacaccacgaucgagaaggaaauuuguccuaaacuggccgaguaccggaauuggagcaagccccagugcaaaaucaccggguucgcgccuuuuuccaaggacaacucuauucgccuuagcgcuggaggcgauaucugggucacaagagagcccuauguguccugugacccugauaagugcuaccaauucgcccuggggcagggaaccacacucaauaaccggcauucuaaugacaccguucacgaucgcacgccguauagaacacugcugaugaacgaacucggcgugcccuuucaucuggggaccaaacaggucuguaucgccuggagcuccagcucuugccacgacggaaaggcuuggcuucauguguguguuacaggccacgaugagaaugccaccgcuuccuucauuuacgacggccggcugguggauagcaucgggucuugguccaaaaagauucuccgcacccaggaaagcgagugcgucuguaucaacggaacaugcacgguggugaugaccgacggcucugccuccgggagagcggauacaaaaauucuguuuaucgaggaaggaaagaucguccacaccagcaaacuuuccggcucugcccaacauguugaggaaugcagcuguuauccucgguaccccggggugcgcugcguguguagagacaauuggaagggauccaaccggccuauugucgauaucaacgugaaggacuacagcauuguuucuuccuaugugugcagcggccuggucggcgacacaccccgcaaaaaugauucuagcuccucuagccacugucucgacccgaacaaugaggaagggggacauggcgugaaggggugggcuuucgaugacggaaacgauguuuggaugggcagaaccaucuccgagaaaagccggucuggguacgagacguuuaaggugauugaaggaugguccaaaccuaauagcaagcugcagaucaaccgccaggucaucguggagagaggcaaucggucuggcuauuccgggauuuucagcgucgaaggaaaguccugcaucaacagauguuuuuacguggagcugauucgcggccggaaacaggaaacagagguuugguggaccucuaauagcaucguggucuucugcgggaccuccggaacauauggcaccgggucuuggcccgacggcgccgauauuaaccucaugccuaucuga

SEQ ID NO: 207561 - RNA, 1410 nt, Artificial Sequence; identical to SEQ ID NO: 206802
  derived and/or modified CDS sequence (opt5) from neuraminidase__InfluenzaA__ABI93075

SEQ ID NO: 207562 - RNA, 1410 nt, Artificial Sequence; identical to SEQ ID NO: 206802
  derived and/or modified CDS sequence (opt5) from neuraminidase__InfluenzaA__ABI93086

SEQ ID NO: 207563 - RNA, 1410 nt, Artificial Sequence; identical to SEQ ID NO: 206802
  derived and/or modified CDS sequence (opt5) from neuraminidase__InfluenzaA__ABI93097

SEQ ID NO: 207564 - RNA, 1410 nt, Artificial Sequence
  derived and/or modified CDS sequence (opt5) from neuraminidase__InfluenzaA__ABI93108
augaaccccaaucagaagaucauuaccaucggcagcgugucccugacaauugccacgaucugcuuccucaugcaaauugcuauccuggucaccacaguuacccuucacuuuaaacaguacgaguguaacucuccuccgaauaaccaggugaugcugugcgaacccacaaucauugagagaaauaucaccgaaauuguguaucucacaaacaccacgaucgagaaggaaauuuguccuaaacuggccgaguaccggaauuggagcaagccccagugcaacaucaccggguucgcgccuuuuuccaaagacaauucuauucgccuuagcgcuggaggcgauaucugggucacaagagagcccuauguguccugugacccugauaagugcuaccaauucgcccuggggcagggaaccacacucaacaauggccauucuaacgacaccguucacgaucggacgccguaucgcacacugcugaugaaugaacucggggugcccuuucaucugggaaccaagcaggucuguaucgccuggagcuccagcucuugccacgacggcaaagccuggcuucauguguguguuacaggcgaugacgagaacgcuaccgcuuccuucauuuacaaugggagacugguggauagcaucggaucuugguccaagaaaauucuccggacccaggaaagcgagugcgucuguaucaacggcacaugcacgguggugaugaccgacgggucugccuccggaaaggcggauacaaaaauucuguuuaucgaggaaggcaagaucguccacaccagcucccuuucugggagcgcccaacacguugaggaaugcuccuguuauccucgcuaccccggagugagaugcgugugucgggacaacuggaagggcagcaaucgcccuauugucgauaucaacgugaaugacuacucuauuguuuccagcuaugugugcucuggccuggucggggacacaccccggaaaaacgauagcuccucuagcucccauugucucgacccgaauaacgaggaaggaggccacggggugaagggaugggcuuucgaugacggcaaugauguuuggauggggagaaccaucagcgagaaacugcgcucuggauacgagacguuuaaggugauugaaggcugguccaaaccuaacagcaagcugcagaucaauagacaggucaucguggaccggggcaaccgcucuggguauuccggaauuuucagcgucgaguccaaaucuugcaucaauagauguuuuuacguggaacucauucggggcagaaagcaggagacagaaguucuguggaccagcaacuccaucguggucuucugcgggaccucuggaacauauggcaccgggagcuggcccgauggcgccgacauuaaucuuaugccuaucuga

SEQ ID NO: 207565 - RNA, 1410 nt, Artificial Sequence
  derived and/or modified CDS sequence (opt5) from neuraminidase__InfluenzaA__ABI93119
augaaccccaaucagaagaucauuaccaucggcagcgugucccugacaauugccacgaucugcuuccucaugcaaauugcuauccuggucaccacaguuacccuucacuuuaaacaguacgaguguaacucuccuccgaauaaccaggugaugcugugcgaacccacaaucauugagagaaauaucaccgaaauuguguaucucacaaacaccacgaucgagaaggaaauuuguccuaaacuggccgaguaccggaauuggagcaagccccagugcaacaucaccggguucgcgccuuuuuccaaagacaauucuauucgccuuagcgcuggaggcgauaucugggucacaagagagcccuauguguccugugacccugauaagugcuaccaauucgcccuggggcagggaaccacacucaacaauggccauucuaacgacaccguucacgaucggacgccguaucgcacacugcugaugaaugaacucggggugcccuuucaucugggaaccaagcaggucuguaucgccuggagcuccagcucuugccacgacggcaaagccuggcuucauguguguguuacaggcgaugacgagaacgcuaccgcuuccuucauuuacaaugggagacugguggauagcaucggaucuugguccaagaaaauucuccggacccaggaaagcgagugcgucuguaucaacggcacaugcacgguggugaugaccgacgggucugccuccggaaaggcggauacaaaaauucuguuuaucgaggaaggcaagaucguccacaccagcucccuuucugggagcgcccaacacguugaggaaugcuccuguuauccucgcuaccccggagugagaugcgugugucgggacaacuggaagggcagcaaucgcccuauugucgauaucaacgugaaagacuacucuauuguuuccagcuaugugugcucuggccuggucggggacacacccagaaagaaugauaacagcuccucuagccauugucucgacccgaauaacgaggaaggaggccacggggugaaaggaugggcuuucgaugacggcaaugauguuuggauggggcggaccaucuccgagaagcugcgcagcggauacgagacguuuaaagugauugaaggcuggucuaagccuaacuccaaacugcagaucaauagacaggucaucguggaccggagcaaccgcucuggcuauuccgggauuuucagcgucgaguccaagucuugcaucaauagauguuuuuacguggaacucauucggggaagaaagcaggagacagaaguucuguggaccagcaacuccaucguggucuucugcggcaccucugggacauauggaaccggcagcuggcccgauggggccgacauuaaucuuaugccuaucuga

SEQ ID NO: 207566 - RNA, 1416 nt, Artificial Sequence
  derived and/or modified CDS sequence (opt5) from neuraminidase__InfluenzaA__ABI94584
augaaccccaaucagaagcuguucgcccucagcggcguggcuaucgcccuguccguccuuaaccugcucauugggaucucuaauguuggacugaacgugagccuucaccugaaagagaagggcccuaaacaagaagagaaucugaccugcacaacgauuaaccagaauaacaccacaguggucgaaaauaccuacgugaacaauacaaccaucauuacaaaggggaccgaccucaaaacgccguccuaucugcuccugaacaagucucuuuguaauguugagggauggguggucaucgcgaaggauaacgcugugagauuuggcgaaagcgagcagaucauuguuacccgggagcccuacguguccugcgacccuacaggguguaaaauguaugcccugcaucagggaaccacaauccgcaauaagcacucuaacggcaccauucaugauagaacggccuuccggggccucaucagcacaccccuggggaccccucccacagucuccaacagcgacuuuaugugcgugggauggucuuccaccaccugucacgauggcauugcucgcaugacaaucugcauucaagggaauaacgacaaugccacggcuaccguguacuauaacagacggcuuacaaccacaaucaaaaccugggcccgcaauauccugagaacgcaggaaagcgagugugucugccauaacggaacaugugcgguugugaugaccgauggcucugccuccagccaggcuuacaccaaggugauguauuuccacaaagggcucgucgugaaggaagaggagcugcggggaucugcccgccacauugaagagugcuccuguuacggccauaaucagaagguuacaugcgugugcagagacaacuggcaaggcgcuaaucggccuaucauugaaaucgauaugagcacccuggagcacacaucccgcuacgucuguacggggauucucaccgacacaucuagaccgggagauaaaagcuccggcgacugcagcaaccccaucaccgggucuccuggagugcccggcguuaagggguuuggauuccugaauggcgauaacacauggcuuggccggaccaucuccccucgcagcagaucuggguuugaaaugcugaaaauucccaaugccggaacggacccgaacagccggaucgcggagagacaggagauuguggacaauaacaacugguccggcuauucugggagcuucaucgauuacuggaaugacaacuccgaauguuauaauccuugcuuuuacgucgagcucauucgcggacggcccgaagaggccaaguauguguggugggcuagcaacucucugaucgcccuuuguggcuccccuuuccccgucgggagcggcucuuuucccgauggagcucagauccaguacuucuccuga

SEQ ID NO: 207567 - RNA, 1413 nt, Artificial Sequence; identical to SEQ ID NO: 206900
  derived and/or modified CDS sequence (opt5) from neuraminidase__InfluenzaA__ABI95220

SEQ ID NO: 207568 - RNA, 1410 nt, Artificial Sequence
  derived and/or modified CDS sequence (opt5) from neuraminidase__InfluenzaA__ABI95242
augaaccccaaucagaagaucauuaccaucggcagcgugucccugacaauuucuacgaucugcuucuuuaugcaaauugccauccucaucaccacagucacccugcacuucaaacaguacgaguuuaacagcccuccgaauaaccagguuaugcuuugugaacccacaauuaucgagagaaauauuaccgaaaucguguaucugacaaacaccacgauugagaaggaaaucugcccuaaacucgcugaguaccggaauugguccaagccccagugugacauuaccggguucgccccuuuuucuaaagauaacagcauccgccuguccgcgggaggcgacaucugggugacaagagagcccuaugucucuugcgauccugacaaguguuaccaauucgcucuugggcagggaaccacacugaauaacgugcauagcaaugauaccguucacggccggacgccguaucgcacacuccugaugaacgaacugggggugcccuuucaucucggaaccaagcaggucugcauugccugguccucuagcuccugucacgacggcaaagccuggcugcaugugugcguuacaggcgaugacaagaaugcuaccgccagcuucaucuacaacgggagacuuguggauucuauugucuccuggagcaaagagauccugcggacccaggaaucugagugugugugcauuaauggaacauguacgguggucaugaccgacggcuccgcuagcggggaggccgauacaaagauccucuuuaucgaagagggaaaaauuguucacaccuccacacugucuggcagcgcgcaacacguggaagagugcuccugcuauccucgcuaccccggggugagaugugucugccgggacaacuggaagggaagcaaccgcccuaucguggauauuaauaucaaggacuacucuauuguuuccagcuauguguguucuggccuugucggcgacacccccagaaagaacgauagcuccucuagcucccauugccuggacccgaauaacgaagaagggggacacggcgugaaagggugggccuucgaugacggaaaugauguuuggaugggccggacgaucagcgagaaacuccgcucuggguacgagacauuuaaggugaucgagggaugguccaacccuaauagcaaacugcagauuaacagacaggucaucguggaccggggcaaucgcucuggcuauuccgggauuuucagcgucgaaggaaaguccuguaucaacagaugcuuuuacguggagcugauucggggcagaaaagaagagaccgagguucucuggaccucuaauagcaucguggucuucugugggacauccggaaccuauggcacagggucuuggcccgauggcgcugacauuaaccugaugccuaucuga

SEQ ID NO: 207569 - RNA, 1413 nt, Artificial Sequence
  derived and/or modified CDS sequence (opt5) from neuraminidase__InfluenzaA__ABI95253
augaaccccaaucagaagaucauuaccaucggcagcauuuccaucgccauugggaucaucucuauuaugcugcaaaucggaaacauuaucagcauuugggcuucccacucuauccagacaggcagccagaaucauacggggauuugcaaccagagaaucaucaccuacgagaauagcacaugggugaaccacaccuaugucaauauuaacaauacaaacguuguggccggaaaagacaagaccucugugacacucgcgggcaauagcucccuguguagcaucucugggugggcuauuuacaccaaagauaacuccauccggauuggaagcaagggcgacgucuucgugauccgcgaaccuuuuaucucuugcucccaucuugaguguagaacguucuuucugacccaaggcgcccuccugaaugauaaacacagcaacgggacaguuaaggaccggucuccguaucgcgcccuuauguccugcccccugggagaagcuccuagccccuacaauuccaaguucgagucuguggccuggagcgcuuccgccugucaugauggcaugggguggcucaccauuggaaucagcggcccugacaacggggcggucgccgugcugaaauauaacggaauuaucacagaaaccauuaagucuuggaaaaagagaauccugcggacgcaggaguccgagugcguuugugugaauggcagcugcuuuacaaucaugaccgauggccccucugacggggcugccagcuacaaaauuuucaagaucgaaaagggaaaagucacaaaguccauugagcucaacgcuccuaauucucacuaugaagaguguagcugcuacccggauaccggcaccgugaugugugugugccgcgacaacuggcacggguccaauagacccugggucagcuuuaaccagaaucuggauuaccagaucggauauauuugcucuggcguuuucggggacaacccucggcccaaagauggagagggcuccuguaauccugugacaguggacggcgccgacggggucaagggauuuagcuacaaauauggcaacgggguguggaucggacgcacgaagucuaauagacuucggaaaggcuucgaaaugauuugggaucccaacggguggaccgacacagauuccgacuuuagcguuaagcaagauguggucgcgaucaccgacugguccggcuacucuggauccuucgugcagcauccggagcugacaggccucgauugcauccgcccuuguuuuuggguugaacuggugagagggcggccccgcgagaauaccacgauuuggacauccggaucuagcaucuccuucugcggcgucaacagcgacaccgccaauuggucuuggccugauggggcugaacuucccuucaccauugacaaguga

SEQ ID NO: 207570 - RNA, 1413 nt, Artificial Sequence; identical to SEQ ID NO: 207428
  derived and/or modified CDS sequence (opt5) from neuraminidase__InfluenzaA__ABI95264

SEQ ID NO: 207571 - RNA, 1413 nt, Artificial Sequence; identical to SEQ ID NO: 207428
  derived and/or modified CDS sequence (opt5) from neuraminidase__InfluenzaA__ABI95275

SEQ ID NO: 207572 - RNA, 1413 nt, Artificial Sequence; identical to SEQ ID NO: 207428
  derived and/or modified CDS sequence (opt5) from neuraminidase__InfluenzaA__ABI95286

SEQ ID NO: 207573 - RNA, 1413 nt, Artificial Sequence
  derived and/or modified CDS sequence (opt5) from neuraminidase__InfluenzaA__ABI95297
augaaccccaaucagaagaucauuaccaucggcagcauuuccaucgccauugggaucaucucucugaugcuccaaauuggaaacaucauuagcaucugggcuucccacucuauucagacaggcagccagaaucauacgggggugugcaaccagagaaucauuaccuacgagaauagcacaugggucaaccacaccuauguuaauaucaacaauacaaacgugaucgccggaaaagacaagaccucugugacacuggcgggcaauagcucccuuuguagcauuucugggugggcuaucuacaccaaagauaacuccauucggaucggaagcaagggcgacgucuucgugauucgcgaaccuuuuaucucuugcucccaucuggaguguagaacguucuuucucacccaaggcgcccugcuuaaugauaaacacagcaacgggacaguuaagaaucggucuccguaucgcgcccugauguccugcccccucggagaagcuccuagccccuacaacuccaaguucgagucuguggccuggagcgcuuccgccugucaugacggcaugggguggcugaccaucggaauuagcggcccugauaacggggcggucgccgugcugaaauauaauggaaucauuacagaaaccaucaagucuuggaaaaagcagauucucagaacgcaggaguccgagugcguuugugugaacggcagcugcuuuacaaucaugaccgacggccccucuaauggggcugccagcuacaaaaucuucaagauugaaaagggaaaagucacaaaguccaucgagcugaacgcuccuaauuuucacuaugaagaguguucuugcuacccggauaccggcaccgugaugugugugugccgggacaacuggcacgggagcaaucgccccugggucuccuucaaccagaaucuugauuaccaaauuggauauaucugcagcggcguuuuuggggacaacccuagacccaaagauggagagggcucuuguaauccugugacaguggacggcgccaacggggucaagggauucuccuacaaauauggcaaugggguguggauuggacggacgaaguccaaccgccugagaaaaggcuuugaaaugaucugggaucccaauggguggaccgacacagacucugauuucuccguuaagcaggacguggucgcgauuaccgauuggagcggcuacuccggaucuuuugugcagcauccggagcucacaggccuggacugcauccggccuuguuucuggguugaacuugugcgcgggcugcccaaggagaacaccacgaucuggacaagcggauccucuauuagcuucugcggcgucaacuccgauaccgccaauuggagcuggccugacggggcugaacuccccuuuaccaucgauaaauga

SEQ ID NO: 207574 - RNA, 1410 nt, Artificial Sequence; identical to SEQ ID NO: 206802
  derived and/or modified CDS sequence (opt5) from neuraminidase__InfluenzaA__ABI95308

SEQ ID NO: 207575 - RNA, 1413 nt, Artificial Sequence; identical to SEQ ID NO: 206458
  derived and/or modified CDS sequence (opt5) from neuraminidase__InfluenzaA__ABI96131

SEQ ID NO: 207576 - RNA, 1413 nt, Artificial Sequence; identical to SEQ ID NO: 206458
  derived and/or modified CDS sequence (opt5) from neuraminidase__InfluenzaA__ABI96133

SEQ ID NO: 207577 - RNA, 1413 nt, Artificial Sequence; identical to SEQ ID NO: 206458
  derived and/or modified CDS sequence (opt5) from neuraminidase__InfluenzaA__ABI96136

SEQ ID NO: 207578 - RNA, 1410 nt, Artificial Sequence
  derived and/or modified CDS sequence (opt5) from neuraminidase__InfluenzaA__ABJ09110
augaaccccaaucagaagaucauuaccaucggcagcgugucccugacaauugccacgaucugcuuccucaugcaaauugcuauccuggucaccacaguuacccuucacuuuaaacaguacgaguguaacucuccuccgaauaaccaggugaugcugugcgaacccacaaucauugagagaaauaucaccgaaauuguguaucucacaaacaccacgaucgagaaggaaauuuguccuaaacuggccgaguaccggaauuggagcaagccccagugcaacaucaccggguucgcgccuuuuuccaaagacaauucuauucgccuuagcgcuggaggcgauaucugggucacaagagagcccuauguguccugugacccugauaagugcuaccaauucgcccuggggcagggaaccacacucaacaauggccauucuaacgacaccguucacgaucggacgccguaucgcacacugcugaugaaugaacucggggugcccuuucaucugggaaccaagcaggucuguaucgccuggagcuccagcucuugccacgacggcaaagccuggcuucauguguguguuacaggcgaugacgagaacgcuaccgcuuccuucauuuacaaugggagacugguggauagcaucggaucuugguccaagaaaauucuccggacccaggaaagcgagugcgucuguaucaacggcacaugcacgguggugaugaccgacgggucugccuccggaaaggcggauacaaaaauucuguuuaucgaggaaggcaagaucauucacaccagcucccuuucugggagcgcccaacacgucgaggaaugcuccuguuauccucgcuaccccggaguuagaugcgugugucgggacaacuggaagggcagcaaucgcccuaucguggauauuaacgucaaagacuacucuaucguguccagcuauguuugcucuggccuggugggggacacacccagaaagaaugauagcuccucuagcucccauugucucgacccgaacaaugaggaaggaggccacggggucaaaggaugggcuuucgaugacggcaacgauguguggauggggcggaccauuagcgagaagcugcgcucuggauacgagacguuuaaaguuaucgaaggcugguccaagccuaauagcaaacugcagaucaacagacaggugauugucgaccggggcaaucgcucuggguauuccggaaucuucagcguggaguccaagucuugcauuaacagauguuuuuacgucgaacucauccggggcagaaagcaggagacagaagugcuguggaccagcaauuccauuguuguguucugcgggaccucuggaacauauggcaccgggagcuggcccgauggcgccgacaucaaccuuaugccuauuuga

SEQ ID NO: 207579 - RNA, 1410 nt, Artificial Sequence; identical to SEQ ID NO: 207173
  derived and/or modified CDS sequence (opt5) from neuraminidase__InfluenzaA__ABJ09143

SEQ ID NO: 207580 - RNA, 1413 nt, Artificial Sequence; identical to SEQ ID NO: 206997
  derived and/or modified CDS sequence (opt5) from neuraminidase__InfluenzaA__ABJ09154

SEQ ID NO: 207581 - RNA, 1410 nt, Artificial Sequence; identical to SEQ ID NO: 206399
  derived and/or modified CDS sequence (opt5) from neuraminidase__InfluenzaA__ABJ09165

SEQ ID NO: 207582 - RNA, 1410 nt, Artificial Sequence; identical to SEQ ID NO: 206399
  derived and/or modified CDS sequence (opt5) from neuraminidase__InfluenzaA__ABJ09176

SEQ ID NO: 207583 - RNA, 1410 nt, Artificial Sequence; identical to SEQ ID NO: 206786
  derived and/or modified CDS sequence (opt5) from neuraminidase__InfluenzaA__ABJ09198

SEQ ID NO: 207584 - RNA, 1410 nt, Artificial Sequence; identical to SEQ ID NO: 206786
  derived and/or modified CDS sequence (opt5) from neuraminidase__InfluenzaA__ABJ09209

SEQ ID NO: 207585 - RNA, 1410 nt, Artificial Sequence
  derived and/or modified CDS sequence (opt5) from neuraminidase__InfluenzaA__ABJ09220
augaaccccaaucagaagaucauuaccaucggcagcgugucccugacaauugccacgaucugcuuccucaugcaaauugcuauccuggucaccacaguuacccuucacuuuaaacaguacgaguguaacucuccuccgaauaaccaggugaugcugugcgaacccacaaucauugagagaaauaucaccgaaauuguguaucucacaaacaccacgaucgagaaggaaauuuguccuaaacuggccaaguaccggaauuggagcaaaccccagugcaagaucaccggguucgcgccuuuuuccaaggacaacucuauucgccuuagcgcuggaggcgauaucugggucacaagagagcccuauguguccugugacccugggaaaugcuaccaauucgcccugggacggggcaccacacucaauaaccgccauucuaaugauaccguucacgacagaacgccguaucggacacugcugaugaacgagcucggggugcccuuucaucugggaaccaagcaggucuguaucgccuggagcuccagcucuugccacgauggcaaggcuuggcuucauguguguguuacaggccacgacgaaaaugccaccgcuuccuucauuuacgaugggcgccugguggacagcaucggaucuugguccaaaaacauucucagaacccaggagagcgaaugcgucuguaucaauggcacaugcacgguggugaugaccgaugggucugccuccgagcgggcggacacaaaaauucuguuuaucgaggaaggaaagaucguccacauuagcccucuuuccggcucugcccagcauguugaggaaugcagcuguuauccccgcuacccuggggugagaugcgugugucgggauaacuggaagggauccaaccgccccaucgucgacauuaaugugaaagauuacagcaucguuucuuccuaugugugcagcggccuggucggcgacaccccgagaaagaacgacucuagcuccucuagcuacugucggaauccuaacaaugagaaagggucccacggagugaagggcugggcuuucgaugacgggaacgauguuuggaugggacgcacaauuagcgaggaacucagaucuggcuaugagaccuuuaaagugaucgggggaugguccaagcccaauagcaaacugcaaaucaaccggcaggucauuguggacagaggcaaucgcucuggcuacuccgggaucuucagcgucgaaggaaaguccugcauuaaccgguguuuuuauguggagcugaucagaggccgcaagcaggaaacggagguuugguggacaucuaauagcauuguggucuucugcgggaccuccggaaccuacggcacagggucuuggccugauggcgccgacaucaaccucaugcccauuuga

SEQ ID NO: 207586 - RNA, 1410 nt, Artificial Sequence; identical to SEQ ID NO: 206802
  derived and/or modified CDS sequence (opt5) from neuraminidase__InfluenzaA__ABJ09231

SEQ ID NO: 207587 - RNA, 1410 nt, Artificial Sequence; identical to SEQ ID NO: 206802
  derived and/or modified CDS sequence (opt5) from neuraminidase__InfluenzaA__ABJ09242

SEQ ID NO: 207588 - RNA, 1410 nt, Artificial Sequence; identical to SEQ ID NO: 206356
  derived and/or modified CDS sequence (opt5) from neuraminidase__InfluenzaA__ABJ09253

SEQ ID NO: 207589 - RNA, 1410 nt, Artificial Sequence
  derived and/or modified CDS sequence (opt5) from neuraminidase__InfluenzaA__ABJ09264
augaaccccaaucagaagaucauuaccaucggcagcgugucccugacaauugccacgaucugcuuccucaugcaaauugcuauccuggucaccacaguuacccuucacuuuaaacaguacgaguguaacucuccuccgaauaaccaggugaugcugugcgaacccacaaucauugagagaaauaucaccgaaauuguguauaugacaaacaccacgaucgagaaggaaauuuguccuaaacucgccgaguaccggaauuggagcaagccccagugcaacaucaccggguucgcgccuuuuuccaaagacaauucuauucgccugagcgcuggaggcgauaucugggucacaagagagcccuauguguccugugacccugauaagugcuaccaauucgcccuugggcagggaaccacacugaacaaucggcauucuaacgacaccguucacgaucgcacgccguauagaacacuccugaugaaugaacugggcgugcccuuucaucucgggaccaagcaggucuguaucgccuggagcuccagcucuugccacgacggaaaagccuggcugcauguguguguuacaggccacgaugagaacgcuaccgcuuccuucauuuacaauggccggcuuguggacagcaucgggucuugguccaagaaaauucugcgcacccaggaaagcgagugcgucuguaucaacggaacaugcacgguggugaugaccgauggcucugccuccgggaaggcggacacaaaaauucucuuuaucgaggaaggaaagaucguccacauuagcccucuguccggcucugcccaacauguugaggaaugcagcuguuaucccagauacccuggggugcggugcgugugucgcgauaacuggaagggauccaauagacccaucgucgacauuaacgugaaagauuacagcaucguuucuuccuaugugugcagcggccuugucggcgacaccccgcggaagaaugacucuagcuccucuagccacugucugaacccuaauaacgaggaagggggacauggcgugaaagggugggcuuucgaugacggaaaugauguuuggaugggccgcacaauuuccgagaagcucagaagcggguacgagaccuuuaaagugaucgaaggauggucuaagcccaacuccaaacugcagaucaaucggcaggucauuguggaccgcggcaacagcucuggcuauuccgggaucuucagcgucgagggaaaguccugcauuaauagauguuuuuacguggaacugauccggggcagaaagcaggagacggaaguuugguggacaucuaacagcauugugguccucugcgggaccuccggaaccuauggcacagggucuuggccugauggcgccgacaucaaucugaugcccauuuga

SEQ ID NO: 207590 - RNA, 1410 nt, Artificial Sequence
  derived and/or modified CDS sequence (opt5) from neuraminidase__InfluenzaA__ABJ09286
augaaccccaaucagaagaucauuaccaucggcagcgugucccugacaauugccacgaucugcuuccucaugcaaauugcuauccuggucaccacaguuacccuucacuuuaaacaguacgaguguaacucuccuccgaauaaccaggugaugcugugcgaacccacaaucauugagagaaauaucaccgaaauuguguaucucacaaacaccacgaucgagaaggaaauuuguccuaaacuggccgaguaccggaauuggagcaagccccagugcaacaucaccggguucgcgccuuuuuccaaagacaauucuauucgccuuagcgcuggaggcgauaucugggucacaagagagcccuauguguccugugacccugauaagugcuaccaauucgcccuggggcagggaaccacacucaacaauggccauucuaacgacaccguucacgaucggacgccguaucgcacacugcugaugaaugaacucggggugcccuuucaucugggaaccaagcaggucuguaucgccuggagcuccagcucuugccacgacggcaaagccuggcuucauguguguguuacaggcgaugacgagaacgcuaccgcuuccuucauuuacaaugggagacugguggauagcaucggaucuugguccaagaaaauucuccggacccaggaaagcgagugcgucuguaucaacggcacaugcacgguggugaugaccgacgggucugccuccggaaaggcggauacaaaaauucuguuuaucgaggaaggcaagaucguccacaccagcccucuuuccgggucugcccaacacguugaggaaugcagcuguuauccccgcuacccuggagugagaugcgugugucgggacaacuggaagggcuccaaucgccccauugucgauaucaacgugaaagacuacagcauuguuucuuccuaugugugcagcggccuggucggggacacaccgagaaagaaugauucuagcuccucuagccauugucucgacccuaacaaugaggaaggaggccacggggugaaaggaugggcuuucgaugacggcaacgauguuuggauggggcggaccaucuccgagaagcugcgcagcggauacgagacguuuaaagugauugaaggcuggucuaagcccaauuccaaacugcagaucaacaagcaggucaucguggacagaggcaaucggagcggguauucuggaauuuucuccgucgagggcaagagcugcaucaaccgcuguuuuuacguggaacucauuagagggcggaaacaggagacagaaguucuguggaccuccaauucuaucguggucuucugcggaaccagcggcacauaugggaccggcuccuggccugauggagccgacauuaaccuuaugcccaucuga

SEQ ID NO: 207591 - RNA, 1410 nt, Artificial Sequence; identical to SEQ ID NO: 206356
  derived and/or modified CDS sequence (opt5) from neuraminidase__InfluenzaA__ABJ09308

SEQ ID NO: 207592 - RNA, 1410 nt, Artificial Sequence; identical to SEQ ID NO: 207560
  derived and/or modified CDS sequence (opt5) from neuraminidase__InfluenzaA__ABJ09319

SEQ ID NO: 207593 - RNA, 1413 nt, Artificial Sequence; identical to SEQ ID NO: 207025
  derived and/or modified CDS sequence (opt5) from neuraminidase__InfluenzaA__ABJ09330

SEQ ID NO: 207594 - RNA, 1410 nt, Artificial Sequence
  derived and/or modified CDS sequence (opt5) from neuraminidase__InfluenzaA__ABJ09341
augaaccccaaucagaagaucauuaccaucggcagcgugucccugacaauugccacgaucugcuuccucaugcaaauugcuauccuggucaccacaguuacccuucacuuuaaacaguacgaguguaacucuccuccgaauaaccaggugaugcugugcgaacccacaaucauugagagaaauaucaccgaaauuguguaucucacaaacaccacgaucgagaaggaaauuuguccuaaacuggccgaguaccggaauuggagcaagccccagugcaacaucaccggguucgcgccuuuuuccaaagacaauucuauucgccuuagcgcuggaggcgauaucugggucacaagagagcccuauguguccugugacccugauaagugcuaccaauucgcccuggggcagggaaccacacucaacaauggccauucuaacgacaccguucacgaucggacgccguaucgcacacugcugaugaaugaacucggggugcccuuucaucugggaaccaagcaggucuguaucgccuggagcuccagcucuugccacgacggcaaagccuggcuucauguguguguuacaggcgaugacgagaacgcuaccgcuuccuucauuuacaaugggagacugguggauagcaucggaucuugguccaagaaaauucuccggacccaggaaagcgagugcgucuguaucaacggcacaugcacgguggugaugaccgacgggucugccuccggaaaggcggauacaaaaauucuguuuaucgaggaaggcaagaucguccacaccagcucccuucuggggucugcccaacacguugaggaaugcagcuguuauccucgcuaccccggagugagaugcgugugucgggacaacuggaagggcuccaaucgcccuauugucgauaucaacgugaaagacuacagcauuguuucuuccuaugugugcagcggccucgucggggacacacccagaaagaaugauucuagcuccucuagccauugucuggacccgaacaaugaggaaggaggccacggggugaaaggaugggcuuucgaugacggcaacgauguuuggauggggcggaccaucuccgagaagcugcgcagcggauacgagacguuuaaagugauugaaggcuggucuaagccuaauuccaaacuccagaucaacagacaggucaucguggaccggggcaaucgcagcggguauucuggaauuuucuccgucgagagcaaguccugcaucaacagauguuuuuacguggaacugauucggggcagaaagcaggagacagaaguucuuuggaccucuaauagcaucguggucuucugcgggaccuccggaacauauggcaccgggucuuggcccgauggcgccgacauuaaccugaugccuaucuga

SEQ ID NO: 207595 - RNA, 1410 nt, Artificial Sequence
  derived and/or modified CDS sequence (opt5) from neuraminidase__InfluenzaA__ABJ09352
augaaccccaaucagaagaucauuaccaucggcagcgugucccugacaauugccacgaucugcuuccucaugcaaauugcuauccuggucaccacaguuacccuucacuuuaaacaguacgaguguaacucuccuccgaauaaccaggugaugcugugcgaacccacaaucauugagagaaauaucaccgaaauuguguaucucacaaacaccacgaucgagaaggaaauuuguccuaaacuggccgaguaccggaauuggagcaagccccagugcaacaucaccggguucgcgccuuuuuccaaagacaauucuauucgccuuagcgcuggaggcgauaucugggucacaagagagcccuauguguccugugacccugauaagugcuaccaauucgcccuggggcagggaaccacacucaacaauggccauucuaacgacaccguucacgggcggacgccguaucgcacacugcugaugaaugaacucggagugcccuuucaucugggcaccaagcaggucuguaucgccuggagcuccagcucuugccacgauggcaaagccuggcuucauguguguguuacaggggacgaugagaacgcuaccgcuuccuucauuuacaauggaagacugguggacagcaucggcucuugguccaagaaaauucuccggacccaggaaagcgagugcgucuguaucaacgggacaugcacgguggugaugaccgauggaucugccuccggcaaggcggacacaaaaauucuguuuaucgaggaagggaagaucguccacaccagcucccuuucuggaagcgcccaacacguugaggaaugcuccuguuauccucgcuaccccggcgugagaugcgugugucgggauaacuggaagggcagcaaucgcccuauugucgacaucaacgugaaagauuacucuauuguuuccagcuaugugugcucugggcuggucggagacacacccagaaagaaugacagcuccucuagcucccauugucucgauccgaacaaugaggaaggcgggcacggagugaaaggcugggcuuucgacgaugggaacgacguuuggaugggacggaccaucagcgagaagcugcgcucuggcuacgagacguuuaaagugauugaaggcugguccaagccuaauagcaaacugcagaucaacagacaggucaucguggaucgggggaaucgcucuggauauuccggcauuuucagcgucgaguccaagucuugcaucaacagauguuuuuacguggaacucauucgggggagaaagcaggagacagaaguucuguggaccagcaauuccaucguggucuucugcggaaccucuggcacauaugggaccggcagcuggcccgacggagccgauauuaaccuuaugccuaucuga

SEQ ID NO: 207596 - RNA, 1407 nt, Artificial Sequence
  derived and/or modified CDS sequence (opt5) from neuraminidase__InfluenzaA__ABJ09374
augauccagagcaagauuaucaccauuggcuccgugucucugacaaucagcacgauuugcuucuuuaugcaaaucgccauccucauuaccacagucacccugcacuucaaacaguacgaguuuaacagcccgccuaauaaccagguuaugcuuugugaaccgacaaucauugagagaaauaucaccgaaauuguguaucugacaaacaccacgaucgagaaggaaauuugccccaaacucgcugaguaccggaauuggucuaagccucagugugacaucaccggguucgcccccuuuagcaaagauaacuccauccgccugucugcgggaggcgacauuugggugacaagagagccuuaugucagcugcgaucccgacaaguguuaccaauucgcucuugggcagggaaccacacugaauaacgugcauuccaaugauaccguucacgaccggacgccuuaucgcacacuccugaugaacgaacugggcgugccguuucaucucgggaccaagcaggucugcaucgccugguccucuuccagcugucacgauggaaaagccuggcugcaugugugcguuacaggcgacgauaagaaugcuaccgccucuuucauuuacaacggcagacuuguggacuccaucgucagcuggucuaaaaagauucugcggacccaggaguccgaaugugugugcaucaaugggacauguacgguggucaugaccgauggaagcgcuuccggcaaagccgacacaaagauccucuuuauugaggaggggaagaucguucacaccucuacacugagcggauccgcgcaacacguggaagagugcagcugcuauccccgcuacccuggcgugagaugugucugccgggauaacuggaaagggucuaaucgccccauuguggacaucaacauuaaggacuacuccaucguuagcucuuauguguguagcggacuugucggcgauaccccucggaaaaacgacuccucuagcuccagccauugccuggaucccaauaacgaagagggcgggcacggagugaagggcugggccuucgacgaugggaaugacguuuggaugggaagaacgaucucugaaaaacuccgcuccggcuacgagacauuuaaggugauugagggguggagcaaccccaauucuaaacugcagaucaacagacaggucauuguggaucggggaaaucgcuccggcuauagcggcaucuucuccgucgaagggaagucuuguauuaacagaugcuuuuacguggagcugauccggggaaagaaagaagagaccgaaguucucuggaccagcaauuccauuguggucuucuguggcacaucugggaccuauggaacaggcagcuggccugacggggcugauaucaaccugaugcccaucuga

SEQ ID NO: 207597 - RNA, 1410 nt, Artificial Sequence; identical to SEQ ID NO: 206786
  derived and/or modified CDS sequence (opt5) from neuraminidase__InfluenzaA__ABJ09385

SEQ ID NO: 207598 - RNA, 1410 nt, Artificial Sequence; identical to SEQ ID NO: 206325
  derived and/or modified CDS sequence (opt5) from neuraminidase__InfluenzaA__ABJ16590

SEQ ID NO: 207599 - RNA, 1410 nt, Artificial Sequence; identical to SEQ ID NO: 207590
  derived and/or modified CDS sequence (opt5) from neuraminidase__InfluenzaA__ABJ16601

SEQ ID NO: 207600 - RNA, 1413 nt, Artificial Sequence
  derived and/or modified CDS sequence (opt5) from neuraminidase__InfluenzaA__ABJ16612
augaaccccaaucagaagaucauuaccaucggcagcauuuccaucgccauugggaucaucucucugaugcuccaaauuggaaacaucauuagcaucugggcuucccacucuauucagacaggcagccagaaucauacgggggugugcaaccagagaaucauuaccuacgagaauagcacaugggucaaccacaccuauguuaauaucaacaauacaaacgugguggccggaaaagacaagaccucugucacacuggcgggcaauagcucccuuuguagcaucucugggugggcuauuuacaccaaagauaacuccauccggauuggaagcaagggcgacguguucguuauccgcgaaccuuuuauuucuugcucccaucuggaguguagaacguucuuucucacccaaggcgcccugcuuaaugauaaacacagcaacgggacagugaaggaccggucuccguaucgcgcccugauguccugcccccucggagaagcuccuagccccuacaauuccaaguucgagucugucgccuggagcgcuuccgccugucaugauggcaugggguggcugaccgugggaaucagcggcccugacaacggggcgguugccgugcugaaauauaacggaaucauuacagaaaccaucaagucuuggaaaaagcggauucucagaacgcaggaguccgagugcgucugugugaauggcagcugcuuuacaaucaugaccgauggccccucuaacggggcugccagcuacaaaauuuucaagaucgaaaagggaaaagugacaaaguccaucgagcugaaugcuccuaacuuucacuaugaagaguguucuugcuacccggacaccggcaccgucauguguguuugccgcgauaauuggcacgggagcaacagacccuggguguccuucaaucagaaccuugacuaccagauuggauauaucugcagcggcguguuuggggauaauccucggcccaaagacggagagggcucuuguaacccugucacaguggauggcgccgacgggguuaagggauucuccuacaaauauggcaaugggguguggauuggacgcacgaaguccaacagacugcggaaaggcuuugaaaugaucugggaccccaauggguggaccgauacagacucugauuucuccgucaagcaagacgugguugcgauuaccgauuggagcggcuacuccggaucuuuugugcagcauccggagcucacaggccuggacugcauccgcccuuguuucugggucgaacuugugagagggcugccccgggagaacaccacgauuuggacaagcggauccucuaucagcuucugcggcgucaauuccgauaccgccaacuggagcuggccugacggggcugaacuccccuuuaccaucgauaaguga

SEQ ID NO: 207601 - RNA, 1410 nt, Artificial Sequence; identical to SEQ ID NO: 207590
  derived and/or modified CDS sequence (opt5) from neuraminidase__InfluenzaA__ABJ16623

SEQ ID NO: 207602 - RNA, 1410 nt, Artificial Sequence
  derived and/or modified CDS sequence (opt5) from neuraminidase__InfluenzaA__ABJ16634
augaaccccaaucagaagaucauuaccaucggcagcgugucccugacaauuucuacgaucugcuucuuuaugcaaauugccauccucaucaccacagucacccugcacuucaaacaguacgaguuuaacagcccuccgaauaaccagguuaugcuuugugaacccacaauuaucgagagaaauauuaccgaaaucguguaucugacaaacauuaccaucgagaaggaaauuugcccuaaacucgcugaguaccggaauugguccaagccccagugugacaucacgggguucgccccuuuuucuaaagauaacagcauccgccuguccgcgggaggcgacauuugggugaccagagagcccuaugucucuugcgauccugacaaguguuaccaauucgcucuugggcagggaacaacccugaauaacgugcauagcaaugauacaguucacgaccggaccccguaucgcacgcuccugaugaacgaacugggcgugcccuuucaucucgggacaaagcaggucugcaucgccugguccucuagcuccugucacgauggaaaagccuggcugcaugugugcguuaccggcgacgauaagaaugcuacagccagcuucauuuacaacggcagacuuguggacucuaucgucuccuggagcaaaaagauucugcggacccaggagucugaaugugugugcaucaaugggaccuguacaguggucaugacggauggauccgcuagcggcaaagccgacaccaagauccucuuuauugaggaggggaagaucguucacacauccacccugucuggaagcgcgcaacacguggaagagugcuccugcuauccucgcuaccccggcgugagaugugucugccgggauaacuggaaagggagcaaccgcccuauuguggacaucaauauuaaggacuacucuaucguuuccagcuauguguguucuggacuugucggcgauacaccccggaaaaacgacagcuccucuagcucccauugccuggauccgaauaacgaagagggcgggcacggagugaagggcugggccuucgacgaugggaaugacguuuggaugggaagaaccaucagcgaaaaacuccgcucuggcuacgagacguuuaaggugauugaggggugguccaacccuaauagcaaacugcagaucaacagacaggucauuguggaucggggaaaucgcucuggcuauuccggcaucuucagcgucgaagggaaguccuguauuaacagaugcuuuuacguggagcugauccggggaagaaaggaagagacagaaguucucuggaccucuaauagcauuguggucuucuguggcaccuccgggacauauggaaccggcucuuggcccgacggggcugauaucaaccugaugccuaucuga

SEQ ID NO: 207603 - RNA, 1413 nt, Artificial Sequence; identical to SEQ ID NO: 206458
  derived and/or modified CDS sequence (opt5) from neuraminidase__InfluenzaA__ABJ16656

SEQ ID NO: 207604 - RNA, 1413 nt, Artificial Sequence; identical to SEQ ID NO: 206458
  derived and/or modified CDS sequence (opt5) from neuraminidase__InfluenzaA__ABJ16667

SEQ ID NO: 207605 - RNA, 1413 nt, Artificial Sequence
  derived and/or modified CDS sequence (opt5) from neuraminidase__InfluenzaA__ABJ16678
augaaccccaaucagaagaucauuaccaucggcagcauuuccaucgccauugggaucaucucucugaugcuccaaauuggaaacaucauuagcaucugggcuucccacucuauucagacaggcagccagaaucauacggggaucugcaaccagagaauuaucaccuacgaaaauuccacaugggugaaccacaccuaugucaauaucaacaauacaaacguuguggccggaaaagacaagaccucugugacacuggcgggcaauagcucccuuuguagcauuucugggugggcuaucuacaccaaagauaacuccauucggaucggaagcaagggcgacgucuucgugauucgcgagccuuuuaucucuugcucccaucuggaguguagaacguucuuucucacccaaggcgcccugcuuaaugauaaacacagcaacgggacaguuaaggaccggucuccguaucgcgcccugauguccugcccccucggagaagcuccuagccccuacaauuccaaguucgagucuguggccuggagcgcuuccgccugucaugauggcaugggguggcugaccaucggaauuagcggcccugacaacggggcggucgccgugcugaaauauaacggaaucauuacagaaaccaucaagucuuggaaaaagcggauucucagaacgcaggaguccgagugcguuugugugaauggcagcugcuuuacaaucaugaccgauggccccucuaacggggcugccagcuacaaaaucuucaagauugaaaagggaaaagucacaaaguccaucgagcugaaugcuccuaacuuucacuaugaagaguguucuugcuacccggacaccggcaccgugaugugugugugccgcgauaauuggcacgggagcaacagacccugggucuccuucaaucagaaccuugacuaccagauuggauauaucugcagcggcguuuuuggggauaauccucggcccaaagacggaaagggcucuuguaacccugugacaguggauggcgccgacggggucaaaggauucuccuacaaguauggcaaugggguguggauuggacgcacgaaaagcaacagacugcggaagggcuuugagaugaucugggaccccaauggguggaccgauacagacucugauuuccucguuaagcaagacguggucgcgauuaccgauugguccggcuacagcggauccuuugugcagcauccggaacugacaggccuugacugcauccgcccuuguuucuggguugagcuggugagagggcucccccgggaaaacaccacgaucuggacaucuggaagcuccauuucuuucugcggcgucgauagcgacaccgccaauugguccuggccugauggggcugagcugcccuuuaccaucgacaaauga

SEQ ID NO: 207606 - RNA, 1413 nt, Artificial Sequence; identical to SEQ ID NO: 206458
  derived and/or modified CDS sequence (opt5) from neuraminidase__InfluenzaA__ABJ16689

SEQ ID NO: 207607 - RNA, 1410 nt, Artificial Sequence
  derived and/or modified CDS sequence (opt5) from neuraminidase__InfluenzaA__ABJ16700
augaaccccaaucagaagaucauuaccaucggcagcgugucccugacaauugccacgaucugcuuccucaugcaaauugcuauccuggucaccacaguuacccuucacuuuaaacaguacgaguguaacucuccuccgaauaaccaggugaugcugugcgaacccacaaucauugagagaaauaucaccgaaauuguguaucucacaaacaccacgaucgagaaggaaauuuguccuaaacuggccgaguaccggaauuggagcaagccccagugcaacaucaccggguucgcgccuuuuuccaaagacaauucuauucgccuuagcgcuggaggcgauaucugggucacaagagagcccuauguguccugugacccugauaagugcuaccaauucgcccuggggcagggaaccacacucaacaauggccauucuaacgacaccguucacgaucggacgccguaucgcacacugcugaugaaugaacucggggugcccuuucaucugggaaccaagcaggucuguaucgccuggagcuccagcucuugccacgacggcaaagccuggcuucauguguguguuacaggcgaugacgagaacgcuaccgcuuccuucauuuacaaugggagacugguggauagcaucggaucuugguccaagaaaauucuccggacccaggaaagcgagugcgucuguaucaacggcacaugcacgguggugaugaccgacgggucugccuccggaaaggcggauacaaaaauucuguuuaucgaggaaggcaagaucguccacaccagcucccuuucugggagcgcccaacacguugaggaaugcuccuguuauccucgcuaccccggagugagaugcgugugucgggacaacuggaagggcagcaaucgcccuauugucgauaucaacgugaaagacuacucuauuguuuccagcuaugugugcucuggccuggucggggacacacccagaaagaaugauagcuccucuagcucccauugucucgacccgaacaaugaggaaggaggccacggggugaaaggaugggcuuucgaugacggcaacgauguuuggauggggcggaccaucagcgagaagcugcgcucuggauacgagacguuuaaagugauugaaggcugguccaagccuaauagcaaacugcagaucaacagacaggucaucguggaccggggcaaucgcucuggguauuccggaauuuucagcgucgaguccaagucuugcaucaacagauguuuuuacguggaacucauucggggcaagaaacaggagacagaaguucuguggaccagcaauuccaucguggucuucugcgggaccucuggaacauauggcaccgggagcuggcccgauggcgccgacauuaaccuuaugccuaucuga

SEQ ID NO: 207608 - RNA, 1410 nt, Artificial Sequence
  derived and/or modified CDS sequence (opt5) from neuraminidase__InfluenzaA__ABJ16711
augaaccccaaucagaagaucauuaccaucggcagcgugucccugacaauugccacgaucugcuuccucaugcaaauugcuauccuggucaccacaguuacccuucacuuuaaacaguacgaguguaacucuccuccgaauaaccaggugaugcugugcgaacccacaaucauugagagaaauaucaccgaaauuguguaucucacaaacaccacgaucgagaaggaaauuuguccuaaacuggccgaguaccggaauuggagcaagccccagugcaacaucaccggguucgcgccuuuuuccaaagacaauucuauucgccuuagcgcuggaggcgauaucugggucacaagagagcccuauguguccugugacccugauaagugcuaccaauucgcccuggggcagggaaccacacucaacaauggccauucuaacgacaccguucacgaucggacgccguaucgcacacugcugaugaaugaacucggggugcccuuucaucugggaaccaagcaggucuguaucgccuggagcuccagcucuugccacgacggcaaagccuggcuucauguguguguuacaggcgaugacgagaacgcuaccgcuuccuucauuuacaaugggagacugguggauagcaucggaucuugguccaagaaaauucuccggacccaggaaagcgagugcgucuguaucaacggcacaugcacgguggugaugaccgacgggucugccuccggaaaggcggauacaaaaauucuguuuaucgaggaaggcaagaucguccacaccagcucccuuucugggagcgcccaacacguugaggaaugcuccuguuauccucgcuaccccggagugagaugcgugugucgggacaacuggaagggcagcaaucgcccuauugucgauaucaacauuaaagacuacucuaucguguccagcuauguuugcucuggccuggugggggacacacccagaaagaaugauagcuccucuagcucccauugucucgacccgaacaaugaggaaggaggccacggggucaaaggaugggcuuucgaugacggcaacgaugccuggauggggcggaccauuagcgagaagcugcgcucuggauacgagacguuuaaagugaucgaaggcugguccaagagcaauucuaaacugcagaucaacagacagguuauuguggaccggggcaaucgcuccggguauagcggaaucuucuccgucgagggcaagucuugcauuaacagauguuuuuacguggaacucauccgggggagaaagcaggagacagaaguccuguggaccagcaauuccauugugguuuucugcggaaccucuggcacauaugggaccggcagcuggccugauggagcugacaucaaccuuaugcccauuuga

SEQ ID NO: 207609 - RNA, 1413 nt, Artificial Sequence
  derived and/or modified CDS sequence (opt5) from neuraminidase__InfluenzaA__ABJ16733
augaaccccaaucagaagaucauuaccaucggcagcauuuccguggccaucgggauuaucaaccugauccuccaaauuggaaauaucauuucuaucugggcuagccacuccauucagacaggcucucagaacuacacggggaucugcaaucagagaauuaucaccuaugagaaccggacaugggucaaucaaaccuacguuaacaucaauaacacaaaugugguggccggaaaagacaagaccagcaugacacuggcgggcaacuccucucuuuguccuauucgcgggugggcuaucuauaccaaagauaauagcauuagaaucggauccaagggcgacauuuucgucauccgggaaccguuuaucagcugcucucaucuggagugucgcacguucuuucucacccagggcgcccugcuuaacgauaaacacuccaaugggacaauuaaggacagaagccccuuccgggcccugaugucuugcccucucggagaagcucccuccccuuacaacagccgcuuugagucuguggccugguccgcuagcgccugucaugauggccugggguggcugaccaucggaauuuccggccccgacaacggggcgguugccgugcucaaguauaauggaaucauuacagaaaccaucaaaucuuggaagaaacagauccugagaacgcaggagagcgagugcgucugugugaacggcuccugcuucacaauuaugaccgauggcccuagcaaucgggcugccucuuaccgcaucuuuaagauugaaaaagggagaguuacaaaguccaucgagcuugacgcuccgaacuaucacuacgaagaguguagcugcuaccccgauaccggaaccgugaugugugucugccgggacaauuggcauggcucuaaccgcccuugggugagcuucaaucaaaaccuggauuaucagauuggguacaucugcuccggaguguuuggcgacaaucccagaccuaaggauggggagggaucuuguaaccccgucacaguugacggcgccgacggcgugaaaggguucagcuaucgguacggaaauggcguguggauugggcgcacgaaguccaacagacuccggaaaggauuugaaaugaucugggauccgaauggcuggaccgacacagauagcgacuucucuaugaagcaggaugucguggcgaugaccgacugguccggguauagcggcucuuuuguucagcacccugagcugacaggacuugauugcaugagacccuguuucuggguggaacugguccgcggccucccucgggagaacaccacgaucuggacauccgggagcuccauuucuuucugcggagugaauagcgaaaccgccaacugguccuggcccgacggcgcugagcugcccuuuaccaucgauaaauga

SEQ ID NO: 207610 - RNA, 1410 nt, Artificial Sequence; identical to SEQ ID NO: 206802
  derived and/or modified CDS sequence (opt5) from neuraminidase__InfluenzaA__ABJ16744

SEQ ID NO: 207611 - RNA, 1410 nt, Artificial Sequence; identical to SEQ ID NO: 206802
  derived and/or modified CDS sequence (opt5) from neuraminidase__InfluenzaA__ABJ16755

SEQ ID NO: 207612 - RNA, 1410 nt, Artificial Sequence; identical to SEQ ID NO: 206802
  derived and/or modified CDS sequence (opt5) from neuraminidase__InfluenzaA__ABJ16766

SEQ ID NO: 207613 - RNA, 1410 nt, Artificial Sequence
  derived and/or modified CDS sequence (opt5) from neuraminidase__InfluenzaA__ABJ16777
augaaccccaaucagaagaucauuaccaucggcagcgugucccugacaauugccacgaucugcuuccucaugcaaauugcuauccuggucaccacaguuacccuucacuuuaaacaguacgaguguaacucuccuccgaauaaccaggugaugcugugcgaacccacaaucauugagagaaauaucaccgaaauuguguaucucacaaacaccacgaucgagaaggaaauuuguccuaaacuggccgaguaccggaauuggagcaagccccagugcaacaucaccggguucgcgccuuuuuccaaagacaauucuauucgccuuagcgcuggaggcgauaucugggucacaagagagcccuauguguccugugacccugauaagugcuaccaauucgcccuggggcagggaaccacacucaacaauggccauucuaacgacaccguucacgaucggacgccguaucgcacacugcugaugaaugaacucggggugcccuuucaucugggaaccaagcaggucuguaucgccuggagcuccagcucuugccacgacggcaaagccuggcuucauguguguguuacaggcgaugacgagaacgcuaccgcuuccuucauuuacaaugggagacugguggauagcaucggaucuugguccaagaaaauucuccggacccaggaaagcgagugcgucuguaucaacggcacaugcacgguggugaugaccgacgggucugccuccggaaaggcggauacaaaaauucuguuuaucgaggaaggcaagaucguccacaccagcucccuuucugggagcgcccaacacguugaggaaugcuccuguuauccucgcuaccccggagugagaugcgugugucgggacaacuggaagggcagcaaucgcccuauugucgauaucaacauuaaagacuacucuaucguguccagcuauguuugcucuggccuggugggggacacacccagaaagaaugauagcuccucuagcucccauugucucgacccgaacaaugaggaaggaggccacggggucaaaggaugggcuuucgaugacggcaacgauguguggauggggcggaccauuagcgagaagcugcgcucuggauacgagacguuuaaaguuaucgaaggcugguccaagccuaauagcaaacugcagaucaacagacaggugauugucgaccggggcaaucgcucuggguauuccggaaucuucagcguggagggcaaguccugcauuaacagauguuuuuacgucgaacucauccgggggagaaagcaggagacagaagugcuguggaccucuaauagcauuguuguguucugcggaaccuccggcacauaugggaccggcucuuggcccgauggagccgacaucaaccuuaugccuauuuga

SEQ ID NO: 207614 - RNA, 1410 nt, Artificial Sequence; identical to SEQ ID NO: 206802
  derived and/or modified CDS sequence (opt5) from neuraminidase__InfluenzaA__ABJ16788

SEQ ID NO: 207615 - RNA, 1413 nt, Artificial Sequence; identical to SEQ ID NO: 207040
  derived and/or modified CDS sequence (opt5) from neuraminidase__InfluenzaA__ABJ53441

SEQ ID NO: 207616 - RNA, 1413 nt, Artificial Sequence
  derived and/or modified CDS sequence (opt5) from neuraminidase__InfluenzaA__ABJ53452
augaaccccaaucagaagaucauuaccaucggcagcauuuccaucgccauugggaucaucucucugaugcuccaaauuggaaacaucauuagcaucugggcuucccacucuauucagacaggcagccagaaucauacggggaucugcaaccagagaauuaucaccuacgagaauagcacaugggugaaccacaccuaugucaauaucaacaauacaaacguuauugccggaaaagacaagaccucugugacacuggcgggcaauagcucccuuuguagcaucucugggugggcuauuuacaccaaagauaacuccauccggauuggaagcaagggcgacguguucgucauccgcgaaccuuuuaucucuugcucccaucuggaguguagaacguucuuucucacccaaggcgcccugcuuaaugauaaacacagcaacgggacagugaaggaccggucuccguaucgcgcccugauguccugcccccucggagaagcuccuagccccuacaauuccaaguucgagucuguugccuggagcgcuuccgccugucaugauggcaugggguggcugaccauuggaaucagcggcccugacaacggggcgguggccguccugaaauauaacggaauuaucacagaaaccauuaagucuuggaaaaagagaauccuccggacgcaggaguccgagugcguguguguuaauggcagcugcuuuacaaucaugaccgauggccccucuaacggggcugccagcuacaaaauuuucaagaucgaaaagggaaaagugacaaaguccauugagcugaaugcuccuaacuuucacuaugaagaguguucuugcuacccggacaccggcaccgucaugugugugugccgcgauaauuggcacgggagcaacagacccuggguguccuucaaucagaaccuugacuaccagaucggauauauuugcagcggcgucuuuggggauaauccucggcccaaagacggagagggcucuuguaacccuguuacaguggauggcgccgacggggugaagggauucuccuacaaauauggcaauggggucuggaucggacgcacgaaguccaacagacugcggaaaggcuuugaaaugauuugggaccccaauggguggaccgauacagacucuaacuucuccgugaagcaagauguuguggcgaucaccgacuggagcggcuacuccggaucuuuuguccagcauccggagcucacaggccuggauugcauccgcccuuguuucuggguggaacuuguuagagggcugccccgggagaauaccacgauuuggacaagcggauccucuaucagcuucugcggcgugaacuccgacaccgccaacuggagcuggccugauggggcugaacuccccuuuaccauugacaaguga

SEQ ID NO: 207617 - RNA, 1410 nt, Artificial Sequence; identical to SEQ ID NO: 206784
  derived and/or modified CDS sequence (opt5) from neuraminidase__InfluenzaA__ABJ53463

SEQ ID NO: 207618 - RNA, 1410 nt, Artificial Sequence; identical to SEQ ID NO: 206784
  derived and/or modified CDS sequence (opt5) from neuraminidase__InfluenzaA__ABJ53474

SEQ ID NO: 207619 - RNA, 1410 nt, Artificial Sequence
  derived and/or modified CDS sequence (opt5) from neuraminidase__InfluenzaA__ABJ53485
augaaccccaaucagaagaucauuaccaucggcagcgugucccugacaauuucuacgaucugcuucuuuaugcaaauugccauccucaucaccacagucacccugcacuucaaacaguacgaguuuaacagcccuccgaauaaccagguuaugcuuugugaacccacaauuaucgagagaaauauuaccgaaaucguguaucugacaaacaccacgauugagaaggaaaucugcccuaaacucgcugaguaccggaauugguccaagccccaguguaacauuaccggguucgccccuuuuucuaaagacaauagcauccgccuguccgcgggaggcgauaucugggugacaagagagcccuaugucucuugcgacccugauaaguguuaccaauucgcucuugggcagggaaccacacugaacaaugugcauagcaacgacaccguucacgaucggacgccguaucgcacacuccugaugaaugaacugggcgugcccuuucaucucgggaccaagcaggucugcauugccugguccucuagcuccugucacgacggaaaagccuggcugcaugugugcguuacaggcgaugacaagaacgcuaccgccagcuucaucuacaauggcagacuuguggauucuauugucuccuggagcaaagagauccugcggacccaggaaucugagugugugugcauuaacgggacauguacgguggucaugaccgacggauccgcuagcggcaaggccgauacaaaaauccucuuuaucgaggaagggaagauuguucacaccuccacacugucuggaagcgcgcaacacguggaggaaugcuccugcuauccucgcuaccccggcgugagaugugucugccgggacaacuggaaggggagcaaucgcccuaucguggauauuaacaucaaagacuacucuauuguuuccagcuauguguguucuggacuugucggcgacacccccagaaagaaugauagcuccucuagcucccauugccuggacccgaacaaugaggaaggcgggcacggagugaaaggcugggccuucgaugacgggaacgauguuuggaugggacggacgaucagcgagaagcuccgccugggcuacgagacauuuaaagugaucgaaggguggucuaauuccaacagcaagcugcagaccaauagacaggucauuguggaccggggaaaccgcucuggcuauuccggcaucuucagcgucgaggggaaauccuguauuaauagaugcuuuuacguggaacucauccggggaagaaaggaggaaaccgagguucuguggacaucuaacagcauuguggucuucuguggcaccuccgggacauauggaacgggcucuuggccugauggggcugacaucaaucuuaugcccauuuga

SEQ ID NO: 207620 - RNA, 1413 nt, Artificial Sequence; identical to SEQ ID NO: 207428
  derived and/or modified CDS sequence (opt5) from neuraminidase__InfluenzaA__ABJ53496

SEQ ID NO: 207621 - RNA, 1413 nt, Artificial Sequence; identical to SEQ ID NO: 207428
  derived and/or modified CDS sequence (opt5) from neuraminidase__InfluenzaA__ABJ53507

SEQ ID NO: 207622 - RNA, 1413 nt, Artificial Sequence
  derived and/or modified CDS sequence (opt5) from neuraminidase__InfluenzaA__ABJ53518
augaaccccaaucagaagaucauuaccaucggcagcauuuccguggccaucgggauuaucaaccugauccuccaaauuggaaauaucauuucuaucugggcuagccacuccauucagacaggcucucagaacuacacggggaucugcaaucagagaauuaucaccuaugagaaccggacaugggucaaucaaaccuacguuaacaucaauaacacaaaugugguggccggaaaagacaagaccagcaugacacuggcgggcaaccuuucccuguguccuauucgcgggugggcuaucuauaccaaagauaauucuauuagaaucggaagcaagggcgacgucuucgugauucgggaaccguuuaucuccugcagccaucucgagugucgcacguucuuucugacccagggcgcccuucugaacgauaaacacucuaaugggacaaucaaggacagaucccccuuccgggcccucaugagcugcccucugggagaagcucccucuccuuacaacucccgcuuugagagcguugccuggucugcuuccgccugucaugauggccugggguggcucaccauuggaaucagcggccccgacaacggggcgguggccguccugaaguauaauggaauuaucacagaaaccauuaaauccuggaagaaacagauccuuagaacgcaggagucugagugcguguguguuaacggcagcugcuucacaaucaugaccgauggcccuuccaaucgggcugccagcuaccgcauuuuuaagaucgaaaaagggagagugacaaagucuauugagcuggacgcuccgaacuaucacuacgaagaguguuccugcuaccccgauaccggaaccgucaugugugugugccgggacaauuggcauggcagcaaccgcccuugggugucuuucaaucaaaaccucgauuaucagaucggguacauuugcagcggagucuuuggcgacaaucccagaccuaaggauggggagggauccuguaaccccguuacaguggacggcgccgacggcgugaaaggguucucuuaucgguacggaaauggcgucuggaucgggcgcaccaagagcaacagacugcggaaaggauuugaaaugauuugggauccgaauggcuggacggacacagauuccgacuucagcaugaagcaggaugugguugcgaugaccgacuggucuggguauuccggcagcuuugugcagcacccugagcuuacaggacuggauugcaugagacccuguuucugggucgaacucgugcgcggccugccucgggagaacaccacgaucuggacaucuggguccagcaucuccuucugcggaguuaauucugaaaccgccaacuggagcuggcccgacggcgcugagcugcccuuuaccauugauaaauga

SEQ ID NO: 207623 - RNA, 1410 nt, Artificial Sequence; identical to SEQ ID NO: 206226
  derived and/or modified CDS sequence (opt5) from neuraminidase__InfluenzaA__ABK39965

SEQ ID NO: 207624 - RNA, 1410 nt, Artificial Sequence
  derived and/or modified CDS sequence (opt5) from neuraminidase__InfluenzaA__ABK39976
augaaccccaaucagaagaucauuaccaucggcagcgugucccugacaauuucuacgaccugcuucuuuaugcaaaucgccauucucaucacaaccgucacacugcacuucaaacaguacgaguuuaacagcccuccgaauaaccagguuaugcuuugugaacccaccaucauugagagaaauaucacagaaauuguguaucugaccaacacgaccaucgagaaggaaauuugcccuaaacucgcugaguaccggaauugguccaagccccaguguaacaucacaggguucgccccuuuuucuaaagacaauagcauucgccuguccgcgggaggcgauaucugggugaccagagagcccuaugucucuugcgacccugauaaguguuaccaauucgcucuugggcagggaacaacccugaacaaugugcauagcaacgacacgguucacgaucggacaccguaucgcacccuccugaugaaugaacugggcgugcccuuucaucucgggacaaagcaggucugcaucgccugguccucuagcuccugucacgacggaaaagccuggcugcaugugugcguuaccggcgaugacaagaacgcuaccgccagcuucauuuacaauggcagacuuguggauucuaucgucuccuggagcaaagagauucugcggacacaggaaucugagugugugugcaucaacgggacgugugcuguggucaugaccgacggauccgccagcggcaaggcggauacaaaaauucucuuuaucgaggaagggaagaucguucacaccuccacacugucuggaagcgcccaacacguggaggaaugcuccugcuauccucgcuaccccggcgugagaugugucugccgggacaacuggaaggggagcaaucgcccuauuguggauaucaacauuaaagacuacucuaucguuuccagcuauguguguucuggacuugucggcgacacccccagaaagaaugauagcuccucuagcucccauugccuggacccgaacaaugaggaaggcgggcacggagugaaaggcugggcuuucgaugacgggaacgauguuuggaugggacggacgauuagcgagaagcuccgcucuggcuacgagacauuuaaagugaucgaagggugguccaauccuaacagcaagcugcagaucaauagacaggucauuguggaccggggaaaccgcucuggcuauuccggcaucuucagcgucgaggggaaauccuguauuaauagaugcuuuuacguggaacugauccggggaagaaaggaggaaaccgagguucucuggaccucuaacagcauuguggucuucuguggcacauccgggaccuauggaacaggcucuuggcccgauggggccgacaucaaucugaugccuauuuga

SEQ ID NO: 207625 - RNA, 1410 nt, Artificial Sequence; identical to SEQ ID NO: 206784
  derived and/or modified CDS sequence (opt5) from neuraminidase__InfluenzaA__ABK39987

SEQ ID NO: 207626 - RNA, 1410 nt, Artificial Sequence; identical to SEQ ID NO: 206454
  derived and/or modified CDS sequence (opt5) from neuraminidase__InfluenzaA__ABK39998

SEQ ID NO: 207627 - RNA, 1410 nt, Artificial Sequence; identical to SEQ ID NO: 206399
  derived and/or modified CDS sequence (opt5) from neuraminidase__InfluenzaA__ABK40020

SEQ ID NO: 207628 - RNA, 1413 nt, Artificial Sequence
  derived and/or modified CDS sequence (opt5) from neuraminidase__InfluenzaA__ABK40031
augaaccccaaucagaagaucauuaccaucggcagcauuuccguggccaucgggauuaucaaccugauccuccaaauuggaaauaucauuucuaucugggcuagccacuccauucagacaggcucucagaacuacacggggaucugcaaucagagaauuaucaccuaugagaaccggacaugggucaaucaaaccuacguuaacaucaauaacacaaaugugguggccggaaaagacaagaccagcaugacacuggcgggcaacuccucucuuuguccuauucgcgggugggcuaucuauaccaaagauaauagcauuagaaucggauccaagggcgacgucuucgugauucgggaaccguuuaucagcugcucucaucuggagugucgcacguucuuucucacccagggcgcccugcuuaacgauaaacacuccaaugggacaaucaaggacagaagccccuuccgggcccugaugucuugcccucucggagaagcucccuccccuuacaacagccgcuuugagucuguugccugguccgcuagcgccugucaugauggccugggguggcugaccauuggaaucuccggccccgacaacggggcgguggccguccucaaguauaauggaauuaucacagaaaccauuaaaucuuggaagaaacagauccugagaacgcaggagagcgagugcguguguguuaacggcuccugcuucacaaucaugaccgauggcccuagcaaucgggcugccucuuaccgcauuuuuaagaucgaaaaagggagagugacaaaguccauugagcuugacgcuccgaacuaucacuacgaagaguguagcugcuaccccgauaccggaaccgucaugugugugugccgggacaauuggcauggcucuaaccgcccuugggugagcuucaaucaaaaccuggauuaucagaucggguacauuugcuccggagucuuuggcgacaaucccagaccuaaggauggggagggaucuuguaaccccguuacaguggacggcgccgacggcgugaaaggguucagcuaucgguacggaaauggcgucuggaucgggcgcacgaaguccaacagacuccggaaaggauuugaaaugauuugggauccgaauggcuggaccgacacagauagcgacuucucuaugaagcaggaugugguugcgaugaccgacugguccggguauagcggcucuuuugugcagcacccugagcugacaggacuugauugcaugagacccuguuucugggucgaacuggugcgcggccucccucgggagaacaccacgaucuggacauccgggagcuccaucucuuucugcggaguuaauagcgaaaccgccaacugguccuggcccgacggcgcugagcugcccuuuaccauugauaaauga

SEQ ID NO: 207629 - RNA, 1413 nt, Artificial Sequence; identical to SEQ ID NO: 207628
  derived and/or modified CDS sequence (opt5) from neuraminidase__InfluenzaA__ABK40042

SEQ ID NO: 207630 - RNA, 1413 nt, Artificial Sequence; identical to SEQ ID NO: 207628
  derived and/or modified CDS sequence (opt5) from neuraminidase__InfluenzaA__ABK40053

SEQ ID NO: 207631 - RNA, 1410 nt, Artificial Sequence; identical to SEQ ID NO: 206802
  derived and/or modified CDS sequence (opt5) from neuraminidase__InfluenzaA__ABK40064

SEQ ID NO: 207632 - RNA, 1410 nt, Artificial Sequence; identical to SEQ ID NO: 206802
  derived and/or modified CDS sequence (opt5) from neuraminidase__InfluenzaA__ABK40078

SEQ ID NO: 207633 - RNA, 1413 nt, Artificial Sequence; identical to SEQ ID NO: 207131
  derived and/or modified CDS sequence (opt5) from neuraminidase__InfluenzaA__ABK40513

SEQ ID NO: 207634 - RNA, 1413 nt, Artificial Sequence; identical to SEQ ID NO: 207131
  derived and/or modified CDS sequence (opt5) from neuraminidase__InfluenzaA__ABK40538

SEQ ID NO: 207635 - RNA, 1413 nt, Artificial Sequence
  derived and/or modified CDS sequence (opt5) from neuraminidase__InfluenzaA__ABK40549
augaaccccaaucagaagaucauuaccaucggcagcauuugcaugacaaucgggauuaucucccugauccuccaaauuggaaacaucauuucuaucugggugagccacuccauucagacgggcucucagaaucauaccgggaucuguaaccagagaauuaucacauacgagaauagcaccugggucaaccaaacauauguuaauaucaacaauaccaacgugguggccggaaaagacacaaccuccgucacgcuggcuggcaauucuagccuuugcccuauucgggggugggccaucuacuccaaggauaacagcauucgcaucggaucuaaaggcgacguguucguuauuagagaaccguuuaucuccuguagccaccuggagugccggaccuucuuucucacacagggcgcgcugcuuaaugauaagcauucuaacgggaccgugaaagaccgcucccccuauagagcucugaugagcuguccuaucggagaagcccccucuccuuacaauucccgguucgagagcgucgccugguccgcuucugccugccacgauggcaugggguggcucacaauuggaaucagcggccccgacgauggggcuguggccguucugaaguauaacggaauuaucaccgaaacgauuaaguccuggcgcaaaagaauccugcggacacaggagagcgagugugugugcgucaacggcucuuguuuuaccaucaugacagacggcccuuccaaugggccggcgagcuaccgcauuuucaagaucgaaaaaggaaagauuaccaaaucuaucgagcucgaugcccccaacagccauuaugaagagugcuccuguuacccugacaccggcacagugaugugcgugugcagagauaauuggcacgggucuaaccggcccugggucagcuuuaaucagaaccuggacuacaagauuggauauaucuguuccggcguuuucggggauaauccucgccccaaggacggaaaaggcagcugcgacccggugacgguggauggcgcugacggggucaagggauuuucuuacagauauggcaacgggguguggauuggacggaccaaauccaauagcucucgcaagggcuucgagaugaucugggauccuaacggguggacagacaccgauuccaauuuucuuguuaaacaagacguggucgccaugacagauuggagcggcuacuccggaucuuucgugcagcaccccgaacugaccggccucgacuguaugagaccuugcuuuuggguugagcugauccgggggagaccccgcgaaaagacgacaauuuggaccagcggauccucuaucagcuucuguggcgugaacuccgauaccgcuaauuggagcuggcccgacggggccgagcuuccuuucacaauugauaaauga

SEQ ID NO: 207636 - RNA, 1413 nt, Artificial Sequence; identical to SEQ ID NO: 207131
  derived and/or modified CDS sequence (opt5) from neuraminidase__InfluenzaA__ABK40560

SEQ ID NO: 207637 - RNA, 1413 nt, Artificial Sequence; identical to SEQ ID NO: 207131
  derived and/or modified CDS sequence (opt5) from neuraminidase__InfluenzaA__ABK40571

SEQ ID NO: 207638 - RNA, 1413 nt, Artificial Sequence; identical to SEQ ID NO: 207131
  derived and/or modified CDS sequence (opt5) from neuraminidase__InfluenzaA__ABK40582

SEQ ID NO: 207639 - RNA, 1413 nt, Artificial Sequence
  derived and/or modified CDS sequence (opt5) from neuraminidase__InfluenzaA__ABK40593
augaaccccaaucagaagaucauuaccaucggcagcauuugcaugacaaucgggauuaucucccugauccuccaaauuggaaacaucauuucuaucugggugagccacuccauucagacgggcucucagaaucauaccgggaucuguaaccagagaauuaucacauacgagaauagcaccugggucaaccaaacauauguuaauaucaacaauaccaacgugguggccggaaaagacacaaccuccgucacgcuggcuggcaauucuagccuuugcccuauucgggggugggccaucuacuccaaggauaacagcauucgcaucggaucuaaaggcgacguguucguuauuagagaaccguuuaucuccuguagccaccuggagugccggaccuucuuucucacacagggcgcgcugcuuaaugauaagcauucuaacgggaccgugaaagaccgcucccccuauagagcucugaugagcuguccuaucggagaagcccccucuccuuacaauucccgguucgagagcgucgccugguccgcuucugccugccacgauggcaugggguggcucacaauuggaaucagcggccccgacgauggggcuguggccguucugaaguauaacggaauuaucaccgaaacgauuaaguccuggcgcaaaagaauccugcggacacaggagagcgagugugugugcgucaacggcucuuguuuuaccaucaugacagacggcccuuccaaugggccggcgagccaucgcauuuucaagaucgaaaaaggaaagauuaccaaaucuaucgagcucgaugcccccaacagccacuacgaagagugcuccuguuauccugacaccggcacagugaugugcgugugcagagauaauuggcacgggucuaaccggcccugggucagcuuuaaucagaaccuggacuacaagauuggauacaucuguuccggcguuuucggggauaauccucgccccaaggacggaaaaggcagcugcgacccggugacgguggauggcgcugacggggucaagggauuuucuuauagauacggcaacgggguguggauuggacggaccaaauccaauagcucucgcaagggcuucgagaugaucugggauccuaacggguggacagacaccgauuccaauuuucuuguuaaacaagacguggucgccaugacagauuggagcggcuauuccggaucuuucgugcagcaucccgaacugaccggccucgacuguaugagaccuugcuuuuggguugagcugauccgggggagaccccgcgaaaagacgacaauuuggaccagcggauccucuaucagcuucuguggcgugaacuccgauaccgcuaauuggagcuggcccgacggggccgagcuuccuuucacaauugauaaauga

SEQ ID NO: 207640 - RNA, 1413 nt, Artificial Sequence; identical to SEQ ID NO: 207131
  derived and/or modified CDS sequence (opt5) from neuraminidase__InfluenzaA__ABK40604

SEQ ID NO: 207641 - RNA, 1410 nt, Artificial Sequence; identical to SEQ ID NO: 206802
  derived and/or modified CDS sequence (opt5) from neuraminidase__InfluenzaA__ABK40615

SEQ ID NO: 207642 - RNA, 1410 nt, Artificial Sequence; identical to SEQ ID NO: 206133
  derived and/or modified CDS sequence (opt5) from neuraminidase__InfluenzaA__ABK40626

SEQ ID NO: 207643 - RNA, 1410 nt, Artificial Sequence
  derived and/or modified CDS sequence (opt5) from neuraminidase__InfluenzaA__ABK40648
augaaccccaaucagaagaucauuaccaucggcagcgugucccugacaauugccacgaucugcuuccucaugcaaauugcuauccuggucaccacaguuacccuucacuuuaaacaguacgaguguaacucuccuccgaauaaccaggugaugcugugcgaacccacaaucauugagagaaauaucaccgaaauuguguaucucacaaacaccacgaucgagaaggaaauuuguccuaaacuggccgaguaccggaauuggagcaagccccagugcaaaaucaccggguucgcgccuuuuuccaaggacaacucuauucgccuuagcgcuggaggcgauaucugggucacaagagagcccuauguguccugugacccugggaagugcuaccaauucgcccugggacagggcaccacacucaauaaccggcauucuaaugauaccguucacgaccgcacgccguauagaacacugcugaugaacgaacucgggauccccuuucaucugggaaccaaacagguguguauugccuggagcuccagcucuugccacgauggcaaggcuuggcuucaugucugugugacaggccacgacgagaaugccaccgcuuccuucaucuacgaugggcggcugguugacagcauuggaucuugguccaaaaacauccuccgcacccaggaaagcgagugcguguguauuaauggcacaugcacggucgugaugaccgaugggucugccuccgacagagcggauacaaagauccuguuuaucgaggaaggaaaaauugugcacaucagcccucuuuccggcucugcccaacaugucgaggaaugcagcuguuauccccgguacccugggguucgcugcguguguagagacaacuggaagggauccaaccggcccauuguggauaucaaugucaaggacuacagcauugugucuuccuauguuugcagcggccuggugggcgacaccccgcgcaaaaacgauucuagcuccucuagcuacuguuggaauccuaacaaugagaaagggggacacggcgucaaggggugggcuuucgacgauggaaacgacguguggaugggcagaacaaucuccgaagagagccggucuggguaugagaccuuuaagguuaucggaggcugguccaaacccaauagcaagcuccagauuaaccgccaggugaucgucgauagaggcaaucggucuggguacuccggaauuuucagcguggaaggcaaauccugcaucaacagauguuuuuaugucgagcugauucgcgggcggaagcaggaaacggaggugugguggacaucuaauagcaucguuguguucugcggaaccuccggcaccuacgggacaggcucuuggccugacggagccgauauuaaccugaugcccaucuga

SEQ ID NO: 207644 - RNA, 1410 nt, Artificial Sequence; identical to SEQ ID NO: 207185
  derived and/or modified CDS sequence (opt5) from neuraminidase__InfluenzaA__ABK40659

SEQ ID NO: 207645 - RNA, 1410 nt, Artificial Sequence; identical to SEQ ID NO: 207173
  derived and/or modified CDS sequence (opt5) from neuraminidase__InfluenzaA__ABK40681

SEQ ID NO: 207646 - RNA, 1413 nt, Artificial Sequence
  derived and/or modified CDS sequence (opt5) from neuraminidase__InfluenzaA__ABK40692
augaaccccaaucagaagaucauuaccaucggcagcauuuccaucgccauugggaucaucucucugaugcuccaaauuggaaacaucauuagcaucugggcuucccacucuauucagacaggcagccagaaucauacggggaucugcaaccagagaauuaucaccuacgagaauagcacaugggugaaccacaccuaugucaauaucaacaauacaaacguuguggccggaaaagacaagaccucugugacacuggcgggcaauagcucccuuuguagcauuucugggugggcuaucuacaccaaagauaacuccauucggaucggaagcaagggcgacgucuucgugauucgcgaaccuuuuaucucuugcucccaucuggaguguagaacguucuuucucacccaaggcgcccugcuuaaugauaaacacagcaacgggacaguuaaggaccggucuccguaucgcgcccugauguccugcccccucggagaagcuccuagccccuacaauuccaaguucgagucuguggccuggagcgcuuccgccugucaugauggcaugggguggcugaccaucggaauuagcggcccugacaacggggcggucgccgugcugaaauauaacggaaucauuacagaaaccaucaagucuugggagaaacggauucucagaacgcaggaguccgaaugcguuugugugaauggcagcugcuuuacaaucaugaccgauggccccucuaacggggcugccagcuacaagaucuucaaaauugagaagggaaaggucacaaaauccguggaacugaaugcuccuaacuuucacuaugaggaguguucuugcuacccggacaccggcaccgugaugugugucugccgcgauaauuggcacgggagcaacagacccuggguuuccuucaaucagaaccuugacuaccagaucggauauauuugcagcggcguguuuggggauaauccucggcccaaggacggaaaaggcucuuguaacccugugacagucgauggcgccgacggggugaagggauucuccuacaaauauggcaaugggguuuggaucggacgcacgaaguccaacagacugcggaaaggcuuugaaaugauuugggaccccaauggguggaccgauacagacucugauuucuccgugaagcaagacgucguggcgaucaccgauuggagcggcuacuccggaucuuuuguucagcauccggagcucacaggccuggacugcauucgcccuuguuucuggguggaacuugucagagggcugccccgggagaacaccacgaucuggacaagcggauccucuaucagcuucugcggcguggauuccgacaccgccaauuggagcuggccugauggggcugaacuccccuuuaccauugacaaguga

SEQ ID NO: 207647 - RNA, 1410 nt, Artificial Sequence; identical to SEQ ID NO: 206802
  derived and/or modified CDS sequence (opt5) from neuraminidase__InfluenzaA__ABK40703

SEQ ID NO: 207648 - RNA, 1410 nt, Artificial Sequence; identical to SEQ ID NO: 206802
  derived and/or modified CDS sequence (opt5) from neuraminidase__InfluenzaA__ABK40714

SEQ ID NO: 207649 - RNA, 1410 nt, Artificial Sequence; identical to SEQ ID NO: 206802
  derived and/or modified CDS sequence (opt5) from neuraminidase__InfluenzaA__ABK40725

SEQ ID NO: 207650 - RNA, 1410 nt, Artificial Sequence; identical to SEQ ID NO: 206802
  derived and/or modified CDS sequence (opt5) from neuraminidase__InfluenzaA__ABK40736

SEQ ID NO: 207651 - RNA, 1410 nt, Artificial Sequence; identical to SEQ ID NO: 207517
  derived and/or modified CDS sequence (opt5) from neuraminidase__InfluenzaA__ABK40747

SEQ ID NO: 207652 - RNA, 1413 nt, Artificial Sequence; identical to SEQ ID NO: 207023
  derived and/or modified CDS sequence (opt5) from neuraminidase__InfluenzaA__ABK79951

SEQ ID NO: 207653 - RNA, 1413 nt, Artificial Sequence; identical to SEQ ID NO: 207628
  derived and/or modified CDS sequence (opt5) from neuraminidase__InfluenzaA__ABK79973

SEQ ID NO: 207654 - RNA, 1410 nt, Artificial Sequence; identical to SEQ ID NO: 206802
  derived and/or modified CDS sequence (opt5) from neuraminidase__InfluenzaA__ABK79984

SEQ ID NO: 207655 - RNA, 1410 nt, Artificial Sequence; identical to SEQ ID NO: 206802
  derived and/or modified CDS sequence (opt5) from neuraminidase__InfluenzaA__ABK79995

SEQ ID NO: 207656 - RNA, 1413 nt, Artificial Sequence; identical to SEQ ID NO: 207131
  derived and/or modified CDS sequence (opt5) from neuraminidase__InfluenzaA__ABK80028

SEQ ID NO: 207657 - RNA, 1413 nt, Artificial Sequence; identical to SEQ ID NO: 207131
  derived and/or modified CDS sequence (opt5) from neuraminidase__InfluenzaA__ABK80039

SEQ ID NO: 207658 - RNA, 1413 nt, Artificial Sequence; identical to SEQ ID NO: 207131
  derived and/or modified CDS sequence (opt5) from neuraminidase__InfluenzaA__ABK80050

SEQ ID NO: 207659 - RNA, 1410 nt, Artificial Sequence
  derived and/or modified CDS sequence (opt5) from neuraminidase__InfluenzaA__ABK80061
augaaccccaaucagaagaucauuaccaucggcagcgugucccugacaauugccacgaucugcuuccucaugcaaauugcuauccuggucaccacaguuacccuucacuuuaaacaguacgaguguaacucuccuccgaauaaccaggugaugcugugcgaacccacaaucauugagagaaauaucaccgaaauuguguaucucacaaacaccacgaucgagaaggaaauuuguccuaaacuggccgaguaccggaauuggagcaagccccagugcaacaucaccggguucgcgccuuuuuccaaagacaauucuauucgccuuagcgcuggaggcgauaucugggucacaagagagcccuauguguccugugacccugauaagugcuaccaauucgcccuggggcagggaaccacacucaacaauggccauucuaacgacaccguucacgaucggacgccguaucgcacacugcugaugaaugaacucggggugcccuuucaucugggaaccaagcaggucuguaucgccuggagcuccagcucuugccacgacggcaaagccuggcuucauguguguguuacaggcgaugacgagaacgcuaccgcuuccuucauuuacaaugggagacugguggauagcaucggaucuugguccaagaaaauucuccggacccaggaaagcgagugcgucuguaucaacggcacaugcacgguggugaugaccgacgggucugccuccggaaaggcggauacaaaaauucuguuuaucgaggaaggcaagaucguccacaccagcucccuuucugggagcgcccaacacguugaggaaugcuccuguuauccucgcuaccccggagugagaugcgugugucgggacaacuggaagggcagcaaucgcccuauugucgauaucaacgugaaagacuacucuauuguuuccagcuaugugugcucuggccuggucggggacacacccagaaagaaugauagcuccucuagcucccauugucucgacccgaacaaugaggaaggaggccacggggugaaaggaugggcuuucgaugacggcaacgauguuuggauggggcggaccaucagcgagaagucucgcuccggauacgagacguuuaaagugauugaaggcuggagcaagccuaauucuaaacugcagaucaacagacaggucaucguggaccggggcaaucgcuccggguauagcggaauuuucuccgucgagggcaagucuugcaucaacagauguuuuuacguggaacugauucgggggagaaagcaggagacagaaguucucuggaccagcaauuccaucguggucuucugcggaaccucuggcacauaugggaccggcagcuggcccgauggagccgacauuaaccugaugccuaucuga

SEQ ID NO: 207660 - RNA, 1410 nt, Artificial Sequence; identical to SEQ ID NO: 206133
  derived and/or modified CDS sequence (opt5) from neuraminidase__InfluenzaA__ABK80072

SEQ ID NO: 207661 - RNA, 1410 nt, Artificial Sequence
  derived and/or modified CDS sequence (opt5) from neuraminidase__InfluenzaA__ABK80083
augaaccccaaucagaagaucauuaccaucggcagcgugucccugacaauugccacgaucugcuuccucaugcaaauugcuauccuggucaccacaguuacccuucacuuuaaacaguacgaguguucuagcccuccgaacaaucaggugaugcugugcgaacccacaaucauugagagaaacaucaccgaaauuguguaucucacaaauaccacgaucgagaaggaaauuuguccuaaacuggccgaguaccggaacugguccaagccccagugcaauaucaccggguucgcgccuuuuucuaaagacaacagcauucgccuuuccgcuggaggcgauaucugggucacaagagagcccuaugugucuugugacccugauaagugcuaccaauucgcccuggggcagggaaccacacucaauaacggccauagcaaugacaccguucacgaucggacgccguaucgcacacugcugaugaacgaacucggggugcccuuucaucugggaaccaagcaggucuguaucgccugguccucuagcuccugccacgacggcaaagccuggcuucauguguguguuacaggcgaugacgagaaugcuaccgcuagcuucauuuacaacgggagacugguggauucuaucggauccuggagcaagaaaauucuccggacccaggaaucugagugcgucuguaucaauggcacaugcacgguggugaugaccgacggguccgccagcggaaaggcggauacaaaaauucuguuuaucgaggaaggcaagaucguccacaccucccuucugucugggagcgcccaacacguugaggaaugcuccuguuauccucgcuaccccggagugagaugcgugugucgggacaacuggaagggcagcaaccgcccuauugucgauaucaaugugaaagacuacucuauuguuuccagcuaugugugcucuggccucgucggggacacacccagaaagaacgauagcuccucuagcucccauugucuggacccgaauaacgaggaaggaggccacggggugaaaggaugggcuuucgaugacggcaaugauguuuggauggggcggaccaucagcgagaagcugcgcucuggauacgagacguuuaaagugauugaaggcugguccaagccuaacagcaaacuccagaucaauagacaggucaucguggaccggggcaaccgcucuggguauuccggaauuuucagcgucgagggcaaguccugcaucaauagauguuuuuacguggaacugauucgggggagaaagcaggagacagaaguucuuuggaccucuaacagcaucguggucuucugcggaaccuccggcacauaugggaccggcucuuggcccgauggagccgacauuaaucugaugccuaucuga

SEQ ID NO: 207662 - RNA, 1410 nt, Artificial Sequence
  derived and/or modified CDS sequence (opt5) from neuraminidase__InfluenzaA__ABK80094
augaaccccaaucagaagaucauuaccaucggcagcgugucccugauuaucgccacaauuugcuuccucaugcaaaucgcuauccuggucacgaccguuacacuucacuuuaaacaguacgaguguaacucuccuccgaauaaccaggugaugcugugcgaacccaccauuaucgagagaaauauuacagaaaucguguaucucaccaacacaaccauugagaaggaaaucuguccuaaacuggccgaguaccggaauuggagcaagccccagugcaacauuacgggguucgcgccuuuuuccaaagacaauucuauccgccuuagcgcuggaggcgauaucugggucaccagagagcccuauguguccugugacccugauaagugcuaccaauucgcccuggggcagggaacaacccucaacaauggccauucuaacgacacaguucacgaucggaccccguaucgcacgcugcugaugaaugaacucggggugcccuuucaucugggaacaaagcaggucuguauugccuggagcuccagcucuugccacgacggcaaagccuggcuucauguguguguuaccggcgaugacgagaacgcuacagcuuccuucaucuacaaugggagacugguggauagcauuggaucuugguccaagaaaauccuccggacccaggaaagcgagugcgucuguauuaacgggaccugcacaguggugaugacggacggcucugccuccggaaaggcggauaccaaaauccuguuuaucgaggaaggcaagauuguccacacaagcucccuuucugggagcgcccaacacguugaggaaugcuccuguuauccucgcuaccccggagugagaugcgugugucgggacaacuggaagggcagcaaucgcccuaucgucgauauuaacgugaaagacuacucuaucguuuccagcuaugugugcucuggccuggucggggacacccccagaaagaaugauagcuccucuagcucccauugucucgacccgaacaaugaggaaggaggccacggggugaaaggaugggcuuucgaugacggcaacgauguuuggauggggcggacaauuagcgagaagcugcgcucuggauacgagaccuuuaaagugaucgaaggcugguccaagccuaauagcaaacugcagaucaacagacaggucauuguggaccggggcaaucgcucuggguauuccggaaucuucagcgucgaguccaagucuugcauuaacagauguuuuuacguggaacucauccggggcagaaagcaggagacggaaguucuguggacaagcaauuccauuguggucuucugcgggaccucuggaaccuauggcacagggagcuggcccgauggcgccgacaucaaccuuaugccuauuuga

SEQ ID NO: 207663 - RNA, 1410 nt, Artificial Sequence; identical to SEQ ID NO: 206802
  derived and/or modified CDS sequence (opt5) from neuraminidase__InfluenzaA__ABK80105

SEQ ID NO: 207664 - RNA, 1410 nt, Artificial Sequence
  derived and/or modified CDS sequence (opt5) from neuraminidase__InfluenzaA__ABK80138
augaaccccaaucagaagaucauuaccaucggcagcgugucccugacaauugccacgaucugcuuccucaugcaaaccgcuauucuggucacaaccguuacacuucacuuuaaacaguacgaguguaacucuccuccgaauaaccaggugaugcugugcgaacccaccaucaucgagagaaauauuacagaaaucguguaucucaccaacacgaccauugagaaggaaaucuguccuaaacuggccgaguaccggaauuggagcaagccccagugcaacauuacaggguucgcgccuuuuuccaaagacaauucuauccgccuuagcgcuggaggcgauauuugggucaccagagagcccuauguguccugugacccugauaagugcuaccaauucgcccuggggcagggaacaacccucaacaauggccauucuaacgacacgguucacgaucggacaccguaucgcacccugcugaugaaugaacucggggugcccuuucaucugggaacaagacaggucuguaucgccuggagcuccagcucuugccacgacggcaaggcuuggcuucauguguguguuaccggcgaugacgagaacgccaccgcuuccuucaucuacaaugggcggcugguggauagcauuggaucuugguccaaaaagauccuccgcacacaggaaagcgagugcgucuguauuaacggcacgugcaccguggugaugacagacgggucugccuccggaaaagcggauaccaagauccuguuuauugaggaaggcaaaaucguccacaucagcacacuuuccgggucugcccaacacguugaggaaugcagcuguuauccuagauaccccggagugcggugcgugugucgcgacaacuggaagggcuccaauagaccuauugucgauaucaacgugaaggacuacagcauuguuucuuccuaugugugcagcggccuggucggggacacgccccggaaaaaugauucuuucagcuccucucauugucucgacccgaacaaugaggaaggaggccacggggugaagggaugggcuuuugaugacggcaacgauguuuggauggggcgcaccaucagcgagaaacugagauccggauacgagacauucaaggugauugaaggcuggagcaaaccuaauucuaagcugcagaucaaccggcaggucaucguggagcgcggcaauagauccggguauagcggaaucuuuucugucgaaggcaaauccugcauuaaccgguguuucuacguggagcucauuagagggcgcaaggaagagaccgagguuugguggaccagcaauuccaucguggucuuuugcggaacaucuggcaccuaugggacaggcagcuggcccgacggagccgauauuaaccugaugccuaucuga

SEQ ID NO: 207665 - RNA, 1410 nt, Artificial Sequence
  derived and/or modified CDS sequence (opt5) from neuraminidase__InfluenzaA__ABK80149
augaaccccaaucagaagaucauuaccaucggcagcgugucccugacaauugccacgaucugcuuccucaugcaaauugcuauccuggucaccacaguuacccuucacuuuaaacaguacgaguguaacucuccuccgaauaaccaggccaugcuguaugaacccacaaucauugagagaaauaucaccgaaauuguguaccucacaaacaccacgaucgagaaggaaauuugcccuaaacuggcggaguaucggaauuggagcaagccccaguguaacaucaccggguucgcuccuuuuuccaaagacaauucuauucgccuuagcgccggaggcgauaucugggugacaagagagcccuacgucuccugcgacccugauaaguguuaucaauucgcccuggggcagggaaccacacucaacaauggccauucuaacgacaccgugcacgaucggacgccguaccgcacacugcugaugaaugaacucgggguucccuuucaucugggaaccagacaggugugcaucgcuuggagcuccagcucuugucacgacggcaaggccuggcuucaugucugcgugacaggcgaugacgagaacgcuaccgccuccuucauuuauaaugggcggcugguugauagcaucggaucuugguccaaaaagauucuccgcacccaggaaagcgagugugugugcaucaacggcacauguacggucgugaugaccgacgggucugcguccggaaaagccgauacaaagauucuguuuaucgaggaaggcaaaaucgugcacauuagcacccuuuccgggucugcucaacacgucgaggaaugcagcugcuacccuagauaccccggaguucggugugugugccgcgacaacuggaagggcuccaauagaccuaucguggauauuaacgucaaggacuauagcaucgugucuuccuacguuuguagcggccuggugggggacacaccccggaaaaaugauucuuucagcuccucucauugccucgacccgaacaaugaggaaggaggccacggggucaagggaugggccuuugaugacggcaacgauguguggauggggcgcaccauuagcgagaaacugagauccggauaugagacguucaagguuaucgaaggcuggagcaaaccuaauucuaagcugcagaucaaccgccaggugauugucgagcggggcaauagauccggguacagcggaaucuuuucuguggaaggcaaauccuguauuaaccggugcuucuaugucgagcucaucagagggcgcaaggaagagacagaggugugguggaccagcaauuccauuguuguguuuuguggaaccucuggcacauacgggaccggcagcuggcccgacggagcugauaucaaccugaugccuauuuga

SEQ ID NO: 207666 - RNA, 1410 nt, Artificial Sequence; identical to SEQ ID NO: 207665
  derived and/or modified CDS sequence (opt5) from neuraminidase__InfluenzaA__ABK80160

SEQ ID NO: 207667 - RNA, 1410 nt, Artificial Sequence
  derived and/or modified CDS sequence (opt5) from neuraminidase__InfluenzaA__ABK80171
augaaccccaaucagaagaucauuaccaucggcagcgugucccugacaauugccacgaucugcuuccucaugcaaauugcuauccuggucaccacaguuacccuucacuuuaaacaguacgaguguaacccuccgcccaauaaccaggugaugcugugcgaaccuacaaucauugagagaaauaucaccgaaauuguguaucucacaaacaccacgaucgagaaggaaauuugucccaaacuggccgaguaccggaauuggucuaagccucagugcaacaucaccggguucgcgcccuuuagcaaagacaauuccauucgccuuucugcuggaggcgauaucugggucacaagagagccuuaugugagcugugacccggauaagugcuaccaauucgcccuggggcagggaaccacacucaacaauggccauuccaacgacaccguucacgaucggacgcccuaucgcacacugcugaugaaugaacucggggugccuuuucaucugggaaccagacaggucuguaucgccuggucuagcuccagcugccacgacggcaaggcuuggcuucauguguguguuacaggcgaugacgagaacgccaccgcuucuuucauuuacaaugggcggcugguggauuccaucggaagcuggucuaaaaagauucuccgcacccaggaauccgagugcgucuguaucaacggcacaugcacgguggugaugaccgacgggagcgccucuggaaaagcggauacaaagauucuguuuaucgaggaaggcaaaaucguccacauuuccacccuuagcggguccgcccaacacguugaggaaugcucuuguuaucccagauacccuggagugcggugcgugugucgcgacaacuggaagggcagcaauagacccaucgucgauauuaacgugaaggacuacuccaucuucagcucuuauguuugcuccggccuggugggggacacaccgcggaaaaaugauagcuuuucuagcucccauugucucgacccuaacaaugaggaaggaggccacggggucaagggaugggcuuucgaugacggcaacgauguguggauggggcgcaccauuucugagaaacugagaagcggauacgagacguuuaagguuaucgaaggcugguccaaacccaauagcaagcugcagacaaaccgccaggugaucgucgagcggggcaauagaucuggguauuccggaauuuucagcguggaaggcaaaucuugcaucaaccgguguuuuuacgucgagcucauuagagggcgcaaggaagagaccgaggugugguggaccuccaauagcaucguuguguucugcggaacauccggcaccuaugggacaggcucuuggccugacggagccgauauuaaccugaugcccaucuga

SEQ ID NO: 207668 - RNA, 1410 nt, Artificial Sequence
  derived and/or modified CDS sequence (opt5) from neuraminidase__InfluenzaA__ABK80182
augaaccccaaucagaagaucauuaccaucggcagcgugucccugacaauugccacgaucugcuuccucaugcaaauugcuauccuggucaccacaguuacccuucacuuuaaacaguacgaguguaacucuccuccgaauaaccaggugaugcugugcgaacccacaaucauugagagaaauaucaccgaaauuguguaucucacaaacaccacgaucgagaaggaaauuuguccuaaacuggccgaguaccggaauuggagcaagccccagugcaacaucaccggguucgcgccuuuuuccaaagacaauucuauucgccuuagcgcuggaggcgauaucugggucacaagagagcccuauguguccugugacccugauaagugcuaccaauucgcccuggggcagggaaccacacucaacaauggccauucuaacgacaccguucacgaucggacgccguaucgcacacugcugaugaaugaacucggggugcccuuucaucugggaaccagacaggucuguaucgccuggagcuccagcucuugccacgacggcaaggcuuggcuucauguguguguuacaggcgaugacaaaaacgccaccgcuuccuucauuuacaaugggaagcugguggauagcaucggaucuugguccaaaaagauucuccggacccaggagagcgaaugcgucuguaucaacggcacaugcgccguggugaugacggacgggucugcguccggaaaagccgauaccaagauucuguuuaucgaggagggcaagaucguccacauuagcacacuuuccgggucugcucaacacguugaagagugcagcuguuauccucgcuaccccggagugagaugcgugugucgggacaacuggaaaggcuccaaucgcccuaucgucgauauuaacgugaaggacuacagcaucguuucuuccuaugugugcagcggccuggucggggacacccccagaaagaaugauucuuucagcuccucucauugucucgacccgaacaaugaagagggaggccacggggugaaaggaugggccuuugaugacggcaacgauguuuggauggggcggacaauuagcgaaaaacugcgcuccggauacgagaccuucaaggugaucgagggcuggagcaaaccuaauucuaagcugcagacgaacagacaggucaucguggaacggggcaaucgcuccggguauagcggaaucuuuucugucgagggcaaguccugcauuaacagauguuucuacguggaacucauucgggggagaaaagaggaaacagagguuugguggaccagcaauuccaucguggucuuuugcggaaccucuggcacauaugggaccggcagcuggcccgacggagcugauauuaaccugaugccuaucuga

SEQ ID NO: 207669 - RNA, 1410 nt, Artificial Sequence
  derived and/or modified CDS sequence (opt5) from neuraminidase__InfluenzaA__ABK80193
augaaccccaaucagaagaucauuaccaucggcagcgugucccugacaauugccacgaucugcuuccucaugcaaauugcuauccuggucaccacaguuacccuucacuuuaaacaguacgaguguaacucuccuccgaauaaccaggugaugcugugcgaacccacaaucauugagagaaauaucaccgaaauuguguaucucacaaacaccacgaucgagaaggaaauuuguccuaaacuggccgaguaccggaauuggagcaagccccagugcaacaucaccggguucgcgccuuuuuccaaagacaauucuauucgccuuagcgcuggaggcgauaucugggucacaagagagcccuauguguccugugacccugauaagugcuaccaauucgcccuggggcagggaaccacacucaacaauggccauucuaacgacaccguucacgaucggacgccguaucgcacacugcugaugaaugaacucggggugcccuuucaucugggaaccagacaggucuguaucgccuggagcuccagcucuugccacgacggcaaggcuuggcuucauguguguguuacaggcgaugacgagaacgccaccgcuuccuucauuuacaaugggcggcugguggauagcaucggaucuugguccaaaaagauucuccgcacccaggaaagcgagugcgucuguaucaacggcacaugcacgguggugaugaccgacgggucugccuccggaaaagcggauacaaagauucuguuuaucgaggaaggcaaaaucguccacauuagcacccuuuccgggucugcccaacacguugaggaaugcagcuguuauccuagauaccccggagugcggugcgugugucgcgacaacuggaagggcuccaauagaccuaucgucgauauuaacgugaaggacuacagcaucguuucuuccuaugugugcagcggccuggucggggacacaccccggaaaaaugauucuuucagcuccucucauugucucgacccgaacaaugaggaaggaggccacggggugaagggaugggcuuuugaugacggcaacgauguuuggauggggcgcaccauuggagagaaacugagaagcggcuacgagacguucaaggugaucgaaggcugguccaaaccuaauagcaagcugcagacaaaccggcaggucaucguggagcgcgggaauagaucuggauauuccggcauuuuuagcgucgaagggaaaucuugcaucaaccgguguuucuacguggagcucauuagaggacgcaaggaagagaccgagguuugguggaccuccaauagcaucguggucuuuugcggcacauccgggaccuauggcacaggaucuuggcccgacggcgccgauauuaaccugaugccuaucuga

SEQ ID NO: 207670 - RNA, 1410 nt, Artificial Sequence
  derived and/or modified CDS sequence (opt5) from neuraminidase__InfluenzaA__ABK80204
augaaccccaaucagaagaucauuaccaucggcagcgugucccugacaauugccacgaucugcuuccucaugcaaauugcuauccuggucaccacaguuacccuucacuuuaaacaguacgaguguaacucuccuccgaauaaccaggugaugcugugcgaacccacaaucauugagagaaauaucaccgaaauuguguaucucacaaacaccacgaucgagaaggaaauuuguccuaaacuggccgaguaccggaauuggagcaagccccagugcaacaucaccggguucgcgccuuuuuccaaagacaauucuauucgccuuagcgcuggaggcgauaucugggucacaagagagcccuauguguccugugacccugauaagugcuaccaauucgcccuggggcagggaaccacacucaacaauggccauucuaacgacaccguucacgaucggacgccguaucgcacacugcugaugaaugaacucggggugcccuuucaucugggaaccagacaggucuguaucgccuggagcuccagcucuugccacgacggcaaggcuuggcuucauguguguguuacaggcgaugacgagaacgccaccgcuuccuucauuuacaaugggaaacugguggauagcaucggaucuugguccaagaaaauucuccggacccaggaaagcgagugcgucuguaucaacggcacaugcgccguggugaugacggacgggucugcguccggaaaggccgauaccaaaauucuguuuaucgaggaaggcaagaucguccacauuagcacacuuuccgggucugcucaacacguugaggaaugcagcuguuauccucgcuaccccggagugagaugcgugugucgggacaacuggaagggcuccaaucgcccuaucgucgauauuaacgugaaagacuacagcaucguuucuuccuaugugugcagcggccuggucggggacacccccagaaagaaugauucuuucagcuccucucauugucucgacccgaacaaugaggaaggaggccacggggugaaaggaugggccuuugaugacggcaacgaugcuuggauggggcggacaauuagcgagaagcugcgcuccggauacgagaccuucaaaguuaucgaaggcuggagcaagccuaauucuaaacugcagacgaacagacaggugaucgucgagcggggcaaucgcuccggguauagcggaaucuuuucuguggaaggcaaguccugcauuaacagauguuucuacgucgagcucauucgggggagaaaggaagagacagaggugugguggaccagcaauuccaucguuguguuuugcggaaccucuggcacauaugggaccggcagcuggcccgacggagccgauauuaaccugaugccuaucuga

SEQ ID NO: 207671 - RNA, 1410 nt, Artificial Sequence; identical to SEQ ID NO: 206663
  derived and/or modified CDS sequence (opt5) from neuraminidase__InfluenzaA__ABK80215

SEQ ID NO: 207672 - RNA, 1410 nt, Artificial Sequence; identical to SEQ ID NO: 206663
  derived and/or modified CDS sequence (opt5) from neuraminidase__InfluenzaA__ABK80226

SEQ ID NO: 207673 - RNA, 1410 nt, Artificial Sequence
  derived and/or modified CDS sequence (opt5) from neuraminidase__InfluenzaA__ABK80237
augaaccccaaucagaagaucauuaccaucggcagcgugucccugacaauugccacgaucugcuuccucaugcaaauugcuauccuggucaccacaguuacccuucacuuuaaacagcaugaguguaacucuccuccgaauaaccaggugaugcugugcgaacccacaaucauugagagaaauaucaccgaaauuguguaccucacaaacaccacgaucgagaaggaaauuuguccuaaacuggucgaguaucggaauuggagcaagccccagugcaacaucaccggguucgccccuuuuuccaaagacaauucuauucgccuuagcgcgggaggcgauaucugggugacaagagagcccuacguuuccugugacccugauaagugcuaucaauucgcucuggggcagggaaccacacucaacaauggccacucuaacgacaccgugcaugaucggacgccguaccgcacacugcugaugaaugaacucgggguccccuuucaccugggaaccagacagguguguaucgccuggagcuccagcucuugccaugacggcaaggccuggcuucacguuugugugacaggcgaugacaaaaacgcuaccgccuccuucauuuauaaugggcggcuggucgauagcaucggaucuugguccaagaaaauucuccgcacccaggagagcgaaugcguguguaucaacggcacaugcacgguggucaugaccgacgggucugcuuccggaaaggccgauacaaaaauucuguuuaucgaggagggcaagaucguucacauuagcacccuuuccgggucugcgcaacauguggaagagugcagcuguuacccuagauaucccggagugcggugcgucugucgcgacaacuggaagggcuccaauagaccuaucguggauauuaacguuaaagacuacagcaucgugucuuccuacgucugcagcggccuggugggggacacaccccggaagaccgauucuuucagcuccucucacugucucgacccgaauaacgaagagggaggccaugggguuaaaggaugggccuuugaugacggcaaugauguguggauggggcgcacgauuagcgaaaagcugagauccggauaugagacauucaaagucaucgagggcuggagcaagccuaacucuaaacugcagaucaaucgccaggugauugucgaacggggcaacagauccggguacagcggaaucuuuucuguggagggcaaguccugcauuaaucgguguuucuauguugaacucaucagagggcgcaaggaggaaaccgaggugugguggaccagcaacuccauugucguguuuugcggaacaucuggcaccuacgggacaggcagcuggcccgacggagcugauaucaaucugaugccuauuuga

SEQ ID NO: 207674 - RNA, 1410 nt, Artificial Sequence
  derived and/or modified CDS sequence (opt5) from neuraminidase__InfluenzaA__ABK80259
augaaccccaaucagaagaucauuaccaucggcagcgccucccugacaauugcuacgaucugcuuccucauucaaaucgccauccugguuaccacagucacccuucacuuuaaacagcaugaguguaacucuccuccgaauaaccagguuaugcugugcgaacccacaauuaucgagagaaauauuaccgaaaucguguaccucacaaacaccacgauugagaaggaaaucuguccuaaacuggcggaguaucggaauuggagcaagccccagugcaacauuaccggguucgcuccuuuuuccaaagacaauucuauccgccuuagcgccggaggcgauaucugggugacaagagagcccuacgucuccugugacccugauaagugcuaucaauucgcccuggggcagggaaccacacucaacaauggccacucuaacgacaccgugcaugaucggacgccguaccgcacacugcugaugaaugaacucgggguucccuuucaccugggaaccagacagguguguauugcuuggagcuccagcucuugccaugacggcaaggccuggcuucacgucugugugacaggcgaugacaaaaacgcuaccgccuccuucaucuauaaugggcggcugguugauagcauuucuuccuggagcaagaaaauccuccgcacccaggagucugaaugcguguguauuaacggaacaugcacggucgugaugaccgacggcuccgcgagcgggaaggccgauacaaaaauccuguuuaucgaggagggaaagauuauccacauuuccacccuuucuggcagcgcucaacauguggaagagugcuccuguuacccuagauaucccgggguccggugcguuugucgcgacaacuggaagggaagcaauagaccuaucguggauauuaacgugaaagacuacucuaucgucuccagcuacgugugcucuggccugguuggcgacacaccccggaagaaugauagcuucuccucuagccacugucucgacccgaacaaugaagaagggggacauggcgugaaagggugggccuuugaugacggaaacgaugucuggaugggccgcaccaucuccgagaagcugagaagcggguaugagacguucaaagugauugagggauggucuaauccuaacuccaagcugcagaucaaucggcagguuauuguggaacgcggcaacagaagcggcuacucugggaucuuuuccgucgagggaaaaagcugcauuaaucgguguuucuauguggaacucaucagaggccgcaaggaggaaacagaggucugguggaccuccaacucuauugugguguuuugcgggaccagcggaacauacggcaccggguccuggcccgacggcgcugauaucaaucugaugccuaucuga

SEQ ID NO: 207675 - RNA, 1410 nt, Artificial Sequence; identical to SEQ ID NO: 206399
  derived and/or modified CDS sequence (opt5) from neuraminidase__InfluenzaA__ABK80270

SEQ ID NO: 207676 - RNA, 1410 nt, Artificial Sequence; identical to SEQ ID NO: 206786
  derived and/or modified CDS sequence (opt5) from neuraminidase__InfluenzaA__ABK80281

SEQ ID NO: 207677 - RNA, 1410 nt, Artificial Sequence
  derived and/or modified CDS sequence (opt5) from neuraminidase__InfluenzaA__ABK80292
augaaccccaaucagaagaucauuaccaucggcagcgugucccugacaauuucuacgaucugcuucuuuaugcaaauugccauccucaucaccacagucacccugcacuucaaacaguacgaguuuaacagcccuccgaauaaccagguuaugcuuugugaacccacaauuaucgagagaaauauuaccgaaaucguguaucugacaaacaccacgauugagaaggaaaucugcccuaaacucgcugaguaccggaauugguccaagccccaguguaacauuaccggguucgccccuuuuucuaaagacaauagcauccgccuguccgcgggaggcgauaucugggugacaagagagcccuaugucucuugcgacccugauaaguguuaccaauucgcucuugggcagggaaccacacugaacaaugugcauagcaacgacaccguucacgaucggacgccguaucgcacacuccugaugaaugaacugggcgugcccuuucaucucgggaccaagcaggucugcauugccugguccucuagcuccugucacgacggaaaagccuggcugcaugugugcguuacaggcgaugacaagaacgcuaccgccagcuucaucuacaauggcagacuuguggauucuauugucuccuggagcaaagagauccugcggacccaggaaucugagugugugugcauuaacgggacauguacgguggucaugaccgacggauccgcuagcggcaaggccgauacaaaaauccucuuuaucgaggaagggaagauuauccacaccuccacacugucuggaagcgcgcaacacguugaggaaugcuccugcuauccucgcuaccccggcgugagaugugugugccgggacaacuggaaggggagcaaucgcccuauugucgauaucaacauuaaagacuacucuaucguguccagcuauguuuguucuggacuugugggcgacacccccagaaagaaugauagcuccucuagcucccauugccuggacccgaacaaugaggaaggcgggcacggagucaaaggcugggccuucgaugacgggaacgauguguggaugggacggacgaucagcgagaagcuccgcucuggcuacgagacauuuaaaguuauugaagggugguccaauccuaacagcaagcugcagaucaauagacaggugauugucgaccggucuaaccgcuccggauauagcggcaucuucuccguggagggcaaaucuuguauuaauagaugcuuuuacgucgaacugauccgggggagaaaggaggaaaccgaggugcucuggaccagcaacuccauuguuguguucuguggaacaucuggcaccuaugggacaggaagcuggcccgauggcgcugacaucaaucugaugccuaucuga

SEQ ID NO: 207678 - RNA, 1410 nt, Artificial Sequence
  derived and/or modified CDS sequence (opt5) from neuraminidase__InfluenzaA__ABK80303
augaaccccaaucagaagaucauuaccaucggcagcgugucccugacaauugccacgaucugcuuccucaugcaaauugcuauccuggucaccacaguuacccuucacuuuaaacaguacgaguguaacucuccuccgaauaaccaggugaugcuguaugaacccacaaucauugagagaaauaucaccgaaauuguguaccucacaaacaccacgaucgagaaggaaauuugcccuaaacuggccgaguaucggaauuggagcaagccccaguguaacaucaccggguucgcgccuuuuuccaaagacaauucuauucgccuuagcgcuggaggcgauaucugggucacaagagagcccuacguguccugcgacccugauaaguguuaucaauucgcccuggggcagggaaccacacucaacaauggccauucuaacgacaccguucacgaucggacgccguaccgcacacugcugaugaaugaacucggggugcccuuucaucugggaaccagacaggucugcaucgccuggagcuccagcucuugucacgacggcaaggcuuggcuucaugugugcguuacaggcgaugacgagaacgccaccgcuuccuucauuuauaaugggcggcugguggauagcaucggaucuugguccaaaaagauucuccgcacccaggaaagcgagugugucugcaucaacggcacauguacgguggugaugaccgacgggaacgccucuggaaaagcggauacaaagauucuguuuaucgaggaaggcaaaaucguccacauuuccacccuuagcggguccgcccaacacguugaggaaugcucuugcuacccuagauaccccggagugcggugugugugccgcgacaauuggaagggcagcaacagaccuaucgucgauauuaaugugaaggacuauuccaucguuagcucuuacguguguuccggccuggucggggacacaccccggaaaaacgauagcuucucuagcucccauugccucgacccgaauaacgaggaaggaggccacggggugaagggaugggcuuuugaugacggcaaugauguuuggauggggcgcaccauuucugagaaacugagaagcggauaugagacguucaaggugaucgaaggcugguccaaaccuaacagcaagcugcagaucaaucggcaggucauuguggagcgcggcaacagaucuggguacuccggaaucuuuagcgucgaaggcaaaucuuguauuaaucggugcuucuauguggagcucaucagagggcgcaaggaagagacagagguuugguggaccuccaacagcauuguggucuuuuguggaaccuccggcacauacgggaccggcucuuggcccgacggagccgauaucaaucugaugccuauuuga

SEQ ID NO: 207679 - RNA, 1410 nt, Artificial Sequence
  derived and/or modified CDS sequence (opt5) from neuraminidase__InfluenzaA__ABK80314
augaaccccaaucagaagaucauuaccaucggcagcgugucccugacaauugccacgaucugcuuccucaugcaaauugcuauccuggucaccacaguuacccuucacuuuaaacaguacgagugugacucuccuccgaacaaucaggugaugcuguaugaacccacaaucauugagagaaacaucaccgaaauuguguaccucacaaauaccacgaucgagaaggaaauuugcccuaaacuggccgaguaucggaacuggagcaagccccaguguaauaucaccggguucgcgccuuuuuccaaagauaacucuauucgccuuagcgcuggaggcgacaucugggucacaagagagcccuacguguccugcgauccugacaaguguuaucaauucgcccuggggcagggaaccacacucaauaacggccauucuaaugauaccguucacgaccggacgccguaccgcacacugcugaugaacgaacucggggugcccuuucaucugggaaccagacaggucugcaucgccuggagcuccagcucuugucacgauggcaaggcuuggcuucaugugugcguuacaggcgacgaugagaaugccaccgcuuccuucauuuauaacgggcggcugguggacagcaucggaucuugguccaaaaagauucuccgcacccaggaaagcgagugugucugcaucaauggcacauguacgguggugaugaccgaugggucugccuccggaaaagcggacacaaagauucuguuuaucgaggaaggcaaaaucguccacauuagcacccuuuccgggucugcccaacacguugaggaaugcagcugcuacccuagauaccccggagugcggugugugugccgcgauaacuggaagggcuccaacagaccuaucgucgacauuaaugugaaggacuauagcaucguuucuuccuacguguguagcggccuggucggggauacaccccggaaaaacgacucuuucagcuccucucauugccucgauccgaauaacgaggaaggaggccacggggugaagggaugggcuuuugacgauggcaaugacguuuggauggggcgcaccauuagcgagaaacugagauccggauaugagacguucaaggugaucgaaggcuggagcaaaccuaacucuaagcugcagaucaaucggcaggucauuguggagcgcggcaacagauccggguacagcggaaucuuuucugucgaaggcaaauccuguauuaaucggugcuucuauguggagcucaucagagggcgcaaggaagagacagagguuugguggaccagcaacuccauuguggucuuuuguggaaccucuggcacauacgggaccggcagcuggcccgauggagccgacaucaaucugaugccuauuuga

SEQ ID NO: 207680 - RNA, 1350 nt, Artificial Sequence
  derived and/or modified CDS sequence (opt5) from neuraminidase__InfluenzaA__ABL07021
augaaccccaaucagaagaucauuaccaucggcagcauuugcauggugaucgggauugucucccugaugcuccaaaucggaaacaugaucucuauuuggguuagccacuccauccagaaaggcaaucagcaucaggccgagucuauuagcaacacaaauccucugacggaaaaggcuguggccuccaucacccuugcggggaacucuagccuguguccgauuagaggaugggcugugcacuccaaagacaauaacauccggauuggcagcaagggggaugucuucgugauccgcgagcccuuuaucucuugcucccaucucgaauguagaacauucuuucugacccaaggagcccuucugaaugacaaacacagcaacggcacaguuaaggaucggucuccucaucgcacccucauguccugccccgugggcgaggccccuagccccuacaauucuagauucgaauccgucgcuuggagcgccuccgcuugucacgacgggacaucuuggcugaccauuggaaucagcggcccugauaacgaggccguggcgguucugaaguauaaugggauuaucacggacaccauuaaauccuggcggaacaauauccuccgcacacaggagagcgaaugcgccugugugaacggaucuugcuuuaccgucaugacagauggcccguccaacgggcaggcuagcuacaagaucuucaaaaugaagaaaggaaagguggugaagucugucgagcuggacgcccccaauuaucacuacgaagaguguagcugcuauccugaugcuggcgagauuaccuguguuugcagagacaacuggcauggcuccaaucggcccugggugucuuuuaaccagaaucuugaauaccaaaucggguauauuugcagcggaguguucggcgauaacccucgccccaaugacgggacgggauccuguggcccgaugagcccuaacggggccuacggagucaaaggcuuuucuuucaaguacggcaaugggguguggaucggaagaacaaaauccaccaacagccggucuggcuuugagaugauuugggaucccaauggguggacaggaaccgacuccagcuucuccguuaagcaggacaucguggcgaucaccgauuggucuggcuauagcggguccuuuguccagcacccugaacugacaggccucgacugcauucgccccuguuucuggguggagcugaucagaggacggcccaaagaaucuacgauuuggaccagcggcuccagcaucucuuucugcgggguuaacuccgauacagugagcuggucuuggccugacggagccgagcuuccguuuaccauugauaaguga

SEQ ID NO: 207681 - RNA, 1350 nt, Artificial Sequence
  derived and/or modified CDS sequence (opt5) from neuraminidase__InfluenzaA__ABL07032
augaaccccaaucagaagaucauuaccaucggcagcauuugcauggugaucgggauugucucccugaugcuccaaaucggaaacaugguuucuacaugggugagccacuccauccagacgggcaaucaguaccaggccgagucuauuagcaacaccaauccucugacagaaaaagcuguggccuccgucacccuugcggggaacucuagccuguguccgaucagaggaugggcugugcauuccaaggacaauaacauucggaucggcagcaaaggggauguuuucgugauucgcgagcccuuuaucucuugcucccaccucgaauguagaacauucuuucugacccaaggagcccuucugaaugacaagcauagcaacggcacagucaaagaucggucuccucaccgcacccucauguccugccccgugggcgaggccccuagccccuauaauucuagauucgaauccguugcuuggagcgccuccgcuugucaugacgggacgucuuggcugaccauuggaaucagcggcccugauaacgaggccguggcgguccugaaguacaaugggaucauuacagacaccaucaaguccuggcggaacaauauucuccgcacacaggagagcgaaugcgccugugugaacggaucuugcuuuaccgugaugacggauggcccguccaacgggcaggcuagcuauaaaaucuucaagauggagaaaggaaaggucguuaaaucuguggaacuggacgcccccaauuaccacuaugaggaguguagcugcuacccugaugcuggcgaaauuacaugugugugcagagacaacuggcacggcuccaaucggcccugggucucuuuuaaccagaaucuugaguaucaaaucggguacaucugcagcggaguguucggcgauaacccucgccccaaugacgggaccggauccuguggcccgaugagcccuaacggggccuacggaguuaagggcuuuucuuucaaguauggcaaugggguguggauuggaagaacaaaauccaccaacagccggucuggcuuugaaaugaucugggaucccaauggguggaccggaacagacuccagcuucuccgucaagcaggacauuguggcgaucacggauuggucuggcuacagcggguccuuuguucagcauccugagcugaccggccucgacugcauucgccccuguuucuggguggaacugaucagaggacggcccaaagagucuacaaucuggaccagcggcuccagcauuucuuucugcggggucaacuccgauacagugagcuggucuuggccugacggagccgagcuuccguuuaccaucgauaaguga

SEQ ID NO: 207682 - RNA, 1350 nt, Artificial Sequence
  derived and/or modified CDS sequence (opt5) from neuraminidase__InfluenzaA__ABL31746
augaaccccaaucagaagaucauuaccaucggcagcauuugcauggugaucgggauugucucccugaugcuccaaaucggaaacaugaucucuauuuggguuagccacuccauccagacaggcaaucagcaucaggccgagucuauuagcaacacgaauccucugaccgaaaaagcuguggccuccgugacacuugcggggaacucuagccuguguccgaucagaggaugggcuguccacuccaaggacaauaacauucggaucggcagcaaaggggauguguucguuauucgcgagcccuuuaucucuugcucccaucucgaauguagaaccuucuuucugacacaaggagcccuucugaaugacaagcacagcaacggcaccgugaaagaucggucuccucaucgcacacucauguccugccccgucggcgaggccccuagccccuacaauucuagauucgaauccguggcuuggagcgccuccgcuugucacgacgggaacucuuggcugaccaucggaauuagcggcccugauaaugaggccguugcggugcugaaguauaacgggaucauuacggacaccaucaaguccuggcggaaaaauauucuccgcacacaggagagcgaaugcgccugugucaacggaucuugcuuuaccgugaugacagauggcccguccaacgggcaggcuagcuacaagaucuucaaaauggagaagggaaaaguggucaagucuguugaacuggacgcccccaauuaucacuacgaggaguguagcugcuauccugaugcuggcgaaaucaccugugugugcagagacaacuggcauggcuccaaucggcccugggugucuuuuaaccagaaucuugaguaccaaauuggguauaucugcagcggagucuucggcgauaacccucgccccaaugacgggacgggauccuguggcccgaugagcccuaacggggccuacggagugaagggcuuuucuuucaaauacggcaaugggguuuggauuggaagaacaaaguccaccaacagccggucuggcuuugaaaugaucugggaucccaauggguggacaggaaccgacuccagcuucuccgugaaacaggacauugucgcgaucaccgauuggucuggcuauagcggguccuuugugcagcacccugagcugacaggccucgacugcauccgccccuguuucuggguugaacugauuagaggacggcccaaggagucuacgaucuggaccagcggcuccagcauuucuuucugcggggugaacuccgauacagucagcuggucuuggccugacggagccgagcuuccguuuaccaucgauaaauga

SEQ ID NO: 207683 - RNA, 1350 nt, Artificial Sequence
  derived and/or modified CDS sequence (opt5) from neuraminidase__InfluenzaA__ABL31757
augaaccccaaucagaagaucauuaccaucggcagcauuugcauggugaucgggauugucucccugaugcuccaaaucggaaacaugaucucuauuuggguuagccacuccauccagacaggcaaucagcaucaggccgagucuauuagcaacacgaauccucugaccgaaaaagcuguggccuccgugacacuugcggggaacucuagccuguguccgaucagaggaugggcuguccacuccaaggacaauaacauucggaucggcagcaaaggggauguguucguuauucgcgagcccuuuaucucuugcucccaucucgaauguagaaccuucuuucugacacaaggagcccuucugaaugacaagcacagcaacggcaccgugaaagaucggucuccucaucgcacacucauguccugccccgucggcgaggccccuagccccuacaauucuagauucgaauccguggcuuggagcgccuccgcuugucacgacgggaccucuuggcugacgaucggaauuagcggcccugauaacgaggccguugcggugcugaaguauaaugggaucauuaccgacacaaucaaguccuggcggaacaauauucuccgcacccaggagagcgaaugcgccugugucaacggaucuugcuuuacagugaugaccgauggcccguccaacgggcaggcuagcuacaaaaucuucaagauggagaaaggaaagguggucaaaucuguugaacuggacgcccccaauuaucacuacgaggaguguagcugcuauccugaugcuggcgaaaucacgugugugugcagagacaacuggcauggcuccaaucggcccugggugucuuuuaaccagaaucuugaguaccaaauuggguauaucugcagcggagucuucggcgauaacccucgccccaaugacgggacaggauccuguggcccgaugagcccuaacggggccuacggagugaagggcuuuucuuucaaguacggcaaugggguuuggauuggaagaaccaaauccacaaacagccggucuggcuuugaaaugaucugggaucccaauggguggaccggaaccgacuccagcuucuccgugaagcaggacauugucgcgaucacagauuggucuggcuauagcggguccuuugugcagcacccugagcugacgggccucgacugcauccgccccuguuucuggguugaacugauuagaggacggcccaaagagucuaccaucuggacaagcggcuccagcauuucuuucugcggggugaacuccgauaccgucagcuggucuuggccugacggagccgagcuuccguuuacaaucgauaaguga

SEQ ID NO: 207684 - RNA, 1350 nt, Artificial Sequence; identical to SEQ ID NO: 207683
  derived and/or modified CDS sequence (opt5) from neuraminidase__InfluenzaA__ABL31768

SEQ ID NO: 207685 - RNA, 1410 nt, Artificial Sequence; identical to SEQ ID NO: 206663
  derived and/or modified CDS sequence (opt5) from neuraminidase__InfluenzaA__ABL67168

SEQ ID NO: 207686 - RNA, 1410 nt, Artificial Sequence; identical to SEQ ID NO: 206802
  derived and/or modified CDS sequence (opt5) from neuraminidase__InfluenzaA__ABL67179

SEQ ID NO: 207687 - RNA, 1413 nt, Artificial Sequence; identical to SEQ ID NO: 207628
  derived and/or modified CDS sequence (opt5) from neuraminidase__InfluenzaA__ABL67190

SEQ ID NO: 207688 - RNA, 1410 nt, Artificial Sequence
  derived and/or modified CDS sequence (opt5) from neuraminidase__InfluenzaA__ABL67201
augaaccccaaucagaagaucauuaccaucagcuccgugucucugacaauuagcacgaucugcuucuuuaugcaaauugccauccucaucaccacagucacccugcacuucaaacaguacgaguuuaacuccccuccgaauaaccagguuaugcuuugugaacccacaauuaucgagagaaauauuaccgaaaucguguaucugacaaacaccacgauugagaaggaaaucugcccuaaacucgcugaguaccggaauuggucuaagccccagugugacauuaccggcuucgccccuuuuagcaaagauaacuccauccgccugucugcugggggagacaucugggugacaagagagcccuaugucagcugcgauccugacaaguguuaccaauucgcgcuuggccaggggaccacacugaauaacgugcauuccaaugauaccguucacgaccggacgccguaucgcacacuccugaugaacgaacugggagugcccuuucaucucggcaccaagcaggucugcauugccuggucuagcuccagcugucacgaugggaaagccuggcugcaugugugcguuacaggagacgauaagaaugcuaccgccucuuucaucuacaacggcagacuuguggacuccauugucagcuggucuaaaaagauccugcggacccaggaguccgaaugugugugcauuaauggcacauguacgguggucaugaccgaugggagcgcuuccggaaaagccgacacaaagauccucuuuaucgaggagggcaagauuguucacaccucuacacugagcggguccgcgcaacacguggaagagugcagcugcuauccucgcuaccccggagugagaugugucugccgggauaacuggaaaggcucuaaccgcccuaucguggacauuaauaucaaggacuacuccauuguuagcucuuauguguguagcgggcuugucggagauacccccagaaagaacgacuccucuagcuccagccauugccuggauccgaauaacgaagagggcggccacggggugaaaggaugggccuucgacgauggcaaugacguuuggauggggcggacgaucucugaaaaacuccgcuccggauacgagacauuuaaggugaucgagggcuggagcaacccuaauucuaaacugcagauuaacagacaggucaucguggaucgggggaaucgcuccggauauagcggcauuuucuccgucgaaggcaagucuuguaucaacagaugcuuuuacguggagcugauucgggggagaaaggaagagaccgaaguucucuggaccagcaauuccaucguggucuucuguggaacaucuggcaccuaugggacaggaagcuggcccgacggcgcugauauuaaccugaugccuaucuga

SEQ ID NO: 207689 - RNA, 1413 nt, Artificial Sequence; identical to SEQ ID NO: 207628
  derived and/or modified CDS sequence (opt5) from neuraminidase__InfluenzaA__ABL67212

SEQ ID NO: 207690 - RNA, 1413 nt, Artificial Sequence; identical to SEQ ID NO: 207131
  derived and/or modified CDS sequence (opt5) from neuraminidase__InfluenzaA__ABL67256

SEQ ID NO: 207691 - RNA, 1413 nt, Artificial Sequence; identical to SEQ ID NO: 207131
  derived and/or modified CDS sequence (opt5) from neuraminidase__InfluenzaA__ABL67267

SEQ ID NO: 207692 - RNA, 1410 nt, Artificial Sequence; identical to SEQ ID NO: 206133
  derived and/or modified CDS sequence (opt5) from neuraminidase__InfluenzaA__ABL67278

SEQ ID NO: 207693 - RNA, 1410 nt, Artificial Sequence
  derived and/or modified CDS sequence (opt5) from neuraminidase__InfluenzaA__ABL67289
augaaccccaaucagaagaucauuaccaucggcagcgugucccugacaauugccacgaucugcuuccucaugcaaauugcuauccuggucaccacaguuacccuucacuuuaaacaguacgaguguaacucuccuccgaauaaccaggugaugcuguaugaacccacaaucauugagagaaauaucaccgaaauuguguaccucacaaacaccacgaucgagaaggaaauuugcccuaaacuggccgaguaucggaauuggagcaagccccaguguaacaucaccggguucgcgccuuuuuccaaagacaauucuauucgccuuagcgcuggaggcgauaucugggucacaagagagcccuacguguccugcgacccugauaaguguuaucaauucgcccuggggcagggaaccacacucaacaauggccauucuaacgacaccguucacgaucggacgccguaccgcacacugcugaugaaugaacucggggugcccuuucaucugggaaccagacaggucugcaucgccuggagcuccagcucuugucacgacggcaaggcuuggcuucaugugugcguuacaggcgaugacgagaacgccaccgcuuccuucauuuauaaugggcggcugguggauagcaucggaucuugguccaaaaagauucuccgcacccaggaaagcgagugugucugcaucaacggcacauguacgguggugaugaccgacgggucugccuccggaaaagcggauacaaagauucuguuuaucgaggaaggcaaaaucguccacauuagcacccuuuccgggucugcccaacacguugaggaaugcagcugcuacccuagauaccccggagugcggugugugugccgcgacaacuggaagggcuccaauagaccuaucgucgauauuaacgugaaggacuauagcaucguuucuuccuacguguguagcggccuggucggggacacaccccggaaaaaugauucuuucagcuccucucauugccucgacccgaacaaugaggaaggaggccacggggugaagggaugggcuuuugaugacggcaacgauguuuggauggggcgcaccauuagcgagaaacugagauccggauaugagacguucaaggugaucgaaggcuggagcaaaccuaauucuaagcugcagaucaaccggcaggucauuguggagcgcggcaauagauccggguacagcggaaucuuuucugucgaaggcaaauccuguauuaaccggugcuucuauguggagcucaucagagggcgcaaggaagagacagagguuugguggaccagcaauuccauuguggucuuuuguggaaccucuggcacauacgggaccggcagcuggcccgacggagccgauaucaaccugaugccuauuuga

SEQ ID NO: 207694 - RNA, 1410 nt, Artificial Sequence
  derived and/or modified CDS sequence (opt5) from neuraminidase__InfluenzaA__ABL67300
augaaccccaaucagaagaucauuaccaucggcagcgugucccugacaauugccacgaucugcuuccucaugcaaauugcuauccuggucaccacaguuacccuucacuuuaaacaguacgaguguaacucuccuccgaauaaccaggugaugcugugcgaacccacaaucauugagagaaauaucaccgaaauuguguaucucacaaacaccacgaucgagaaggaaauuuguccuaaacuggccgaguaccggaauuggagcaagccccagugcaacaucaccggguucgcgccuuuuuccaaagacaauucuauucgccuuagcgcuggaggcgauaucugggucacaagagagcccuauguguccugugacccugauaagugcuaccaauucgcccuggggcagggaaccacacucaacaauggccauucuaacgacaccguucacgaucggacgccguaucgcacacugcugaugaaugaacucggggugcccuuucaucugggaaccagacaggucuguaucgccuggagcuccagcucuugccacgacggcaaggcuuggcuucauguguguguuacaggcgaugacgagaacgccaccgcuuccuucauuuacaaugggcggcugguggauagcaucggaucuugguccaaaaacauucuccgcacccaggaaagcgagugcgucuguaucaacggcacaugcacgguggugaugaccgacgggucugccuccggaaaggcggauacaaaaauucuguuuaucgaggaaggcaagaucguccacauuagcacccuuuccgggucugcccaacacguugaggaaugcagcuguuauccuagauaccccggagugcggugcgugugucgcgacaauuggaaaggcuccaacagaccuaucgucgauauuaaugugaaggaccauagcaucguuucuuccuacgugugcagcggccuggucggggacacaccccggaagaacgauucuuucagcuccucucacugucucgacccgaauaacgaggaaggaggccauggggugaaaggaugggcuuuugaugacggcaaugauguuuggauggggcgcaccauuagcgagaagcugagauccggauaugagacguucaaagugaucgaaggcuggagcaagccuaacucuaaacugcagaucaaucggcaggucauuguggagcgcggcaacagauccggguacagcggaaucuuuucugucgaaggcaaguccugcauuaaucgguguuucuauguggagcucaucagagggcgcaaagaagagacagagguuugguggaccagcaacuccauuguggucuuuugcggaaccucuggcacauacgggaccggcagcuggcccgacggagccgauaucaaucugaugccuauuuga

SEQ ID NO: 207695 - RNA, 1410 nt, Artificial Sequence; identical to SEQ ID NO: 206252
  derived and/or modified CDS sequence (opt5) from neuraminidase__InfluenzaA__ABL67311

SEQ ID NO: 207696 - RNA, 1410 nt, Artificial Sequence
  derived and/or modified CDS sequence (opt5) from neuraminidase__InfluenzaA__ABL67322
augaaccccaaucagaagaucauuaccaucggcagcgugucccugacaauugccacgaucugcuuccucaugcaaauugcuauccuggucaccacaguuacccuucacuuuaaacaguacgaguguaacccuccgcccaauaaccaggugaugcugugcgaaccuacaaucauugagagaaauaucaccgaaauuguguaucucacaaacaccacgaucgagaaggaaauuugucccaaacuggccgaguaccggaauuggucuaagccucagugcaacaucaccggguucgcgcccuuuagcaaagacaauuccauucgccuuucugcuggaggcgauaucugggucacaagagagccuuaugugagcugugacccggauaagugcuaccaauucgcccuggggcagggaaccacacucaacaauggccauuccaacgacaccguucacgaucggacgcccuaucgcacacugcugaugaaugaacucggggugccuuuucaucugggaaccagacaggucuguaucgccuggucuagcuccagcugccacgacggcaaggcuuggcuucauguguguguuacaggcgaugacgagaacgccaccgcuucuuucauuuacaaugggcggcugguggauuccaucggaagcuggucuaaaaagauucuccgcacccaggaauccgagugcgucuguaucaacggcacaugcacgguggugaugaccgacgggagcgccucuggaaaagcggauacaaagauucuguuuaucgaggaaggcaaaaucguccacaccuccacacuuagcggguccgcccaacacguugaggaaugcucuuguuaucccagauacccuggagugcggugcgugugucgcgacaacuggaagggcagcaauagacccauugucgauaucaacgugaaggacuacuccauuguuagcucuuaugugugcuccggccuggucggggacaccccgcggaaaaaugauagcuucucuagcucccauugucucgacccuaacaaugaggaaggaggccacggggugaagggaugggcuuuugaugacggcaacgauguuuggauggggcgcacgaucucugagaaacugagaagcggauacgagacauucaaggugauugaaggcugguccaaacccaauagcaagcugcagaccaaccggcaggucaucguggagcgcggcaauagaucuggguauuccggaaucuuuagcgucgaaggcaaaucuugcauuaaccgguguuucuacguggagcucaucagagggcgcaaggaagagaccgagguuugguggacauccaauagcauuguggucuuuugcggaaccuccggcacauaugggacgggcucuuggccugacggagccgauaucaaccugaugcccauuuga

SEQ ID NO: 207697 - RNA, 1410 nt, Artificial Sequence
  derived and/or modified CDS sequence (opt5) from neuraminidase__InfluenzaA__ABL67333
augaaccccaaucagaagaucauuaccaucggcagcgugucccugacaauugccacgaucugcuuccucaugcaaauugcuauccuggucaucaccguuacacuucacuuuaaacaguacgaguguaacucuccuccgaauaaccaggugaugcugugcgaacccaccauuaucgagagaaauauuacagaaaucguguaucucaccaacacaaccauugagaaggaaaucuguccuaaacuggccgaguaccggaauuggagcaagccccagugcaacauuacgggguucgcgccuuuuuccaaagacaauucuauccgccuuagcgcuggaggcgauaucugggucaccagagagcccuauguguccugugacccugauaagugcuaccaauucgcccuggggcagggaacaacccucaacaauggccauucuaacgacacaguucacgaucggaccccguaucgcacgcugcugaugaaugaacucggggugcccuuucaucugggaacaagacaggucuguauugccuggagcuccagcucuugccacgacggcaaggcuuggcuucauguguguguuaccggcgaugacgagaacgccacagcuuccuucaucuacaaugggaaacugguggauagcauuggaucuugguccaagaaaauccuccggacccaggaaagcgagugcgucuguauuaacgggaccugcgccguggugaugacagacggcucugcguccggaaaggccgauacgaaaauccuguuuaucgaggaaggcaagauuguccacaucagcacccuuuccgggucugcucaacacguugaggaaugcagcuguuauccucgcuaccccggagugagaugcgugugucgggacaacuggaagggcuccaaucgcccuauugucgauaucaacgugaaagacuacagcauuguuucuuccuaugugugcagcggccuggucggggacacacccagaaagaaugauucuuucagcuccucucauugucucgacccgaacaaugaggaaggaggccacggggugaaaggaugggccuuugaugacggcaacgauguuuggauggggcggaccaucagcgagaagcugcgcuccggauacgagacauucaaagugaucgaaggcuggagcaagccuaauucuaaacugcagaccaacagacaggucauuguggagcggggcaaucgcuccggguauagcggaaucuuuucugucgaaggcaaguccugcauuaacagauguuucuacguggagcucauccgggggagaaaggaagagacggagguuugguggacaagcaauuccauuguggucuuuugcggaaccucuggcaccuaugggacaggcagcuggcccgacggagcugauaucaaccugaugccuauuuga

SEQ ID NO: 207698 - RNA, 1410 nt, Artificial Sequence; identical to SEQ ID NO: 206663
  derived and/or modified CDS sequence (opt5) from neuraminidase__InfluenzaA__ABL67344

SEQ ID NO: 207699 - RNA, 1410 nt, Artificial Sequence
  derived and/or modified CDS sequence (opt5) from neuraminidase__InfluenzaA__ABL67355
augaaccccaaucagaagaucauuaccaucggcagcgugucccugacaauugccacgaucugcuuccucaugcaaauugcuauccuggucaccacaguuacccuucacuuuaaacagcaugaguguaacucuccuccgaauaaccaggugaugcugugcgaacccacaaucauugagagaaauaucaccgaaauuguguaccucacaaacaccacgaucgagaaggaaauuuguccuaaacuggucgaguaucggaauuggagcaagccccagugcaacaucaccggguucgccccuuuuuccaaagacaauucuauucgccuuagcgcgggaggcgauaucugggugacaagagagcccuacguuuccugugacccugaaaagugcuaucaauucgcucuggggcagggaaccacacucaacaauggccacucuaacgauaccgugcaugaccggacgccguaccgcacacugcugaugaaugagcucgggguccccuuucaccugggaaccaaacagguguguaucgccuggagcuccagcucuugccaugauggcaaagccuggcuucacguuugugugacaggcgacgauaagaacgcuaccgccuccuucauuuauaaugggagacuggucgacagcaucggaucuugguccaaaaagauucuccggacccaggaaagcgagugcguguguaucaacggcacaugcacgguggucaugaccgaugggucugcuuccggaaaagccgacacaaagauucuguuuaucgaggaaggcaagaucguucacauuagcacccuuuccgggucugcgcaacauguggaggaaugcagcuguuacccucgcuaucccggagugagaugcgucugucgggauaacuggaaaggcuccaaucgcccuaucguggacauuaacguuaaggauuacagcaucgugucuuccuacgucugcagcggccuggugggggacacacccagaaagaaugacucuuucagcuccucucacugucucgauccgaacaaugaggaaggaggccaugggguuaagggaugggccuuugacgauggcaacgacguguggauggggcggaccauuagcgagaaacugcgcuccggauaugagacguucaaggucaucgaaggcuggagcaaaccuaauucuaagcugcagaucaacagacaggugauugucgagcggggcaaucgcuccggguacagcggaaucuuuucuguggaaggcaaguccugcauuaacagauguuucuauguugagcucauccgggggagaaaagaagagacagaggugugguggaccagcaauuccauugucguguuuugcggaaccucuggcacauacgggaccggcagcuggcccgauggagcugacaucaaccugaugccuauuuga

SEQ ID NO: 207700 - RNA, 1410 nt, Artificial Sequence
  derived and/or modified CDS sequence (opt5) from neuraminidase__InfluenzaA__ABL67366
augaaccccaaucagaagaucauuaccaucggcagcgugucccugacaauugccacgaucugcuuccucaugcaaauugcuauccuggucaccacaguuacccuucacuuuaaacagcaugaguguaacucuccuccgaauaaccaggugaugcugugcgaacccacaaucauugagagaaauaucaccgaaauuguguaccucacaaacaccacgaucgagaaggaaauuuguccuaaacuggccgaguaucggaauuggagcaagccccagugcaacaucaccggguucgcgccuuuuuccaaagacaauucuauucgccuuagcgcuggaggcgauaucugggucacaagagagcccuacguguccugugacccugauaagugcuaucaauucgcccuggggcagggaaccacacucaacaauggccacucuaacgacaccguucaugaucggacgccguaccgcacacugcugaugaaugaacucggggugcccuuucaccugggaaccagacaggucuguaucgccuggagcuccagcucuugccaugacggcaaggcuuggcuucacguguguguuacaggcgaugacaaaaacgccaccgcuuccuucauuuauaaugggcggcugguggauagcaucggaucuugguccaagaaaauucuccgcacccaggagagcgaaugcgucuguaucaacggcacaugcacgguggugaugaccgacgggucugccuccggaaaggcggauacacggauucuguuuaucgaggagggcaaaaucguccacauuagcacccuuuccgggucugcccaacauguugaagagugcagcuguuacccuagauaucccggagugcgcugcguguguagagacaacuggaagggcuccaaucggccuaucgucgauauuaacgugaaggacuacagcaucguuucuuccuacgugugcagcggccuggucggggacacaccccgcaaaaaugauucuuucagcuccucucacugucucgacccgaacaaugaagagggaggccauggggugaagggaugggcuuuugaugacggcaacgauguuuggauggggagaaccauuagcgaaaaacugcgguccggauaugagacguucaaggugaucgagggcuggagcaaaccuaauucuaagcugcagaucaaccgccaggucauuguggaaagaggcaaucgguccggguacagcggaaucuuuucugucgagggcaaauccugcauuaacagauguuucuauguggaacucauccgcgggcggaaggaggaaacagagguuugguggaccagcaauuccauuguggucuuuugcggaaccucuggcacauacgggaccggcagcuggcccgacggagccgauaucaaccugaugccuauuuga

SEQ ID NO: 207701 - RNA, 1410 nt, Artificial Sequence
  derived and/or modified CDS sequence (opt5) from neuraminidase__InfluenzaA__ABL67377
augaaccccaaucagaagaucauuaccaucggcagcgccucccugacaauugcuaucauuugcuuccucauccaaaucgccauucugguuacgaccgucacacuucacuuuaaacagcaugaguguaacucuccuccgaauaaccagguuaugcugugcgaacccaccaucauugagagaaauaucacagaaauuguguaccucaccaacacaaccaucgagaaggaaauuuguccuaaacuggcggaguaucggaauuggagcaagccccagugcaacaucacgggguucgcuccuuuuuccaaagacaauucuauccgccuuagcgccggaggcgauauuugggugaccagagagcccuacgucuccugugacccugauaagugcuaucaauucgcccuggggcagggaacaacccucaacaauggccacucuaacgacacagugcaugaucggaccccguaccgcacgcugcugaugaaugaacucgggguucccuuucaccugggaacaagacagguguguaucgcuuggagcuccagcucuugccaugacggcaaggccuggcuucacgucugugugaccggcgaugacaaaaacgcuacagccuccuucauuuauaaugggcggcugguugauagcaucucuuccuggagcaagaaaauucuccgcacccaggagucugaaugcguguguaucaacggaaccugcacagucgugaugacggacggcuccgcgagcgggaaggccgauaccaaaauccuguuuauugaggagggaaagaucauucacaucuccacacuuucuggcagcgcucaacauguggaagagugcuccuguuacccuagauaucccgggguccggugcguuugucgcgacaacuggaagggaagcaauagaccuauuguggauaucaacgugaaagacuacucuaucgucuccagcuacgugugcucuggccugguuggcgacacaccccggaagaaugauagcuucuccucuagccacugucucgacccgaacaaugaagaagggggacauggcgugaaagggugggccuuugaugacggaaacgaugucuggaugggccgcaccauuuccgagaagcugagaagcggguaugagaccuucaaagugaucgagggauggucuaauccuaacuccaagcugcagauuaaucggcagguuaucguggaacgcggcaacagaagcggcuacucugggaucuuuuccgucgagggaaaaagcugcauuaaucgguguuucuauguggaacucauuagaggccgcaaggaggaaacggaggucugguggacauccaacucuaucgugguguuuugcgggaccagcggaaccuacggcacaggguccuggcccgacggcgcugaucugaaucuuaugccuaucuga

SEQ ID NO: 207702 - RNA, 1410 nt, Artificial Sequence; identical to SEQ ID NO: 206399
  derived and/or modified CDS sequence (opt5) from neuraminidase__InfluenzaA__ABL67388

SEQ ID NO: 207703 - RNA, 1410 nt, Artificial Sequence; identical to SEQ ID NO: 206399
  derived and/or modified CDS sequence (opt5) from neuraminidase__InfluenzaA__ABL67399

SEQ ID NO: 207704 - RNA, 1410 nt, Artificial Sequence; identical to SEQ ID NO: 206784
  derived and/or modified CDS sequence (opt5) from neuraminidase__InfluenzaA__ABL67410

SEQ ID NO: 207705 - RNA, 1410 nt, Artificial Sequence
  derived and/or modified CDS sequence (opt5) from neuraminidase__InfluenzaA__ABL67421
augaaccccaaucagaagaucauuaccaucggcagcauuucccugacaaucucuacgauuugcuucuuuaugcaaaucgccauccucauuaccacagugacccugcacuucaaacaguacgaguuuaacagcccuccgaauaaccaggucaugcuuugugaacccacaaucauugagagaaauaucaccgaaauuguuuaucugacaaacaccacgaucgagaaggaaauuugcccuaaacucgcugaguaccggaauugguccaagccccaguguaacaucaccggguucgccccuuuuucuaaagacaauagcauccgccuguccgcgggaggcgauauuugggugacaagagagcccuaugugucuugcgacccugauaaguguuaccaauucgcucuugggcagggaaccacacugaacaauguccauagcaacgacaccgugcacgaucggacgccguaucgcacacuccugaugaaugaacugggcguucccuuucaucucgggaccaaacaggugugcaucgccugguccucuagcuccugucacgacggaaaggccuggcugcaugucugcgugacaggcgaugacaagaacgcuaccgccagcuucauuuacaauggcagacuuguugauucuaucguguccuggagcaaagagauucugcggacccaggaaucugagugugucugcaucaacgggacauguacgguggugaugaccgacggauccgcuagcggcaaggccgauacaaaaauccucuuuauugaggaagggaagaucguccacaccuccacacugucuggaagcgcgcaacacguugaggaaugcuccugcuauccucgcuaccccggcgugagaugugugugccgggacaacuggaaggggagcaaucgcccuauugucgauaucaacauuaaagacuacucuaucguguccagcuauguuuguucuggacuugugggcgacacccccagaaagaaugauagcuccucuagcucccauugccuggacccgaacaaugaggaaggcgggcacggagucaaaggcugggccuucgaugacgggaacgauguguggaugggacggacgaucagcgagaagcuccgcucuggcuacgagacauuuaaaguuauugaagggugguccaauccuaacagcaagcugcagaucaauagacaggugauugucgaccggggaaaccgcucuggcuauuccggcaucuucagcguggaggggaaauccuguauuaauagaugcuuuuacgucgaacugauccggggaagaaaggaggaaaccgaggugcucuggaccucuaacagcauuguuguguucuguggcacauccgggaccuauggaacaggcucuuggcccgauggggcugacaucaaucugaugccuaucuga

SEQ ID NO: 207706 - RNA, 1350 nt, Artificial Sequence
  derived and/or modified CDS sequence (opt5) from neuraminidase__InfluenzaA__ABL67772
augaaccccaauaagaaaaucauuaccaucggcagcauuugcauggugacagggauggucucccugaugcuccagaucggaaaccugauuucuaucuggguuagccacuccauccauacgggcaaucaacacaaggccgagccuauuucuaacaccaauuuccuuacagaaaaagcuguggccagcgugaagcuggcggggaacuccucucucuguccgaucaauggaugggcugucuacagcaaagacaacuccauuagaaucggcagcaagggggauguguuuguuauucgggagcccuucaucucuugcucccaucuggaaugucgcaccuuuuuccuuacacagggagcccugcucaaugacaagcacagcaacggcaccgugaaagauagaucuccucaucggacacugauguccugccccgucggcgaggccccuagccccuauaauucucgcuuugaauccguggcuuggagcgccuccgcuugucacgacgggaccucuuggcugacgauuggaaucagcggcccugauaacggggccguugcggugcucaaguacaauggaaucauuaccgacacaaucaaauccuggagaaacaauauucugcggacccaggagagcgagugcgccugugucaacggcucuugcuucacagugaugaccgaugggccguccaacggacaggcuagccacaagaucuuuaaaauggaaaagggcaagguggucaaaucuguugagcuugacgcccccaauuaucauuacgaagaguguagcugcuauccugaugcuggcgagauuacgugugugugccgcgacaacuggcacggguccaauagacccugggugucuuucaaccaaaaucugaaguaccagaucggauauaucugcagcggcgucuuuggggauaacccucggcccaaugacggaacaggcuccugugggccggugagcucuaacggagccuacggcguuaaaggcuucuccuuuaaguacgggaauggaguguggauuggccgcaccaaaagcacaaacucuagauccggguucgaaaugaucugggauccuaauggauggaccgagaccgacagcuccuuuucugucaagcaggacauuguggcgaucacagauuggagcggcuauuccgggucuuucguucagcaucccgaacucacgggccuggacugcauucggccuuguuucuggguggagcuuauccgcggaagacccaaagaaagcaccaucuggacauccggcagcucuauuuccuuuugcggggucaacagcgauaccgugggauggucuuggcccgacggcgccgagcugccuuucacaaucgauaaguga

SEQ ID NO: 207707 - RNA, 1350 nt, Artificial Sequence
  derived and/or modified CDS sequence (opt5) from neuraminidase__InfluenzaA__ABL67783
augaaccccaauaagaaaaucauuaccaucggcagcauuugcauggugacagggauggucucccugaugcuccagaucggaaaccugauuucuaucuggguuagccacuccauccauacgggcaaucaacacaaggccgagccuauuucuaacaccaauuuccuuacagaaaaagcuguggccagcgugaagcuggcggggaacuccucucucuguccgaucaauggaugggcugucuacagcaaagacaacuccauuagaaucggcagcaagggggauguguuuguuauucgggagcccuucaucucuugcucccaucuggaaugucgcaccuuuuuccuuacacagggagcccugcucaaugacaagcacagcaacggcaccgugaaagauagaucuccucaucggacacugauguccugccccgucggcgaggccccuagccccuauaauucucgcuuugaauccguggcuuggagcgccuccgcuugucacgacgggaccucuuggcugacgauuggaaucagcggcccugauuccggggccguugcggugcucaaguacaacggaaucauuaccgacacaaucaaaagcuggagaaauaacauucugcggacccaggagucugagugcgccugugucaauggcuccugcuucacagugaugaccgaugggccgagcaacggacaggcuucucacaagaucuuuaaaauggaaaagggcaagguggucaaaagcguugagcuugacgcccccaacuaucauuacgaagaguguuccugcuauccugaugcuggcgagauuacgugugugugccgcgacaauuggcacgggucuaacagacccugggugagcuucaaucaaaaccuggaauaccagaucggauauaucugcuccggcgucuuuggggauaauccucggcccaacgacggaacaggcagcugugggccggugucuuccaauggagccuacggcguuaagggcuucagcuuuaaauacgggaacggaguguggauuggccgcaccaagucuacaaauuccagaagcggguucgagaugaucugggauccuaacggauggaccgaaaccgacuccucuuuuagcgucaaacaggacauuguggcgaucacagauugguccggcuauucugggagcuucguucagcaucccgagcucacgggccuggacugcauucggccuuguuucuggguggaacuuauccgcggaagacccaaggaguccaccaucuggacaagcgggucuuccauuagcuuuugcggcgucaauucugauaccgugggaugguccuggcccgacggcgccgagcugccuuucacaaucgauaaauga

SEQ ID NO: 207708 - RNA, 1350 nt, Artificial Sequence
  derived and/or modified CDS sequence (opt5) from neuraminidase__InfluenzaA__ABL67796
augaaccccaauaagaaaaucauuaccaucggcagcauuugcauggugacagggauggucucccugaugcuccagaucggaaaccugauuucuaucuggguuagccacuccauccauacgggcaaucaacacaaggccgagccuauuucuaacaccaauuuccuuacagaaaaagcuguggccagcgugaagcuggcggggaacuccucucucuguccgaucaauggaugggcugucuacagcaaagacaacuccauuagaaucggcagcaagggggauguguuuguuauucgggagcccuucaucucuugcucccaucuggaaugucgcaccuuuuuccuuacacagggagcccugcucaaugacaagcacagcaacggcaccgugaaagauagaucuccucaucggacacugauguccugccccgucggcgaggccccuagccccuauaauucucgcuuugaauccguggcuuggagcgccuccgcuugucacgacgggaccucuuggcugacgauuggaaucagcggcccugauaacggggccguugcggugcucaaguacaauggaaucauuaccgacacaaucaaauccuggagaaacaauauucugcggacccaggagagcgagugcgccugugucaacggcucuugcuucacagugaugaccgaugggccguccaacggacaggcuagccacaagaucuuuaaaauggaaaagggcaagguggucaaaucuguugagcuugacgcccccaauuaucauuacgaagaguguagcugcuauccugaugcuggcgagauuacgugugugugccgcgacaacuggcacggguccaauagacccugggugucuuucaaccaaaaucuggaauaccagaucggauauaucugcagcggcgucuuuggggauaacccucggcccaaugacggaacaggcuccugugggccggugagcuacaacggagccuacggcguuaagggcuucucuuuuaaauaugggaauggaguguggauuggccgcaccaaguccacaaacagcagaucuggguucgagaugaucugggauccuaauggauggaccgaaaccgacuccagcuuuuccgucaaacaggacauuguggcgaucacagauuggucuggcuacagcggguccuucguucagcaucccgagcucacgggccuggacugcauucggccuuguuucuggguggaacuuauccgcggaagacccaaggagucuaccaucuggacaagcggcuccagcauuucuuuuugcggggucaacuccgauaccgugggauggagcuggcccgacggcgccgagcugccuuucacaaucgauaaauga

SEQ ID NO: 207709 - RNA, 1350 nt, Artificial Sequence
  derived and/or modified CDS sequence (opt5) from neuraminidase__InfluenzaA__ABL67807
augaaccccaauaagaaaaucauuaccaucggcagcauuugcauggugacagggauggucucccugaugcuccagaucggaaaccugauuucuaucuggguuagccacuccauccauacgggcaaucaacacaaggccgagccuauuucuaacaccaaucuucugacagaaaaagcuguggccagcgugaagcucgcggggaacuccucucuguguccgaucgacggaugggcugucuacagcaaagauaauuccauuagaaucggcagcaagggggacguguucguugugcgggagcccuuuauuucuugcucccaucuugaaugucgcaccuucuuucugacacagggagcccuccugaacgauaagcacagcaauggcaccgucaaagacagaucuccucaucggacacugauguccugccccgugggcgaggccccuagccccuauaacucucgcuucgaauccguugcuuggagcgccuccgcuugucacgaugggaccucuuggcucacgaucggaauuagcggcccugacaauggggccguggcgguccugaaguacaacggaaucaucaccgauacaauuaaauccuggagaaauaacauccuucggacccaggagagcgagugcgccugugugaauggcucuugcuuuacagugaugaccgacgggccguccaacggacaggcuagccacaagauuuucaaaauggaaaagggcaaggucguuaaaucuguggagcuggaugcccccaacuaucauuacgaagaguguagcugcuauccugacgcuggcgagaucacgugugugugccgcgauaauuggcacggguccaacagacccugggucucuuuuaaucaaaaccucgaauaccagauuggauauaucugcagcggcguguucggggacaauccucggcccaacgauggagccggcuccugugggccgguuagcucuaauggagcguacggcgugaagggcuuuuccuucaaauacgggaacggagucuggaucggccgcacaaagagcaccaauucuagauccggguuugagaugauuugggacccuaacggauggacagaaaccgacagcuccuucucugugaaacaggauaucguugccauuaccgacuggagcggcuauuccgggucuuuugugcagcaucccgagcugacaggccuugauugcauccggccuuguuucugggucgaacugauucgcggaagacccaaggagagcacgaucuggaccuccggcagcucuaucuccuucugcggggugaauagcgacacagucggauggucuuggcccgauggcgcugagcucccuuuuaccauugacaaauga

SEQ ID NO: 207710 - RNA, 1350 nt, Artificial Sequence
  derived and/or modified CDS sequence (opt5) from neuraminidase__InfluenzaA__ABL67818
augaaccccaauaagaaaaucauuaccaucggcagcauuugcauggugacagggauggucucccugaugcuccagaucggaaaccugauuucuaucuggguuagccacuccauccauacgggcaaucaacacaaggccgagccuauuucuaacaccaaucuucugacagaaaaagcuguggccagcgugaagcucgcggggaacuccucucuguguccgaucgacggaugggcugucuacagcaaagauaauuccauuagaaucggcagcaagggggacguguucguugugcgggagcccuuuauuucuugcucccaucuugaaugucgcaccuucuuucugacacagggagcccuccugaacgauaagcacagcaauggcaccgucaaagacagaucuccucaucggacacugauguccugccccgugggcgaggccccuagccccuauaacucucgcuucgaauccguugcuuggagcgccuccgcuugucacgaugggaccucuuggcucacgaucggaauuagcggcccugacaauggggccguggcgguccugaaguacaacggaaucaucaccgauacaauuaaauccuggagaaauaacauccuucggacccaggagagcgagugcgccugugugaauggcuauugcuuuacagugaugaccgacgggccgucuaacggacaggcuucccacaagauuuucaaaauggaaaagggcaaggucguuaaaagcguggagcuggaugcccccaacuaccauuaugaagaguguucuugcuacccugacgcuggcgagaucacgugugugugccgcgauaauuggcacgggagcaacagacccugggucuccuuuaaucaaaaccucgaauaucagauuggauacaucugcucuggcguguucggggacaauccucggcccaacgauggagccggcagcugugggccgguuuccagcaauggagcguacggcgugaagggcuuuucuuucaaauaugggaacggagucuggaucggccgcacaaaguccaccaauagcagaucuggguuugagaugauuugggacccuaacggauggacagaaaccgacuccagcuucuccgugaaacaggauaucguugccauuaccgacuggucuggcuacagcggguccuuugugcagcaucccgagcugacaggccuugauugcauccggccuuguuucugggucgaacugauucgcggaagacccaaggagucuacgaucuggaccagcggcuccagcaucucuuucugcggggucaauuccgacacagugggauggagcuggcccgauggcgcugagcucccuuuuaccauugacaaauga

SEQ ID NO: 207711 - RNA, 1350 nt, Artificial Sequence
  derived and/or modified CDS sequence (opt5) from neuraminidase__InfluenzaA__ABL67829
augaaccccaauaagaaaaucauuaccaucggcagcauuugcauggugacagggauggucucccugaugcuccagaucggaaaccugauuucuaucuggguuagccacuccauccauacgggcaaucaacacaaggccgagccuauuucuaacaccaaucuucugacagaaaaagcuguggccagcgugaagcucgcggggaacuccucucuguguccgaucaauggaugggcugucuacagcaaagacaacuccauuagaaucggcagcaagggggauguguucguugugcgggagcccuuuauuucuugcucccaucuugaaugucgcaccuucuuucugacacagggagcccuccugaaugacaagcacagcaacggcaccgucaaagauagaucuccucaucggacacugauguccugccccgugggcgaggccccuagccccuauaauucucgcuucgaauccguugcuuggagcgccuccgcuugucacgacgggaccucuuggcucacgaucggaauuagcggcccugauaacggggccguggcgguccugaaguacaauggaaucaucaccgacacaauuaaauccuggagaaacaauauccuucggacccaggagagcgagugcgccugugugaacggcuuuugcuucacagugaugaccgaugggccgucuaacggacaggcuucccacaagauuuuuaaaauggaaaagggcaaggucguuaaaagcguggagcuggacgcccccaauuaucauuacgaagaguguucuugcuauccugaugcuggcgagaucacgugugugugccgcgacaacuggcacgggagcaauagacccugggucuccuucaaccaaaaucucgaauaccagauuggauauaucugcucuggcguguuuggggauaacccucggcccaaugacggagccggcagcugugggccgguugcguccaacggagccuacggcgugaagggcuucagcuuuaaauacgggaauggagucuggaucggccgcacaaagucuaccaacuccagaagcggguucgagaugauuugggauccuaauggauggacagaaaccgacucuuccuuuagcgugaaacaggacaucguugcuauuaccgauugguccggcuauucugggagcuucgugcagcaucccgagcugacaggccuugacugcauccggccuuguuucugggucgaacugauucgcggaagacccaaggaguccacgaucuggaccucuggcagcuccaucagcuuuugcggggugaacucugauacagucggaugguccuggcccgacggcgccgagcucccuuucaccauugauaaauga

SEQ ID NO: 207712 - RNA, 1410 nt, Artificial Sequence; identical to SEQ ID NO: 206784
  derived and/or modified CDS sequence (opt5) from neuraminidase__InfluenzaA__ABM22018

SEQ ID NO: 207713 - RNA, 1413 nt, Artificial Sequence; identical to SEQ ID NO: 207628
  derived and/or modified CDS sequence (opt5) from neuraminidase__InfluenzaA__ABM22029

SEQ ID NO: 207714 - RNA, 1410 nt, Artificial Sequence; identical to SEQ ID NO: 206786
  derived and/or modified CDS sequence (opt5) from neuraminidase__InfluenzaA__ABM22040

SEQ ID NO: 207715 - RNA, 1410 nt, Artificial Sequence; identical to SEQ ID NO: 207693
  derived and/or modified CDS sequence (opt5) from neuraminidase__InfluenzaA__ABM22062

SEQ ID NO: 207716 - RNA, 1410 nt, Artificial Sequence
  derived and/or modified CDS sequence (opt5) from neuraminidase__InfluenzaA__ABM22073
augaaccccaaucagaagaucauuaccaucggcagcgugucccugacaauugccacgaucugcuuccucaugcaaauugcuauccuggucaccacaguuacccuucacuuuaaacaguacgaguguaacucuccuccgaauaaccaggugaugcugugcgaacccacaaucauugagagaaauaucaccgaaauuguguaucucacaaacaccacgaucgagaaggaaauuuguccuaaacuggccgaguaccggaauuggagcaagccccagugcaacaucaccggguucgcgccuuuuuccaaagacaauucuauucgccuuagcgcuggaggcgauaucugggucacaagagagcccuauguguccugugacccugauaagugcuaccaauucgcccuggggcagggaaccacacucaacaauggccauucuaacgacaccguucacgaucggacgccguaucgcacacugcugaugaaugaacucggggugcccuuuaaccugggaaccagacaggucuguaucgccuggagcuccagcucuugccaugacggcaaggcuuggcuucacguguguguuacaggcgaugacgagaaugccaccgcuuccuucauuuacaacgggaaacugguggauagcaucggaucuugguccaagaaaauucuccggacccaggaaagcgagugcgucuguaucaacggcacaugcgccguggugaugacggacgggucugcguccggaaaggccgauaccaaaauucuguuuaucgaggaaggcaagaucguccauauuagcacacuuuccgggucugcucaacacguugaggaaugcagcuguuauccucgcuaccccggagugagaugcgugugucgggacaauuggaagggcuccaaccgcccuaucgucgauauuaaugugaaagacuacagcaucguuucuuccuaugugugcagcggccuggucggggacacccccagaaagaacgauucuuucagcuccucucacugucucgacccgaauaacgaggaaggaggccauggggugaaaggaugggccuuugaugacggcaaugauguuuggauggggcggacaauuagcgagaagcugcgcuccggauacgagaccuucaaagugaucgaaggcuggagcaagccuaacucuaaacugcagacgaauagacaggucaucguggagcggggcaaccgcuccggguauagcggaaucuuuucugucgaaggcaaguccugcauuaauagauguuucuacguggagcucauucgggggagaaaggaagagacagagguuugguggaccagcaacuccaucguggucuuuugcggaaccucuggcacauaugggaccggcagcuggcccgacggagcugauauuaaucugaugccuaucuga

SEQ ID NO: 207717 - RNA, 1410 nt, Artificial Sequence; identical to SEQ ID NO: 206663
  derived and/or modified CDS sequence (opt5) from neuraminidase__InfluenzaA__ABM22084

SEQ ID NO: 207718 - RNA, 1410 nt, Artificial Sequence
  derived and/or modified CDS sequence (opt5) from neuraminidase__InfluenzaA__ABM22095
augaaccccaaucagaagaucauuaccaucggcagcgugucccugacaauugccacgaucugcuuccucaugcaaauugcuauccuggucaccacaguuacccuucacuuuaaacagcaugaguguaacucuccuccgaauaaccaggccaugcugugcgaacccacaaucauugagagaaauaucaccgaaauugugcaccucacaaacaccacgaucgagaaggaaauuuguccuaaacugguggaguaccggaauuggagcaagccccagugcaacaucaccggguucgcgccuuuuuccaaagacaauucuauucgccuuagcgcuggaggcgauaucugggucacaagagagcccuauguguccugugacccugauaagugcuaccaauucgcccuggggcagggaaccacacucaacaauggccauucuaacgacaccguucacgaucggacgccguaucgcacacugcugaugaaugaacucggggugcccuuucaucugggaaccagacaggucuguaucgccuggagcuccagcucuugccacgacggcaaggcuuggcuucacguguguguuacaggcgaugacaaaaacgccaccgcuuccuucauuuacaaugggcggcugguggauagcaucggaucuugguccaagaaaauucuccgcacccaggagagcgaaugcgucuguaucaacggcacaugcacgguggugaugaccgacgggucugccuccggaaaggcggauacaaaaauucuguuuaucgaggagggcaagaucguccauauuagcacccuuuccgggucugcccaacacguugaagagugcagcuguuauccuagauaccccggagugcggugcgugugucgcgacaacuggaagggcuccaauagaccuaucgucgauauuaacgugaaagacuauagcaucguuucuuccuacgugugcagcggccuggucggggacacaccccggaagaaugauucuuucagcuccucucauugucucgacccgaacaaugaagagggaggccacggggugaaaggaugggcuuuugaugacggcaacgauguuuggauggggcgcaccauuagcgaaaagcugagauccggauacgagacguucaaagugaucgagggcuggagcaagccuaauucuaaacugcagaucaaccggcaggucauuguggaacgcggcaauagauccggguauagcggaaucuuuucugucgagggcaaguccugcauuaaccgguguuucuacguggaacucaucagagggcgcaaggaggaaacagagguuugguggaccagcaauuccauuguggucuuuugcggaaccucuggcacauaugggaccggcagcuggcccgacggagccgauaucaaccugaugccuauuuga

SEQ ID NO: 207719 - RNA, 1410 nt, Artificial Sequence; identical to SEQ ID NO: 206663
  derived and/or modified CDS sequence (opt5) from neuraminidase__InfluenzaA__ABM22106

SEQ ID NO: 207720 - RNA, 1410 nt, Artificial Sequence; identical to SEQ ID NO: 206663
  derived and/or modified CDS sequence (opt5) from neuraminidase__InfluenzaA__ABM22117

SEQ ID NO: 207721 - RNA, 1410 nt, Artificial Sequence; identical to SEQ ID NO: 207674
  derived and/or modified CDS sequence (opt5) from neuraminidase__InfluenzaA__ABM22128

SEQ ID NO: 207722 - RNA, 1410 nt, Artificial Sequence
  derived and/or modified CDS sequence (opt5) from neuraminidase__InfluenzaA__ABM22139
augaaccccaaucagaagaucauuaccaucggcagcgugucccugacaauuucuacgaucugcuucuuuaugcaaauugccauccucaucaccacagucacccugcacuucaaacaguacgaguuuaacagcccuccgaauaaccagguuaugcuuugugaacccacaauuaucgagagaaauauuaccgaaaucguguaucugacaaacaccacgauugagaaggaaaucugcccuaaacucgcugaguaccggaauugguccaagccccaguguaacauuaccggguucgccccuuuuucuaaagacaauagcauccgccuguccgcgggaggcgauaucugggugacaagagagcccuaugucucuugcgacccugauaaguguuaccaauucgcucuugggcagggaaccacacugaacaaugugcauagcaacgacaccguucacgaucggacgccguaucgcacacuccugaugaaugaacugggcgugcccuuucaucucgggaccaagcaggucugcauugccugguccucuagcuccugucacgacggaaaagccuggcugcaugugugcguuacaggcgaugacaagaacgcuaccgccagcuucaucuacaauggcagacuuguggauucuauugucuccuggagcaaagagauccugcggacccaggaaucugagugugugugcauuaacgggacauguacgguggucaugaccgacggauccgcuagcgagaaggccgauacaaaaauccucuuuaucgaagagggcaagauuguucacaccuccacacugucugggagcgcgcaacacguggaagagugcuccugcuauccucgcuaccccggagugagaugugucugccgggacaacuggaagggcagcaaucgcccuaucguggauauuaacaucaaagacuacucuauuguuuccagcuauguguguucugggcuugucggagacacccccagaaagaaugauagcuccucuagcucccauugccuggacccgaacaaugaagagggcggccacggggugaaaggaugggccuucgaugacggcaacgauguuuggauggggcggacgaucagcgagaagcuccgcucuggauacgaaacauuuaaagugaucgagggcugguccaauccuaacagcaagcugcagauuaauagacaggucaucguggaccgggggaaccgcucuggauauuccggcauuuucagcgucgaaggcaaauccuguaucaauagaugcuuuuacguggagcugauucgggggagaaaggaagagaccgagguucucuggaccucuaacagcaucguggucuucuguggaacauccggcaccuaugggacaggaucuuggcccgauggcgcugacauuaaucugaugccuaucuga

SEQ ID NO: 207723 - RNA, 1410 nt, Artificial Sequence
  derived and/or modified CDS sequence (opt5) from neuraminidase__InfluenzaA__ABM22150
augaaccccaaucagaagaucauuaccaucggcagcgugucccugacaauuucuacgaucugcuucuuuaugcaaauugccauccucaucaccacagucacccugcacuucaaacaguacgaguuuaacagccuuccuaauaaccagguuaugcugugugaaccgacaauuaucgagagaaauauuaccgaaaucguguaucucacaaacaccacgauugagaaggaaaucugccccgagcuggcugaguaccggaauugguccaaaccucagugugacauuaccggguucgcccccuuuucuaaggauaacagcauccgccuuuccgcgggaggcgacaucugggugacaagagaaccuuaugucucuugcgaucccgacaaauguuaccaauucgcucuggggcagggaaccacacucaauaacgugcauagcaaugauaccguucacgaccggacgccuuaucgcacacugcugaugaacgagcucggcgugccguuucaucuggggaccaagcaggucugcauugccugguccucuagcuccugucacgauggaaaggccuggcuucaugugugcguuacaggcgacgauaaaaaugcuaccgccagcuucaucuacaacggcagacugguggacucuauugucuccuggagcaagaaaauccuccggacccaggaaucugagugugugugcauuaaugggacauguacgguggucaugaccgauggauccgcuagcggcaaggccgacacaaaaauccuguuuaucgaggaagggaagauuguucacaccuccacacuuucuggaagcgcgcaacacguggaggaaugcuccugcuauccccgcuacccuggcgugagaugugucugccgggauaacuggaaggggagcaaccgccccaucguggacauuaauaucaaagacuacucuauuguuuccagcuauguguguucuggacuggucggcgauaccccuagaaagaacgacagcuccucuagcucccauugccucgaucccaauaacgaggaaggcgggcacggagugaaaggcugggccuucgacgaugggaaugacguuuggaugggacggacgaucagcgagaagcugcgcucuggcuacgagacauuuaaagugaucgaagggugguccaacccgaauagcaagcugcagauuaacagacaggucaucguggaucggggaaaucgcucuggcuauuccggcauuuucagcgucgaggggaaauccuguaucaacagaugcuuuuacguggaacucauucggggaagaaaggaggaaaccgagguucuguggaccucuaauagcaucguggucuucuguggcacauccgggaccuauggaacaggcucuuggccugacggggcugauauuaaccuuaugcccaucuga

SEQ ID NO: 207724 - RNA, 1413 nt, Artificial Sequence; identical to SEQ ID NO: 207131
  derived and/or modified CDS sequence (opt5) from neuraminidase__InfluenzaA__ABM22161

SEQ ID NO: 207725 - RNA, 1413 nt, Artificial Sequence; identical to SEQ ID NO: 207131
  derived and/or modified CDS sequence (opt5) from neuraminidase__InfluenzaA__ABM22172

SEQ ID NO: 207726 - RNA, 1413 nt, Artificial Sequence; identical to SEQ ID NO: 207131
  derived and/or modified CDS sequence (opt5) from neuraminidase__InfluenzaA__ABM22183

SEQ ID NO: 207727 - RNA, 1413 nt, Artificial Sequence; identical to SEQ ID NO: 207131
  derived and/or modified CDS sequence (opt5) from neuraminidase__InfluenzaA__ABM22194

SEQ ID NO: 207728 - RNA, 1413 nt, Artificial Sequence; identical to SEQ ID NO: 207131
  derived and/or modified CDS sequence (opt5) from neuraminidase__InfluenzaA__ABM22205

SEQ ID NO: 207729 - RNA, 1413 nt, Artificial Sequence; identical to SEQ ID NO: 207131
  derived and/or modified CDS sequence (opt5) from neuraminidase__InfluenzaA__ABM22216

SEQ ID NO: 207730 - RNA, 1413 nt, Artificial Sequence; identical to SEQ ID NO: 207131
  derived and/or modified CDS sequence (opt5) from neuraminidase__InfluenzaA__ABM22227

SEQ ID NO: 207731 - RNA, 1413 nt, Artificial Sequence; identical to SEQ ID NO: 207131
  derived and/or modified CDS sequence (opt5) from neuraminidase__InfluenzaA__ABM22238

SEQ ID NO: 207732 - RNA, 1413 nt, Artificial Sequence
  derived and/or modified CDS sequence (opt5) from neuraminidase__InfluenzaA__ABM22271
augaaccccaaucagaagaucauuaccaucggcagcauuuccaucgugauugggaucaucucucugauucuccaaaucggaaacauuaucagcauuugggccucccacucuauccagacaggcagccagaaucauacggggauuugcaaccagagaaucaucaccuacgaaaauuccacaugggucaaccaaaccuauguuaauauuaacaauacaaacgugguggcuggaaaagacaagaccucuaugacacuggccggcaauagcucccuuuguccuauccgggggugggcgauuuacaccaaagauaacagcauccgcauuggaucuaagggcgacgucuucgugaucagagagccguuuaucuccugcagccaccuggagugucggacguucuuucucacccagggcgcucugcuuaaugauaaacauucuaacgggacaguuaaggaccgcucccccuauagagcccugaugagcugcccucucggagaagcccccucuccuuacaauucccgguucgagagcguggcuugguccgccucugcuugucacgauggccugggguggcugaccauuggaaucagcggccccgacaacggggccgucgcggugcucaaguauaacggaauuaucacagaaaccauuaaauccuggaagaaacgcauccugagaacgcaggagagcgagugcguuuguaugaauggcucuugcuuuacaaucaugaccgauggcccuuccaacggggccgcuagcuaccggauuuucaagaucgaaaaaggacgcgugacaaagucuauugagcuuggcgccccgaauuaucauuacgaagaguguagcugcuaccccgacaccgggaccgucaugugugugugcagagauaacuggcacggauccaaucggccuugggugucuuuuaaccagaaucuggacuaucaaaucggcuacauuugcagcggggucuucggagauaacccccgcccuaaggacggcgagggcuccuguaaucccguuacaguggauggggcugacggagugaaaggcuuuagcuauagauacgggaacggagucuggaucggccggacgaagucuaaucgccucagaaaaggguucgaaaugauuugggacccgaacggcuggaccgauacagacuccgauuuuagcaugaagcaggacaucguggccaugaccgauuggucuggauauuccggcagcuucguucagcacccugagcugacagggcuugacugcaugcggcccuguuuuuggguggaacuggucagaggacucccucgcgagaauaccacgaucuggacauccggcucuagcauuuccuucugcggggugaacucugauaccgcgaauuggagcuggcccgacggagccgaacugcccuucaccaucgauaaauga

SEQ ID NO: 207733 - RNA, 1413 nt, Artificial Sequence; identical to SEQ ID NO: 207040
  derived and/or modified CDS sequence (opt5) from neuraminidase__InfluenzaA__ABM22282

SEQ ID NO: 207734 - RNA, 1410 nt, Artificial Sequence; identical to SEQ ID NO: 206415
  derived and/or modified CDS sequence (opt5) from neuraminidase__InfluenzaA__ABM22304

SEQ ID NO: 207735 - RNA, 1410 nt, Artificial Sequence; identical to SEQ ID NO: 206415
  derived and/or modified CDS sequence (opt5) from neuraminidase__InfluenzaA__ABM22315

SEQ ID NO: 207736 - RNA, 1410 nt, Artificial Sequence; identical to SEQ ID NO: 206415
  derived and/or modified CDS sequence (opt5) from neuraminidase__InfluenzaA__ABM22326

SEQ ID NO: 207737 - RNA, 1410 nt, Artificial Sequence; identical to SEQ ID NO: 206415
  derived and/or modified CDS sequence (opt5) from neuraminidase__InfluenzaA__ABM22337

SEQ ID NO: 207738 - RNA, 1410 nt, Artificial Sequence; identical to SEQ ID NO: 206418
  derived and/or modified CDS sequence (opt5) from neuraminidase__InfluenzaA__ABM22348

SEQ ID NO: 207739 - RNA, 1410 nt, Artificial Sequence; identical to SEQ ID NO: 206418
  derived and/or modified CDS sequence (opt5) from neuraminidase__InfluenzaA__ABM22359

SEQ ID NO: 207740 - RNA, 1410 nt, Artificial Sequence; identical to SEQ ID NO: 206418
  derived and/or modified CDS sequence (opt5) from neuraminidase__InfluenzaA__ABM22370

SEQ ID NO: 207741 - RNA, 1413 nt, Artificial Sequence; identical to SEQ ID NO: 206997
  derived and/or modified CDS sequence (opt5) from neuraminidase__InfluenzaA__ABM66867

SEQ ID NO: 207742 - RNA, 1413 nt, Artificial Sequence; identical to SEQ ID NO: 207131
  derived and/or modified CDS sequence (opt5) from neuraminidase__InfluenzaA__ABM66900

SEQ ID NO: 207743 - RNA, 1413 nt, Artificial Sequence; identical to SEQ ID NO: 207131
  derived and/or modified CDS sequence (opt5) from neuraminidase__InfluenzaA__ABM66911

SEQ ID NO: 207744 - RNA, 1410 nt, Artificial Sequence; identical to SEQ ID NO: 206418
  derived and/or modified CDS sequence (opt5) from neuraminidase__InfluenzaA__ABM66922

SEQ ID NO: 207745 - RNA, 1410 nt, Artificial Sequence; identical to SEQ ID NO: 206418
  derived and/or modified CDS sequence (opt5) from neuraminidase__InfluenzaA__ABM66933

SEQ ID NO: 207746 - RNA, 1410 nt, Artificial Sequence; identical to SEQ ID NO: 206418
  derived and/or modified CDS sequence (opt5) from neuraminidase__InfluenzaA__ABM66944

SEQ ID NO: 207747 - RNA, 1410 nt, Artificial Sequence; identical to SEQ ID NO: 206418
  derived and/or modified CDS sequence (opt5) from neuraminidase__InfluenzaA__ABM66955

SEQ ID NO: 207748 - RNA, 1410 nt, Artificial Sequence; identical to SEQ ID NO: 206418
  derived and/or modified CDS sequence (opt5) from neuraminidase__InfluenzaA__ABM66966

SEQ ID NO: 207749 - RNA, 1410 nt, Artificial Sequence; identical to SEQ ID NO: 206418
  derived and/or modified CDS sequence (opt5) from neuraminidase__InfluenzaA__ABM66977

SEQ ID NO: 207750 - RNA, 1410 nt, Artificial Sequence; identical to SEQ ID NO: 206418
  derived and/or modified CDS sequence (opt5) from neuraminidase__InfluenzaA__ABM66988

SEQ ID NO: 207751 - RNA, 1410 nt, Artificial Sequence; identical to SEQ ID NO: 206418
  derived and/or modified CDS sequence (opt5) from neuraminidase__InfluenzaA__ABM66999

SEQ ID NO: 207752 - RNA, 1410 nt, Artificial Sequence; identical to SEQ ID NO: 206418
  derived and/or modified CDS sequence (opt5) from neuraminidase__InfluenzaA__ABM67010

SEQ ID NO: 207753 - RNA, 1410 nt, Artificial Sequence; identical to SEQ ID NO: 206418
  derived and/or modified CDS sequence (opt5) from neuraminidase__InfluenzaA__ABM67021

SEQ ID NO: 207754 - RNA, 1413 nt, Artificial Sequence
  derived and/or modified CDS sequence (opt5) from neuraminidase__InfluenzaA__ABM67054
augaaccccaaucagaagaucauuaccaucggcagcauuuccaucgccauugggacaaucucucugaugcuccaaaucggaaacaugauuagcaucugggcuucccacucuauucagacgggcagccagaaucauaccgggaucugcaaccagagaauuaucacauacgaaaauuccaccugggugaaccacacauaugucaauauuaacaauaccaacguuguggccggaaaagacaagacaucugugacccuggcgggcaauagcucccuuuguagcaucucugggugggcuaucuacacgaaagauaacuccauucggaucggaagcaagggcgacgucuucgugauucgcgagccuuuuaucucuugcucccaucuggaguguagaaccuucuuucucacacaaggcgcccugcuuaaugauaaacacagcaacgggaccguuaaggaccggucuccguaucgcgcccugauguccugcccccucggagaagcuccuagccccuacaauuccaaguucgagucuguggccuggagcgcuuccgccugucaugauggcaugggguggcugacaauuggaaucagcggcccugacaacggggcggucgccgugcugaaauauaacggaaucauuaccgaaacgaucaagucuuggaaaaagcggauucucagaacacaggaguccgagugcguuugugugaauggcagcugcuuuaccaucaugacagauggccccucuaacggggcugccagcuacaaaauuuucaagaucgaaaagggaaaagucaccaaguccaucgagcugaaugcuccuaacuuucacuaugaagaguguucuugcuacccggacaccggcacagugaugugugugugccgcgauaauuggcacgggagcaacagacccugggucuccuucaaucagaaccuugacuaccagauuggauauaucugcagcggcguuuuuggggauaauccucggcccaaagacggaaagggcucuuguaacccugugacgguggauggcgccgacggggucaaaggauucuccuacaaguauggcaaugggguguggauuggacgcaccaaaagcaacagacugcggaagggcuuugagaugaucugggaccccaauggguggacagauaccgacucugauuucuccguuaagcaagacguggucgcgauuacagauuggagcggcuacuccggaucuuuugugcagcauccggaacucaccggccuggacugcauccgcccuuguuucuggguugagcuugugagagggcugccccgggaaaacacgacaauuuggaccagcggauccucuaucagcuucugcggcgucgauuccgacaccgccaauuggagcuggccugauggggcugagcuccccuuuacaaucgacaaauga

SEQ ID NO: 207755 - RNA, 1350 nt, Artificial Sequence
  derived and/or modified CDS sequence (opt5) from neuraminidase__InfluenzaA__ABM68048
augaaccccaaucagaagaucauuaccaucggcagcauuugcauggugaucgggauugucucccugaugcuccaaaucggaaacaucauuucuaucuggauuagccacuccauccagacaggcaaucagugucaggccgggccuauuucuaacacgaaauuccugaccgagaaggcuguugccagcgugacacuugcgggaaauuccucucugugcccgaucagcggcugggcuguguacuccaaagacaacagcauuagaaucgggucucggggagaugucuuugugauccgcgaauccuucauuagcuguucucaucucgagugcagaaccuuuuuccugacacaaggcgcccuucugaaugacaagcacuccaacggcaccguuaaagaucggagcccccaucgcacacucaugucuuguccugugggggaagcccccuccccuuauaauagcagauuugaguccgucgcuuggucugccagcgcuugccacgacggaaccuccuggcugacgaucggcauuagcgggcccgauaacggagccguggcgguucugaaguacaauggcaucauuaccgacacaaucaagucuuggcggaacaauauccuccgcacccaggaauccgagugugccugcgugaacgggagcuguuucacagucaugaccgauggaccuucuaauggccaggcuagcuauaaaauuuuuaagauggagaaaggcaagguggugaaauccgucgaacuggacgccccgaacuaccauuaugaggaaugcucuuguuaccccgaugcuggggagaucacgugcguuugcagagacagcuggcacggauccaaccggccuugggugagcuucaaucagaaccuugaguaucaaauuggcuacaucuguucugggguguuuggagauaauccccgcccuaacgacggcacaggguccugcggacccgucagcccgaauggcgccuacggcgugaagggguucucuuuuaaguauggaaacggcguuuggauugggagaaccaaauccacaaauagccgguccggauucgaaaugaucugggauccuaacggcuggaccgggaccgacucuagcuuuuccgugaagcaggacaucgucgcgauuacagauuggucuggcuacagcggauccuucgugcagcaccccgagcugacgggccucgacuguauccgcccuugcuucuggguugaacugauuagagggcggcccaaagagagcaccaucuggacaucuggauccagcauuucuuuuuguggcgucaauuccgauaccgugagcuggucuuggcccgacggggccgaacuuccuuucacaaucgauaaguga

SEQ ID NO: 207756 - RNA, 1350 nt, Artificial Sequence
  derived and/or modified CDS sequence (opt5) from neuraminidase__InfluenzaA__ABM68049
augaaccccaaucagaagaucauuaccaucggcagcauuugcauggugaucgggauugucucccugaugcuccaaaucggaaacaucauuucuaucuggauuagccacuccauccagacaggcaaucagugucaggccgagccuauuucuaacacgaaauuccugaccgaaaaggcuguugccagcgugacacuugcgggaaauuccucucugugcccgaucagcgggugggcuguguacuccaaagacaacagcauuagaaucggcucucgcggggaugucuuugugauccgggagcccuucauuuccuguagccaucucgaaugcagaaccuuuuuccugacacaaggagcccuucugaaugacaagcacucuaacggcaccguuaaagaucgguccccucaucgcacacucaugagcugucccgugggcgaggccccuucucccuauaauuccagauuugaaagcgucgcuugguccgccucugcuugccacgacgggaccagcuggcugacgaucggaauuuccggcccugauaacggggccguggcgguucugaaguacaauggaaucauuaccgacacaaucaagagcuggcggaacaauauccuccgcacccaggagucugagugugccugcgugaacggcuccuguuucacagucaugaccgaugggccgagcucuggacaggcuagcuauaaaauuuuuaagauggaaaaaggcaagguggugaaauccgucgagcuggacgcccccaauuaccauuaugaagagugcucuuguuacccugaugcuggcgagaucacgugcguuugcagagacagcuggcacggguccaaccggcccugggugagcuucaaccagaaucuugaauaucaaauuggauacaucuguucuggcguguuuggggauaacccucgccccaaugacggaacaggcuccugcgggccggucagcccuaacggagccuacggcgugaagggcuucucuuuuaaguaugggaauggaguuuggauuggcagaaccaaauccacaaacagccgguccggguucgagaugaucugggaucccaauggauggaccggcaccgacucuagcuuuuccgugaagcaggacaucgucgcgauuacagauuggucuggguacagcggcuccuucgugcagcacccugaacugacgggacucgacuguauccgccccugcuucuggguugagcugauuagaggccggcccaaagaaagcaccaucuggacaucuggguccagcauuucuuuuuguggagugaacuccgauaccgucagcuggucuuggccugacggcgccgagcuuccguucacaaucgauaaguga

SEQ ID NO: 207757 - RNA, 1350 nt, Artificial Sequence
  derived and/or modified CDS sequence (opt5) from neuraminidase__InfluenzaA__ABM90436
augaaccccaaucagaagaucauuaccaucggcagcauuugcauggugaucgggauugucucccugaugcuccaaaucggaaacaugaucucuauuuggguuagccacuccauccagaaaggcaaucagcaucaggccgagucuauuagcaacacaaauccucugacggaaaaggcuguggccuccgugacccuugcggggaacucuagccuguguccgaucagaggaugggcuguccacuccaaagacaauaacauucggaucggcagcaagggggauguguucguuauucgcgagcccuuuaucucuugcucccaucucgaauguagaacauucuuucugacccaaggagcccuucugaaugacaaacacagcaacggcacagugaaggaucggucuccucaucgcacccucauguccugccccgucggcgaggccccuagccccuacaauucuagauucgaauccguggcuuggagcgccuccgcuugucacgacgggacaucuuggcugaccaucggaauuagcggcccugauaacgaggccguugcggugcugaaguauaaugggaucauuacggacaccaucaaauccuggcggaacaauauucuccgcacacaggagagcgaaugcgccugugucaacggaucuugcuuuaccgugaugacagauggcccguccaacgggcaggcuagcuacaagaucuucaaaaugaagaaaggaaagguggucaagucuguugagcuggacgcccccaauuaucacuacgaagaguguagcugcuauccugaugcuggcgagaucaccugugugugcagagacaacuggcauggcuccaaucggcccugggugucuuuuaaccagaaucuugaauaccaaauuggguauaucugcagcggagucuucggcgauaacccucgccccaaugacgggacgggauccuguggcccgaugagcccuaacggggccuacggagugaaaggcuuuucuuucaaguacggcaaugggguuuggauuggaagaacaaaauccaccaacagccggucuggcuuugagaugaucugggaucccaauggguggacaggaaccgacuccagcuucuccgugaagcaggacauugucgcgaucaccgauuggucuggcuauagcggguccuuugugcagcacccugaacugacaggccucgacugcauccgccccuguuucuggguugagcugauuagaggacggcccaaagaaucuacgaucuggaccagcggcuccagcauuucuuucugcggggugaacuccgauacagucagcuggucuuggccugacggagccgagcuuccguuuaccaucgauaaguga

SEQ ID NO: 207758 - RNA, 1350 nt, Artificial Sequence; identical to SEQ ID NO: 207757
  derived and/or modified CDS sequence (opt5) from neuraminidase__InfluenzaA__ABM90447

SEQ ID NO: 207759 - RNA, 1350 nt, Artificial Sequence; identical to SEQ ID NO: 207757
  derived and/or modified CDS sequence (opt5) from neuraminidase__InfluenzaA__ABM90458

SEQ ID NO: 207760 - RNA, 1350 nt, Artificial Sequence; identical to SEQ ID NO: 207757
  derived and/or modified CDS sequence (opt5) from neuraminidase__InfluenzaA__ABM90469

SEQ ID NO: 207761 - RNA, 1350 nt, Artificial Sequence
  derived and/or modified CDS sequence (opt5) from neuraminidase__InfluenzaA__ABM90491
augaaccccaaucagaagaucauuaccaucggcagcauuugcauggugaucgggauugucucccugaugcuccaaaucggaaacaugaucucuauuuggguuagccacuccauccagaaaggcaaucagcaucaggccgagucuauuagcaacacaaauccucugacggaaaaggcuguggccuccgugacccuugcggggaacucuagccuguguccgaucagaggaugggcuguccacuccaaagacaauaacauucggaucggcagcaagggggauguguucguuauucgcgagcccuuuaucucuugcucccaucucgaauguagaacauucuuucugacccaaggagcccuucugaaugacaaacacagcaacggcacagugaaggaucggucuccucaucgcacccucauguccugccccgucggcgaggccccuagccccuacaauucuagauucgaauccguggcuuggagcgccuccgcuugucacgacgggacaucuuggcugaccaucggaauuagcggcccugauaacgaggccguugcggugcugaaguauaaugggaucauuacggacaccaucaaauccuggcggaacaauauucuccgcacacaggagagcgaaugcgccugugucaacggaucuugcuuuaccgugaugacagauggcccguccaacgggcaggcuagcuacaagaucuucaaaaugaagaaaggaaaggugaucaagucugucgagcuggacgccaccaauuaucacuacgaagaguguagcugcuaucccgaugcuggcgagauuacguguguuugcagagacaacuggcauggcuccaaucggccuugggugucuuuuaaccagaaucuugaauaccaaaucggguauauuugcagcggaguguucggcgauaacccccgcccuaaugacgggacaggauccuguggccccaugagcccgaacggggccuacggagucaaaggcuuuucuuucaaguacggcaaugggguguggaucggaagaaccaaauccacaaacagccggucuggcuuugagaugauuugggauccuaauggguggaccggaaccgacuccagcuucuccguuaagcaggacaucguggcgaucacagauuggucuggcuauagcggguccuuuguccagcaccccgaacugacgggccucgacugcauucgcccuuguuucuggguggagcugaucagaggacggcccaaagaaucuaccauuuggacaagcggcuccagcaucucuuucugcgggguuaacuccgauaccgugagcuggucuuggcccgacggagccgagcuuccuuuuacaauugauaaguga

SEQ ID NO: 207762 - RNA, 1350 nt, Artificial Sequence; identical to SEQ ID NO: 207761
  derived and/or modified CDS sequence (opt5) from neuraminidase__InfluenzaA__ABM90502

SEQ ID NO: 207763 - RNA, 1350 nt, Artificial Sequence
  derived and/or modified CDS sequence (opt5) from neuraminidase__InfluenzaA__ABM90524
augaaccccaaucagaagaucauuaccaucggcagcauuugcauggugaucgggauugucucccugaugcuccaaaucggaaacaugaucucuauuuggguuagccacuccauccagacaggcaaucagcaucaggccgagucuauuagcaacacgaauccucugaccgaaaaagcugugguguccgucacacuugccgggaacucuagccuguguccgaucagaggaugggcggugcacuccaaggacaauaacauucggaucggcagcaaaggggauguuuucgugauucgcgagcccuuuaucucuugcucccaucucgaauguagaaccuucuuucugacacaaggagcccuucugaaugacaagcacagcaacggcaccgucaaagaucggucuccucaucgcacacucauguccugccccgugggcgaggcuccuagccccuacaauucuagauucgaauccguugccuggagcgcuuccgccugucacgacgggaccucuuggcugacgaucggaauuagcggcccugauaacgaggcuguggccguccugaaguauaaugggaucauuaccgacacaaucaaguccuggcggaacaauauucuccgcacccaggagagcgaaugcgcgugugugaacggaucuugcuuuacagugaugaccgauggcccguccaacgggcaggccagcuacaaaaucuucaagauggagaaaggaaaggucguuaaaucuguggaacuggacgcucccaauuaucacuacgaggaguguagcugcuauccugaugccggcgaaaucacgugugugugcagagacaacuggcauggcuccaaucggcccugggucucuuuuaaccagaaucuugaguaccaaauuggguauaucugcagcggaguguucggcgauaacccucgccccaaugacgggacaggauccuguggcccgaugagcccuaacggggcuuacggaguuaagggcuuuucuuucaaguacggcaaugggguguggauuggaagaaccaaauccacaaacagccggucuggcuuugaaaugaucugggaucccaauggguggaccggaaccgacuccagcuucuccgucaagcaggacauuguggccaucacagauuggucuggcuauagcggguccuuuguucagcacccugagcugacgggccucgacugcauccgccccuguuucuggguggaacugauuagaggacggcccaaagagucuaccaucuggacaagcggcuccagcauuucuuucugcggggucaacuccgauaccgugagcuggucuuggccugacggagcggagcuuccguuuacaaucgauaaguga

SEQ ID NO: 207764 - RNA, 1350 nt, Artificial Sequence; identical to SEQ ID NO: 207763
  derived and/or modified CDS sequence (opt5) from neuraminidase__InfluenzaA__ABM90535

SEQ ID NO: 207765 - RNA, 1350 nt, Artificial Sequence; identical to SEQ ID NO: 207763
  derived and/or modified CDS sequence (opt5) from neuraminidase__InfluenzaA__ABM90546

SEQ ID NO: 207766 - RNA, 1413 nt, Artificial Sequence
  derived and/or modified CDS sequence (opt5) from neuraminidase__InfluenzaA__ABN50759
augaaccccaaucagaagaucauuaccaucggcagcauuugcauggccaucgggauuaucucccugauccuccaaauuggaaacaucauuucuaucugggugagccacuccauucagacaggcucucagaaucauacggggaucuguaaccagagaauuaucaccuacgagaauagcacaugggucaaccaaaccuauguuaauaucuccaacacaaaugugguggcuggaaaagacaccacaucuaugacccuggccggcaacagcucccuuugcccuauucgggggugggcgaucuacagcaaggauaauucuauucgcaucggauccaaaggcgacgucuucgugauuagagaaccguuuaucagcuguucucaccuggagugccggacguucuuucucacccagggcgcucugcuuaacgauaagcauuccaaugggacaguuaaagaccgcagccccuauagagcccugaugucuuguccuaucggagaagcccccuccccuuacaacagccgguucgaguccguggcuuggucugccagcgcuugccacgauggcaugggguggcucaccauuggaaucuccggccccgacgauggggccgucgcggugcugaaguauaauggaauuaucacagaaaccauuaagagcuggcgcaaacagauccugagaacgcaggagucugaguguguuugcgugaacggcuccuguuuuacaaucaugaccgacggcccuagcgaugggcaagccucuuaccggauuuucaagaucgaaaaaggaaagauuacaaaaagcaucgagcucgacgcuccgaacucccauuaugaagagugcucuuguuaccccgauaccggcaccgucaugugcgugugccgcgacaauuggcacgggagcaacagaccuuggguguccuuuaaucagaaccuggauuaccagauuggauauaucuguagcggcgucuucggggacaauccccggccuaaggacggaaagggcucuugcgaucccguuaacguggacggcgccgauggggugaaaggauuuuccuaccgcuauggcaauggggucuggauuggaagaacaaagagcaacucuucccggaaaggcuucgagaugaucugggacccgaauggguggacggauaccgacagcaacuuucuugugaagcaggauguuguggcuaugacagacugguccggcuacucuggcagcuucguccaacacccugaacugaccggacucgauuguauccgccccugcuuuuggguggagcugauuagagggcggccuagagagaaaacaaccaucuggacguccggaucuagcauuuccuucuguggcguuaauagcgacacagugaacuggucuuggcccgauggggccgaacuucccuucaccaucgacaaguga

SEQ ID NO: 207767 - RNA, 1410 nt, Artificial Sequence
  derived and/or modified CDS sequence (opt5) from neuraminidase__InfluenzaA__ABN50770
augaaccccaaucagaagaucauuaccaucggcagcgugucccugacaauuucuacgaucugcuucuuuaugcaaauugccauccucaucaccacagucacccugcacuucaaacaguacgaguuuaacagcccuccgaauaaccagguuaugcuuugugaacccacaauuaucgagagaaauauuaccgaaaucguguaucugacaaacaccacgauugagaaggaaaucugcccuaaacucgcugaguaccggaauugguccaagccccagugugacauuaccggguucgccccuuuuucuaaagauaacagcauccgccuguccgcgggaggcgacaucugggugacaagagagcccuaugucucuugcgauccugacaaguguuaccaauucgcucuugggcagggaaccacacugaauaacgugcauagcaaugauaccguucacgaccggacgccguaucgcacacuccugaugaacgaacugggcgugcccuuucaucucgggaccaagcaggucugcauugccugguccucuagcuccugucacgauggaaaagccuggcugcaugugugcguuacaggcgacgauaagaaugcuaccgccagcuucaucuacaacggcagacuuguggacucugucguguccuggagcaaaaagauucugcggacccaggagucugaaugugugugcaucaaugggacauguacggucguuaugaccgauggauccgcuagcggcaaagccgacacaaagauucucuuuaucgaggaggggaagaucgugcacaccuccacacugucuggaagcgcgcaacacguggaagagugcuccugcuauccucgcuaccccggcgucagaugugugugccgggauaacuggaaagggagcaaccgcccuauuguugacaucaauauuaaggacuacucuaucguguccagcuaugucuguucuggacuugugggcgauacccccagaaagaacgacagcuccucuagcucccauugccuggauccgaauaacgaagagggcgggcacggaguuaaaggcugggccuucgacgaugggaaugacguguggaugggacggacgauuagcgaaaaacuccgcucuggcuacgagacauuuaaggucaucgaggggugguccaacccuaauagcaaacugcagaucaacagacaggugauugucgaucggggaaaucgcucuggcuauuccggcaucuucagcguggaagggaaguccuguauuaacagaugcuuuuacguugagcugauccggggaagaaaggaagagaccgaagugcucuggaccucuaauagcauugucguguucuguggcacauccgggaccuauggaacaggcucuuggcccgacggggcugauaucaaccugaugccuauuuga

SEQ ID NO: 207768 - RNA, 1413 nt, Artificial Sequence
  derived and/or modified CDS sequence (opt5) from neuraminidase__InfluenzaA__ABN50903
augaaccccaaucagaagaucauuaccaucggcagcauuugcauggccaucgggauuaucucccugauccuccaaauuggaaacaucauuucuaucugggugagccacuccauucagacaggcucucagaaucauacggggaucuguaaccagagaauuaucaccuacgagaauagcacaugggucaaccaaaccuauguuaauaucaacaauacaaacgugguggcuggaaaagacaccacauccgucacccuggccggcaauucuagccuuugcccugugcgggggugggcgauuuacuccaaggauaacagcauccgcauuggaucuaaaggcgacguuuucgugaucagagaaccguuuauuuccuguagccaccuggagugccggacguucuuucucacccagggcgcucugcuuaaugauaagcauucuaacgggacagucaaagaccgcucccccuauagagcccugaugagcuguccuaucggagaagcccccucuccuuacaauucccgguucgagagcguggcuugguccgccucugcuugccacgauggcaugggguggcucaccaucggaauuagcggccccgacgauggggccguugcggugcugaaguauaacggaaucauuacagaaaccaucaaguccuggcgcaaacggauucugagaacgcaggagagcgagugugucugcgugaacggcucuuguuuuacaaucaugaccgacggcccuuccaaugggccggccagcuaccgcaucuucaagauugaaaaaggaaagaucacaaaaucuauugagcucgaugcucccaacagccauuaugaagagugcuccuguuacccugacaccggcaccgugaugugcgucugcagagauaauuggcacgggucuaaccggcccuggguuagcuuuaaucagaaccuggacuaccaaaucggauauauuuguuccggcguguucggggauaauccucgccccaaggacggaaagggcagcugcggcccggugacagucgacggggccgauggagugaaaggcuuuucuuacagauaugggaacggaguuuggaucggccggacgaaguccaauagcucucgcaaaggguucgagaugauuugggacccuaacggcuggaccgauacagacuccaauuuucuugugaagcaggaugucguggcuaugaccgacuggagcggauacuccggcucuuucauccagcaccccgaacugacagggcucgauuguaugagaccuugcuuuuggguugagcugauccggggaagaccccgcgagaaaaccacgauuuggacaagcggcuccucuaucagcuucuguggggugaacuccgacaccgucaauuggagcuggcccgauggagccgaacuuccuuucaccauugacaaguga

SEQ ID NO: 207769 - RNA, 1413 nt, Artificial Sequence; identical to SEQ ID NO: 207131
  derived and/or modified CDS sequence (opt5) from neuraminidase__InfluenzaA__ABN50920

SEQ ID NO: 207770 - RNA, 1413 nt, Artificial Sequence
  derived and/or modified CDS sequence (opt5) from neuraminidase__InfluenzaA__ABN50931
augaaccccaaucagaagaucauuaccaucggcagcauuugcauggccaucgggauuaucucccugauccuccaaauuggaaacaucgugucuauuuggaucagccacuccauucagacaggcucucagaauuacacggggaucuguaaccagagaauuaucaccuaugagaauagcacaugggucaaccaaaccuacguuaauaucaacaauacaaacgugguggcuggacaggacaccacauccgucgcccuggcgggcaauucuagccuuugcccuauuuccgggugggcuaucuauagcaaagauaacucuauucggaucggauccaagggcgacguguucguuauucgcgaaccguuuaucagcuguucucaucuggagugcagaaccuucuuucucacgcagggcgcccugcuuaaugauaaacacuccaacgggaccgugaaggaccggagccccuaccgcgcccugaugucuuguccuaucggagaagcucccuccccuuauaauagcagauucgaguccgucgccuggucugcuagcgccugccaugauggcaugggguggcucacaauuggaaucuccggccccgacgauggggcgguggccguucugaaauacaacggaauuaucaccgaaacaauuaagagcuggcggaagcgcauccugagaacccaggagucugagugugugugcgucaacggcuccuguuuuacgaucaugacagacggcccuaauaacgggccggcuagcuauaaaauuuucaagaucgaaaaaggaaagauuaccaaaucuaucgagcucgaugcccccaauagccacuacgaagagugcuccuguuacccugacgcuggcacagugaugugcgugugccgggauaacuggcaugggucuaaucgccccugggucagcuuuaaccaaaaucuggacuaucagauuggauacaucuguuccggcguuuucggggauaacccuagacccaaggacggaaagggcagcugcggcccggugaccguggacggggccgauggagucaaaggcuuuucuuaucgguacgggaauggaguguggauuggccgcaccaaguccaacagcucuagacggggguucgagaugaucugggacccuaauggcuggacagauacggacuccaaauuucuuguuaagcaggauguggucgcgaucaccgacuggagcggauauuccggcucuuucgugcagcaccccgaacugacagggcucgauuguaugcgcccuugcuuuuggguugagcugauuagaggacggcccagagaaaacaccacaaucuggaccagcggcuccucuauuagcuucuguggggugaauggagacacggccaacugguccuggcccgauggcgcugagcuuccuuucacaaucgacaaauga

SEQ ID NO: 207771 - RNA, 1413 nt, Artificial Sequence
  derived and/or modified CDS sequence (opt5) from neuraminidase__InfluenzaA__ABN50943
augaaccccaaucagaagaucauuaccaucggcagcauuugcauggccaucgggauuaucucccugauccuccaaauuggaaacaucgugucuauuuggaucagccacuccauucagacaggcucucagaauuacacggggaucuguaaccagagaauuaucaccuaugagaauagcacaugggucaaccaaaccuacguuaauaucaacaauacaaacgugguggcuggacaggacaccacauccgucgcccuggcgggcaauucuagccuuugcccuauuuccgggugggcuaucuauagcaaagauaacucuauucggaucggauccaagggcgacguguucguuauucgcgaaccguuuaucagcuguucucaucuggagugcagaaccuucuuucucacgcagggcgcccugcuuaaugauaaacacuccaacgggaccgugaaggaccggagccccuaccgcgcccugaugucuuguccuaucggagaagcucccuccccuuauaauagcagauucgaguccgucgccuggucugcuagcgccugccaugauggcaugggguggcucacaauuggaaucuccggccccgacgauggggcgguggccguucugaaauacaacggaauuaucaccgaaacaauuaagagcuggcggaagcgcauccugagaacccaggagucugagugugugugcgucaacggcuccuguuuuacgaucaugacagacggcccuaauaacgggccggcuagcuauaaaauuuucaagaucgaaaaaggaaagauuaccaaaucuaucgagcucgaugcccccaauagccacuacgaagagugcuccuguuacccugacgcuggcacagugaugugcgugugccgggauaacuggcaugggucuaaucgccccugggucagcuuuaaccaaaaucuggacuaucagauuggauacaucuguuccggcguuuucggggauaacccuagacccaaggacggaaagggcagcugcggcccggugaccguggacggggccgauggagucaaaggcuuuucuuaucgguacgggaauggaguguggauuggccgcaccaaguccaacagcucuagacggggguucgagaugaucugggacccuaauggcuggacagauacggacuccaaauuucuuguuaagcaggauguggucgcgaugaccgacuggagcggauauuccggcucuuucgugcagcaccccgaacugacagggcucgauuguaugcgcccuugcuuuuggguugagcugaucagaggacggcccagagaaaacaccacaauuuggaccagcggcuccucuaucagcuucuguggggugaauggagacacggccaacugguccuggcccgauggcgcugagcuuccuuucacaauugacaaauga

SEQ ID NO: 207772 - RNA, 1413 nt, Artificial Sequence; identical to SEQ ID NO: 207040
  derived and/or modified CDS sequence (opt5) from neuraminidase__InfluenzaA__ABN50954

SEQ ID NO: 207773 - RNA, 1413 nt, Artificial Sequence; identical to SEQ ID NO: 207040
  derived and/or modified CDS sequence (opt5) from neuraminidase__InfluenzaA__ABN50965

SEQ ID NO: 207774 - RNA, 1413 nt, Artificial Sequence; identical to SEQ ID NO: 207040
  derived and/or modified CDS sequence (opt5) from neuraminidase__InfluenzaA__ABN50976

SEQ ID NO: 207775 - RNA, 1410 nt, Artificial Sequence; identical to SEQ ID NO: 206415
  derived and/or modified CDS sequence (opt5) from neuraminidase__InfluenzaA__ABN50987

SEQ ID NO: 207776 - RNA, 1410 nt, Artificial Sequence; identical to SEQ ID NO: 206418
  derived and/or modified CDS sequence (opt5) from neuraminidase__InfluenzaA__ABN50998

SEQ ID NO: 207777 - RNA, 1410 nt, Artificial Sequence
  derived and/or modified CDS sequence (opt5) from neuraminidase__InfluenzaA__ABN51013
augaaccccaaucagaagaucauuaccaucggcagcgugucccugacaauuucuacgaucugcuucuuuaugcaaauugccauccucaucaccacagucacccugcacuucaaacaguacgaguuuaacagcccuccgaauaaccagguuaugcuuugugaacccacaauuaucgagagaaauauuaccgaaaucguguaucugacaaacaccacgauugagaaggaaaucugcccuaaacucgcugaguaccggaauugguccaagccccaguguaacauuaccggguucgccccuuuuucuaaagacaauagcauccgccuguccgcgggaggcgauaucugggugacaagagagcccuaugucucuugcgacccugauaaguguuaccaauucgcucuugggcagggaaccacacugaacaaugugcauagcaacgacaccguucacgaucggacgccguaucgcacacuccugaugaaugaacugggcgugcccuuucaucucgggaccaagcaggucugcauugccugguccucuagcuccugucacgacggaaaagccuggcugcaugugugcguuacaggcgaugacaagaacgcuaccgccagcuucaucuacaauggcagacuuguggauucuauugucuccuggagcaaagagauccugcggacccaggaaucugagugugugugcauuaacgggacauguacgguggucaugaccgacggauccgcuagcggcaaggccgauacaaaaauccucuuuaucgaggaagggaagauuguucacaccuccacacugucuggaagcgcgcaacacguggaggaaugcuccugcuauccucgcuaccccggcgugagaugugucugccgggacaacuggaaggggagcaaucgcccuaucguggauauuaacaucaaagacuacucuauuguuuccagcuauguguguucuggacuugucggcgacacccccagaaagaaugauagcuccucuagcucccugugccucgacccgaacaaugaggaaggcgggcauggagugaaaggcugggccuucgaugacgggaacgauguuuggaugggacggacgaucagcgagaagcugcgcucuggcuacgagacauuuaaagugaucgaagggugguccaauccuaacagcaagcugcagauuaauagacaggucaucguggaccggggaaaccgcucuggcuauuccggcauuuucagcgucgaggggaaauccuguaucaauagaugcuuuuacguggaacucauucggggaagaaaggaggaaaccgagguucuguggaccucuaacagcaucguggucuucuguggcacauccgggaccuauggaacaggcucuuggcccgauggggcugacauuaaucuuaugccuaucuga

SEQ ID NO: 207778 - RNA, 1410 nt, Artificial Sequence
  derived and/or modified CDS sequence (opt5) from neuraminidase__InfluenzaA__ABN51024
augaaccccaaucagaagaucauuaccaucggcagcgugucccugacagucucuacgauuugcuucuuuaugcaaaucgccauucucaucaccacaguuacccugcacuucaaacaguacgaguuuaacagcccuccgaauaaccaggugaugcuuugugaacccacaaucauugagagaaauaucaccgaaauuguguaucugacaaacaccacgaucgagaaggaaauuugcccuaaacucgcugaguaccggaauugguccaagccccaguguaacaucaccggguucgccccuuuuucuaaagacaauagcauucgccuguccgcgggaggcgauaucugggucacaagagagcccuaugugucuugcgacccugauaaguguuaccaauucgcucuugggcagggaaccacacugaacaauguucauagcaacgacaccgugcacgaucggacgccguaucgcacacuccugaugaaugaacugggcguccccuuucaucucgggaccaaacaggugugcaucgccugguccucuagcuccugucacgacggaaaggccuggcugcauguuugcgugacaggcgaugacaagaacgcuaccgccagcuucauuuacaauggcagacuugucgauucuaucguguccuggagcaaagagauucugcggacccaggaaucugagugugugugcaucaacgggacauguacggucguuaugaccgacggauccgcuagcggcaaggccgauacaaaaauucucuuuaucgaggaagggaagaucgugcacaccuccacacugucuggaagcgcgcaacacguggaggaaugcuccugcuauccucgcuaccccggcgucagaugugugugccgggacaacuggaaggggagcaaucgcccuauuguugauaucaacauuaaagacuacucuaucguguccagcuaugucuguucuggacuugugggcgacacccccagaaagaaugauagcuccucuagcucccauugccuggacccgaacaaugaggaaggcgggcacggaguuaaaggcugggccuucgaugacgggaacgauguguggaugggacggacgauuagcgagaagcuccgcucuggcuacgagacauuuaaagucaucgaagggugguccaauccuaacagcaagcugcagaccaauagacaggugaucgucgaccggggaaaccgcucuggcuauuccggcauuuucagcguggaggggaaauccuguaucaauagaugcuuuuacguugaacugauucggggaagaaaggaggaaaccgaggugcucuggacaucuaacagcaucgucguguucuguggcaccuccgggacauauggaacgggcucuuggcccgauggggcugacauuaaucugaugccuaucuga

SEQ ID NO: 207779 - RNA, 1410 nt, Artificial Sequence
  derived and/or modified CDS sequence (opt5) from neuraminidase__InfluenzaA__ABN51035
augaaccccaaucagaagaucauuaccaucggcagcgugucccugacaauuucuacgaucugcuucuuuaugcaaauugccauccucaucaccacagucacccugcacuucaaacaguacgaguuuaacagcccuccgaauaaccagguuaugcuuugugaacccacaauuaucgagagaaauauuaccgaaaucguguaucugacaaacaccacgauugagaaggaaaucugcccuaaacucgcugaguaccggaauugguccaagccccagugugacauuaccggguucgccccuuuuucuaaagauaacagcauccgccuguccgcgggaggcgacaucugggugacaagagagcccuaugucucuugcgauccugacaaguguuaccaauucgcucuugggcagggaaccacacugaauaacgugcauagcaaugauaccguucacgaccggacgccguaucgcacacuccugaugaacgaacugggcgugcccuuucaucucgggaccaagcaggucugcauugccugguccucuagcuccugucacgauggaaaagccuggcugcaugugugcguuacaggcgacgauaagaaugcuaccgccagcuucaucuacaacggcagacuuguggacucugucguguccuggagcaaagauauucugcggacccaggagucugaaugugugugcaucaaugggacauguacggucguuaugaccgacggauccgcuagcggcaaggccgauacaaaaauucucuuuaucgaggaggggaagaucgugcacaccuccacacugucuggaagcgcgcaacacguggaagagugcuccugcuauccucgcuaccccggcgucagaugugugugccgggacaacuggaaggggagcaaccgcccuauuguugacaucaauauuaaaaacuacucuaucguguccagcuaugucuguucuggacuugugggcgauacccccagaaagacggacagcuccucuagcucccauugccuggauccgaauaacgaagagggcgggcacggaguuaaaggcugggccuucgacgaugggaaugacguguggaugggacggacaauuagcgaaaagcuccgccugggcuacgagaccuuuaaagucaucgagggguggucuaacccuaauuccaagcugcagaucaacagacaggugauugucgaucggggaaaucgcagcggcuauucuggcaucuucuccguggaagggaaaagcuguauuaacagaugcuuuuacguugagcucauccggggaagaaaggaagagaccgaagugcuguggacauccaauucuauugucguguucuguggcaccagcgggacauauggaacgggcuccuggcccgacggggcugauaucaaccuuaugccuauuuga

SEQ ID NO: 207780 - RNA, 1410 nt, Artificial Sequence; identical to SEQ ID NO: 207779
  derived and/or modified CDS sequence (opt5) from neuraminidase__InfluenzaA__ABN51046

SEQ ID NO: 207781 - RNA, 1413 nt, Artificial Sequence
  derived and/or modified CDS sequence (opt5) from neuraminidase__InfluenzaA__ABN51069
augaaccccaaucagaagaucauuaccaucggcagcauuuccaucgccauugggaucaucucucugauucuccaaaucggaaacauuaucagcauuugggcuucccacucuauccagacaggcagccagaaucauacggggauuugcaaccagagaaucaucaccuacgagaauagcacaugggugaaccaaaccuaugucaauauuaacaauacaaacguuguggccggaaaagacaagaccucuaugacacuggcgggcaauagcucccuuuguccuauccgggggugggcuauuuacaccaaagauaacagcauccgcauuggaucuaagggcgacguguucgucaucagagaaccguuuaucuccugcagccaccuggagugucggacguucuuucucacccagggcgcccugcuuaaugauaaacauucuaacgggacagugaaggaccgcucccccuauagagcccugaugagcugcccucucggagaagcucccucuccuuacaauucccgguucgagagcguugccugguccgcuucugccugucacgauggccugggguggcugaccauuggaaucagcggccccgacaacggggcgguggccguccucaaguauaacggaauuaucacagaaaccauuaaauccuggaagaaacgcauccugagaacgcaggagagcgagugcguguguaugaauggcucuugcuuuacaaucaugaccgauggcccuuccaacggggcugccagcuaccggauuuucaagaucgaaaaaggacgcguuacaaagucuauugagcuugacgcuccgaauuaucauuacgaagaguguagcugcuaccccgauaccggcaccgugaugugugucugcagagacaacuggcacggguccaaucggccuugggugucuuuuaaccagaaucuggauuaucaaaucggauacauuugcagcggcguguucggggacaacccccgcccuaaggauggagagggcuccuguaaucccgucacaguugacggcgccgacggggugaaaggauuuagcuauagauacggcaacgggguguggaucggacggacgaagucuaaucgccucagaaaaggcuucgaaauggucugggauccgaacggguggaccgacacagauuccgacuuuagcaugaagcaggauauuguggcgaugaccgacuggucuggcuauuccggauccuucguucagcacccugagcugacaggccuugauugcaugcggcccuguuuuuggguggaacuggucagagggcucccucgcgagaauaccacgaucuggacauccggaucuagcaucuccuucugcggcgugaacucugacaccgccaauuggagcuggcccgauggggcugaacugcccuucaccauugacaaauga

SEQ ID NO: 207782 - RNA, 1413 nt, Artificial Sequence
  derived and/or modified CDS sequence (opt5) from neuraminidase__InfluenzaA__ABN51080
augaaccccaaucagaagaucauuaccaucggcagcauuuccaucgccauugggaucaucucucugaugcuccaaauuggaaacaucauuagcaucugggcuucccacucuauucagacaggcagccagaaucauacgggggugugcaaccagagaaucauuaccuacgagaauagcacaugggucaaccacaccuauguuaauaucaacaauacaaacgugaucgccgaaaaagacaagaccucugugacacuggcgggaaauagcucccuuuguagcauuucuggcugggcuaucuacaccaaagauaacuccauucggaucgggagcaagggagacgucuucgugauucgcgagccuuuuaucucuugcucccaucuggaauguagaacguucuuucucacccaaggcgcccugcuuaaugauaaacacagcaacggcacaguuaaggaccggucuccguaucgcgcccugauguccugcccccucggggaggcuccuagccccuacaauuccaaguucgaaucuguggccuggagcgcuuccgccugucaugauggaaugggcuggcugaccaucgggauuagcggaccugacaacggcgcggucgccgugcugaaauauaacgggaucauuacagagaccaucaagucuuggaaaaagcagauucucagaacgcaggaguccgaaugcguuugugugaauggaagcugcuuuacaaucaugaccgauggccccucuaacggcgcugccagcuacaaaaucuucaagauugagaaggggaaagucacaaaguccguggaacugaaugcuccuaacuuucacuaugaggaguguucuugcuacccggacaccggaaccgugaugugugucugccgggauaauuggcacggcagcaaccgccccuggguuuccuucaaucagaaccuugacuaccaaaucggguauauuugcagcggaguguuuggcgauaauccuagacccaaagacggggaaggaucuuguaacccugugacagucgauggcgccaauggcgugaagggguucuccuacaaauauggaaacggcguuuggaucgggcggacgaaguccaaucgccugagaaaaggauuugagaugauuugggaccccaacggcuggaccgacacagauucugacuucuccgugaagcaggaugucguggcgaucaccgacuggagcggguacuccggcucuuuuguucagcauccggaacucacaggacuggauugcauucggccuuguuucuggguggagcuuguccgcggccugcccaaggaaaauaccacgaucuggacaagcggguccucuaucagcuucugcggagugaacuccgacaccgccaacuggagcuggccugauggcgcugagcuccccuuuaccauugacaaauga

SEQ ID NO: 207783 - RNA, 1413 nt, Artificial Sequence; identical to SEQ ID NO: 206458
  derived and/or modified CDS sequence (opt5) from neuraminidase__InfluenzaA__ABN51091

SEQ ID NO: 207784 - RNA, 1410 nt, Artificial Sequence; identical to SEQ ID NO: 206167
  derived and/or modified CDS sequence (opt5) from neuraminidase__InfluenzaA__ABN51102

SEQ ID NO: 207785 - RNA, 1410 nt, Artificial Sequence; identical to SEQ ID NO: 206175
  derived and/or modified CDS sequence (opt5) from neuraminidase__InfluenzaA__ABN51113

SEQ ID NO: 207786 - RNA, 1410 nt, Artificial Sequence
  derived and/or modified CDS sequence (opt5) from neuraminidase__InfluenzaA__ABN51124
augaaccccaaucagaagaucauuaccaucggcagcgugucccugacaauugccacggucugcuuccucaugcaaaucgcuauucugguuaccacagugacccuucacuuuaaacaguacgagugugacucuccugccagcaaccaggugaugccgugcgaacccaucaucauugagagaaauaucacagaaauugucuaucugaacaauaccacaaucgagaaggaaauuuguccuaaagugguugaguaccggaacugguccaagccccagugccaaaucaccggguucgcgccuuuuucuaaagauaauagcauucgccucuccgcuggaggcgacaucugggugacgagagagcccuaugucucuugugauccugggaagugcuaccaguucgcccugggacagggcaccacacuugacaacaagcauagcaaugauaccauccacgaccgggugccgcaucgcacacugcucaugaacgaacuggggguucccuuucaccugggaaccagacagguguguauugccugguccucuagcuccugccaugauggcaaggcuuggcuccacgucuguaucacgggcgacgauaaaaaugccacagcuagcuucauuuaugacgggcggcugguggauucuaucggauccuggagccaaaacauucuucgcacccaggagucugaaugcguguguaucaauggcacaugcaccgucguuaugaccgacggguccgccagcggcagagcggauacacggauccuguuuauugaggagggaaaaaucgugcacauuuccccucucucugggagcgcccagcauguggaagagugcuccuguuacccccgcuauccuggagucagaugcaucugucgggacaacuggaagggcagcaaucgccccgugguugacauuaacauggaagauuacucuaucgacuccagcuacgugugcucuggccuggucggggauacgccgagaaacgacgaucggagcuccaauucuaacugucgcaauccuaacaaugagagaggaaaccagggcgugaaagggugggcuuucgacaauggagaugacguuuggaugggccggaccaucagcaaggaucuuagauccggguaugaaacauuuaaggugauuggaggcuggagcacccccaacucuaaaucccaaaucaaucgccaggucauuguggacagcgauaaccggucuggcuacuccgggaucuucagcgucgagggaaaguccugcauuaauagauguuuuuauguggagcugauccgcggccggaaacaggaaacaagaguuugguggaccucuaacagcauuguggucuucugcgggacguccggaacauacggcaccgggucuuggccugacggcgccaauaucaacuuuaugcccaucuga

SEQ ID NO: 207787 - RNA, 1410 nt, Artificial Sequence; identical to SEQ ID NO: 206175
  derived and/or modified CDS sequence (opt5) from neuraminidase__InfluenzaA__ABN51135

SEQ ID NO: 207788 - RNA, 1413 nt, Artificial Sequence; identical to SEQ ID NO: 206468
  derived and/or modified CDS sequence (opt5) from neuraminidase__InfluenzaA__ABN51146

SEQ ID NO: 207789 - RNA, 1410 nt, Artificial Sequence
  derived and/or modified CDS sequence (opt5) from neuraminidase__InfluenzaA__ABN51157
augaaccccaaucagaagaucauuaccaucggcagcgugucccugacaauugccacgaucugcuuccucaugcaaauugcuauccuggucaccacaguuacccuucacuuuaaacaguacgaguguaacucuccuccgaauaaccaggugaugcugugcgaacccacaaucauugagagaaauaucaccgaaauuguguaucucacaaacaccacgaucgagaaggaaauuuguccuaaacuggccgaguaccggaauuggagcaagccccagugcaacaucaccggguucgcgccuuuuuccaaagacaauucuauucgccuuagcgcuggaggcgauaucugggucacaagagagcccuauguguccugugacccugauaagugcuaccaauucgcccuggggcagggaaccacacucaacaauggccauucuaacgacaccguucacgaucggacgccguaucgcacacugcugaugaaugaacucggggugcccuuucaucugggaaccagacaggucuguaucgccuggagcuccagcucuugccacgacggcaaggcuuggcuucauguguguguuacaggcgaugacgagaacgccaccgcuuccuucauuuacaaugggcggcugguggauagcaucggaucuugguccaaaaagauucuccgcacccaggaaagcgagugcgucuguaucaacggcacaugcacgguggugaugaccgacgggucugccuccggaaaagcggagacaaagauucuguuuaucgaagagggcaaaaucguccacauuagcacccuuuccgggucugcccaacacguugaagagugcagcuguuauccuagauaccccggagugcggugcgugugucgcgauaacuggaagggcuccaauagaccuaucgucgacauuaacgugaaggauuacagcaucguuucuuccuaugugugcagcggccuggucggggacacaccccggaaaaaugacucuuucagcuccucucauugucucgauccgaacaaugaagagggaggccacggggugaagggaugggcuuuugacgauggcaacgacguuuggauggggcgcaccauuagcgagaaacugagauccggauacgaaacguucaaggugaucgagggcuggagcaaaccuaauucuaagcugcagacaaaccggcaggucaucguggaacgcggcaauagauccggguauagcggaaucuuuucugucgagggcaaauccugcauuaaccgguguuucuacguggaacucauuagagggcgcaaggaggagaccgaaguuugguggaccagcaauuccaucguggucuuuugcggaacaucuggcaccuaugggacaggcagcuggcccgauggagccgacauuaaccugaugccuaucuga

SEQ ID NO: 207790 - RNA, 1410 nt, Artificial Sequence; identical to SEQ ID NO: 207778
  derived and/or modified CDS sequence (opt5) from neuraminidase__InfluenzaA__ABN59393

SEQ ID NO: 207791 - RNA, 1365 nt, Artificial Sequence
  derived and/or modified CDS sequence (opt5) from neuraminidase__InfluenzaA__ABN59415
augaaccccaaucagaagaucauuaccaucggcagcauuugccugguggucgggcucaucucccugauucuucaaaucggaaacaucauuucuaucuggauuagccacuccauccagacaggcucucagaaucauacggggauuuguaaccagaauaucauuaccuacaaaaacagcacauggguuaaggacaccacauccgugauccugaccggaaauucuagccucugcccuaucagaggcugggccauuuauuccaaagauaacagcauccggauugggucuaagggagacguguucgucauccgcgagccguuuauuuccuguagccaccuggaaugcagaacauucuuucuuacccaaggcgcucugcucaaugauaaacauucuuccggcacggugaaggaccggagccccuaccgcgcccugaugucuuguccuguuggggaggcgcccuccccuuauaacagcagauucgaauccguggcuuggucugccagcgccugccacgauggaaugggcuggcugaccaucgggaucuccggacccgacaauggcgcugucgccgugcucaaguacaacgggauuaucacagagaccauuaaaagcuggcggaagaaaauccugcgcacacaggaaucugagugugcuugcguuaauggauccuguuuuaccauuaugacggauggcccuagcgacggccuugccucuuauaagaucuucaaaaucgagaaggggaaggugacaaaaagcauugaacugaacgcgcccaauucccauuacgaggaaugcucuuguuauccggauaccggaaaggucaugugcgugugcagagacaacuggcacggcagcaaccggccuuggguguccuuugaucagaaucucgacuaccagaucggguacauuuguagcggagucuucggcgauaacccccgcccugaggacgggacaggaucuugcggccccguuuauguggacggcgccaauggggugaaaggauuuuccuacagauauggcaacggggucuggaucggacggaccaagagccacucuucccgccauggcuucgagaugauuugggauccgaauggguggaccgaaacagacagcaaauuuuccgugagacaagauguuguggcuaugacggacuggucuggcuacagcggauccuucguccagcacccugagcugaccggccuugauuguaugcggcccugcuuuuggguggaacugauccgcgggagaccuaaggagaaaacaauuuggaccucugccagcuccaucagcuucuguggaguuaacucugacacaguggauugguccuggcccgacggcgcugaacuccccuucagcaucgauaaguga

SEQ ID NO: 207792 - RNA, 1413 nt, Artificial Sequence; identical to SEQ ID NO: 207023
  derived and/or modified CDS sequence (opt5) from neuraminidase__InfluenzaA__ABN59426

SEQ ID NO: 207793 - RNA, 1410 nt, Artificial Sequence; identical to SEQ ID NO: 206325
  derived and/or modified CDS sequence (opt5) from neuraminidase__InfluenzaA__ABO32659

SEQ ID NO: 207794 - RNA, 1410 nt, Artificial Sequence
  derived and/or modified CDS sequence (opt5) from neuraminidase__InfluenzaA__ABO32670
augaaccccaaucagaagaucauuaccaucggcagcgugucccugacaauuucuacgaucugcuucuuuaugcaaauugccauccucgucaccacaguuacccugcacuucaaacaguacgaguguaacagcccuccgaauaaccaggugaugcuuugcgaacccacaaucauugagagaaauaucaccgaaauuguguaucugacaaacaccacgaucgagaaggaaauuuguccuaaacucgcugaguaccggaauugguccaagccccagugcaacaucaccggguuugccccuuucucuaaagacaauagcauucgccuguccgcgggaggcgauaucugggucacaagagagcccuaugugucuugugacccugauaagugcuaccaauuugcucuugggcagggaaccacacugaacaauggccauagcaacgacaccguucacgaucggacgccguaucgcacacuccugaugaaugaacugggggugcccuuccauaugggaaccaagcaggucuguaucgccugguccucuagcuccugccacgacggcaaagccuggcuccauguguguguuacaggcgaugacgagaacgcuaccgccagcuuuauuuacaaugggagacugguggauucuaucggauccuggagcaagaaaauucuucggacccaggaaucugagugcgucuguaucaacggcacaugcacgguggugaugaccgacggguccgcuagcggaaaggccgauacaaaaauucuguucaucgaggaaggcaagaucguccacaccuccacacucucugggagcgcgcaacacguugaggaaugcuccuguuauccucgcuaccccggagugagaugcgugugucgggacaacuggaagggcagcaaucgcccuauugucgauaucaacauuaaagacuacucuaucguguccagcuauguuugcucuggccuggugggggacacccccagaaagaaugauagcuccucuagcucccauugucuugacccgaacaaugaggaaggaggccacggggucaaaggaugggccuuugaugacggcaacgauguguggauggggcggacgauuagcgagaagcugcgcucuggauacgagacauucaaaguuaucgaaggcugguccaagccuaauagcaaacuccagaucaacagacaggugauugucgaccggggcaaucgcucuggguauuccggaaucuuuagcguggagggcaaguccugcauuaacagauguuucuacgucgaacugauccgggggagaaagcaggagaccgaagugcuguggaccucuaauagcauuguuguguuuugcggaacauccggcaccuaugggacaggcucuuggcccgauggagcugacaucaaccucaugccuauuuga

SEQ ID NO: 207795 - RNA, 1413 nt, Artificial Sequence; identical to SEQ ID NO: 207646
  derived and/or modified CDS sequence (opt5) from neuraminidase__InfluenzaA__ABO32681

SEQ ID NO: 207796 - RNA, 1410 nt, Artificial Sequence
  derived and/or modified CDS sequence (opt5) from neuraminidase__InfluenzaA__ABO32695
augaaccccaaucagaagaucauuaccaucggcagcgugucccugacaauuucuacgaucugcuucuuuaugcaaauugccauccucaucaccacagucacccugcacuucaaacaguacgaguuuaacagcccuccgaauaaccagguuaugcuuugugaacccacaauuaucgagagaaauauuaccgaaaucguguaucugacaaacaccacgauugagaaggaaaucugcccuaaacucgcugaguaccggaauugguccaagccccaguguaacauuaccggguucgccccuuuuucuaaagacaauagcauccgccuguccgcgggaggcgauaucugggugacaagagagcccuaugucucuugcgacccugauaaguguuaccaauucgcucuugggcagggaaccacacugaacaaugugcauagcaacgacaccguucacgaucggacgccguaucgcacacuccugaugaaugaacugggcgugcccuuucaucucgggaccaagcaggucugcauugccugguccucuagcuccugucacgacggaaaagccuggcugcaugugugcguuacaggcgaugacaagaacgcuaccgccagcuucaucuacaauggcagacuuguggauucuauugucuccuggagcaaagagauccugcggacccaggaaucugagugugugugcauuaacgggacauguacgguggucaugaccgacggauccgcuagcggcaaggccgauacaaaaauccucuuuaucgaggaagggaagauuguucacaccuccacacugucuggaagcgcgcaacacguggaggaaugcuccugcuauccucgcuaccccggcgugagaugugucugccgggacaacuggaaggggagcaaucgcccuaucguggauauuaacaucaaagacuacucuauuguuuccagcuauguguguucuggacuugucggcgacacccccagaaagaaugauagcuccucuagcucccauugcagcgacccgaacaaugaggaaggcgggcacggagugaaaggcugggccuucgaugacgggaacgauguuuggaugggacggacgaucucugagaagcugcgcuccggcuacgagacauuuaaagugaucgaaggguggagcaauccuaacucuaagcuccagauuaauagacaggucaucguggaccggggaaaccgcuccggcuauagcggcauuuucuccgucgaggggaaaucuuguaucaauagaugcuuuuacguggaacugauucggggaagaaaggaggaaaccgagguucuguggaccagcaacuccaucguggucuucuguggcacaucugggaccuauggaacaggcagcuggcccgauggggcugacauuaaucucaugccuaucuga

SEQ ID NO: 207797 - RNA, 1410 nt, Artificial Sequence; identical to SEQ ID NO: 206802
  derived and/or modified CDS sequence (opt5) from neuraminidase__InfluenzaA__ABO32754

SEQ ID NO: 207798 - RNA, 1410 nt, Artificial Sequence; identical to SEQ ID NO: 206802
  derived and/or modified CDS sequence (opt5) from neuraminidase__InfluenzaA__ABO32765

SEQ ID NO: 207799 - RNA, 1410 nt, Artificial Sequence; identical to SEQ ID NO: 207674
  derived and/or modified CDS sequence (opt5) from neuraminidase__InfluenzaA__ABO32778

SEQ ID NO: 207800 - RNA, 1410 nt, Artificial Sequence
  derived and/or modified CDS sequence (opt5) from neuraminidase__InfluenzaA__ABO32793
augaaccccaaucagaagaucauuaccaucggcagcgugucccugacaauuucuacgaucugcuucuuuaugcaaauugucauccucaucaccacaguuacccugcacuucaaacaguacgaguuuaacagcccuccgaauaaccaggugaugcuuugugaacccacaauuaucgagagaaauauuaccgaaaucguguaucugacaaacaccacgauugagaaggaaaucugcccuaaacucgccgaguaccggaauugguccaagccccagugugacauuaccggguucgcuccuuuuucuaaagauaacagcauccgccuguccgccggaggcgacaucugggucacaagagagcccuaugugucuugcgauccugacaaguguuaccaauucgcgcuugggcagggaaccacacugaauaacguucauagcaaugauaccgugcacgaccggacgccguaucgcacacuccugaugaacgaacugggcguccccuuucaucucgggaccaaacaggugugcauugcuugguccucuagcuccugucacgauggaaaggccuggcugcauguuugcgugacaggcgacgauaagaaugccaccgcuagcuucaucuacaacggcagacuugucgacucuauuguguccuggagcaaagagauccugcggacccaggaaucugagugugugugcauuaaugggacauguacggucguuaugaccgauggauccgccagcggcaagacagacaccaaaauccucuuuaucgaggaagggaagauugugcacacauccacccugucuggaagcgcucaacacguggaggaaugcuccugcuauccucgcuaccccggcgucagaugugugugccgggauaacuggaaggggagcaaccgcccuaucguugacauuaauaucaaagacuacucuauuguguccagcuaugucuguucuggacuugugggcgauacgcccagaaagaacgacagcuccucuagcucccauugccuggauccgaauaacgaggaaggcgggcacggaguuaaaggcugggccuucgacgaugggaaugacguguggaugggacggacaaucagcgagaagcuccgcucuggcuacgagaccuuuaaagucaucgaagggugguccaacccuaauagcaagcugcagauuaacagacaggugaucgucgaucggggaaaucgcucuggcuauuccggcauuuucagcguggaggggaaauccuguaucaacagaugcuuuuacguugaacugauucggggaagaaaggaggaaaccgaggugcucuggacaucuaauagcaucgucguguucuguggcaccuccgggacauauggaacgggcucuuggcccgacggggcggauauuaaccugaugccuaucuga

SEQ ID NO: 207801 - RNA, 1410 nt, Artificial Sequence; identical to SEQ ID NO: 206399
  derived and/or modified CDS sequence (opt5) from neuraminidase__InfluenzaA__ABO32806

SEQ ID NO: 207802 - RNA, 1410 nt, Artificial Sequence; identical to SEQ ID NO: 206786
  derived and/or modified CDS sequence (opt5) from neuraminidase__InfluenzaA__ABO32819

SEQ ID NO: 207803 - RNA, 1410 nt, Artificial Sequence; identical to SEQ ID NO: 206418
  derived and/or modified CDS sequence (opt5) from neuraminidase__InfluenzaA__ABO32830

SEQ ID NO: 207804 - RNA, 1410 nt, Artificial Sequence; identical to SEQ ID NO: 206784
  derived and/or modified CDS sequence (opt5) from neuraminidase__InfluenzaA__ABO32841

SEQ ID NO: 207805 - RNA, 1410 nt, Artificial Sequence; identical to SEQ ID NO: 206784
  derived and/or modified CDS sequence (opt5) from neuraminidase__InfluenzaA__ABO32852

SEQ ID NO: 207806 - RNA, 1410 nt, Artificial Sequence; identical to SEQ ID NO: 206784
  derived and/or modified CDS sequence (opt5) from neuraminidase__InfluenzaA__ABO32863

SEQ ID NO: 207807 - RNA, 1410 nt, Artificial Sequence; identical to SEQ ID NO: 207778
  derived and/or modified CDS sequence (opt5) from neuraminidase__InfluenzaA__ABO32874

SEQ ID NO: 207808 - RNA, 1410 nt, Artificial Sequence; identical to SEQ ID NO: 207778
  derived and/or modified CDS sequence (opt5) from neuraminidase__InfluenzaA__ABO32885

SEQ ID NO: 207809 - RNA, 1410 nt, Artificial Sequence; identical to SEQ ID NO: 207779
  derived and/or modified CDS sequence (opt5) from neuraminidase__InfluenzaA__ABO32896

SEQ ID NO: 207810 - RNA, 1410 nt, Artificial Sequence; identical to SEQ ID NO: 207779
  derived and/or modified CDS sequence (opt5) from neuraminidase__InfluenzaA__ABO32907

SEQ ID NO: 207811 - RNA, 1410 nt, Artificial Sequence
  derived and/or modified CDS sequence (opt5) from neuraminidase__InfluenzaA__ABO32918
augaaccccaaucagaagaucauuaccaucggcagcgugucccugacaauuucuacgaucugcuucuuuaugcaaauugccauccucaucaccacagucacccugcacuucaaacaguacgaguuuaacagcccuccgaauaaccagguuaugcuuugugaacccacaauuaucgagagaaauauuaccgaaaucguguaucugacaaacaccacgauugagaaggaaaccugcccuaaacucgcugaguaccggaauugguccaagccccaguguaacaucacaggguucgccccuuuuucuaaagacaauagcauucgccuguccgcgggaggcgauaucugggugaccagagagcccuaugucucuugcgacccugauaaguguuaccaauucgcucuugggcagggaacaacccugaacaaugugcauagcaacgacacgguucacgaucggacaccguaucgcacccuccugaugaaugaacugggcgugcccuuucaucucgggacaaagcaggucugcaucgccugguccucuagcuccugucacgacggaaaagccuggcugcaugugugcguuaccggcgaugacaagaacgcuaccgccagcuucauuuacaauggcagacuuguggauucuaucgucuccuggagcaaagagauucugcggacacaggaaucugagugugugugcaucaacgggacguguaccguggucaugacagacggauccgcuagcggcaaggccgauaccaaaauucucuuuaucgaggaagggaagaucguucacacauccacccugucuggaagcgcgcaacacguggaggaaugcuccugcuauccucgcuaccccggcgugagaugugucugccgggacaacuggaaggggagcaaucgcccuauuguggauaucaacauuaaagacuacucuaucguuuccagcuauguguguucuggacuugucggcgacacgcccagaaagaaugauagcuccucuagcucccauugccuggacccgaacaaugaggaaggcgggcacggagugaaaggcugggccuucgaugacgggaacgauguuuggaugggacggacaauuagcgagaagcuccgcucuggcuacgagaccuuuaaagugaucgaagggugguccaauagcaacucuaagcugcagaccaauagacaggucaucguggaccggggaaaccgcuccggcuauagcggcauuuucuccgucgaggggaaaucuuguaucaauagaugcuuuuacguggaacugauucggggaagaaaggaggaaacagagguucucuggaccagcaacuccaucguggucuucuguggcacaucugggacguauggaaccggcagcuggccugauggggcugacauuaaucugaugcccaucuga

SEQ ID NO: 207812 - RNA, 1410 nt, Artificial Sequence; identical to SEQ ID NO: 207811
  derived and/or modified CDS sequence (opt5) from neuraminidase__InfluenzaA__ABO32929

SEQ ID NO: 207813 - RNA, 1410 nt, Artificial Sequence; identical to SEQ ID NO: 207811
  derived and/or modified CDS sequence (opt5) from neuraminidase__InfluenzaA__ABO32940

SEQ ID NO: 207814 - RNA, 1413 nt, Artificial Sequence
  derived and/or modified CDS sequence (opt5) from neuraminidase__InfluenzaA__ABO32951
augaaccccaaucagaagaucauuaccaucggcagcauuuccaucgccauugggaucaucucucugaugcuccaaauuggaaacaucauuagcaucugggcuucccacucuauucagacaggcagccagaaucauacgggggugugcaaccagagaaucauuaccuacgagaauagcacaugggucaaccacaccuauguuaauaucaacaauacaaacgugaucgccggaaaagacaagaccucugugacacuggcgggcaauagcucccuuuguagcauuucugggugggcuaucuacaccaaagauaacuccauucggaucggaagcaagggcgacgucuucgugauucgcgaaccuuuuaucucuugcucccaucuggaguguagaacguucuuucucacccaaggcgcccugcuuaaugauaaacacagcaacgggacaguuaaggaccggucuccguaucgcgcccugauguccugcccccucggagaagcuccuagccccuacaauuccaaguucgagucuguggccuggagcgcuuccgccugucaugauggcaugggguggcugaccaucggaauuagcggcccugacaacggggcggucgccgugcugaaauauaacggaaucauuacagaaaccaucaagucuuggaaaaagcagauucucagaacgcaggaguccgagugcguuugugugaauggcagcugcuuuacaaucaugaccgauggccccucuaacggggcugccagcuacaaaaucuucaagauugaaaagggaaaagucacaaaguccaucgagcugaaugcuccuaacuuucacuaugaagaguguucuugcuacccggacaccggcaccgugaugugugugugccgggauaauuggcacgggagcaaccgccccugggucuccuucaaucagaaccuugacuaccaaauuggauauaucugcagcggcguuuuuggggauaauccuagacccaaagacggagagggcucuuguaacccugugacaguggauggcgccaauggggucaagggauucuccuacaaauauggcaacgggguguggauuggacggacgaaguccaaucgccugagaaaaggcuuugaaaugaucugggaccccaacggguggaccgacacagauucugacuucuccguuaagcaggauguggucgcgauuaccgacuggagcggcuacuccggaucuuuugugcagcauccggagcucacaggccuggauugcauccggccuuguuucuggguugaacuugugcgcgggcugcccagagagaauaccacgaucuggacaagcggauccucuauuagcuucugcggcgucaacuccgacaccgccaacuggagcuggccugauggggcugaacuccccuuuaccaucgacaaguga

SEQ ID NO: 207815 - RNA, 1413 nt, Artificial Sequence
  derived and/or modified CDS sequence (opt5) from neuraminidase__InfluenzaA__ABO32962
augaaccccaaucagaagaucauuaccaucggcagcauuuccaucgccauugggaucaucucucugaugcuccaaauuggaaacaucauuagcaucugggcuucccacucuauucagacaggcagcaaaaaucauacgggggugugcaaccagagaaucauuaccuacgaaaauuccacaugggucaaccacaccuauguuaauaucaacaauacaaacgugguggccggaaaggacaaaaccucugucacacuggcgggcaauagcucccuuuguagcaucucugggugggcuauuuacaccaaggauaacuccauccggauuggaagcaaaggcgacguguucguuauccgcgagccuuuuauuucuugcucccaucuggaguguagaacguucuuucucacccagggcgcccugcuuaaugauaagcacagcaacgggacagugaaggaccggucuccguaucgcgcccugauguccugcccccucggagaagcuccuagccccuacaauuccaaauucgagucugucgccuggagcgcuaacgccugucaugauggcaugggguggcugaccaucggaaucuccggcccugacaacggggcgguggccguucugaaguauaauggaauuaucacagaaaccauuaaaagcuggaagaaacaaauccucagaacgcaggagucugagugcgugugugucaacggcuccugcuuuacaauuaugaccgauggccccagcaauggggcugccucuuacaagaucuucaagaucaaaaagggaaaagugacaaagagcauugaacugaacgcuccuaauuuucacuaugaggaauguuccugcuacccggacaccggcaccgugaugugugucugccgggauaacuggcacgggucuaaucgccccuggguuagcuucaaccagaaucuugacuaccagaucggauauauuugcuccggcguguuuggggauaacccuagacccaaagacggagagggcagcuguaauccugugacagucgauggcgccaacggggugaagggauucucuuacaaauauggcaaugggguuuggaucggacggacgaaguccaaccgccugagaaagggcuuugagaugauuugggaccccaauggguggaccgacacagauagcgacuucucugugcggcaagaugucguggcgaucaccgacugguccggcuacagcggauccuuuguucagcauccggaacucacaggccuggauugcauucgcccuuguuucuggguggagcuugucagagggcugccccgggaaaacaccacgaucuggacaucuggaagcuccaucucuuucugcggcgugaacagcgacaccgccaauugguccuggccugauggggcugagcuccccuuuaccauugacaaauga

SEQ ID NO: 207816 - RNA, 1413 nt, Artificial Sequence; identical to SEQ ID NO: 206458
  derived and/or modified CDS sequence (opt5) from neuraminidase__InfluenzaA__ABO32973

SEQ ID NO: 207817 - RNA, 1413 nt, Artificial Sequence; identical to SEQ ID NO: 207023
  derived and/or modified CDS sequence (opt5) from neuraminidase__InfluenzaA__ABO32984

SEQ ID NO: 207818 - RNA, 1413 nt, Artificial Sequence; identical to SEQ ID NO: 207023
  derived and/or modified CDS sequence (opt5) from neuraminidase__InfluenzaA__ABO32995

SEQ ID NO: 207819 - RNA, 1413 nt, Artificial Sequence
  derived and/or modified CDS sequence (opt5) from neuraminidase__InfluenzaA__ABO33009
augaaccccaaucagaagaucauuaccaucggcagcauuugcauggccaucgggaugauuucccugauccuccaaaucggaaacauuaucucuauuugggugagccacuccauccagacaggcucucagaaucauacggggauuuguaaccagagaaucauuaccuacgagaauagcacaugggucaaccaaaccuauguuaauaucuccaacacaaaugugguggcuggaaaagacaccacaucuaugacccuggccggcaacagcucccuuugcccuauccgggggugggcgauuuacagcaaggauaauucuauccgcauuggauccaaaggcgacgucuucgugaucagagaaccguuuauuagcuguucucaccuggagugccggacguucuuucucacccagggcgcucugcuuaacgauaagcauuccaaugggacaguuaaagaccgcagccccuauagagcccugaugucuuguccuaucggagaagcccccuccccuuacaacagccgguucgaguccguggcuuggucugccagcgcuugccacgauggcaugggguggcucaccaucggaauuuccggccccgacgauggggccgucgcggugcugaaguauaauggaaucauuacagaaaccaucaagagcuggcgcaaacagauucugagaacgcaggagucugaguguguuugcgugaacggcuccuguuuuacaaucaugaccgacggcccuagcgaugggccggccucuuaccggaucuucaagauugaaaaaggaaagaucacaaaaagcauugagcucgacgcucccaacucccauuaugaagagugcucuuguuacccugauaccggcaccgucaugugcgugugccgcgacaauuggcacgggagcaacagacccuggguguccuuuaaucaaaaccuggauuaccagaucggauauauuuguagcggcgucuucggggacaauccucggcccaaggacggaaagggcucuugcgauccgguuaacguggacggcgccgauggggugaaaggauuuuccuaccgcuauggcaauggggucuggaucggaagaacaaagagcaacucuucccggaaaggcuucgagaugauuugggacccuaauggguggacggauaccgacagcaacuuucuugugaagcaggauguuguggcuaugacagacugguccggcuacucuggcagcuucguccagcaccccgaacugaccggacucgauuguaugcgcccuugcuuuuggguggagcugaucagagggcggcccagagagaaaacaaccaucuggacguccggaucuagcauuuccuucuguggcguuaauagcgacacagugaacuggucuuggcccgauggggccgaacuuccuuucaccaucgacaaguga

SEQ ID NO: 207820 - RNA, 1410 nt, Artificial Sequence; identical to SEQ ID NO: 207590
  derived and/or modified CDS sequence (opt5) from neuraminidase__InfluenzaA__ABO33039

SEQ ID NO: 207821 - RNA, 1410 nt, Artificial Sequence
  derived and/or modified CDS sequence (opt5) from neuraminidase__InfluenzaA__ABO33050
augaaccccaaucagaagaucauuaccaucggcagcgugucccugacaauugccacgaucugcuuccucaugcaaauugcuauccuggucaccacaguuacccuucacuuuaaacaguacgaguguaacucuccuccgaauaaccaggugaugcugugcgaacccacaaucauugagagaaauaucaccgaaauuguguaucucacaaacaccacgaucgagaaggaaauuuguccuaaacuggccgaguaccggaauuggagcaagccccagugcaacaucaccggguucgcgccuuuuuccaaagacaauucuauucgccuuagcgcuggaggcgauaucugggucacaagagagcccuauguguccugugacccugauaagugcuaccaauucgcccuggggcagggaaccacacucaacaauggccauucuaacgacaccguucacgaucggacgccguaucgcacacugcugaugaaugaacucggggugcccuuucaucugggaaccaagcaggucuguaucgccuggagcuccagcucuugccacgacggcaaagccuggcuucauguguguguuacaggcgaugacgagaacgcuaccgcuuccuucauuuacaaugggagacugguggauagcaucggaucuugguccaagaaaauucuccggacccaggaaagcgagugcgucuguaucaacggcacaugcacgguggugaugaccgacgggucugccuccggaaaggcggauacaaaaauucuguuuaucgaggaaggcaagaucguccacaccagcccucuuuccgggucugcccaacacguugaggaaugcagcuguuauccccgcuacccuggagugagaugcgugugucgggacaacuggaagggcuccaaucgccccauugucgauaucaacgugaaagacuacagcauuguuucuuccuaugugugcagcggccuggucggggacacaccgagaaagaaugauucuagcuccucuagccauugucucgacccuaacaaugaggaaggaggccacggggugaaaggaugggcuuucgaugacggcaacgauguuuggauggggcggaccaucuccgagaagcugcgcagcggauacgagacguuuaaagugauugaaggcuggucuaagcccaauuccaaacugcagaucaacagacaggucaucguggaccggggcaaucgcagcggguauucuggaauuuucuccgucgagggcaagagcugcaucaacagauguuuuuacguggaacucauucgggggagaaagcaggagacagaaguucuguggaccuccaauucuaucguggucuucugcggaaccagcggcacauaugggaccggcuccuggccugauggagccgacauuaaccuuaugcccaucuga

SEQ ID NO: 207822 - RNA, 1410 nt, Artificial Sequence; identical to SEQ ID NO: 206802
  derived and/or modified CDS sequence (opt5) from neuraminidase__InfluenzaA__ABO33061

SEQ ID NO: 207823 - RNA, 1410 nt, Artificial Sequence
  derived and/or modified CDS sequence (opt5) from neuraminidase__InfluenzaA__ABO33072
augaaccccaaucagaagaucauuaccaucggcagcgugucccugacaauugccacgaucugcuuccucaugcaaauugcuauccuggucaccacaguuacccuucacuuuaaacaguacgagugugggucuccugccaacaaucaggugaugccgugcgaacccaucauuaucgagagaaacauuacagaaaucguguaucugaccaauacaaccauugagaaggaaaucuguccuaaacucgucgaguaccggaacuggagcaagccccagugcaaaauuacgggauucgcgccuuuuuccaaggacaauucuauccgccugagcgcuggcggggauaucugggugaccagagagcccuauguuuccugugacccuggaaagugcuaccaauucgcccuuggccaggggacaacccuggauaacaaacauucuaaugacacaauucacgaucggaccccgcaucgcacgcuccugaugaacgaacugggagugcccuuucaccucggcacaagacaggucuguaucgccuggagcuccagcucuugccaugacggcaaggcuuggcugcacguguguguuaccggguaugauaaaaaugccacagcuuccuucauuuacgacggacggcuuguggauagcaucggcucuugguccaagaacauucugcgcacccaggagagcgaaugcgucuguaucaaugggaccugcacaguggugaugacggacggaucugccuccgagagagcggauaccaaaauccucuuuauugaggaaggcaagaucguccacauuagcccucuguccgggucugcccaacauguugaggaaugcagcuguuauccccgguacccuggagugcgcugcguguguagagacaacuggaagggcuccaaucggcccgucguggauaucaacguuaaagacuacagcauugugucuuccuaugucugcagcggccuugugggggacacaccgcgcaagaacgauagaucuagcuccucuuacugucggaauccuaacaaugagaaaggaaaccacggcguuaaggggugggcuuucgacgauggaaaugacguguggaugggccgcaccaucagcgaagaguccagaagcggguaugagacauuuaaagucaucggaggcuggucuacccccaacuccaagcugcagauuaauagacaggugaucgucgauagcgacaaccggucuggcuacuccgggauuuucagcguggaaggaaaauccugcaucaaucgcuguuuuuauguugagcucauucggggcagagaacaggagacgcgcgugugguggacaucuaacagcaucgucguguucugcgggaccuccggaaccuacggcacagggucuuggccugauggcgccgacauuaaucugaugcccaucuga

SEQ ID NO: 207824 - RNA, 1413 nt, Artificial Sequence; identical to SEQ ID NO: 207131
  derived and/or modified CDS sequence (opt5) from neuraminidase__InfluenzaA__ABO37991

SEQ ID NO: 207825 - RNA, 1413 nt, Artificial Sequence
  derived and/or modified CDS sequence (opt5) from neuraminidase__InfluenzaA__ABO38013
augaaccccaaucagaagaucauuaccaucggcagcauuuccaucgccauugggaucaucucucugauucuccaaaucggaaacauuaucagcauuugggcuucccacucuauccagacaggcagccagaaucauacggggauuugcaaccagagaaucaucaccuacgagaauagcacaugggugaaccaaaccuaugucaauauuaacaauacaaacguuguggccggaaaagacaagaccucuaugacacuggcgggcaauagcucccuuuguccuauccgggggugggcuauuuacaccaaagauaacagcauccgcauuggaucuaagggcgacguguucgucaucagagaaccguuuaucuccugcagccaccuggagugucggacguucuuucucacccagggcgcccugcuuaaugauaaacauucuaacgggacagugaaggaccgcucccccuauagagcccugaugagcugcccucucggagaagcucccucuccuuacaauucccgguucgagagcguugccugguccgcuucugccugucacgauggccugggguggcugaccauuggaaucagcggccccgacaacggggcgguggccguccucaaguauaacggaauuaucacagaaaccauuaaauccuggaagaaacgcauccugagaacgcaggagagcgagugcguguguaugaauggcucuugcuuuacaaucaugaccgauggcccuuccaacggggcugccagcuaccggauuuucaagaucgaaaaaggacgcguuacaaagucuauugagcuugacgcuccgaauuaucauuacgaagaguguagcugcuaccccgauaccggcaccgugaugugugucugcagagacaacuggcacggguccaaucggccuugggugucuuuuaaccagaaucuggauuaucaaaucggauacauuugcagcggcguguucggggacaacccccgcccuaaggauggagagggcuccuguaaucccgucacaguugacggcgccgacggggugaaaggauuuagcuauagauacggcaacgggguguggaucggacggacgaagucuaaucgccucagaaaaggcuaugaaaugauuugggauccgaacggguggaccgacacagauuccgacuucagcaugaagcaggauaucgucgcgaugaccgacuggucuggcuacuccggauccuuugugcagcacccugagcugacaggccuugauugcaugcggcccuguuucuggguugaacuggugagagggcucccucgcgagaauaccacgaucuggacauccggaucuagcauuuccuuuugcggcgucaacucugacaccgccaauuggagcuggcccgauggggcugaacugcccuucaccaucgacaaauga

SEQ ID NO: 207826 - RNA, 1413 nt, Artificial Sequence
  derived and/or modified CDS sequence (opt5) from neuraminidase__InfluenzaA__ABO38024
augaaccccaaucagaagaucauuaccaucggcagcauuuccaucgccauugggaucaucucucugaugcuccaaauuggaaacaucauuagcaucugggcuucccacucuauucagacaggcagccagaaucauacggggaucugcaaccagagaauuaucaccuacgagaauaacacaugggugaaucacaccuaugucaacaucaauaacacaaauauuguugccggaaaagacaagaccuccgugacacuggcgggcaacucuagccuuuguuccaucagcgggugggcuauuuacaccaaagauaauucuauccggauuggauccaagggcgacguguucgucauccgcgaaccuuuuaucagcugcucucaucuggaguguagaacguucuuucucacccaaggcgcccugcuuaacgauaaacacuccaaugggacagugaaggaccggagcccguaucgcgcccugaugucuugcccccucggagaagcuccuucccccuacaacagcaaguucgaguccguugccuggucugcuagcgccugucaugauggcaugggguggcugaccauuggaaucuccggcccugacaacggggcgguggccguccugaaauauaauggaauuaucacagaaaccauuaagagcuggaaaaagagaauccuccggacgcaggagucugagugcguguguguuaacggcuccugcuuuacaaucaugaccgauggccccagcaauggggcugccucuuacaaaauuuucaagaucgaaaagggaaaagugacaaagagcauugagcugaacgcuccuaauuuucacuaugaagaguguuccugcuacccggacaccggcaccgucaugugugugugccgcgauaacuggcacgggucuaauagacccugggugagcuucaaccagaaucuugacuaccagaucggauauauuugcuccggcgucuuuggggauaacccucggcccaaagacggagagggcagcuguaauccuguuacaguggauggcgccgacggggugaagggauucucuuacaaauauggcaacggggucuggaucggacgcacgaaguccaauagacugcggaaaggcuuugaaauggugugggaccccaacggguggaccgauacagacagcgauuucucuguuaagcaagacguggucgcgauuaccgauugguccggcuacagcggauccuuugugcagcauccggagcucacaggccuggacugcauccgcccuuguuucuggguugaacuugugagagggcugccccgggagaauaccacgaucuggacaucuggaagcuccauuucuuucugcggcgucaacagcgauaccgccaacugguccuggccugacggggcugaacuccccuuuaccaucgauaaguga

SEQ ID NO: 207827 - RNA, 1413 nt, Artificial Sequence
  derived and/or modified CDS sequence (opt5) from neuraminidase__InfluenzaA__ABO38035
augaaccccaaucagaagaucauuaccaucggcagcauuuccaucgccauugggaucaucucucugaugcuccaaauuggaaacaucauuagcaucugggcuucccacucuauucagacaggcagccagaaucauacggggaccugcaaccagagaaucauuacauacgaaaauuccaccugggugaaccacacauaugugaauaucaacaauaccaacguuguggccggaaaagacaagacaucugugacccuggcgggcaauagcucccuuuguagcaucucugggugggcuauuuacacgaaagauaacuccauccggauuggaagcaagggcgacgucuucgugauccgcgagccuuuuauuucuugcucccaucuggaguguagaaccuucuuucucacacaaggcgcccugcuuaaugauaaacacagcaacgggaccguuaaggaccggucuccguaucgcgcccugauguccugcccccucggagaagcuccuagccccuacaauuccaaguucgagucuguggccuggagcgcuuccgccugucaugauggcaugggguggcugacaaucggaaucagcggcccugacaacggggcggucgccgugcugaaauauaacggaauuaucaccgaaacgauuaagucuuggaaaaagagaauccuccggacacaggaguccgagugcguuugugugaauggcagcugcuuuaccauuaugacagauggccccucuaacggggcugccagcuacaaaaucuucaagaucgaaaagggaaaagucaccaaguccauugagcugaaugcuccuaacuuucacuaugaagaguguucuugcuacccggacaccggcacagugaugugugugugccgcgauaauuggcacgggagcaacagacccugggucuccuucaaucagaaccuugacuaccagaucggauauauuugcagcggcguuuuuggggauaauccucggcccaaagacggagagggcucuuguaacccugugacgguggauggcgccgacggggucaagggauucuccuacaaauauggcaaugggguguggaucggacgcaccaagagcaacagacugcggaaaggcuuugaaguuauuugggaccccaauggguggacagauaccgacucugauuucuccgugaagcaagacgucguggcgaucacagauuggagcggcuacuccggaucuuuuguucagcauccggagcucaccggccuggacugcauucgcccuuguuucuggguggaacuugucagagggaugccccgggagaacacgacaaucuggaccagcggauccucuaucagcuucugcggcgucaauuccgauaccgccaacuggagcuggccugacggggcugaacugcccuuuacaauugauaaguga

SEQ ID NO: 207828 - RNA, 1413 nt, Artificial Sequence; identical to SEQ ID NO: 206468
  derived and/or modified CDS sequence (opt5) from neuraminidase__InfluenzaA__ABO38046

SEQ ID NO: 207829 - RNA, 1413 nt, Artificial Sequence; identical to SEQ ID NO: 207023
  derived and/or modified CDS sequence (opt5) from neuraminidase__InfluenzaA__ABO38068

SEQ ID NO: 207830 - RNA, 1410 nt, Artificial Sequence; identical to SEQ ID NO: 206399
  derived and/or modified CDS sequence (opt5) from neuraminidase__InfluenzaA__ABO38079

SEQ ID NO: 207831 - RNA, 1410 nt, Artificial Sequence
  derived and/or modified CDS sequence (opt5) from neuraminidase__InfluenzaA__ABO38090
augaaccccaaucagaagaucauuaccaucggcagcgugucccugacaauugccacgaucugcuuccucaugcaaauugcuauccuggucaccacaguuacccuucacuuuaaacaguacgaguguaacucuccuccgaauaaccaggugaugcugugcgaacccacaaucauugagagaaauaucaccgaaauuguguaucucacaaacaccacgaucgagaaggaaauuuguccuaaacuggccgaguaccggaauuggagcaagccccagugcaacaucaccggguucgcgccuuuuuccaaagacaauucuauucgccuuagcgcuggaggcgauaucugggucacaagagagcccuauguguccugugacccugauaagugcuaccaauucgcccuggggcagggaaccacacucaacaauggccauucuaacgacaccguucacgaacggacgccguaucgcacacugcugaugaaugagcucggggugcccuuucaucugggaaccaagcaggucuguaucgccuggagcuccagcucuugccacgauggcaaagccuggcuucauguguguguuacaggcgacgaugaaaacgcuaccgcuuccuucauuuacaaugggagacugguggacagcaucggaucuugguccaagaaaauucuccggacccaggagagcgagugcgucuguaucaacggcacaugcacgguggugaugaccgaugggucugccuccggaaaggcggacacaaaaauucuguuuaucgaagagggcaagaucguccacaccagccuucuguccgggucugcccaacacguugaagagugcagcuguuauccucgcuaccccggagugagaugcgugugucgggauaacuggaagggcuccaaucgcccuauugucgacaucaacgugaaagauuacagcauuguuucuuccuaugugugcagcggccucgucggggacacacccagaaagaaugacucuagcuccucuagccauugucuggauccgaacaaugaagagggaggccacggggugaaaggaugggcuuucgacgauggcaacgacguuuggauggggcggaccaucuccgagaagcugcgcagcggauacgaaacguuuaaagugauugagggcuggucuaagccuaauuccaaacuccagaucaacagacaggucaucguggaucggggcaaucgcagcggguauucuggaauuuucuccgucgaaggcaagagcugcaucaacagauguuuuuacguggagcugauucgggggagaaagcaggaaacagagguucuuuggaccuccaauucuaucguggucuucugcggaaccagcggcacauaugggaccggcuccuggcccgacggagccgauauuaaccugaugccuaucuga

SEQ ID NO: 207832 - RNA, 1410 nt, Artificial Sequence
  derived and/or modified CDS sequence (opt5) from neuraminidase__InfluenzaA__ABO38101
augaaccccaaucagaagaucauuaccaucggcagcgugucccugacaauugccacggucugcuuccucaugcaaaucgcuauucuggccaccacaguuacccuucacuuuaaacagcaugagugugacucuccugcgagcaaccaggugaugccgugcgaacccaucaucauugagagaaauaucacagaaauuguguaccugaacaauaccacaaucgagaaggaaauuuguccugaggucguggaguaucggaacugguccaaaccccagugccaaaucaccggguucgcuccuuuuucuaaggauaauagcauucgccucuccgccggaggcgacaucuggguuacgagagaacccuacgugucuugugauccugggaaaugcuaucaguucgcccugggacagggcaccacacuugacaacaagcacagcaaugggaccauccaugaucggauuccgcaccgcacacugcucaugaacgagcugggaguccccuuucaucugggcaccaaacagguguguguugcuugguccucuagcuccugccacgacggcaaggccuggcuccacgugugugucacgggggaugacagaaaugcuacagccagcuucaucuacgauggacggcugguggacucuauuggcuccuggagccaaaacauccuucgcacccaggaaucugagugcguguguauuaaugggacaugcaccgucguuaugaccgauggauccgcgagcggcagagccgacacacggauccuguuuaucaaggaggggaaaauugugcauaucuccccucucucuggaagcgcucagcacauugaagagugcuccuguuauccccgcuacccugaugugagaugcaucugucgggacaacuggaagggcagcaaucgccccgucauugacaucaacauggaagauuauucuaucgacuccagcuacgugugcucuggccugguuggggauacgccgagaaacgacgauagcuccucuaauagcaacugucgggacccuaauaacgagcgcggaaaucccggcgugaaagggugggccuucgauaacggagacgaugucuggaugggcagaaccauuaauaaggacucccggagcggguacgaaacauuuaaggugaucggaggcuggucuaccccuaacuccaaaagccagguuaauagacaagugauugucgauaacaauaacuggucuggcuauuccgggaucuucagcguggagggaaaguccugcauuaaucgcuguuuuuacgucgagcuuauccggggcagaccccaggaaacacgcgugugguggaccucuaacagcauuguuguguucugcgggacguccggaacauauggcaccgggucuuggcccgacggcgcuaauaucaacuuuaugccuaucuga

SEQ ID NO: 207833 - RNA, 1410 nt, Artificial Sequence
  derived and/or modified CDS sequence (opt5) from neuraminidase__InfluenzaA__ABO38233
augaaccccaaucagaagaucauuaccaucggcagcgugucccugacaauugccacgaucugcuuccucaugcaaauugcuauccuggucaccacaguuacccuucacuuuaaacaguacgagugugacucuccugccaacaaucaggugaugccgugcgaacccaucauuaucgagagaaacauuacagaaaucguguaucugaccaauacaaccauugagaaggaaaucuguccuaaacucgucgaguaccggaacuggagcaagccccagugcaaaauuacgggguucgcgccuuuuuccaaggauaauucuauccgccugagcgcuggaggcgacaucugggugaccagagagcccuauguuuccugugauccugggaagugcuaccaauucgcccuuggacagggcacaacccuggacaacaaacauucuaaugauacaauucacgaccggaccccgcaucgcacgcuccugaugaacgaacugggggugcccuuucaccucggaacaagacaggucuguaucgccuggagcuccagcucuugccaugauggcaaggcuuggcugcacguguguguuaccggcuaugacaaaaaugccacagcuuccuucauuuacgaugggcggcuuguggacagcaucggaucuugguccaagaacauucugcgcacccaggagagcgaaugcgucuguaucaaugggaccugcacaguggugaugacggauggcucugccuccgagagagcggacaccaaaauccucuuuauugaggaaggaaagaucguccacauuagcccucuguccggcucugcccaacauguugaggaaugcagcuguuauccccgguacccuggggugcgcugcguguguagagauaacuggaagggauccaaucggcccgucguggacaucaacguuaaagacuacagcauugcuucuuccuaugugugcagcggccuugucggcgauacaccgcgcaagaacgacagauacucuagcuccuauugucggaauccuaacaaugagaaagggaaccacggagugaagggcugggccuucgaugacgggaaugauguuuggaugggacgcaccaucucugacgaaagcagauccggcuacgagacauuuaaagugaucgggggauggagcacccccaacucuaagcugcagauuaaucggcaggucaucguggauuccgacaacagaagcggcuauucuggcauuuucuccgucgaggggaaaagcugcaucaaucgcuguuuuuacguggaacucauucggggaagagagcaggaaacgcgcguuugguggacauccaacucuaucguggucuucugcggcaccagcgggaccuauggaacaggcuccuggccugauggggcugacauuaaucugaugcccaucuga

SEQ ID NO: 207834 - RNA, 1410 nt, Artificial Sequence; identical to SEQ ID NO: 207183
  derived and/or modified CDS sequence (opt5) from neuraminidase__InfluenzaA__ABO38244

SEQ ID NO: 207835 - RNA, 1410 nt, Artificial Sequence; identical to SEQ ID NO: 206399
  derived and/or modified CDS sequence (opt5) from neuraminidase__InfluenzaA__ABO38255

SEQ ID NO: 207836 - RNA, 1410 nt, Artificial Sequence; identical to SEQ ID NO: 206784
  derived and/or modified CDS sequence (opt5) from neuraminidase__InfluenzaA__ABO38277

SEQ ID NO: 207837 - RNA, 1410 nt, Artificial Sequence; identical to SEQ ID NO: 207811
  derived and/or modified CDS sequence (opt5) from neuraminidase__InfluenzaA__ABO38288

SEQ ID NO: 207838 - RNA, 1410 nt, Artificial Sequence
  derived and/or modified CDS sequence (opt5) from neuraminidase__InfluenzaA__ABO38299
augaaccccaaucagaagaucauuaccaucggcagcgugucccugacaauugccacggucugcuucaucaugcaaauugcuauccucgccaccacaguuacccugcacuuuaaacagcaugagugugacucuccugcgagcaaccaggugaugccgugcgaacccaucauuaucgagagaaauauuacagaaaucguguaccuuaacaauaccacaauugagaaggaaaucuguccugaggcugucgaguaucggaacugguccaaaccccagugccaaauuaccggguucgccccuuuuucuaaggauaauagcauccgccuguccgccggaggcgacaucugggugacgagagaacccuacguuucuugugauccugggaaaugcuaucaguucgcucucggacagggcaccacacuggacaacaagcacagcaaugggaccauucaugaucggaucccgcaccgcacacuucugaugaacgagcucggagugcccuuucaucugggcaccaagcaggucuguguggccugguccucuagcuccugccacgacggcaaggcuuggcugcacguuugugugacgggggaugacagaaaugccacagcgagcuucauuuacgauggacggcucgucgacucuaucggcuccuggagccaaaacauucugcgcacccaggaaucugagugcguguguaucaaugggacaugcaccguggucaugaccgauggauccgccagcggcagagcugacacacggauccuuuuuauuaaagaggggaaaaucguucauauuuccccucugucuggaagcgcccagcacguggaagagugcuccuguuauccccgcuacccugaugugagaugcacgugucgggacaacuggaagggcagcaaucgccccgucaucgacauuaacauggaagauuauucuaucgacuccagcuacgugugcucuggccucguuggggauaccccgagaaacgacgauagcuccucuaauagcaacugucgggacccuaauaacgagcgcggaaaucccggcgugaaagggugggcuuucgauaacggagacgaugucuggaugggcagaacaaucaauaaggacucccggagcggguacgaaaccuuuaaggugauuggaggcuggucuacaccuaacuccaaaagccagguuaauagacaagugaucgucgauaacaauaacuggucuggcuauuccgggauuuucagcguggagggaaaguccugcaucaaucgcuguuuuuacgucgagcugauucggggcagaccccaggaaacccgcgugugguggacgucuaacagcaucguuguguucugcgggacauccggaaccuauggcaccgggucuuggcccgacggcgccaauauuaacuuuaugccuaucuga

SEQ ID NO: 207839 - RNA, 1410 nt, Artificial Sequence
  derived and/or modified CDS sequence (opt5) from neuraminidase__InfluenzaA__ABO38310
augaaccccaaucagaagaucauuaccaucggcagcgugucccugacaauugccacggucugcuuccucaugcaaaucgcuauucuggccaccacaguuacccuucacuuuaaacagcaugagugugacucuccuacaagcaaccaggugaugccgugcgaacccaucaucauugagagaaauaucaccgaaauuguguaccugaacaauacaaccaucgagaaggaaauuuguccugaggucguggaguaucggaacugguccaaaccccagugccaaaucacgggguucgcgccuuuuucuaaggauaauagcauucgccucuccgcuggaggcgacaucuggguuaccagagaacccuacgugucuugugauccugggaaaugcuaucaguucgcccugggacagggcacaacccuugacaacaagcacagcaaugggacaauccaugaucggauuccgcaccgcacccugcucaugaacgagcugggaguccccuuucaucugggcacgaaacagguguguguugccugguccucuagcuccugccacgacggcaaggcuuggcuccacgugugugucacaggggaugacagaaaugccaccgcuagcuucaucuacgauggacggcugguggacucuauuggcuccuggagccaaaacauccuucgcacacaggaaucugagugcguguguauuaaugggaccugcaccgucguuaugacagauggauccgccagcggcagagcggacacgcggauccuguuuaucaaggaggggaaaauugugcauaucuccccucucucuggaagcgcccagcacauugaagagugcuccuguuauccccgcuacccugaugugagaugcaucugucgggacaacuggaagggcagcaaucgccccgucauugacaucaacauggaagauuauucuaucgacuccagcuacgugugcucuggccugguuggggauaccccgagaaacggagacagcuccucuaauagcaacugucgggauccuaauaacgagcgcggcaaucccggggugaaaggaugggcuuucgacaacggcgaugacgucuggauggggagaacaauuaauaaggaaucccggagcggauacgagaccuuuaaggugaucggcggcuggucuacaccuaacuccaaaagccagguuaauagacaagugauugucgauaacaauaacuggucuggguauuccggaaucuucagcguggagggcaaguccugcauuaaucgcuguuuuuacgucgaacuuauccgggggagaccccaggagacccgcgugugguggacgucuaacagcauuguuguguucugcggaacauccggcaccuaugggaccggcucuuggcccgacggagccaauaucaacuuuaugccuaucuga

SEQ ID NO: 207840 - RNA, 1413 nt, Artificial Sequence; identical to SEQ ID NO: 207002
  derived and/or modified CDS sequence (opt5) from neuraminidase__InfluenzaA__ABO38332

SEQ ID NO: 207841 - RNA, 1413 nt, Artificial Sequence
  derived and/or modified CDS sequence (opt5) from neuraminidase__InfluenzaA__ABO38343
augaaccccaaucagaagaucauuaccaucggcagcauuugcaugacaaucgggauuaucucccugauccuccaaauuggaaacaucauuucuaucugggugagccacuccauucagacgggcucucagaaucauaccgggaucuguaaccagagaauuaucacauacgagaauagcaccugggucaaccaaacauauguuaauaucaacaauaccaacgugguggccggaaaagacacaaccuccgucacgcuggcuggcaauucuagccuuugcccuauucgggggugggccaucuacuccaaggauaacagcauucgcaucggaucuaaaggcgacguguucguuauuagagaaccguuuaucuccuguagccaccuggagugccggaccuucuuucucacacagggcgcgcugcuuaaugauaagcauucuaacgggaccgugaaagaccgcucccccuauagagcucugaugagcuguccuaucggagaagcccccucuccuuacaauucccgguucgagagcgucgccugguccgcuucugccugccacgauggcaugggguggcucacaauuggaaucagcggccccgacgauggggcuguggccguucugaaguauaacggaauuaucaccgaaacgauuaaguccuggcgcaaaagaauccugcggacacaggagagcgagugugugugcgucaacggcucuuguuuuaccaucaugacagacggcccuuccaaugggccggcgagcuaccgcauuuucaagaucgaaaaaggaaagauuaccaaaucuaucgagcucgaugcccccaacagccauuaugaagagugcuccuguuacccugacaccggcacagugaugugcgugugcagagauaauuggcacgggucuaaccggcccugggucagcuuuaaucagaaccuggacuaccaaauuggauauaucuguuccggcguuuucggggauaauccucgccccaaggacggaaagggcagcugcgacccggugacgguggauggcgcugacggggucaaaggauuuucuuacagauauggcaacgggguguggauuggacggaccaaguccaauagcucucgcaaaggcuucgagaugaucugggauccuaacggguggacagacaccgauuccaauuuucuuguuaagcaggacguggucgccaugacagauuggagcggcuacuccggaucuuucgugcagcaccccgaacugaccggccucgacuguaugagaccuugcuuuuggguugagcuggugcgggggagaccccgcgaaggaacgacagucuggaccagcggcuccucuaucagcuucuguggggugaacuccgauaccgcuaauuggagcuggcccgacggagccgagcuuccuuucacaauugauaaauga

SEQ ID NO: 207842 - RNA, 1410 nt, Artificial Sequence
  derived and/or modified CDS sequence (opt5) from neuraminidase__InfluenzaA__ABO38354
augaaccccaaucagaagaucauuaccaucggcagcauuugcaugguggucgggaucauuucccugauccuccaaaucggaaacauuaucucuauuuggaucagccacuccauucagacaggcucucagaaucauacggggaucuguaaccagaauauuaucaccuacaaaaacagcacauggguuaaucaaaccuaugugaacaucuccaauacaaacguggucgccggacaggacaccacaucugugauucugaccggcaauagcucccuuugcccuaucagagggugggcuauuuacagcaaggauaacucuauccggauuggauccaaaggcgacguuuucgugauccgcgagccguuuaucagcuguucucaccuggaaugcagaacguucuuucucacccagggcgcccugcuuaaugaucggcauuccaacgggacagucaaggaccgcagccccuauagagcgcugaugucuuguccugugggagaggcucccuccccuuacaauagccgguucgaauccguugccuggucugccagcgcuugccacgauggcaugggguggcucaccauuggaaucuccggccccgacaacggggccguggcuguccugaaauauaacggaauuaucacagagaccauuaagagcuggcgcaagaaaauccugagaacgcaggaaucugagugugccugcgugaauggcuccuguuuuacaaucaugaccgauggcccuagcaacgggcucgcgucuuacaagauuuucaaaaucgagaagggaaaagugacaaagagcauugaacugaaugccccgaacucccauuaugaggaaugcucuuguuaccccgacaccggcaaggucaugugcguuugccgggauaauuggcacgggagcaaccgcccuuggguguccuuugaccaaaaucuugauuaccagaucggauauauuuguagcggcguguucggggacaaccccagaccuaaagauggaaccggcucuugcggccccgucuacguggacggggcuaauggaguuaagggcuuuuccuaucgguacgggaacggaguguggaucggccgcacaaaaagcaauucuuccagacacggguucgagaugauuugggacccgaacggcuggacggagaccgauagcaaguuuuccguccggcaggacgugguugccaugacagauuggucuggauauagcggcuccuucgugcagcauccugaacugaccgggcucgacuguaugcgccccugcuuuugggucgagcugaucagaggacggccuaaagaaaauacaaucuggaccucuggcagcuccauuagcuucuguggggugaacucugauacggucgacugguccuggcccgauggagcugagcuucccuucacaaucgacaaguga

SEQ ID NO: 207843 - RNA, 1413 nt, Artificial Sequence
  derived and/or modified CDS sequence (opt5) from neuraminidase__InfluenzaA__ABO38365
augaaccccaaucagaagaucauuaccaucggcagcauuugcauggccaucgggauuaucucccugauccuccaaaugggaaacauuaucucuauuugggugagccacuccauccagacaggcucucagaaucauacggggauuuguaaccagagaaucauuaccuacgagaauagcacaugggucaaccaaaccuauguuaauaucaacaauacaaacgugguggcuggaaaagacaccacauccgucacccuggccggcaauucuagccuuugcccuauccgggggugggcgauuuacuccaaggauaacagcauccgcauuggaucuaaaggcgacguguucguuaucagagaaccguuuauuuccuguagccaccuggagugccggacguucuuucucacccagggcgcucugcuuaaugauaagcauucuaacgggacagugaaagaccgcucccccuauagagcccugaugagcuguccuaucggagaagcccccucuccuuacaauucccgguucgagagcgucgcuugguccgccucugcuugccacgauggcaugggguggcucaccaucggaauuagcggccccgacgauggggccguggcgguucugaaguauaacggaaucauuacagaaaccaucaaguccuggcgcaaacggauucugagaacgcaggagagcgagugugugugcgucaacggcucuuguuuuacaaucaugaccgacggcccuuccaaugggccggccagcuaccgcaucuucaagauugaaaaaggaaagaucacaaaaucuauugagcucgaugcucccaacagccauuaugaagagugcuccuguuacccugacaccggcaccgugaugugcgugugcagagauaauuggcacgggucuaaccggcccugggucagcuuuaaucagaaccuggacuaccaaaucggauauauuuguuccggcguuuucggggauaauccucgccccaaggacggaaagggcagcugcgacccggugacaguggauggcgccgacggggucaaaggauuuucuuacagauauggcaacgggguguggaucggacggacgaaguccaauagcucucgcaaaggcuucgagaugauuugggauccuaacggguggaccgacacagauuccaauuuucuuguuaagcaggacguggucgcuaugaccgauuggagcggcuacuccggaucuuucgugcagcaccccgaacugacaggccucgacuguaugagaccuugcuuuuggguugagcugauccgggggagaccccgcgagaaaaccacgaucuggacaagcggauccucuauuagcuucuguggcgugaacuccgauaccgccaauuggagcuggcccgacggggcggaacuuccuuucaccaucgauaaguga

SEQ ID NO: 207844 - RNA, 1410 nt, Artificial Sequence
  derived and/or modified CDS sequence (opt5) from neuraminidase__InfluenzaA__ABO38376
augaaccccaaucagaagaucauuaccaucggcagcauuugcaugguggucgggaucauuucccugauccuccaaaucggaaacauuaucucuauuuggaucagccacuccauucagacaggcucucagaaucauacggggaccuguaaccagagcaucauuacauacaaaaauuccaccuggguuaaccaaacauaugugaauaucucuaacaccaauguggucgccggaaaggacacaaccagcgugauccuggcuggcaacuccagccuuugcccuauuagagggugggccaucuacucuaaagauaauggaguucggauuggcuccaagggcgacguguucgucauccgcgagccguuuauuagcuguucucaccuggaaugcagaacguucuuucucacccagggggcgcugcuuaacgauaaacauuccaauggaacagugaaggaccggagccccuaucgcgcucugaugucuuguccuguuggcgaggcccccuccccuuacaacagcagauucgaauccguggccuggucugcuagcgccugccacgaugggaugggauggcucaccaucggcaucuccgggcccgacgauggagcugucgccgugcugaaguauaauggcauuaucacagagaccauuaaaagcuggcggaaggaaauccugcgcacgcaggagucugagugugcgugcgugaacggcuccuguuuuacaauuaugaccgacgggccuagcggaggcccggccucuuacaaaaucuucaagaucgaaaaagggaaggucacaaagagcauugagcucgaugcucccaacucccauuaugaagagugcucuuguuacccugacaccggaaaaguuaugugcgugugcagagauaauuggcacggcagcaaccggcccuggguguccuuugaccagaaucuggauuaccaaaugggguauaucuguagcggagucuucggcgacaacccucgccccaaggacggcaaagggaauugcggaccgguguacguugauggcgccaacggggugaagggauuuucuuauagauacggcaauggggucuggauuggccggaccaaauccaacagcucucgccagggauucgagaugaucugggacccuaauggcuggacagaaacggauuccaacuuuuucgugaagcaggacguuguggcugucaccgauuggagcggguauuccggaucuuuugugcagcaccccgagcuuacaggccuggacuguaugagaccuugcuucugggucgaacucauucgggggcgccccaaagagaagaccaucuggacaagcggauccucuauuagcuucuguggcguuaauuccgauaccguggacuggagcuggcccgauggggccgaacugccuuuuacgaucgacaaguga

SEQ ID NO: 207845 - RNA, 1410 nt, Artificial Sequence
  derived and/or modified CDS sequence (opt5) from neuraminidase__InfluenzaA__ABO38387
augaaccccaaucagaagaucauuaccaucggcagcauuugcaugguggucgggaucauuucccugauccuccaaaucggaaacauuaucucuauuuggaucagccacuccauucagacaggcucucagaaucauacggggaucuguaaccagagcauuaucaccuacaaaaauuccacauggguuaaccaaaccuaugugaauaucucuaacacaaauguggucgccggacaggacaccacaagcgugauucugaccggcaacuccagccuuugcccuaucagagggugggcuauuuacucuaaggauaauggaauccggauuggcuccaaaggcgacguuuucgugauccgcgagccguuuaucagcuguucucaccuggaaugcagaacguucuuucucacccagggggcccugcuuaacgauaagcauuccaauggaacagucaaagaccggagccccuaucgcgcgcugaugucuuguccugugggcgaggcucccuccccuuacaacagcagauucgaauccguugccuggucugccagcgcuugccacgaugggaugggauggcucaccauuggcaucuccgggcccgacaaugaggccguggcuguccugaaguauaacggaauuaucacagaaaccauuaagagcuggcggaaaaagauccugcgcacgcaggagucugagugugccugcgugaacggcuccuguuuuacaaucaugaccgauggcccuagcgacgggcucgcgucuuacaaaauuuucaagaucgaaaaaggaaaggugacaaagagcauugagcugaaugccccgaacucccauuaugaagagugcucuuguuaccccgauaccggcaaagucaugugcguuugcagagacaauuggcacgggagcaaccggccuuggguguccuuugaucaaaaucuugacuaccagaucggauauauuuguagcggcguguucggggauaacccccgcccuaaggacggaaccggcucuugcggccccgucuacguggacggggcuaauggaguuaaaggcuuuuccuauagauacgggaacggaguguggaucggccggacaaagagcacgucuucccgccacggguucgagaugauuugggauccgaauggcuggaccgaaacagacagcaaauuuuccgucagacaggaugugguugccaugaccgacuggucuggauauagcggcuccuucgugcagcauccugagcugacagggcucgauuguaugcggcccugcuuuugggucgaacugauccgcggacaaccuaaggagaaaaccaucuggacgucuggcagcuccauuagcuucuguggggugaacucugacacagucgauugguccuggcccgacggagcugaacuucccuucaccaucgauaaguga

SEQ ID NO: 207846 - RNA, 1413 nt, Artificial Sequence
  derived and/or modified CDS sequence (opt5) from neuraminidase__InfluenzaA__ABO38398
augaaccccaaucagaagaucauuaccaucggcagcauuugcauggccaucgggauuaucucccugauccuccaaauuggaaacaucgugucuauuuggaucagccacuccauucagacaggcucucagaauuacacggggaucuguaaccagagaauuaucaccuaugagaauagcacaugggucaaccaaaccuacguuaauaucaacaauacaaacgugguggcuggacaggacaccacauccgucgcccuggcgggcaauucuagccuuugcccuauuuccgggugggcuaucuauagcaaagauaacucuauucggaucggauccaagggcgacguguucguuauucgcgaaccguuuaucagcuguucucaucuggagugcagaaauuucuuucucacccagggcgcccugcuuaacgauaaacacuccaaugggacggugaaggaccggagccccuaccgcgcccugaugucuuguccuaucggagaagcucccuccccuuauaacagcagauucgaguccgucgccuggucugcuagcgccugccaugauggcaugggguggcucaccauuggaaucuccggccccgacgauggggcgguggccguucugaaauacaacggaauuaucacagaaaccauuaagagcuggcggaagcgcauccugagaacacaggagucugagugugugugcgucaauggcuccuguuuuaccaucaugacggacggcccuaacaaugggccggcuagcuauaaaauuuucaagaucgaaaaaggaaagauuacaaaaucuaucgagcucgaugcccccaacagccacuacgaagagugcuccuguuacccugacgcuggcaccgugaugugcgugugccgggauaauuggcaugggucuaaccgccccugggucagcuuuaaucaaaaccuggacuaucagauuggauacaucuguuccggcguuuucggggauaauccuagacccaaggacggaaagggcagcugcgacccggugacaguggauggcgccgacggggucaaaggauuuucuuaucgguacggcaacgggguguggauuggacgcaccaaguccaauagcucuagacggggcuucgagaugaucugggauccuaacggguggaccgacacagauuccaaauuucuuguuaagcaggacguggucgcgaugacggauuggagcggcuauuccggaucuuucgugcagcaccccgaacugaccggccucgacuguaugcgcccuugcuuuuggguugagcugaucagagggcggcccagagaaaauacaaccauuuggacaagcggauccucuaucagcuucuguggcgugaacggggauaccgccaauugguccuggcccgacggagcugagcuuccuuucacgauugauaaauga

SEQ ID NO: 207847 - RNA, 1410 nt, Artificial Sequence; identical to SEQ ID NO: 206325
  derived and/or modified CDS sequence (opt5) from neuraminidase__InfluenzaA__ABO38420

SEQ ID NO: 207848 - RNA, 1410 nt, Artificial Sequence
  derived and/or modified CDS sequence (opt5) from neuraminidase__InfluenzaA__ABO38715
augaaccccaaucagaagaucauuaccaucggcagcgugucccugacaauugccacggucugcuuccucaugcaaaucgcuauucugguuaccacagugacccuucacuuuaaacagcaugagugugacucuccugccagcaaccaggugaugccgugcgaacccaucaucauugagagaaauaucacagaaauugucuaccugaacaauaccacaaucgagaaggaaaccuguccuaaagugguugaguaucgguccuggucuaagccccagugcaaaauuacgggguucgcgccuuuuagcaaggauaacuccauccgccucucugcuggaggcgacauuugggugaccagagagcccuacgucagcugugauccugggaagugcuaucaauucgcccugggacagggcacaacccuugacaauaaacacuccaacgauacaauccaugaccggaucccgcaccgcacccugcucaugaaugaacugggggugcccuuucaucugggaacgagacagguuuguauugccuggucuagcuccagcugccacgauggcaaggcuuggcuccacgugugugucacaggcgacgauaaaaacgccaccgcuucuuucaucuacgacgggcggcugguggauuccauuggaagcuggucucagaauauccuucgcacacaagaguccgaaugcguguguauuaacggaaccugcaccgucguuaugacagacgggagcgccuccggcagagcggauacgcggauccuguuuaucgaggagggcaagauugugcauaucucuccucucagcggguccgcccagcacguggaagagugcagcuguuauccccgcuacccugacgucagaugcauuugucgggacaauuggaaaggaucuaaccgccccaucguggauauuaauauggaagacuauuccaucgauagcucuuacguuugcagcggccuggugggcgacaccccgagaaacgaugaccgguccucuaacagcaauugucgcaacccuaauaacgagagagggaaucagggagucaagggcugggcuuucgauaacggggacgauguguggaugggacggacaaucuccaaggaccuuagaagcggcuacgaaaccuuuaaaguuauugggggauggucuacacccaauuccaagagccagaucaaccgccaagugauugucgauucugacaaucgguccggcuauagcggcaucuucuccguggaggggaaaucuugcauuaacagauguuuuuacgucgagcugauccgcggacggaagcaggaaaccagagugugguggacgagcaauuccauuguuguguucugcggcacaucugggaccuauggaaccggcagcuggccugacggggccaacaucaauuuuaugcccaucuga

SEQ ID NO: 207849 - RNA, 1410 nt, Artificial Sequence; identical to SEQ ID NO: 207848
  derived and/or modified CDS sequence (opt5) from neuraminidase__InfluenzaA__ABO38726

SEQ ID NO: 207850 - RNA, 1413 nt, Artificial Sequence
  derived and/or modified CDS sequence (opt5) from neuraminidase__InfluenzaA__ABO44049
augaaccccaaucagaagaucauuaccaucggcagcauuuccaucgccauugggaucaucucucugaugcuccaaauuggaaacaucauuagcaucugggcuucccacucuauucagacaggcagccagaaucauacggggaucugcaaccagagaauuaucaccuacgagaauagcacaugggugaaccacaccuaugucaauaucaacaauacaaacguuguggccggaaaagacaagaccucugugacacuggcgggcaauagcucccuuuguagcauuucugggugggcuaucuacaccaaagauaacuccauucggaucggaagcaagggcgacgucuucgugauucgcgaaccuuuuaucucuugcucccaucuggaguguagaacguucuuucucacccaaggcgcccugcuuaaugauaaacacagcaacgggacaguuaaggaccggucuccguaucgcgcccugauguccugcccccucggagaagcuccuagccccuacaauuccaaguucgagucuguggccuggagcgcuuccgccugucaugauggcaugggguggcugaccaucggaauuagcggcccugacaacggggcggucgccgugcugaaauauaacggaaucauuacagaaaccaucaagucuuggaaaaagcggauucucagaacgcaggaguccgagugcguuugugugaauggcagcugcuuuacaaucaugaccgauggccccucuaacggggcugccagcuacaaaaucuucaagauugaaaagggaaaagucacaaaguccaucgagcugaaugcuccuaacuuucacuaugaagaguguucuugcuacccggacaccggcaccgugauuugugugugccgcgauaauuggcacgggagcaacagacccugggucuccuucaaucagaaccuugacuaccagaucggauauauuugcagcggcguuuuuggggauaauccucggcccaaagacggagagggcucuuguaacccugugacaguggauggcgccgacggggucaagggauucuccuacaaauauggcaaugggguguggaucggacgcacgaaguccaacagacugcggaaaggcuuugaaaugauuugggaccccaauggguggaccgauacagacucuaacuucuccguuaagcaagauguggucgcgaucaccgacuggagcggcuacuccggaucuuuugugcagcauccggagcucacaggccuggauugcauccgcccuuguuucuggguugaacuugugagagggcugccccgggagaauaccacgauuuggacaagcggauccucuaucagcuucugcggcgucaacuccgacaccgccaacuggagcuggccugauggggcugaacuccccuuuaccauugacaaguga

SEQ ID NO: 207851 - RNA, 1410 nt, Artificial Sequence
  derived and/or modified CDS sequence (opt5) from neuraminidase__InfluenzaA__ABO44060
augaaccccaaucagaagaucauuaccaucggcagcgugucccugacaauugccacggucugcuuccucaugcaaaucgcuauucugguuaccacagugacccuucacuuuaaacagcaugagugugacucuccugccagcaaccaggugaugccgugcgaacccaucaucauugagagaaauaucacagaaauugucuaccugaacaauaccacaaucgagaaggaaauuuguccuaaagugguugaguaucggaacugguccaagccccagugcaaaaucaccggguucgcgccuuuuucuaaggauaauagcauucgccucuccgcuggaggcgacaucugggugacgagagagcccuacgucucuugugauccugggaagugcuaucaauucgcccugggacagggcaccacacuugacaacaaacacagcaaugauaccauccaugaccggauuccgcaccgcacacugcucaugaacgaacugggggugcccuuucaucugggaaccagacagguuuguaucgccugguccucuagcuccugccacgauggcaaggcuuggcuccacgugugugucacgggcgacgauaaaaaugccacagcuagcuucauuuacgacgggcggcugguggauucuaucggauccuggagccagaacauucuucgcacccaagagucugaaugcguguguaucaauggcacaugcaccgucguuaugaccgacggguccgccagcggcagagcggauacaaagauccuguuuauugaggagggaaaaaucgugcauauuuccccucucucugggagcgcccagcacguggaagagugcuccuguuauccccgguacccugacguccgcugcaucuguagagacaacuggaagggaagcaaucggcccgugguugauauuaacauggaagacuauucuaucgauuccagcuacgugugcucuggccuggucggcgacacgccgcgcaacgaugacagaagcuccaauucuaacugucggaauccuaacaaugagcgcgggaaccagggagugaagggcugggcuuucgauaauggggacgauguuuggaugggaagaaccaucagcaaagaccuucgguccggcuacgaaacauuuaaggugauugggggauggagcacccccaacucuaaaucccagaucaauagacaagucauuguggauagcgacaaccgcucuggcuauuccggcaucuucagcgucgaggggaaguccugcauuaaucgguguuuuuacguggagcugaucagaggacgcaaacaggaaacacggguuugguggaccucuaacagcauuguggucuucugcggcacguccgggacauauggaaccggcucuuggccugacggggccaauaucaaccucaugcccaucuga

SEQ ID NO: 207852 - RNA, 1410 nt, Artificial Sequence
  derived and/or modified CDS sequence (opt5) from neuraminidase__InfluenzaA__ABO44071
augaaccccaaucagaagaucauuaccaucggcuucguguuucugacaauugccacggucugcuuccucaugcaaaucgcuauucugguuaccacagugacccuucacuuuaaacaguacgagugugacagcccugccuccaaccaggugaugccgugcgaacccaucaucauugagagaaauaucacagaaauugucuaucugaacaauaccacaaucgagaaggaaauuuguccuaaagugguugaguaccggaacuggucuaagccccagugccaaaucaccggguucgcgccuuuuagcaaagauaauuccauucgccucucugcuggaggcgacaucugggugacgagagagcccuaugucagcugugaucaugggaagugcuaccaguucgcccugggacagggcaccacacuugacaacaagcacuccaaugauaccauccaugaccggauuccucaccgcacacugcucaugaacgaacugggggugccguuucaucugggaaccagacagguuuguaucgccuggucuagcuccagcugccacgauggcaaggcuuggcuccacguguguauuacgggcgacgauaaaaaugccacagcuucuuucaucuaugacgggcggcuggucgauuccauuggaagcuggucucaaaacauccuucgcacccaggaguccgaaugcguguguaucaauggcacaugcaccguggucaugaccgacgggagcgccucuggcagagcggauacacggauucuguuuaucgaggagggaaaaauuguucauaucagcccccucuccggguccgcccagcacguggaagagugcucuuguuacccucgcuaucccggagugagaugcauuugucgggacaacuggaagggcagcaaucgcccugucguggacaucaacauggaagauuacuccaucgacagcucuuacguuugcuccggccuggugggggauacgcccagaaacgacgaucggagcucuaauagcaacuguaaaaauccgaacaaugagcgcggaaaccagggcgucaaggggugggcuuucgacaauggagaugacguguggaugggcagaaccauuuccaaggaucuucggucuggguaugaaacauuuaaaguuaucggaggcuggagcaccccuaacuccaagagccaaauuaauagacaggugaucgucgacucugauaaccgcuccggcuacagcgggauuuucucuguggagggaaaauccugcaucaaucgguguuuuuaugucgagcugauuagaggccgcaagcaggaaacacgggugugguggaccagcaacuccaucguuguguucugcgggacgucuggaacauacggcaccgggagcuggcccgacggcgccaauaucaacuucaugccuauuuga

SEQ ID NO: 207853 - RNA, 1410 nt, Artificial Sequence; identical to SEQ ID NO: 206418
  derived and/or modified CDS sequence (opt5) from neuraminidase__InfluenzaA__ABO44082

SEQ ID NO: 207854 - RNA, 1410 nt, Artificial Sequence
  derived and/or modified CDS sequence (opt5) from neuraminidase__InfluenzaA__ABO44093
augaaccccaaucagaagaucauuaccaucggcagcgugucccugacaauugccacggucugcuuccucaugcaaaucgcuauucuggccaccacaguuacccuucacuuuaaacagcaugagugugacucuccugcgagcaaccaggugaugccgugcgaacccaucaucauugagagaaauaucacagaaauuguguaccugaacaauaccacaaucgagaaggaaauuuguccugaggucguggaguaucggaacugguccaaaccccagugccaaaucaccggguucgcuccuuuuucuaaggauaauagcauucgccucuccgccggaggcgacaucuggguuacgagagaacccuacgugucuugugauccugggaaaugcuaucaguucgcccugggacagggcaccacacuugacaacaagcacagcaaugggaccauccaugaucggauuccgcaccgcacacugcucaugaacgagcugggaguccccuuucaucugggcaccaaacagguguguguugcuugguccucuagcuccugccacgacggcaaggccuggcuccacgugugugucacgggggaugacagaaaugcuacagccagcuucaucuacgauggacggcugguggacucuauuggcuccuggagccaaaacauccuucgcacccaggaaucugagugcguguguauuaaugggacaugcaccgucguuaugaccgauggauccgcgagcggcagagccgacacacggauccuguuuaucaaggaggggaaaauugugcauaucuccccucucucuggaagcgcucagcacauugaagagugcuccuguuauccccgcuacccugaugugagaugcaucugucgggacaacuggaagggcagcaaucgccccguccuggacauuucuauggaagauuauuccaucgacagcucuuacgugugcagcggccuuguuggggauacgccgagaaacgacgauuccucuagcaacuccaauugucgggacccuaacaaugagcgcggaaaccccggcgugaaagggugggccuucgauaauggagacgaugucuggaugggcagaaccaucagcaaggaccugcggucuggguacgaaacauuuaaggugauuggaggcugguccaccccuaacagcaaaucucagguuaauagacaagugaucgucgauaacaauaacugguccggcuauagcgggauuuucuccguggagggaaagucuugcaucaaucgcuguuuuuacgucgagcucauucggggcagaagccaggaaacacgcgugugguggaccuccaacucuaucguuguguucugcgggacgagcggaacauauggcaccggguccuggcccgacggcgcuaauauuaacuuuaugcccaucuga

SEQ ID NO: 207855 - RNA, 1410 nt, Artificial Sequence
  derived and/or modified CDS sequence (opt5) from neuraminidase__InfluenzaA__ABO44104
augaaccccaaucagaagaucauuaccaucggcagcgccucccugacaauugcuacggugugcuuccucaugcaaaucgccauucuggucaccacaguuacccuucacuuuaaacagcaugagugugacucuccugcgagcaaccaggugaugccgugcgaacccaucaucauugagagaaauaucacagaaauuguguaccugaacaauaccacaaucgagaaggaaauuuguccuaaagucguggaguaucggaacugguccaagccccagugcaaaaucaccggguucgcuccuuuuucuaaggauaauagcauucgccucuccgccggaggcgacaucuggguuacgagagagcccuacgugucuugugauccugggaagugcuaucaauucgcccugggacagggcaccacacuugacaacaaacacagcaaugauaccauccaugaccggauuccgcaccgcacacugcucaugaacgaacuggggguccccuuucaucugggaaccagacagguguguaucgcuugguccucuagcuccugccacgauggcaaggccuggcuccacguuugugugacgggcgacgauaaaaaugcuacagccagcuucauuuacgacgggcggcuggucgauucuaucggauccuggagccagaacauucuucgcacccaagagucugaaugcguguguaucaauggcacaugcaccguggucaugaccgacggguccgcgagcggcagagccgauacacggauccuguuuauugaggagggaaagaucguucauauuuccccucucucugggagcgcucagcacguggaagagugcuccuguuauccccgcuacccugacgugagaugcaucugucgggacaacuggaaaggaagcaaucgccccgucguggauauuaacauggaagacuauucuaucgauuccagcuacguuugcucuggccuggugggcgacacgccgagaaacgaugaccggagcuccaauucuaacugucgcaauccuaacaaugagaaggggaaccagggagucaagggcugggccuucgauaauggggacgauguguggaugggaagaaccaucagcaaagaccuucgguccggcuacgaaacauuuaagguuauugggggauggagcacccccaacucuaaaucccagaucaauagacaagugauugucgauagcgacaaccgcucuggcuauuccggcaucuucagcguggaggggaaguccugcauuaaucgguguuuuuacgucgagcugaucagaggacgcaaacaggaaacacgggugugguggaccucuaacagcauuguuguguucugcggcacguccgggacauauggaaccggcucuuggccugacggggcuaauaucaaccucaugcccaucuga

SEQ ID NO: 207856 - RNA, 1413 nt, Artificial Sequence
  derived and/or modified CDS sequence (opt5) from neuraminidase__InfluenzaA__ABO44126
augaaccccaaucagaagaucauuaccaucggcagcauuugcauggccaucgggauuaucucccugauccuccaaauuggaaacaucgugucuauuuggaucagccacuccauucagacaggcucucagaauuacacggggaucuguaaccagagaauuaucaccuaugagaauagcacaugggucaaccaaaccuacguuaauaucaacaauacaaacgugguggcuggacaggacaccacauccgucgcccuggcgggcaauucuagccuuugcccuauuuccgggugggcuaucuauagcaaagauaacucuauucggaucggauccaagggcgacguguucguuauucgcgaaccguuuaucagcuguucucaucuggagugcagaaccuucuuucucacgcagggcgcccugcuuaaugauaaacacuccaacgggaccgugaaggaccggagccccuaccgcgcccugaugucuuguccuaucggagaagcucccuccccuuauaauagcagauucgaguccgucgccuggucugcuagcgccugccaugauggcaugggguggcucacaauuggaaucuccggccccgacgauggggcgguggccguucugaaauacaacggaauuaucaccgaaacaauuaagagcuggcggaagcgcauccugagaacccaggagucugagugugugugcgucaacggcuccuguuuuacgaucaugacagacggcccuaauaacgggccggcuagcuauaaaauuuucaagaucgaaaaaggaaagauuaccaaaucuaucgagcucaaugcccccaacagccacuacgaagagugcuccuguuacccugaugcuggcacagugaugugcgugugccgggacaauuggcaugggucuaaccgccccugggucagcuuuaaucaaaaccuggauuaucagauuggauacaucuguuccggcguuuucggggacaauccuagacccaaggauggaaagggcagcugcggcccggugaccguggacggggccgacggagucaaaggcuuuucuuaucgguacgggaacggaguguggauuggccgcaccaaguccaauagcucuagacggggguucgagaugaucugggauccuaacggcuggacagacacggauuccaaauuucuuguuaagcaggacguggucgcgaucaccgauuggagcggauauuccggcucuuucgugcagcaccccgaacugacagggcucgacuguaugcgcccuugcuuuuggguugagcugauuagaggacggcccagagaaaauaccacaaucuggaccagcggcuccucuauuagcuucuguggggugaacggagauacggccaauugguccuggcccgacggcgcugagcuuccuuucacaaucgauaaauga

SEQ ID NO: 207857 - RNA, 1413 nt, Artificial Sequence
  derived and/or modified CDS sequence (opt5) from neuraminidase__InfluenzaA__ABO52228
augaaccccaaucagaagaucauuaccaucggcagcauuuccaucgccauugggaucaucucucugauucuccaaaucggaaacauuaucagcauuugggcuucccacucuauccagacaggcagccagaaucauacggggauuugcaaccagagaaucaucaccuacgagaauagcacaugggugaaccaaaccuaugucaauauuaacaauacaaacguuguggccggaaaagacaagaccucuaugacacuggcgggcaauagcucccuuuguccuauccgggggugggcuauuuacaccaaagauaacagcauccgcauuggaucuaagggcgacguguucgucaucagagaaccguuuaucuccugcagccaccuggagugucggacguucuuucucacccagggcgcccugcuuaaugauaaacauucuaacgggacagugaaggaccgcucccccuauagagcccugaugagcugcccucucggagaagcucccucuccuuacaauuccaaguucgagagcguugccugguccgcuucugccugucacgauggccugggguggcugaccauuggaaucagcggccccgacaacggggcgguggccguccucaaauauaacggaauuaucacagaaaccauuaaguccuggaaaaagcggauccugcgcacgcaggagagcgagugcguguguaugaauggcucuugcuuuacaaucaugaccgauggcccuuccaacggggcugccagcuacagaauuuucaaaaucgaaaagggacggguuacaaagucuauugagcuugacgcuccgaauuaucauuacgaagaguguagcugcuaccccgauaccggcaccgugaugugugucugccgcgacaacuggcacggguccaauagaccuugggugucuuuuaaccagaaucuggauuaucaaaucggauacauuugcagcggcguguucggggacaacccccggccuaaagauggagagggcuccuguaaucccgucacaguugacggcgccgacggggugaagggauuuagcuaucgcuacggcaacgggguguggaucggaagaacgaaaucuaaucggcuccgcaagggcuucgaaaugauuugggauccgaacggguggaccgacacagauuccgacuuuagcaugaaacaggauaucgucgcgaugaccgacuggucuggcuauuccggauccuucgugcagcacccugagcugacaggccuugauugcaugagacccuguuuuuggguugaacuggugcgggggcucccuagagagaauaccacgaucuggacauccggaucuagcauuuccuucugcggcgucaacucugacaccgccaauuggagcuggcccgauggggcugaacugcccuucaccaucgacaaguga

SEQ ID NO: 207858 - RNA, 1410 nt, Artificial Sequence
  derived and/or modified CDS sequence (opt5) from neuraminidase__InfluenzaA__ABO52239
augaaccccaaucagaagaucauuaccaucggcagcgugucccugacaauugccacggucugcuucaucaugcaaauugcuauccucgccaccacaguuacccugcacuuuaaacagcaugagugugacucuccugcgagcaaccaggugaugccgugcgaacccaucauuaucgagagaaauauuacagaaaucguguaccuuaacaauaccacaauugagaaggaaaucuguccugaggcugucgaguaucggaacugguccaaaccccagugccaaauuaccggguucgccccuuuuucuaaggauaauagcauccgccuguccgccggaggcgacaucugggugacgagagaacccuacguuucuugugauccugggaaaugcuaucaguucgcucucggacagggcaccacacuggacaacaagcacagcaaugggaccauucaugaucggaucccgcaccgcacacuucugaugaacgagcucggagugcccuuucaucugggcaccaagcaggucuguguggccugguccucuagcuccugccacgacggcaaggcuuggcugcacguuugugugacgggggaugacaaaaaugccacagcgagcuucauuuacgauggaagacucgucgacucuaucggcuccuggagccaaaacauucugcggacccaggaaucugagugcguguguaucaaugggacaugcaccguggucaugaccgauggauccgccagcggccgcgcugacacaagaauccuuuuuauuaaagaggggaagaucguucauauuuccccucugucuggaagcgcccagcacguggaagagugcuccuguuauccccgguacccugaugugcgcugcaucuguagagacaacuggaaaggcagcaaucggcccgucauugacaucaacauggaagauuauucuaucgacuccagcuacgugugcucuggccucguuggggauacgccgcgcaacgacgauagcuccucuaauagcaacuguagagacccuaauaacgagcggggaaaucccggcgugaaggggugggcuuucgauaacggagacgaugucuggaugggccgcaccauuaauaaggacuccagaagcggguacgaaacauuuaaagugaucggaggcuggucuaccccuaacuccaagagccagguuaaucggcaagugauugucgauaacaauaacuggucuggcuauuccgggaucuucagcguggagggaaaauccugcauuaauagauguuuuuacgucgagcugauccgcggccggccccaggaaacaagagugugguggaccucuaacagcauuguuguguucugcgggacguccggaacauauggcaccgggucuuggcccgacggcgccaauaucaacuuuaugccuaucuga

SEQ ID NO: 207859 - RNA, 1410 nt, Artificial Sequence; identical to SEQ ID NO: 207855
  derived and/or modified CDS sequence (opt5) from neuraminidase__InfluenzaA__ABO52250

SEQ ID NO: 207860 - RNA, 1413 nt, Artificial Sequence
  derived and/or modified CDS sequence (opt5) from neuraminidase__InfluenzaA__ABO52261
augaaccccaaucagaagaucauuaccaucggcagcauuugcauggccaucgggauuaucucccugauccuccaaauuggaaacaucauuucuaucugggugagccacuccauucagacaggcucucagaaucauacggggaucuguaaccagagaauuaucaccuacgagaauagcacaugggucaaccaaaccuauguuaauaucaacaauacaaacgugguggcuggaaaagacaccacauccgucacccuggccggcaauucuagccuuugcccuauucgggggugggcgaucuacuccaaggauaacagcauucgcaucggaucuaaaggcgacguguucguuauuagagaaccguuuaucuccuguagccaccuggagugccggacguucuuucucacccagggcgcucugcuuaaugauaagcauucuaacgggacagugaaagaccgcucccccuauagagcccugaugagcuguccuaucggagaagcccccucuccuuacaauucccgguucgagagcgucgcuugguccgccucugcuugccacgauggcaugggguggcucaccauuggaaucagcggccccgacgauggggccguggcgguucugaaguauaacggaauuaucacagaaaccauuaaguccuggcgcaaaagaauccugcggacgcaggagagcgagugugugugcgucaacggcucuuguuuuacaaucaugaccgacggcccuuccaaugggccggccagcuaccgcauuuucaagaucgaaaaaggaaagauuacaaaaucuaucgagcucgaugcucccaacagccauuaugaagagugcuccuguuacccugacaccggcaccgugaugugcgugugcagagauaauuggcacgggucuaaccggcccugggucagcuuuaaucagaaccuggacuaccaaauuggauauaucuguuccggcguuuucggggauaauccucgccccaaggacggaaagggcagcugcgacccggugacaguggauggcgccgacggggucaaaggauuuucuuacagauauggcaacgggguguggauuggacggacgaaguccaauagcucucgcaaaggcuucgagaugaucugggauccugacggguggaccgauacagacuccaacuuucuuguuaagcaggauguggucgcuaugaccgacuggagcggcuacuccggaucuuucgugcagcaccccgaacugacaggccucgauuguaucagaccuugcuuuuggguugagcugauucgggggagaccccgcgagaaaaccacgaucuggacaagcggauccucuauuagcuucuguggcgucaauuccgacaccgugaacuggagcuggcccgauggggccgaacuuccuuucaccaucgacaaguga

SEQ ID NO: 207861 - RNA, 1413 nt, Artificial Sequence
  derived and/or modified CDS sequence (opt5) from neuraminidase__InfluenzaA__ABO52283
augaaccccaaucagaagaucauuaccaucggcagcauuugcaugacaaucgggacgauuucccugauccuccaaaucggaaacauuaucucuauuuggaucagccacuccauucagaccggcucucagaaucauacagggaucuguaaccagagaauuaucaccuacgagaauaacacaugggugaaucaaaccuaugucaacaucagcaauacaaacguuguggccggaaaagacaccacguccaugauucuggcuggcaauucuagccuuugcccuauccgggggugggccauuuacuccaaggauaacagcauccgcauuggaucuaaaggcgacguguucgucaucagagaaccguuuaucuccuguagccaccuggagugccggaccuucuuucucacacagggcgcgcugcuuaaugauaagcauucuaacgggaccgugaaagaccgcucccccuauagagcucugaugagcuguccuauuggagaagcccccucuccuuacaauucccgguucgagagcguugccugguccgcuucugccugccacgauggcaugggguggcucacaaucggaauuagcggccccgacgauggggcuguggccguccugaaguauaacggaaucauuaccgaaaucaucaaguccuggcgcaaacagauucugagaacgcaggagagcgagugugugugcguuaacggcucuuguuuuacaaucaugaccgacggcccuuccgaugggccggcgagcuaccggauuuucaagaucgaaaaaggaaagauuacaaaaucuaucgagcucgacgcccccaauagccauuaugaagagugcuccuguuacccugauaccggcaaggugaugugcgucugccgcgacaacuggcacgggucuaauagacccugggugagcuuuaaccaaaaucuggauuaccagauuggauauaucuguuccggcguguucggggacaacccucggcccaaggacggaaaaggcagcugcgauccggucaauguugacggcgcugauggggugaagggauuuucuuaccgcuauggcgacgggguguggaucggaagaaccaaauccaacagcucucggaagggcuucgagaugauuugggauccuaauggguggacagacacggaugacaacuuucuugucaaacaggaugugguugccaugaccgacugguccggcuacagcggauccuucgugcagcaccccgaacugacaggccucgauuguaugcgcccuugcuuuugggucgagcugaucagagggcggcccagagaaaagaccacaauuuggaccucuggaagcuccaucucuuucuguggcgugaauagcgacacgguuaacugguccuggcccgacggggcugagcuuccuuucacaauugauauguga

SEQ ID NO: 207862 - RNA, 1410 nt, Artificial Sequence; identical to SEQ ID NO: 207590
  derived and/or modified CDS sequence (opt5) from neuraminidase__InfluenzaA__ABO52294

SEQ ID NO: 207863 - RNA, 1410 nt, Artificial Sequence
  derived and/or modified CDS sequence (opt5) from neuraminidase__InfluenzaA__ABO52316
augaaccccaaucagaagaucauuaccaucggcagcgugucccugacaauugccacgaucugcuuccucaugcaaauugcuauccuggucaccacaguuacccuucacuuuaaacaguacgagugugacucuccugccaacaaucagaucaugccgugcgaacccacaauuaucgagagaaacauuaccgaaaucguguaucugacaaauauuaccaucgagaaggaaauuuguccuaaacucguggaguaccggaacuggagcaagccccagugcaaaaucacgggguucgcgccuuuuuccaaggauaauucuauccgccugagcgcuggaggcgacauuugggucaccagagagcccuauguguccugugauccuucucggugcuaccaauucgcccuugggcagggaacaacccuggacaacaagcauagcaaugauacaauccacgaccgcaccccgcauagaacgcuccugaugaacgaacugggcguucccuuucaccucgggacacgccagguguguauugccugguccucuagcuccugccaugauggaaaggcuuggcugcacgucugugugaccggcuaugacaaaaaugccacagcuagcuucaucuacgauggccggcuuguugacucuauuggguccuggagccagaacauccugagaacccaagagucugaaugcguguguaucaauggaaccugcacagucgugaugacggauggcuccgccagcgggcgggcggacaccaaaauucucuuuaucgaggagggaaagauugugcacaucuccccucugucuggcagcgcccagcaugucgaagagugcuccuguuauccccgcuacccugggguuagaugcauuugucgggauaacuggaaaggaagcaaucgccccgugguggacaucaacgucaaggacuacucuaucgauuccagcuaugugugcucuggccuuguuggcgacacaccgagaaagaacgaucggagcuccaauucuuacugucgcaacccuaauaacgaaaaagggaaucacggagugaagggcugggcuuucgacgaugggaacgacgucuggaugggaagaaccauuagcgaggauucccggagcggcuaugaaacauuuaaagugaucgggggauggucuacccccaauuccaagcugcagauuaacagacagguuaucguggacagcgauaaucgcucuggcuacuccggcauuuucagcgucgaggggaaauccugcaucaaccgguguuuuuauguggagcucauuagaggacgcgaacaagagacgcgggucugguggacaucuaauagcaucgugguuuucugcggcaccuccgggaccuacggagccggcucuuggccugacggggcugauaucaaccugaugcccauuuga

SEQ ID NO: 207864 - RNA, 1410 nt, Artificial Sequence; identical to SEQ ID NO: 206186
  derived and/or modified CDS sequence (opt5) from neuraminidase__InfluenzaA__ABO52327

SEQ ID NO: 207865 - RNA, 1410 nt, Artificial Sequence
  derived and/or modified CDS sequence (opt5) from neuraminidase__InfluenzaA__ABO52338
augaaccccaaucagaagaucauuaccaucggcagcgugucccugacaauugccacgaucugcuuccucaugcaaauugcuauccuggucaccacaguuacccuucacuuuaaacaguacgagugugacucuccugccaacaaucaggugaugccgugcgaacccaucauuaucgagagaaacauuacagaaaucguguaucugaccaauacaaccauugagaaggaaaucuguccuaaacucgucgaguaccggaacuggagcaagccccagugcaaaauuacgggguucgcgccuuuuuccaaggauaauucuauccgccugagcgcuggaggcgacaucugggugaccagagagcccuauguuuccugugauccugggaagugcuaccaauucgcccuuggacagggcacaacccuggacaacaaacauucuaaugauacaauucacgaccggaccccgcaucgcacgcuccugaugaacgaacugggggugcccuuucaccucggaacaagacaggucuguaucgccuggagcuccagcucuugccaugauggcaaggcuuggcugcacguguguguuaccggcuaugacaaaaaugccacagcuuccuucauuuacgaugggcggcuuguggacagcaucggaucuugguccaagaacauucugcgcacccaggagagcgaaugcgucuguaucaauggaaccugcacaguggugaugacggaugggucugccuccggcagagcggacaccaaaauccucuuuauugaggagggcaagaucguccacauuagcccucuguccgggucugcccaacauguugaagagugcagcuguuauccccgguacccuggagugcgcugcaucuguagagauaacuggaagggcuccaaucggcccguggucgacauuaacgugaaagacuacagcaucgauucuuccuauguuugcagcggccuugugggggacacaccgcgcaacaaugauagaucuagcuccucuuacugucggaacccuaauaacgaaaagggaaaucacggcgucaaagggugggcuuucgacgauggaaacgacguguggaugggccgcaccaucagcgaggauuccagaagcggguaugaaacauuuaagguuauuggaggcuggucuacccccaauuccaaacugcagaucaacagacaggugauugucgacagcgauaaucggucuggcuacuccgggaucuucagcguggagggaaaguccugcauuaaccgcuguuuuuaugucgagcucauccggggcagagaacaggagacgcgcgugugguggacaucuaauagcauuguuguguucugcgggaccuccggaaccuacggcacagggucuuggccugacggcgccgauaucaaccugaugcccaucuga

SEQ ID NO: 207866 - RNA, 1410 nt, Artificial Sequence
  derived and/or modified CDS sequence (opt5) from neuraminidase__InfluenzaA__ABO52349
augaaccccaaucagaagaucauuaccaucggcagcgugucccugacaauugccacgaucugcuuccucaugcaaauugcuauccuggucaccacaguuacccuucacuuuaaacaguacgagugugacucuccugccaacaaucaggugaugccgugcgaacccaucauuaucgagagaaacgugacagaaauugucuaucugaccaauacaaccaucgagaaggaaauuuguccuaaacucguggaguaccggaacuggagcaagccccagugcaaaaucacgggguucgcgccuuuuuccaaggauaauucuauucgccugagcgcuggaggcgacaucuggguuaccagagagcccuauguguccugugauccugggaagugcuaccaauucgcccuuggacagggcacaacccuggacaacaaacauucuaaugauacaauccacgaccggaccccguaucgcacgcuccugaugaacgaacuggggguccccuuucaucucggaacaagacagguguguauugccuggagcuccagcucuugccacgauggcaaggcuuggcugcauguuugugugaccggcuacgacaaaaaugccacagcuuccuucaucuaugaugggcggcuugucgacagcauuggaucuugguccaagaacauccugcgcacccaggagagcgaaugcguguguauuaaugggaccugcacaguggucaugacggauggcucugccuccgagagagcggacaccaaaauccucuuuaucgaggaaggaaagauuauccacauuagcccucuguccggcucugcccaacacguugaggaaugcagcuguuacccccgguacccuggggugcgcugcaucuguagagauaacuggaagggauccaaucggcccguggucgacauuaacaugcgcgacuauagcaucgugucuuccuacguuugcagcggccuugugggcgauacaccgcggaaaaacgacagaucuagcuccucuuauugucgcaauccuaacaaugagaaggggaaccauggagucaaaggcugggcuuucgaugacgggaaugauguguggaugggaagaaccaucagcgaagagucccggagcggcuacgagacauuuaagguuauugggggauggucuacccccaacuccaaacugcagaucaauagacaggugauugucgacagcaacaaucgcucuggcuauuccggcaucuucagcguggaagggaaguccugcauuaaccgguguuuuuacgucgagcucaucagaggacgcgaacaggagacgcgggugugguggacaucuaauagcauuguuguguucugcggcaccuccgggaccuauggaacaggcucuuggccugauggggccgacaucaaccugaugcccaucuga

SEQ ID NO: 207867 - RNA, 1410 nt, Artificial Sequence
  derived and/or modified CDS sequence (opt5) from neuraminidase__InfluenzaA__ABO52360
augaaccccaaucagaagaucauuaccaucggcagcgugucccugacaauugccacggucugcuuccucaugcaaaucgcuauucugguuaccacagugacccuucacuuuaaacaguacgagugugacucuccugccagcaaccaggugaugccgugcgaacccaucaucauugagagaaauaucacagaaauugucuaucugaacaauaccacaaucgagaaggaaauuuguccuaaagugguugaguaccggaacugguccaagccccagugccaaaucaccggguucgcgccuuuuucuaaagauaauagcauucgccucuccgcuggaggcgacaucugggugacgagagagcccuaugucucuugugaucaugggaagugcuaccaguucgcccugggacagggcaccacacuugacaacaagcacagcaaugauaccauccaugaccggauuccucaccgcacacugcucaugaacgaacugggggugccguuucaucugggaaccagacagguuuguaucgccugguccuccucuuccugccacgauggcaaggcuuggcuccacguguguauuacgggcgacgauaaaaaugccacagcuagcuucaucuaugacgggcggcuggucgauucuauuggauccuggagccaaaacauccuucgcacccaggagucugaaugcguguguaucaauggcacaugcaccguggucaugaccgacggguccgccagcggcagagcggauacacggauucuguuuaucgaggagggaaaaauuguucauaucagcccccucucugggagcgcccagcacguggaagagugcuccuguuacccucgcuaucccggagugagaugcauuugucgggacaacuggaagggcagcaaucgcccugucguggacaucaacauggaagauuacucuaucgacuccagcuacguuugcucuggccuggugggggauacgcccagaaacgacgaucggagcuccaauucuaacugucgcaauccgaacaaugagagaggaaaccagggcgucaaagggugggcuuucgacaauggaaacgauguguggaugggccggaccauuagcaaggaccuuagauccggguaugaaacauuuaagguuaucggaggcuggagcaccccuaauucuaaaucccaaauuaaccgccaggugaucgucgauagcgacaaucggucuggcuacuccgggauuuucagcguggagggaaaguccugcaucaacagauguuuuuaugucgagcugauucgcggccggaaacaggaaacaagagugugguggaccucuaauagcaucguuguguucugcgggacguccggaacauacggcaccgggucuuggcccgauggcgccaacaucaauuuuaugccuauuuga

SEQ ID NO: 207868 - RNA, 1410 nt, Artificial Sequence
  derived and/or modified CDS sequence (opt5) from neuraminidase__InfluenzaA__ABO52371
augaaccccaaucagaagaucauuaccaucggcagcgugucccugacaauugccacggucugcuuccucaugcaaaucgcuauucugguuaccacagugacccuucacuuuagacaguacgagugugacucuccugccaacaaucaggugaugccgugcgaacccaucaucauugagcggaacaucacagaaauugucuaucugaauaacaccacaaucgagaaagaaauuuguccuaagcucguggaguaccgcaauuggagcaaaccccagugcaagaucaccggguucgcgccuuuuuccaaagauaacucuauuagacugagcgcuggaggcgacaucuggguuacgcgggagcccuauguguccugugauccugggaagugcuaccaauucgcccuuggacagggcaccacacuggacaauaagcauucuaacgauaccauccacgaccgcauuccgcauagaacacuccugaugaaugaacuggggguccccuuucaccucggaaccagacagguguguaucgccuggagcuccagcucuugccaugauggcaaggcuuggcugcacguuugugugacgggcgacgauaaaaacgccacagcuuccuucauuuaugacgggaaacuugucgauagcaucggaucuuggucccagaauauucugcgcacccaagagagcgaaugcguguguaucaacggcacaugcaccguggucaugaccgacgggucugccuccggacgggcggauacacggauccucuuuauugaggagggcaagaucguucacauuagcccucuguccgggucugcccagcauguggaagagugcagcuguuacccccgcuauccuggagugagaugcaucugucgggacaauuggaaaggcuccaaccgccccgucguggacauuaacguugaagauuacagcaucgacucuuccuacgugugcagcggccuugucggggauacgccgagaaauaacgaccggucuggaaauagcaacugucgcaauccuaacaaugagagaggcaaccacggggugaagggaugggcuuucgaugacggcaaugauguuuggauggggcggaccaucaacaaggaccugagauccggauaugaaacauuuaaagugauuggcggcuggucuacccccaauagcaagucccagaucaaccgccaggucauuguggauagcgacaaucggucuggguacuccggaaucuucagcgucgagggcaaaucuugcauuaacagauguuuuuauguggagcucauccgcgggcgggaacaagagacaagaguuugguggaccuccaauagcauuguggucuucugcggaacguccggcacauacgggaccggcucuuggccugauggagccgacaucaaccugaugcccaucuga

SEQ ID NO: 207869 - RNA, 1413 nt, Artificial Sequence
  derived and/or modified CDS sequence (opt5) from neuraminidase__InfluenzaA__ABO52800
augaaccccaaucagaagaucauuaccaucggcagcauuugcaugacaaucgggauuaucucccugauccuccaaauuggaaacaucauuucuaucugggugagccacuccauucagacgggcucucagaaucauaccgggaucuguaaccagagaauuaucacauacgagaauagcaccugggucaaccaaacauauguuaauaucaacaauaccaacgugguggccggaaaagacacaaccuccgucacgcuggcuggcaauucuagccuuugcccuauucgggggugggccaucuacuccaaggauaacagcauucgcaucggaucuaaaggcgacguguucguuauuagagaaccguuuaucuccuguagccaccuggagugccggaccuucuuucucacacagggcgcgcugcuuaaugauaagcauucuaacgggaccgugaaagaccgcucccccuauagagcucugaugagcuguccuaucggagaagcccccucuccuuacaauucccgguucgagagcgucgccugguccgcuucugccugccacgauggcaugggguggcucacaauuggaaucagcggccccgacgauggggcuguggccguucugaaguauaacggaauuaucaccgaaacgauuaaguccuggcgcaaaagaauccugcggacacaggagagcgagugugugugcgucaacggcucuuguuuuaccaucaugacagacggcccuuccaaugggccggcgagcuaccgcauuuucaagaucgaaaaaggaaagauuaccaaaucuaucgagcucgaugcccccaacagccauuaugaagagugcuccuguuacccugacaccggcacagugaugugcgugugcagagauaauuggcacgggucuaaccggcccugggucagcuuuaaucagaaccuggacuaccaaauuggauauaucuguuccggcguuuucggggauaauccucgccccaaggacggaaagggcagcugcgacccggugacgguggauggcgcugacggggucaaaggauuuucuuacagauauggcaacgggguguggauuggacggaccaaguccaauagcucucgcaaaggcuucgagaugaucugggauccuaacggguggacagacaccgauuccaauuuucuuguuaagcaggacguggucgccaugacagauuggagcggcuacuccggaucuuucgugcagcaccccgaacugaccggccucgacuguaugagaccuugcuuuuggguugagcugauccgggggagaccccgcgaacggacgacaauuuggaccagcggauccucuaucagcuucuguggcgugaacuccgauaccgcuaauuggagcuggcccgacggggccgagcuuccuuucacaauugauaaauga

SEQ ID NO: 207870 - RNA, 1413 nt, Artificial Sequence; identical to SEQ ID NO: 206900
  derived and/or modified CDS sequence (opt5) from neuraminidase__InfluenzaA__ABP49220

SEQ ID NO: 207871 - RNA, 1413 nt, Artificial Sequence
  derived and/or modified CDS sequence (opt5) from neuraminidase__InfluenzaA__ABP49319
augaaccccaaucagaagaucauuaccaucggcagcauuugcauggccaucgggauuaucucccugauccuccaaauuggaaacaucauuucuaucugggugagccacuccauucagacaggcucucagaaucauacggggaucuguaaccagagaauuaucaccuacgagaauaacacaugggucaaucaaaccuauguuaacaucagcaauacaaacgugguggcuggaaaagacaccacauccaugauucuggccggcaauucuagccuuugcccuauccgggggugggcgauuuacuccaaggauaacagcauccgcauuggaucuaaaggcgacgucuucgugaucagagaaccguuuaucuccuguagccaccuggagugccggaccuucuuucucacgcagggcgcucugcuuaaugauaagcauucuaacgggaccguuaaagaccgcucccccuauagagcccugaugagcuguccuauuggagaagcccccucuccuuacaauucccgguucgagagcguggcuugguccgccucugcuugccacgauggcaugggguggcucacaaucggaauuagcggccccgacgauggggccgucgcggugcugaaguauaacggaaucauuaccgaaacaaucaaguccuggcgcaaacagauccugagaacccaggagagcgaguguguuugcgugaacggcucuuguuuuacgauuaugacagacggcccuuccgaugggccggccagcuaccggaucuucaagauugaaaaaggaaagaucaccaaaucuauugagcucgacgcucccaauagccauuaugaagagugcuccuguuacccugauacaggcaaggucaugugcgugugccgcgacaacuggcacgggucuaauagacccugggugagcuuuaaccaaaaucuggauuaccagaucggauauauuuguuccggcgucuucggggacaacccucggcccaaggacggaaaaggcagcugcgauccgguuaauguggacggcgccgauggggugaagggauuuucuuaccgcuauggcaacggggucuggaucggaagaaccaaauccaauagcucucggaagggcuucgagaugaucugggacccuaacggguggaccgauacagacggcaauuuucuugugaaacaggauguuguggcuaugacggacugguccggauacagcggcuccuucguccagcaccccgaacugaccgggcucgauuguaugcgcccuugcuuuuggguggagcugauuagaggacggcccagagaaaagacaaccaucuggacaucuggcagcuccauuucuuucugugggguuaacagcgacaccgugaauugguccuggcccgauggagccgagcuuccuuucacgaucgacaaauga

SEQ ID NO: 207872 - RNA, 1410 nt, Artificial Sequence
  derived and/or modified CDS sequence (opt5) from neuraminidase__InfluenzaA__ABP49330
augaaccccaaucagaagaucauuaccaucggcagcauuugcaugguggucgggaucauuucccugauccuccaaaucggaaacauuaucucuauuuggaucagccacuccauucagacaggcucucagaaucauacggggaucuguaaccagagcauuaucaccuacaaaaauuccacauggguuaaccaaaccuaugugaauaucucuaacacaaauguggucgccggaaagggcaccacaccugugauucuggcugggaacagcucccuuugcccgaucagaggaugggccauuuacagcaaagacaauggcauccggauuggcucuaagggggauguuuucgugauccgcgagcccuuuaucuccuguagccaccuggaaugcagaaccuucuuucucacgcagggagcgcugcuuaacgacaaacauucuaauggcaccgucaaggaucgguccccuuaucgcgcucugaugagcugucccgugggggaggccccuucucccuacaacuccagauucgaaagcguugccugguccgcuugcgccugucacgacggaaugggcuggcucacaauugggaucucuggaccugaugacgaggcuguggccguccugaaguauaauggcauuaucaccgaaacaauuaaaagcuggcggaagaaaauccugcgcacccaggaguccgagugcgugugugugaacggcagcugcuuuacgaucaugacagaugggccgucugacggacccgcguccuacaagauuuucaaaaucgaaaagggcaaggucaccaaaagcauugagcucgaugccccuaacucucauuaugaagaguguagcugcuaccccgacacagggaagguuaugugcguguguagagauaauuggcacggauccaaccggccuugggugucuuuugaccagaaucuggauuaccaaaucggcuauauuugcagcggggucuucggagacaacccccgcccgaaagacggcaagggcuccugugggccuguguacguugauggagcuaauggcgugaaaggguuuagcuauagauacggaaacggcgucuggaucgggcggauuaagucuaauuccagccgccagggcuucgagaugaucugggaccccaacggauggaccgaaaccgauucuuccuuuuucgugaaacaggacguuguggccaugacagauuggagcggcuauuccgggucuuuuguccagcacccugagcuuacgggacuggacugcaugagacccuguuucuggguggaacucauccggggccgccccaaggagaagaccauuuggacaagcggguccucuaucagcuucugcggagucaauuccgauaccguggacuggagcuggccugauggcgcugaacugccguuuacaauugacaaauga

SEQ ID NO: 207873 - RNA, 1413 nt, Artificial Sequence
  derived and/or modified CDS sequence (opt5) from neuraminidase__InfluenzaA__ABP49352
augaaccccaaucagaagaucauuaccaucggcagcauuugcaugacaaucgggauuaucucccugauccuccaaauuggaaacaucauuucuaucugggugagccacuccauucagacgggcucucagaaucauaccgggaucuguaaccagagaauuaucacauacgagaauagcaccugggucaaccaaacauauguuaauaucaacaauaccaacgugguggccggaaaagacacaaccuccgucgcucuggccggcaauucuagccuuugcccuauucgggggugggcgaucuacuccaaggauaacagcauucgcaucggaucuaaaggcgacguguucguuauuagagaaccguuuaucuccuguagccaccuggagugccggacguucuuucucacccagggcgcucugcuuaaugauaagcauucuaacgggacagugaaagaccgcucccccuauagagcccugaugagcuguccuaucggagaagcccccucuccuuacaauucccgguucgagagcgucgcuugguccgccucugcuugccacgauggcaugggguggcucaccauuggaaucagcggccccgacgauggggccguggcgguucugaaguauaacggaauuaucacagaaaccauuaaguccuggcgcaaaagaauccugcggacgcaggagagcgagugugugugcgucaacggcucuuguuuuacaaucaugaccgacggcccuuccgaugggccggccagcuaccgcauuuucaagaucgaaaaaggaaagauuacaaaaucuaucgagcucgacgcucccaauagccauuaugaagagugcuccuguuacccugauaccggcaccgugaugugcgugugcagagacaacuggcacgggucuaaucggcccugggucagcuuuaaccagaaucuggauuaccaaauuggauauaucuguuccggcguuuucggggacaacccucgccccaaggacggaaagggcagcugcggcccggugacaguggauggggccgacggagucaaaggcuuuucuuacaaguaugggaauggaguguggauuggcagaacgaaauccaacagcucucggaagggguucgagaugaucugggauccuaauggcuggaccgacacagauuccaacuuucuuguuaaacaggacguggucgcuaugaccgauuggagcggauacuccggcucuuucgugcagcaccccgaacugacagggcucgacuguaugcgcccuugcuuuuggguugagcugaucagaggacggcccagagaacgcaccacgauuuggacaagcggcuccucuaucagcuucugugggguggauuccgacaccgccaauuggagcuggcccgauggagcggagcuuccuuucaccauugacaaguga

SEQ ID NO: 207874 - RNA, 1413 nt, Artificial Sequence; identical to SEQ ID NO: 207770
  derived and/or modified CDS sequence (opt5) from neuraminidase__InfluenzaA__ABP49363

SEQ ID NO: 207875 - RNA, 1410 nt, Artificial Sequence; identical to SEQ ID NO: 206802
  derived and/or modified CDS sequence (opt5) from neuraminidase__InfluenzaA__ABP49374

SEQ ID NO: 207876 - RNA, 1413 nt, Artificial Sequence
  derived and/or modified CDS sequence (opt5) from neuraminidase__InfluenzaA__ABP49385
augaaccccaaucagaagaucauuaccaucggcagcauuuccguggccaucgggauuaucaaccugacacuccaaaucggaaauauuaucucuauuugggcuagccacuccauccagacgggcucucagaacuacaccgggauuugcaaucagagaaucauuacauaugagaaccggaccugggucaaucaaacauacguuaacaucaauaacaccaaugugguggccggaaaagacaagacaagcaugacccuggcgggcaacuccucucuuuguccuauccgcgggugggcuauuuauacgaaagauaauagcaucagaauuggauccaagggcgacgucuucgugauccgggaaccguuuauuagcugcucucaucuggagugucgcaccuucuuucucacacagggcgcccugcuuaacgauaaacacuccaaugggaccaucaaggacagaagccccuuccgggcccugaugucuugcccucucggagaagcucccuccccuuacaacagccgcuuugagucuguugccugguccgcuagcgccugucaugauggccugggguggcugacaaucggaauuuccggccccgacaacggggcgguggccguccucaaguauaauggaaucauuaccgaaacgaucaaaucuuggaagaaacagauucugagaacacaggagagcgagugcguguguguuaacggcuccugcuucaccaucaugacagauggcccuagcaaucgggcugccucuuaccgcaucuuuaagauugaaaaagggagagugaccaaguccaucgagcuugacgcuccgaacuaucacuacgaagaguguagcugcuaccccgauaccggaacagucaugugugugugccgggacaauuggcauggcucuaaccgcccuugggugagcuucaaucaaaaccuggauuaucagauuggguacaucugcuccggagucuuuggcgacaaucccagaccuaaggauggggagggaucuuguaaccccguuacgguggacggcgccgacggcgugaaaggguucagcuaucgguacggaaauggcgucuggauugggcgcaccaaguccaacagacuccggaaaggauuugaaaugaucugggauccgaauggcuggacagacaccgauagcgacuucucuaugaagcaggaugugguugcgaugacagacugguccggguauagcggcucuuuugugcagcacccugagcugaccggacuugauugcaugagacccuguuucugggucgaacuggugcgcggccucccucgggagaacacgacaauuuggaccuccgggagcuccaucucuuucugcggaguuaauagcgaaaccgccaacugguccuggcccgacggcgcugagcugcccuuuacaaucgauaaauga

SEQ ID NO: 207877 - RNA, 1413 nt, Artificial Sequence; identical to SEQ ID NO: 206458
  derived and/or modified CDS sequence (opt5) from neuraminidase__InfluenzaA__ABP49396

SEQ ID NO: 207878 - RNA, 1410 nt, Artificial Sequence
  derived and/or modified CDS sequence (opt5) from neuraminidase__InfluenzaA__ABP49407
augaaccccaaucagaagaucauuaccaucggcagcgugucccugacaauuucuacgaucugcuucuuuaugcaaauugccauccucaucaccacagucacccugcacuucaaacaguacgaguuuaacagcccuccgaauaaccagguuaugcuuugugaacccacaauuaucgagagaaauauuaccgaaaucguguaucugacaaacaccacgauugagaaggaaaucugcccuaaacucgcugaguaccggaauugguccaagccccagugugacauuaccggguucgccccuuuuucuaaagauaacagcauccgccuguccgcgggaggcgacaucugggugacaagagagcccuaugucucuugcgauccugacaaguguuaccaauucgcucuugggcagggaaccacacugaauaacgugcauagcaaugauaccguucacgaccggacgccguaucgcacacuccugauguccgaacugggcgugcccuuucaucucgggaccaagcaggucugcauugccuggucuagcuccagcugucacgauggaaaagccuggcugcaugugugcguuacaggcgacgauaagaacgcuaccgccucuuucaucuacaauggcagacuuguggacuccauugucagcuggucuaaagagauccugcggacccaggaauccgagugugugugcauuaacgggacauguacgguggucaugaccgauggaagcgcuuccggcaaggccgacacaaaaauccucuuuaucgaggaagggaagauuguucacaccucuacacugagcggauccgcgcaacacguggaggaaugcagcugcuauccucgcuaccccggcgugagaugugucugccgggauaauuggaaggggucuaaccgcccuaucguggacauuaacaucaaagacuacuccauuguuagcucuuauguguguagcggacuugucggcgauacccccagaaagaaugacuccucuagcuccagccauugccuggauccgaacaaugaggaaggcgggcacggagugaaaggcugggccuucgacgaugggaacgacguuuggaugggacggacgaucucugagaagcuccgcuccggcuacgagacauuuaaagugaucgaaggguggagcaauccuaacucuaagcugcagauuaauagacaggucaucguggaucggggaaaccgcuccggcuauagcggcauuuucuccgucgaggggaaaaucuguauuaauagaugcuuuuacguggaacugauccggggaagaaaggaggaaaccgagguucucuggaccucuaacagcauuguggucuucuguggcacauccgggaccuauggaacaggcucuuggcccgacggggcugauaucaaucugaugccuaucuga

SEQ ID NO: 207879 - RNA, 1410 nt, Artificial Sequence; identical to SEQ ID NO: 206802
  derived and/or modified CDS sequence (opt5) from neuraminidase__InfluenzaA__ABP49418

SEQ ID NO: 207880 - RNA, 1410 nt, Artificial Sequence; identical to SEQ ID NO: 206802
  derived and/or modified CDS sequence (opt5) from neuraminidase__InfluenzaA__ABP49429

SEQ ID NO: 207881 - RNA, 1410 nt, Artificial Sequence
  derived and/or modified CDS sequence (opt5) from neuraminidase__InfluenzaA__ABP49440
augaaccccaaucagaagaucauuaccaucggcagcgugucccugacaauugccacggucugcuuccucauccaaauugcuauccuggccaccacaguuacccuucacuuuaaacagcaugagugugacucuccugcgagcaaccaggugaugccgugcgaacccaucauuaucgagagaaauauuacagaaaucguguaccugaacaauaccacaauugagaaggaaaucuguccugaggucguggaguaucggaacugguccaaaccccagugccaaauuaccggguucgcuccuuuuucuaaggauaauagcauccgccucuccgccggaggcgacaucuggguuacgagagaacccuacgugucuugugauccugggaaaugcuaucaguucgcccugggacagggcaccacacuugacaacaagcacagcaaugggaccauucaugaucggaucccgcaccgcacacugcucaugaacgagcugggaguccccuuucaucugggcaccaaacagguguguguugcuugguccucuagcuccugccacgacggcaaggccuggcuccacgugugugucacgggggaugacagaaaugcuacagccagcuucauuuacgauggacggcugguggacucuaucggcuccuggagccaaaacauucuucgcacccaggaaucugagugcguguguaucaaugggacaugcaccgucguuaugaccgauggauccgcgagcggcagagccgacacacggauccuguuuauuaaggaggggaaaaucgugcauauuuccccucucucuggaagcgcucagcacaucgaagagugcuccuguuauccccgcuacccugaugugagaugcauuugucgggacaacuggaagggcagcaaucgccccgucaucgacaucaacauggaagauuauucuauugacuccagcuacgugugcucuggccugguuggggauacgccgagaaacgacgauagcuccucuaauagcaacugucgggacccuaauaacgagcgcggaaaucccggcgugaaagggugggccuucgauaacggagacgaugucuggaugggcagaaccaucuccaaggacagccggucuggguacgaaacauuuaaggugauuggaggcugguccaccccuaauagcaaaucucaggcuaacagacaaguuaucguggauaagaauaacugguccggcuauagcgggauuuucuccgucgagggaaaaucuugcaucaaucgcuguuuuuacguggagcuuauucggggcagaccccaggaaacacgcgucugguggaccagcaacuccaucgugguuuucugcgggacgucuggaacauauggcaccgggagcuggcccgacggcgccaauaucaacuuuaugccuauuuga

SEQ ID NO: 207882 - RNA, 1413 nt, Artificial Sequence; identical to SEQ ID NO: 207023
  derived and/or modified CDS sequence (opt5) from neuraminidase__InfluenzaA__ABP49451

SEQ ID NO: 207883 - RNA, 1410 nt, Artificial Sequence
  derived and/or modified CDS sequence (opt5) from neuraminidase__InfluenzaA__ABP49462
augaaccccaaucagaagaucauuaccaucggcagcgugucccugacaauugccacggucugcuucaucaugcaaauugcuauccucgccaccacaguuacccugcacuuuaaacagcaugagugugacucuccugcgagcaaccaggugaugccgugcgaacccaucauuaucgagagaaauauuacagaaaucguguaccuuaacaauaccacaauugagaaggaaaucuguccugaggcugucgaguaucggaacugguccaaaccccagugccaaauuaccggguucgccccuuuuucuaaggauaauagcauccgccuguccgccggaggcgacaucugggugacgagagaacccuacguuucuugugauccugggaaaugcuaucaguucgcucucggacagggcaccacacuggacaacaagcacagcaaugggaccauucaugaucggaucccgcaccgcacacuucugaugaacgagcucggagugcccuuucaucugggcaccaagcaggucuguguggccugguccucuagcuccugccacgacggcaaggcuuggcugcacguuugugugacgggggaugacagaaaugccacagcgagcuucauuuacgauggacggcucgucgacucuaucggcuccuggagccaaaacauucugcgcacccaggaaucugagugcguguguaucaaugggacaugcaccguggucaugaccgauggauccgccagcggcagagcugacacacggauccuuuuuauuaaagaggggaaaaucguucauauuuccccucugucuggaagcgcccagcacaucgaagagugcuccuguuauccccgcuacccugaugugagaugcauuugucgggacaacuggaagggcagcaaucgccccgugaucgacaucaacauggaagauuauucuauugacuccagcuacgucugcucuggccucgugggggauacgccgagaaacgacgauagcuccucuaauagcaacugucgggacccuaauaacgagcgcggaaaucccggcguuaaagggugggcuuucgauaacggagacgauguguggaugggcagaaccaucaauaaggacucccggagcggguacgaaacauuuaaggucauuggaggcuggucuaccccuaacuccaaaagccaggugaauagacaaguuaucguggauaacaauaacuggucuggcuauuccgggauuuucagcgucgagggaaaguccugcaucaaucgcuguuuuuacguggagcugauucggggcagaccccaggaaacacgcgucugguggaccucuaacagcaucgugguuuucugcgggacguccggaacauauggcaccgggucuuggcccgacggcgccaauaucaacuuuaugccuauuuga

SEQ ID NO: 207884 - RNA, 1410 nt, Artificial Sequence; identical to SEQ ID NO: 207832
  derived and/or modified CDS sequence (opt5) from neuraminidase__InfluenzaA__ABP49473

SEQ ID NO: 207885 - RNA, 1410 nt, Artificial Sequence
  derived and/or modified CDS sequence (opt5) from neuraminidase__InfluenzaA__ABP49495
augaaccccaaucagaagaucauuaccaucggcagcgugucccugacaauugccacgaucugcuuccucaugcaaauugcuauccuggucaccacaguuacccuucacuuuaaacaguacgagugugacucuccugccaacaaucaggugaugccgugcgaacccaucauuaucgagagaaacauuacagaaaucguguaucugaccaauacaaccauugagaaggaaaucuguccuaaacucgucgaguaccggaacuggagcaagccccagugcaaaauuacgggguucgcgccuuuuuccaaggauaauucuauccgccugagcgcuggaggcgacaucugggugaccagagagcccuauguuuccugugauccugggaagugcuaccaauucgcccuuggacagggcacaacccuggacaacaaacauucuaaugauacaauucacgaccggaccccgcaucgcacgcuccugaugaacgaacugggggugcccuuucaccucggaacaagacaggucuguaucgccuggagcuccagcucuugccaugauggcaaggcuuggcugcacguguguguuaccggcuaugacaaaaaugccacagcuuccuucauuuacgaugggcggcuuguggacagcaucggaucuuggucccagaacauucugcgcacccaagagagcgaaugcgucuguaucaauggaaccugcacaguggugaugacggaugggucugccuccggcagagcggacaccaagauccucuuuauugaggagggcaaaaucguccacacaagcccucuguccgggucugcccagcauguugaagagugcagcuguuauccccgguacccuggagugcgcugcauuuguagagauaacuggcggggcuccaaucgccccguggucgacaucaacgugaaggacuacagcauugauucuuccuauguuugcagcggccuugugggggacaccccgagaaacaaugaucggucuagcuccucuuacugucgcaacccuaauaacgaaaagggaacacacggcgucaaagggugggcuuucgacgauggaaaugacguguggaugggcagaaccaucagcgaggauucccggagcggguaugaaacguuuaagguuaucggaggcuggucuacacccaacuccaaacugcagauuaauagacaggugaucgucgacagcgauaaccgcucuggcuacuccgggauuuucagcguggagggaaaguccugcaucaaucgguguuuuuaugucgagcucauuagaggccgcgaacaagagacccgggugugguggaccucuaacagcaucguuguguucugcgggacauccggaaccuacggcacagggucuuggccugacggcgccgauauuaaucugaugcccaucuga

SEQ ID NO: 207886 - RNA, 1410 nt, Artificial Sequence; identical to SEQ ID NO: 206175
  derived and/or modified CDS sequence (opt5) from neuraminidase__InfluenzaA__ABP49506

SEQ ID NO: 207887 - RNA, 1410 nt, Artificial Sequence; identical to SEQ ID NO: 206167
  derived and/or modified CDS sequence (opt5) from neuraminidase__InfluenzaA__ABP49517

SEQ ID NO: 207888 - RNA, 1413 nt, Artificial Sequence
  derived and/or modified CDS sequence (opt5) from neuraminidase__InfluenzaA__ABQ01314
augaaccccaaucagaagaucauuaccaucggcagcauuugcauggccaucgggacaauuucccugauccuccaaaucggaaacauuaucucuauuugggugagccacuccauccagacgggcucucagaaucauaccgggauuuguaaccagagaaucauuacauacgagaauaacaccugggucaaucaaacauauguuaacaucagcaauaccaacgugguggcuggaaaagacacaaccuccaugauccuggccggcaauucuagccuuugcccuauucgggggugggcgaucuacuccaaggauaacagcauucgcaucggaucuaaaggcgacgucuucgugauuagagaaccguuuaucuccuguagccaccuggagugccggacguucuuucucacccagggcgcucugcuuaaugauaagcauucuaacgggacaguuaaagaccgcucccccuauagagcccugaugagcuguccuaucggagaagcccccucuccuuacaauucccgguucgagagcguggcuugguccgccucugcuugccacgauggcaugggguggcucaccauuggaaucagcggccccgacgauggggccgucgcggugcugaaguauaacggaauuaucacagaaauuaucaaguccuggcgcaaacagauccugagaacccaggagagcgaguguguuugcgugaacggcucuuguuuuacgauuaugacagacggcccuuccgaugggccggccagcuaccggaucuucaagauugaaaaaggaaagaucaccaaaucuauugagcucgacgcucccaauagccauuaugaagagugcuccuguuacccugauacaggcaaggucaugugcgugugccgcgacaacuggcacgggucuaauagacccugggugagcuuuaaccaaaaucuggauuaccagaucggauauauuuguuccggcgucuucggggacaacccucggcccaaggacggaaaaggcagcugcgauccgguuaauguggacggcgccgauggggugaagggauuuucuuaccgcuauggcaacggggucuggaucggaagaaccaaauccaauagcucucggaagggcuucgagaugaucugggacccuaacggguggaccgauacagacggcaauuuucuugugaaacaggauguuguggcuaugacggacugguccggauacagcggcuccuucguccagcaccccgaacugaccgggcucgauuguaugcgcccuugcuuuuggguggagcugauuagaggacggcccagagaaaagacaaccaucuggacaucuggcagcuccauuucuuucugugggguuaacagcgacaccgugaauugguccuggcccgauggagccgagcuuccuuucacgaucgacaaauga

SEQ ID NO: 207889 - RNA, 1413 nt, Artificial Sequence
  derived and/or modified CDS sequence (opt5) from neuraminidase__InfluenzaA__ABQ01325
augaaccccaaucagaagaucauuaccaucggcagcauuugcauggccaucgggauuaucucccugauccuccaaauuggaaacaucauuucuaucugggugagccacuccauucagacaggcucucagaaucauacggggaucuguaaccagagaauuaucaccuacgagaauagcacaugggucaaccaaaccuauguuaauaucuccaacacaaaugugguggcuggaaaagacaccacaucuaugacccuggccggcaacagcucccuuugcccuauucgggggugggcgaucuacagcaaggauaauucuauucgcaucggauccaaaggcgacgucuucgugauuagagaaccguuuaucagcuguucucaccuggagugccggacguucuuucucacccagggcgcucugcuuaacgauaagcauuccaaugggacaguuaaagaccgcagccccuauagagcccugaugucuuguccuaucggagaagcccccuccccuuacaacagccgguucgaguccguggcuuggucugccagcgcuugccacgauggcaugggguggcucaccauuggaaucuccggccccgacgauggggccgucgcggugcugaaguauaauggaauuaucacagaaaccauuaagagcuggcgcaaacagauccugagaacgcaggagucugaguguguuugcgugaacggcuccuguuuuacaaucaugaccgacggcccuagcgaugggcaagccucuuaccggauuuucaagaucgaaaaaggaaagauuacaaaaagcaucgagcucgacgcuccgaacucccauuaugaagagugcucuuguuaccccgauaccggcaccgucaugugcgugugccgcgacaauuggcacgggagcaacagaccuuggguguccuuuaaucagaaccuggauuaccagauuggauauaucuguagcggcgucuucggggacaauccccggccuaaggacggaaagggcucuugcgaucccguuaacguggacggcgccgauggggugaaaggauuuuccuaccgcuauggcaauggggucuggauuggaagaacaaagagcaacucuucccggaaaggcuucgagaugaucugggacccgaauggguggacggauaccgacagcaacuuucuugugaagcaggauguuguggcuaugacagacugguccggcuacucuggcagcuucguccaacacccugaacugaccggacucgauuguaugcgccccugcuuuuggguggagcugaucagagggcggccuagagagaaaacaaccauuuggacguccggaucuagcaucuccuucuguggcguuaauagcgacacagugaacuggucuuggcccgauggggccgaacuucccuucaccauugacaaguga

SEQ ID NO: 207890 - RNA, 1410 nt, Artificial Sequence; identical to SEQ ID NO: 206802
  derived and/or modified CDS sequence (opt5) from neuraminidase__InfluenzaA__ABQ01336

SEQ ID NO: 207891 - RNA, 1410 nt, Artificial Sequence; identical to SEQ ID NO: 206802
  derived and/or modified CDS sequence (opt5) from neuraminidase__InfluenzaA__ABQ01347

SEQ ID NO: 207892 - RNA, 1410 nt, Artificial Sequence
  derived and/or modified CDS sequence (opt5) from neuraminidase__InfluenzaA__ABQ01358
augaaccccaaucagaagaucauuaccaucggcagcgugucccugacaauugccacggucugcuuccucaugcaaaucgcuauucuggccaccacaguuacccuucacuuuaaacagcaugaguguaacucuccugcgagcaaucaggugaugccgugcgaacccaucaucauugagagaaacaucacagaaauuguguaccugaauaacaccacaaucgagaaggaaauuuguccugaggucguggaguaucggaauugguccaaaccccagugccaaaucaccggguucgcuccuuuuucuaaggacaacagcauucgccucuccgccggaggcgauaucuggguuacgagagaacccuacgugucuugugacccugggaaaugcuaucaguucgcccugggacagggcaccacacuugauaauaagcacagcaacgggaccauccaugaccggauuccgcaccgcacacugcucaugaaugagcugggaguccccuuucaucugggcaccaaacagguguguguugcuugguccucuagcuccugccacgauggcaaggccuggcuccacgugugugucacgggggacgauagaaacgcuacagccagcuucaucuacgacggacggcuggaagauucuauuggcuccuggagccaaaauauccuucgcacccaggagucugagugcguguguauuaacgggacaugcaccguggucaugaccgacggaaaugcguccggcagagccgauacacggauccuguuuaucaaggaagggaaaauuguucauaucagcccucucuccggaucugcucagcacauugaggaaugcagcuguuauccccgcuacccugacgugagaugcaucugucgggauaacuggaagggcuccaaccgccccgugcuggacauuagcauggaggacuauucuaucgauuccagcuacgucugcucuggccuugugggggacacgccgagaaaugaugacagcuccucuaacagcaauugucgggauccuaacaaugaacgcggaaaccccggcguuaaagggugggccuucgacaauggagaugacguguggaugggcagaaccaucuccaaggaucugcggagcggguacgagacauuuaaggucauuggaggcuggucuaccccuaacuccaaaagccaggugaauagacaaguuaucguggacaacaauaacuggucuggcuauuccgggauuuucagcgucgagggaaaguccugcaucaaucgcuguuuuuacguggaacucauucggggcagaucucaggagacacgcgucugguggaccagcaacuccaucgugguuuucugcgggacgucuggaacauauggcaccgggagcuggcccgauggcgcuaauauuaacuuuaugcccaucuga

SEQ ID NO: 207893 - RNA, 1410 nt, Artificial Sequence
  derived and/or modified CDS sequence (opt5) from neuraminidase__InfluenzaA__ABQ01369
augaaccccaaucagaagaucauuaccaucggcagcgugucccugacaauugccacgaucugcuucgucaugcaaauugcuauccucguuaccacagugacccugcacuuuaaacaguacgagugugacucuccugccaacaaucaggugaugccgugcgaacccaucauuaucgagagaaacauuacagaaaucgucuaucuuaccaauacaaccauugagaaggaaaucuguccuaaacugguggaguaccggaacuggagcaagccccagugcaaaauuacgggguucgcgccuuuuuccaaggauaauucuauccgccucagcgcuggaggcgacaucuggguuaccagagagcccuauguguccugugauccugggaagugcuaccaauucgcccugggacagggcacaacccuugacaacaaacauucuaaugauacaauucacgaccggaccccgcaucgcacgcugcucaugaacgaacuggggguccccuuucaccugggaacaagacagguguguaucgccuggagcuccagcucuugccaugauggcaaggcuuggcuccacguuugugugaccggcuaugacaaaaaugccacagcuuccuucauuuacgaugggcggcuggucgacagcaucggaucuuggucccagaacauucuucgcacccaagagagcgaaugcguguguaucaauggaaccugcacaguggucaugacggaugggucugccuccggcagagcggacaccaagauccuguuuauugaggagggcaaaaucguucacacaagcccucucuccgggucugcccagcauguggaagagugcagcuguuauccccgguacccuggagugcgcugcauuuguagagauaacuggaagggcuccaaucggcccgucguggacaucaacguuaaggacuacagcauugauucuuccuaugugugcagcggccuggucggggacaccccgcgcaaaaacgauagaucuagcuccucuuacugucggaauccuaacaaugaaaagggaacacacggcgugaaagggugggcuuucgacgauggaaacgacguuuggaugggccgcaccaucagcgaggauuccagaagcggguaugaaacguuuaaggugaucggaggcuggucuacacccaauuccaaacuucagauuaaccggcaggucaucguggacagcgauaauagaucuggcuacuccgggauuuucagcgucgagggaaaguccugcaucaaccgcuguuuuuauguggagcugauucggggcagagaacaagagacccgcguuugguggaccucuaauagcaucguggucuucugcgggacauccggaaccuacggcacagggucuuggccugacggcgccgauauuaaccucaugcccaucuga

SEQ ID NO: 207894 - RNA, 1410 nt, Artificial Sequence
  derived and/or modified CDS sequence (opt5) from neuraminidase__InfluenzaA__ABQ44386
augaaccccaaucagaagaucauuaccaucggcagcgugucccugacaauugccacgaucugcuuccucaugcaaauugcuauccuggucaccacaguuacccuucacuuuaaacaguacgaguguaacucuccuccgaauaaccaggugaugcugugcgaacccacaaucauugagagaaauaucaccgaaauuguguaucucacaaacaccacgaucgagaaggaaauuuguccuaaacuggccgaguaccggaauuggagcaagccccagugcaacaucaccggguucgcgccuuuuuccaaagacaauucuauucgccuuagcgcuggaggcgauaucugggucacaagagagcccuauguguccugugacccugauaagugcuaccaauucgcccuggggcagggaaccacacucaacaauggccauucuaacgacaccguucacgaucggacgccguaucgcacacugcugaugaaugaacucggggugcccuuucaucugggaaccaagcaggucuguaucgccuggagcuccagcucuugccacgacggcaaagccuggcuucauguguguguuacaggcgaugacgagaacgcuaccgcuuccuucauuuacaaugggagacugguggauagcaucggaucuugguccaagaaaauucuccggacccaggaaagcgagugcgucuguaucaacggcacaugcacgguggugaugaccgacgggucugccuccggaaaggcggauacaaaaauucuguuuaucgaggaaggcaagaucguccacaccagcucccuuucugggagcgcccaacacguugaggaaugcuccuguuauccucgcuaccccggagugagaugcgugugucgggacaacuggaagggcagcaaucgcccuauugucgauaucaacgugaaagacuacucuauuguuuccagcuaugugugcucuggccuggucggggacacacccagaaagaaugauagcuccucuagcucccauugucucgacccgaacaaugaggaaggaggccacggggugaaaggaugggcuuucgaugacggcaacgauguuuggauggggcggaccaucagcgagaagcugcgcucuggauacgagacguuuaaagugauugaaggcugguccaagccuaauagcaaacugcagaucaacagacaggucaucguggaccggggcaaucgcucuggguauuccggaauuuucagcgucgaguccaagucuugcaucaacagauguuuuuacguggaacucauucggggcagaaagcaggagaaugaaguucuguggacaagcaacuccaucguggucuucugcgggaccucuggaaccuauggcacagggagcuggcccgauggcgccgacauuaaucuuaugccuaucuga

SEQ ID NO: 207895 - RNA, 1410 nt, Artificial Sequence; identical to SEQ ID NO: 206786
  derived and/or modified CDS sequence (opt5) from neuraminidase__InfluenzaA__ABQ44408

SEQ ID NO: 207896 - RNA, 1413 nt, Artificial Sequence
  derived and/or modified CDS sequence (opt5) from neuraminidase__InfluenzaA__ABQ44419
augaaccccaaucagaagaucauuaccaucggcagcauuugcauggccaucgggauuaucucccugauccuccaaauuggaaacaucgugucuauuuggaucagccacuccauucagaauggcucucagaacuacacagggaucuguaaucagagaauuaucacguaugagaacagcaccugggucaaucaaacauacguuaacaucaauaacaccaaugugguggcuggacaggacacaaccuccgucgcccuggcgggcaacucuagccuuugcccuauuuccgggugggcuaucuauagcaaagauaauucuauucggaucggauccaagggcgacguguucguuauucgcgaaccguuuaucagcuguucucaucuggagugcagaacauucuuucucacccagggcgcccugcuuaacgauaaacacuccaaugggacggugaaggaccggagccccuaccgcgcccugaugucuuguccuaucggagaagcucccuccccuuauaacagcagauucgaguccgucgccuggucugcuagcgccugccaugauggcaugggguggcucaccauuggaaucuccggccccgacgauggggcgguggccguucugaaauacaacggaauuaucacagaaaccauuaagagcuggcggaagcgcauccugagaacacaggagucugagugugugugcgucaauggcuccuguuuuaccaucaugacggacggcccuaacaaugggccggcuagcuauaaaauuuucaagaucgaaaaaggaaagauuacaaaaucuaucgagcucgaugcccccaacagccacuacgaagagugcuccuguuacccugacgcuggcaccgugaugugcgugugccgggauaauuggcaugggucuaaccgccccugggucagcuuuaaucaaaaccuggacuaucagauuggauacaucuguuccggcguuuucggggauaauccuagacccaaggacggaaagggcagcugcggcccggugacaguggacggggccgauggagucaaaggcuuuucuuaucgguacgggaacggaguguggauuggccgcaccaaguccaauagcucuagacggggguucgagaugaucugggacccuaacggcuggaccgauacagacuccaaauuucuuguuaagcaggauguggucgcgaugacggacuggagcggauauuccggcucuuucgugcagcaccccgaacugaccgggcucgauuguaugcgcccuugcuuuuggguugagcugaucagaggacggcccagagaaaauacaaccauuuggacaagcggcuccucuaucagcuucuguggggugaacggagacaccgccaauugguccuggcccgauggcgcugagcuuccuuucacgauugacaaauga

SEQ ID NO: 207897 - RNA, 1410 nt, Artificial Sequence; identical to SEQ ID NO: 206418
  derived and/or modified CDS sequence (opt5) from neuraminidase__InfluenzaA__ABQ44430

SEQ ID NO: 207898 - RNA, 1410 nt, Artificial Sequence; identical to SEQ ID NO: 207848
  derived and/or modified CDS sequence (opt5) from neuraminidase__InfluenzaA__ABQ44441

SEQ ID NO: 207899 - RNA, 1410 nt, Artificial Sequence; identical to SEQ ID NO: 207832
  derived and/or modified CDS sequence (opt5) from neuraminidase__InfluenzaA__ABQ44463

SEQ ID NO: 207900 - RNA, 1413 nt, Artificial Sequence
  derived and/or modified CDS sequence (opt5) from neuraminidase__InfluenzaA__ABQ44474
augaaccccaaucagaagaucauuaccaucggcagcauuugcaugacaaucgggacgauuucccugauccuccaaaucggaaacauuaucucuauuugggugagccacuccauccagaccggcucucagaaucauacagggauuuguaaccagagaaucauuaccuacgagaauaacacaugggucaaucaaaccuauguuaacaucagcaauacaaacgugguggccggaaaagacaccacguccaugauccuggcuggcaauucuagccuuugcccuauucgggggugggccaucuacuccaaggauaacagcauucgcaucggaucuaaaggcgacgucuucgugauuagagaaccguuuaucuccuguagccaccuggagugccggaccuucuuucucacacagggcgcgcugcuuaaugauaagcauucuaacgggaccguuaaagaccgcucccccuauagagcucugaugagcuguccuaucggagaagcccccucuccuuacaauucccgguucgagagcguggccugguccgcuucugccugccacgauggcaugggguggcucacaauuggaaucagcggccccgacgauggggcugucgccgugcugaaguauaacggaauuaucaccgaaauuaucaaguccuggcgcaaacagauccugagaacgcaggagagcgaguguguuugcgugaacggcucuuguuuuacaauuaugaccgacggcccuuccgaugggccggcgagcuaccggaucuucaagauugaaaaaggaaagaucacaaaaucuauugagcucgacgcccccaauagccauuaugaagagugcuccuguuacccugauaccggcaaggucaugugcgugugccgcgacaacuggcacgggucuaauagacccugggugagcuuuaaccaaaaucuggauuaccagaucggauauauuuguuccggcgucuucggggacaacccucggcccaaggacggaaaaggcagcugcgauccgguuaauguggacggcgcugauggggugaagggauuuucuuaccgcuauggcaacggggucuggaucggaagaaccaaauccaauagcucucggaagggcuucgagaugaucugggacccuaacggguggacagauacggacggcaauuuucuugugaaacaggauguuguggccaugaccgacugguccggauacagcggcuccuucguccagcaccccgaacugacagggcucgauuguaugcgcccuugcuuuuggguggagcugauuagaggacggcccagagaaaagaccacaaucuggaccucuggcagcuccauuucuuucugugggguuaacagcgacacggugaauugguccuggcccgauggagcugagcuuccuuucacaaucgacaaauga

SEQ ID NO: 207901 - RNA, 1410 nt, Artificial Sequence; identical to SEQ ID NO: 206167
  derived and/or modified CDS sequence (opt5) from neuraminidase__InfluenzaA__ABR15800

SEQ ID NO: 207902 - RNA, 1413 nt, Artificial Sequence; identical to SEQ ID NO: 207888
  derived and/or modified CDS sequence (opt5) from neuraminidase__InfluenzaA__ABR15811

SEQ ID NO: 207903 - RNA, 1413 nt, Artificial Sequence; identical to SEQ ID NO: 206900
  derived and/or modified CDS sequence (opt5) from neuraminidase__InfluenzaA__ABR15910

SEQ ID NO: 207904 - RNA, 1410 nt, Artificial Sequence; identical to SEQ ID NO: 206226
  derived and/or modified CDS sequence (opt5) from neuraminidase__InfluenzaA__ABR15932

SEQ ID NO: 207905 - RNA, 1410 nt, Artificial Sequence
  derived and/or modified CDS sequence (opt5) from neuraminidase__InfluenzaA__ABR15943
augaaccccaaucagaagaucauuaccaucggcagcgugucccugacaauugccacgaucugcuuccucaugcaaauugcuauccuggucaccacaguuacccuucacuuuagacaguacgaguguaacucuccuccgaauaaccaggugaugcugugcgaacccacaaucauugagcggaauaucaccgaaauuguguaucucacaaacaccacgaucgagaaagaaauuuguccuaagcuggccgaguaccgcaauuggagcaaaccccagugcaacaucaccggguucgcgccuuuuuccaaggacaauucuauuagacuuagcgcuggaggcgauaucugggucacacgggagcccuauguguccugugacccugauaaaugcuaccaauucgcccuggggcagggaaccacacucaacaauggccauucuaacgacaccguucacgaucgcacgccguauagaacacugcugaugaaugaacucggggugcccuuucaucugggaacccggcaggucuguaucgccuggagcuccagcucuugccacgacggcaaggcuuggcuucauguguguguuacaggcgaugacgagaacgccaccgcuuccuucauuuacaaugggcgccugguggauagcaucggaucuugguccaagaaaauucucagaacccaggaaagcgagugcgucuguaucaacggcacaugcacgguggugaugaccgacgggucugccuccggaaaggcggauacaaaaauucuguuuaucgaggaaggcaagaucguccacauuagcacccuuuccgggucugcccaacacguugaggaaugcagcuguuauccucgguaccccggagugcgcugcguguguagagacaacuggaaaggcuccaaucggccuaucgucgauauuaacgugaaggacuacagcaucguuucuuccuaugugugcagcggccuggucggggacacaccccgcaagaaugauucuuucagcuccucucauugucucgacccgaacaaugaggaaggaggccacggggugaaaggaugggcuuuugaugacggcaacgauguuuggauggggagaaccauuagcgagaagcugcgguccggauacgagacguucaaagugaucgaaggcuggagcaagccuaauucuaaacugcagacaaaccgccaggucaucguggagagaggcaaucgguccggguauagcggaaucuuuucugucgaaggcaaguccugcauuaacagauguuucuacguggagcucauucgcgggcggaaagaagagaccgagguuugguggaccagcaauuccaucguggucuuuugcggaacaucuggcaccuaugggacaggcagcuggcccgacggagccgauauuaaccugaugccuaucuga

SEQ ID NO: 207906 - RNA, 1410 nt, Artificial Sequence
  derived and/or modified CDS sequence (opt5) from neuraminidase__InfluenzaA__ABR15954
augaaccccaaucagaagaucauuaccaucggcagcgugucccugacaauugccacgaucugcuuccucaugcaaauugcuauccuggucaccacaguuacccuucacuuuaaacaguacgaguguaacucuccuccgaauaaccaggugaugcugugcgaacccacaaucauugagagaaauaucaccgaaauuguguaucucacaaacaccacgaucgagaaggaaauuuguccuaaacuggccgaguaccggaauuggagcaagccccagugcaacaucaccggguucgcgccuuuuuccaaagacaauucuauucgccuuagcgcuggaggcgauaucugggucacaagagagcccuauguguccugugacccugauaagugcuaccaauucgcccuggggcagggaaccacacucaacaauggccauucuaacgacaccguucacgaucggacgccguaucgcacacugcugaugaaugaacucggggugcccuuucaucugggaaccagacaggucuguaucgccuggagcuccagcucuugccacgacggcaaggcuuggcuucauguguguguuacaggcgaugacgagaacgccaccgcuuccuucauuuacaaugggcggcugguggauagcaucggaucuugguccaaaaagauucuccgcacccaggaaagcgagugcgucuguaucaacggcacaugcacgguggugaugaccgacgggucugccuccggaaaagcggauacaaagauucuguuuaucgaggaaggcaaaaucguccacauuagcacccuuuccgggucugcccaacacguugaggaaugcagcuguuauccuagauaccccggagugcggugcgugugucgcgacaacuggaagggcuccaauagaccuaucgucgauauuaacgugaaggacuacagcaucguuucuuccuaugugugcagcggccuggucggggacacaccccggaaaaauaacucuuucagcuccucucauugucucgauccgaauaacgaggaaggaggccacggggugaagggaugggcuuuugacgauggcaaugacguuuggauggggcgcaccauuagcgagaaacugagauccggauacgagacguucaaggugaucgaaggcuggagcaaaccuaacucuaagcugcagacaaaucggcaggucaucguggagcgcggcaacagauccggguauagcggaaucuuuucugucgaaggcaaauccugcauuaaucgguguuucuacguggagcucauuagagggcgcaaggaagagaccgagguuugguggaccagcaacuccaucguggucuuuugcggaacaucuggcaccuaugggacaggcagcuggcccgauggagccgacauuaaucugaugccuaucuga

SEQ ID NO: 207907 - RNA, 1410 nt, Artificial Sequence; identical to SEQ ID NO: 206226
  derived and/or modified CDS sequence (opt5) from neuraminidase__InfluenzaA__ABR15965

SEQ ID NO: 207908 - RNA, 1410 nt, Artificial Sequence
  derived and/or modified CDS sequence (opt5) from neuraminidase__InfluenzaA__ABR22243
augaaccccaaucagaagaucauuaccaucggcagcgugucccugacaauugccacgaucugcuuccucaugcaaauugcuauccuggucaccacaguuacccuucacuuuaaacaguacgaguguaacucuccuccgaauaaccaggugaugcugugcgaacccacaaucauugagagaaauaucaccgaaauuguguaucucacaaacaccacgaucgagaaggaaauuuguccuaaacuggccgaguaccggaauuggagcaagccccagugcaacaucaccggguucgcgccuuuuuccaaagacaauucuauucgccuuagcgcuggaggcgauaucugggucacaagagagcccuauguguccugugacccugauaagugcuaccaauucgcccuggggcagggaaccacacucaacaauggccauucuaacgacaccguucacgaucggacgccguaucgcacacugcugaugaaugaacucggggugcccuuucaucugggaaccaagcaggucuguaucgccuggagcuccagcucuugccacgacggcaaggcuuggcuucauguguguguuacaggcgaugacgagaacgccaccgcuuccuucauuuacaaugggagacugguggauagcaucggaucuugguccaagaaaauucuccggacccaggaaagcgagugcgucuguaucaacggcacaugcacgguggugaugaccgacgggucugccuccggaaaggcggauacaaaaauucuguuuaucgaggaaggcaagaucguccacaccagcccucuuuccgggucugcccaacacguugaggaaugcagcuguuauccccgcuacccuggagugagaugcgugugucgggacaacuggaagggcuccaaucgccccauugucgauaucaacgugaaagacuacagcauuguuucuuccuaugugugcagcggccuggucggggacacaccgagaaagaccgauucuagcuccucuagccauugucucgacccuaauaacgaggaaggaggccacggggugaaaggaugggcuuucgaugacggcaaugauguuuggauggggcggacgaucuccgagaaaagccgcucuggauacgagacauuuaaagugauugaaggcugguccaagcccaacagcaaacugcagaucaauagacaggucaucguggaccggggcaaccgcucuggguauuccggaauuuucagcgucgagggcaaguccugcaucaauagauguuuuuacguggaacugauucgggggagaaagcaggagaccgaaguucucuggaccucuaacagcaucguggucuucugcggaacauccggcaccuaugggacaggcucuuggccugauggagccgaccugaaucuuaugcccauuuga

SEQ ID NO: 207909 - RNA, 1410 nt, Artificial Sequence; identical to SEQ ID NO: 206802
  derived and/or modified CDS sequence (opt5) from neuraminidase__InfluenzaA__ABR28518

SEQ ID NO: 207910 - RNA, 1410 nt, Artificial Sequence; identical to SEQ ID NO: 206648
  derived and/or modified CDS sequence (opt5) from neuraminidase__InfluenzaA__ABR28595

SEQ ID NO: 207911 - RNA, 1413 nt, Artificial Sequence
  derived and/or modified CDS sequence (opt5) from neuraminidase__InfluenzaA__ABR28771
augaaccccaaucagaagaucauuaccaucggcagcauuuccaucgccauugggaucaucucucugaugcuccaaauuggaaacaucauuagcaucugggcuucccacucuauucagacaggcagccagaaucauacggggaucugcaaccagagaauuaucaccuacgagaauagcacaugggugaaccacaccuaugucaauaucaacaauacaaacguuguggccggaaaagacaagaccucugugacacuggcgggcaauagcucccuuuguagcauuucugggugggcuaucuacaccaaagauaacuccauucggaucggaagcaagggcgacgucuucgugauucgcgaaccuuuuaucucuugcucccaucuggaguguagaacguucuuucucacccaaggcgcccugcuuaaugauaaacacagcaacgggacaguuaaggaccggucuccguaucgcgcccugauguccugcccccucggagaagcuccuagccccuacaauuccaaguucgagucuguggccuggagcgcuuccgccugucaugauggcaugggguggcugaccaucggaauuagcggcccugacaacggggcggucgccgugcugaaauauaacggaaucauuacagaaaccaucaagucuuggaaaaagcggauucucagaacgcaggaguccgagugcguuugugugaauggcagcugcuuuacaaucaugaccgauggccccucuaacggggcugccagcuacaaaaucuucaagauugaaaagggaaaagucacaaagucccgcgagcugaaugcuccuaacuuucacuaugaagaguguucuugcuacccggacaccggcaccgugaugugugugugcagagauaauuggcacgggagcaaccggcccugggucuccuucaaucagaaccuugacuaccagaucggauauauuugcagcggcguuuuuggggauaauccucgccccaaagacggagagggcucuuguaacccugugacaguggauggcgccgacggggucaagggauucuccuacaaauauggcaaugggguguggaucggaagaacgaaguccaaccggcugcgcaaaggcuuugaaaugauuugggaccccaauggguggaccgauacagacucuaacuucuccguuaagcaagauguggucgcgaucaccgacuggagcggcuacuccggaucuuuugugcagcauccggagcucacaggccuggauugcauuagaccuuguuucuggguugaacuugugcgggggcugccccgcgagaauaccacgaucuggacaagcggauccucuaucagcuucugcggcgucaacuccgacaccgccaacuggagcuggccugauggggcugaacuccccuuuaccauugacaaguga

SEQ ID NO: 207912 - RNA, 1413 nt, Artificial Sequence
  derived and/or modified CDS sequence (opt5) from neuraminidase__InfluenzaA__ABR28782
augaaccccaaucagaagaucauuaccaucggcagcauuuccaucgccauugggauccugucucucaugcugcaaaucggaaacauuaucagcauuugggcuucccacucuauccagacaggcagccagaaucauacggggauuugcaaccagagaaucauuaccuacgagaauagcacaugggugaaccacaccuaugucaauaucaacaauacaaacguuguggccggaaaagacaagaccucugugacacuugcgggcaauagcucccuguguagcaucucugggugggcuauuuacaccaaagauaacuccauccggauuggaagcaagggcgacgucuucgugauccgcgaaccuuuuauuucuugcucccaucucgaguguagaacguucuuucugacccaaggcgcccuucugaaugauaaacacagcaacgggacaguuaaggaccggucuccguaucgcgcccucauguccugcccccugggagaagcuccuagccccuacaauuccaaguucgagucuguggccuggagcgcuuccgccugucaugauggcaugggguggcugaccaucggaaucagcggcccugacaacggggcggucgccgugcucaaauauaacggaauuaucacagaaaccauuaagucuuggaaaaagagaauccugcggacgcaggaguccgagugcguuugugugaauggcagcugcuuuacaauuaugaccgauggccccucuaacggggcugccagcuacaaaaucuucaagaucgaaaagggaaaagucacaaaguccauugagcuuaaugcuccuaacuuucacuaugaagaguguucuugcuacccggacaccggcaccgugaugugugugugccgcgauaauuggcacgggagcaacagacccugggucuccuucaaucagaaccuggacuaccagaucggauauauuugcagcggcguuuuuggggauaauccucggcccaaagacggagagggcucuuguaacccugugacaguggauggcgccgacggggucaagggauucuccuacaaauauggcaaugggguguggaucggacgcacgaaguccaacagacuccggaaaggcuuugaaaugauuugggaccccaauggguggaccgauacagacucuaacuucuccguuaagcaagauguggucgcgaucaccgacuggagcggcuacuccggaucuuuugugcagcauccggagcugacaggccuugauugcauucgcccuuguuucuggguugaacuggugagagggcucccccgggagaauaccacgaucuggacaagcggauccucuaucagcuucugcggcgucaacuccgacaccgccaacuggagcuggccugauggggcugaacugcccuuuaccauugacaaguga

SEQ ID NO: 207913 - RNA, 1410 nt, Artificial Sequence; identical to SEQ ID NO: 206916
  derived and/or modified CDS sequence (opt5) from neuraminidase__InfluenzaA__ABR28793

SEQ ID NO: 207914 - RNA, 1413 nt, Artificial Sequence; identical to SEQ ID NO: 206900
  derived and/or modified CDS sequence (opt5) from neuraminidase__InfluenzaA__ABR28804

SEQ ID NO: 207915 - RNA, 1410 nt, Artificial Sequence; identical to SEQ ID NO: 206802
  derived and/or modified CDS sequence (opt5) from neuraminidase__InfluenzaA__ABR28815

SEQ ID NO: 207916 - RNA, 1410 nt, Artificial Sequence; identical to SEQ ID NO: 206226
  derived and/or modified CDS sequence (opt5) from neuraminidase__InfluenzaA__ABR28826

SEQ ID NO: 207917 - RNA, 1413 nt, Artificial Sequence; identical to SEQ ID NO: 206468
  derived and/or modified CDS sequence (opt5) from neuraminidase__InfluenzaA__ABR28837

SEQ ID NO: 207918 - RNA, 1413 nt, Artificial Sequence
  derived and/or modified CDS sequence (opt5) from neuraminidase__InfluenzaA__ABR28848
augaaccccaaucagaagaucauuaccaucggcagcauuuccaucgccauugggaucaucucucugaugcuccaaauuggaaacaucauuagcaucugggcuucccacucuauucagacaggcagccagaaucauacgggggugugcaaccagagaaucauuaccuacgagaauagcacaugggucaaccacaccuauguuaauaucaacaauacaaacgugaucgugggaaaagacaagaccucugucacacuggccggcaauagcucccuuuguagcauuucugggugggcgaucuacaccaaagauaacuccauucggaucggaagcaagggcgacguguucguuauucgcgaaccuuuuaucucuugcucccaucuggaguguagaacguucuuucucacccaaggcgcucugcuuaaugauaaacacagcaacgggacagugaaggaccggucuccguaucgcgcccugauguccugcccccucggagaagccccuagccccuacaauuccaaguucgagucugucgcuuggagcgccuccgcuugucaugauggcaugggguggcugaccaucggaauuagcggcccugacaacggggccguggcgguucugaaauauaacggaaucauuacagaaaccaucaagucuuggaaaaagcagauucucagaacgcaggaguccgagugcgugugugucaauggcagcugcuuuacaaucaugaccgauggccccucuaacggggccgcuagcuacaaaaucuucaagauugaaaagggaaaaaucacaaaguccauugagcugaaugccccuaacuuucacuaugaagaguguucuugcuacccggacaccggcaccgugaugugugugugccgggauaauuggcacgggagcaaccgccccugggucuccuucaaucagaaccuugacuaccaaaucggauauauuugcagcggcguuuuuggggauaauccuagacccaaagacggagagggcucuuguaacccugugacaguggauggcgcuaauggggucaagggauucuccuacaaauauggcaacgggguguggaucggacggacgaaguccaaucgccugagaaaaggcuuugaaaugguuugggaccccaacggguggaccgacacagauucugacuucuccgugaagcaggaugucguggccauuaccgacuggagcggcuacuccggaucuuuuguucagcauccggagcucacaggccugaauugcauccggccuuguuucuggguggaacuuguccgcgggcugcccaaggagaacaccacgaucuggacaagcggauccucuauuagcuucugcggcgugaacuccgauaccgcgaauuggagcuggccugacggggccgaacuccccuuuaccaucgauaaauga

SEQ ID NO: 207919 - RNA, 1410 nt, Artificial Sequence
  derived and/or modified CDS sequence (opt5) from neuraminidase__InfluenzaA__ABR28859
augaaccccaaucagaagaucauuaccaucggcagcgugucccugacaauugccacgaucugcuuccucaugcaaauugcuauccuggucaccacaguuacccuucacuuuaaacaguacgaguguaacucuccuccgaauaaccaggugaugcugugcgaacccacaaucauugagagaaauaucaccgaaauuguguaucucacaaacaccacgaucgagaaggaaauuuguccuaaacuggccgaguaccggaauuggagcaagccccagugcaacaucaccggguucgcgccuuuuuccaaagacaauucuauucgccuuagcgcuggaggcgauaucugggucacaagagagcccuauguguccugugacccugauaagugcuaccaauucgcccuggggcagggaaccacacucaacaauggccauucuaacgacaccguucacgggcggacgccguaucgcacacugcugaugaaugaacucggagugcccuuucaucugggcaccagacaggucuguaucgccuggagcuccagcucuugccacgauggcaaggcuuggcuucauguguguguuacaggggacgaugagaacgccaccgcuuccuucauuuacaauggacggcugguggacagcaucggcucuugguccaaaaagauucuccgcacccaggaaagcgagugcgucuguaucaacgggacaugcacgguggugaugaccgauggaucugccuccggcaaagcggacacaaagauucuguuuaucgaggaagggaaaaucguccacauuagcacccuuuccggaucugcccaacacguugaggaaugcagcuguuauccuagauaccccggcgugcggugcgugugucgcgauaacuggaagggcuccaauagaccuaucgucgacauuaacgugaaggauuacagcaucguuucuuccuaugugugcagcgggcuggucggagacacaccccggaaaaaugacucuuucagcuccucucauugucucgauccgaacaaugaggaaggcgggcacggagugaagggcugggcuuuugacgaugggaacgacguuuggaugggacgcaccauuagcgagaaacugagauccggcuacgagacguucaaggugaucgaaggcuggagcaaaccuaauucuaagcugcagaucaaccggcaggucauuguggagcgcgggaauagauccggauauagcggcaucuuuucugucgaagggaaauccugcauuaaccgguguuucuacguggagcucaucagaggacgcaaggaagagacagagguuugguggaccagcaauuccauuguggucuuuugcggcaccucugggacauauggcaccggaagcuggcccgauggcgccgacaucaaccugaugccuauuuga

SEQ ID NO: 207920 - RNA, 1410 nt, Artificial Sequence
  derived and/or modified CDS sequence (opt5) from neuraminidase__InfluenzaA__ABR28870
augaaccccaaucagaagaucauuaccaucggcagcgugucccugacaauugccacgaucugcuuccucaugcaaauugcuauccuggucaccacaguuacccuucacuuuaaacaguacgaguguaacucuccuccgaauaaccaggugaugcugugcgaacccacaaucauugagagaaauaucaccgaaacaguguaucucaccaacacgaccauugagaaggaaaucuguccuaaacuggccgaguaccggaauuggagcaagccccagugcaacauuacaggguucgcgccuuuuuccaaagacaauucuauccgccuuagcgcuggaggcgauauuugggucaccagagagcccuauguguccugugacccugauaagugcuaccaauucgcccuggggcagggaacaacccucaacaauggccauucuaacgacacgguucacgaucggacaccguaucgcacccugcugaugaaugaacucggggugcccuuucaucugggaacaagacaggucuguaucgccuggagcuccagcucuugccacgacggcaaggcuuggcuucauguguguguuaccggcgaugacgagaacgccaccgcuuccuucaucuacaaugggcggcugguggauagcauuggaucuugguccaaaaagauccuccgcacacaggaaagcgagugcgucuguauuaacggcacgugcaccguggugaugacagacgggucugccuccggaaaagcggauaccaagauccuguuuauugaggaaggcaaaaucguccacaucagcacacuuuccgggucugcccaacacguugaggaaugcagcuguuauccuagauaccccggagugcggugcgugugucgcgacaacuggaagggcuccaauagaccuauugucgauaucaacgugaaggacuacagcauuguuucuuccuaugugugcagcggccuggucggggacacgccccggaaaaaugauucuuucagcuccucucauugucucgacccgaacaaugaggaaggaggccacggggugaagggaugggcuuuugaugacggcaacgauguuuggauggggcgcaccaucagcgagaaacugagauccggauacgagacauucaaggugauugaaggcuggagcaaaccuaauucuaagcugcagaucaaccggcaggucaucguggagcgcggcaauagauccggguauagcggaaucuuuucugucgaaggcaaauccugcauuaaccgguguuucuacguggagcucauuagagggcgcaaggaagagaccgagguuugguggaccagcaauuccaucguggucuuuugcggaacaucuggcaccuaugggacaggcagcuggcccgacggagccgauauuaaccugaugccuaucuga

SEQ ID NO: 207921 - RNA, 1410 nt, Artificial Sequence
  derived and/or modified CDS sequence (opt5) from neuraminidase__InfluenzaA__ABR28881
augaaccccaaucagaagaucauuaccaucggcagcgugucccugacaauugccacggucugcuuccucaugcaaaucgcuauucugguuaccacagugacccuucacuuuaaacaguacgaguguaacucuccuccgaauaaccaggugaugcugugcgaacccacaaucaucgagagaaauauuaccgaaaucgucuaucucacaaacaccacgauugagaaggaaaucuguccuaaacuggccgaguaccggaauuggagcaagccccagugcaacauuaccggguucgcgccuuuuuccaaagacaauucuauccgccuuagcgcuggaggcgauauuugggugacaagagagcccuauguuuccugugacccugauaagugcuaccaauucgcccuggggcagggaaccacacucaacaauggccauucuaacgacaccgugcacgaucggacgccguaucgcacacugcugaugaaugaacucgggguccccuuucaucugggaaccagacagguguguaucgccuggagcuccagcucuugccacgacggcaaggcuuggcuucauguuugugugacaggcgaugacgagaacgccaccgcuuccuucaucuacaaugggcggcuggucgauagcauuggaucuugguccaaaaagauccuccgcacccaggaaagcgagugcguguguauuaacggcacaugcacgguggucaugaccgacgggucugccuccggaaaagcggauacaaagauccuguuuauugaggaaggcaaaaucguucacaucagcacccuuuccgggucugcccaacacguggaggaaugcagcuguuauccuagauaccccggagugcggugcgucugucgcgacaacuggaagggcuccaauagaccuauuguggauaucaacguuaaggacuacagcauugugucuuccuaugucugcagcggccuggugggggacacaccccggaaaaaugauucuuucagcuccucucauugucucgacccgaacaaugaggaaggaggccacgggguuaagggaugggcuuuugaugacggcaacgauguguggauggggcgcaccaucagcgagaaacugagauccggauacgagacguucaaggucauugaaggcuggagcaaaccuaauucuaagcugcagacaaaccgccaggugaucgucgagcggggcaauagauccggguauagcggaaucuuuucuguggaaggcaaauccugcauuaaccgguguuucuacguugagcucaucagagggcgcaaggaagagaccgaggugugguggaccagcaauuccauugucguguuuugcggaacaucuggcaccuaugggacaggcagcuggcccgacggagccgauaucaaccugaugccuauuuga

SEQ ID NO: 207922 - RNA, 1410 nt, Artificial Sequence; identical to SEQ ID NO: 206786
  derived and/or modified CDS sequence (opt5) from neuraminidase__InfluenzaA__ABR28892

SEQ ID NO: 207923 - RNA, 1413 nt, Artificial Sequence; identical to SEQ ID NO: 206458
  derived and/or modified CDS sequence (opt5) from neuraminidase__InfluenzaA__ABR28903

SEQ ID NO: 207924 - RNA, 1410 nt, Artificial Sequence
  derived and/or modified CDS sequence (opt5) from neuraminidase__InfluenzaA__ABR28925
augaaccccaaucagaagaucauuaccaucggcagcgugucccugacaauuucuacgaucugcuucuuuaugcaaauugccauccucaucaccacagucacccugcacuucaaacaguacgaguuuaacagcccuccgaauaaccagguuaugcuuugugaacccacaauuaucgagagaaauauuaccgaaaucguguaucugacaaacaccacgauugagaaggaaaucugcccuaaacucgcugaguaccggaauugguccaagccccagugugacauuaccggguucgccccuuuuucuaaagauaacagcauccgccuguccgcgggaggcgacaucugggugacaagagagcccuaugucucuugcgauccugacaaguguuaccaauucgcucuugggcagggaaccacacugaauaacgugcauagcaaugauaccguucacgaccggacgccguaucgcacacuccugaugaacgaacugggcgugcccuuucaucucgggaccaagcaggucugcauugccugguccucuagcuccugucacgauggaaaagccuggcugcaugugugcguuacaggcgacgauaagaaugcuaccgccagcuucaucuacaacggcagacuuguggacucuauugucuccuggagcaaagaggugcugcggacccaggaaucugagugugugugcaucaaugggacauguacggucguuaugaccgauggauccgcuagcggcaaggccgacacaaaaauucucuuuaucgaggaagggaagaucgugcacaccuccacacugucuggaagcgcgcaacacguggaggaaugcuccugcuauccucgcuaccccggcgucagaugugugugccgggauaacuggaaggggagcaaccgcccuauuguugacaucaauauuaaagacuacucuaucguguccagcuaugucuguucuggacuugugggcgauacccccagaaagaacgacagcuccucuagcucccauugccuggauccgaauaacgaggaaggcgggcacggaguuaaaggcugggccuucgacgaugggaaugacguguggaugggacggacgauuagcgagaagcuccgcucuggcuacgagacauuuaaagucaucgaagggugguccaacccuaauagcaagcugcagaucaacagacaggugauugucgaucggggaaaucgcucuggcuauuccggcaucuucagcguggaggggaaauccuguauuaacagaugcuuuuacguugaacugauccggggaagaaaggaggaaaccgaggugcucuggaccucuaauagcauugucguguucuguggcacauccgggaccuauggaacaggcucuuggcccgacggggcugauaucaaccugaugccuauuuga

SEQ ID NO: 207925 - RNA, 1410 nt, Artificial Sequence
  derived and/or modified CDS sequence (opt5) from neuraminidase__InfluenzaA__ABR88082
auggaccccaaccagaagaucauuaccaucggcagcgugucccugacaauuucuacgaucugcuucuuuaugcaaaccgccauucucaucacaaccgucacacugcacuucaaacaguacgaguuuaauagcccuccgaacaaucagguuaugcuuugugaacccaccaucauugagagaaacaucacagaaauuguguaucugaccaauacgaucauugagaaggaaaucugcccuaaacucgcugaguaccggaacugguccaagccccagugugauauuaccggguucgccccuuuuucuaaagacaauagcauccgccuguccgcgggaggcgauaucugggugacaagagagcccuaugucucuugcgacccugauaaguguuaccaauucgcucuugggcagggaaccacacugaacaaugugcauagcaacgacaccguucacgaucggacgccguaucgcacacuccugaugaaugaacugggcgugcccuuucaucucgggaccaagcaggucugcauugccugguccucuagcuccugucacgacggaaaagccuggcugcaugugugcguuacaggcgaugacaagaacgcuaccgccagcuucaucuacaauggcagacuuguggauucugucguguccuggagcaaagacauucugcggacccaggagucugaaugugugugcaucaacgggacauguacggucguuaugaccgauggauccgcuagcggcaaggccgacacaaaaauucucuuuaucgaggaggggaagaucgugcacaccuccacacugucuggaagcgcgcaacacguggaagagugcuccugcuauccucgcuaccccggcgucagaugugugugccgggacaauuggaaggggagcaaccgcccuauuguugauaucaacauuaaaaauuacucuaucguguccagcuaugucuguucuggacuugugggcgacacccccagaaagacggauagcuccucuagcucccauugccuggacccgaacaaugaagagggcgggcacggaguuaaaggcugggccuucgaugacgggaacgauguguggaugggacggacaauuagcgaaaagcuccgccugggcuacgagaccuuuaaagucaucgagggguggucuaauccuaacuccaagcugcagaucaauagacaggugauugucgaccggggaaaccgcagcggcuauucuggcaucuucuccguggaagggaaaagcuguauuaauagaugcuuuuacguugagcucauccggggaagaaaggaagagaccgaagugcuguggacauccaacucuauugucguguucuguggcaccagcgggacauauggaacgggcuccuggcccgauggggcugacaucaaucuuaugccuauuuga

SEQ ID NO: 207926 - RNA, 1413 nt, Artificial Sequence
  derived and/or modified CDS sequence (opt5) from neuraminidase__InfluenzaA__ABS00324
augaaccccaaucagaagaucauuaccaucggcagcauuugcauggccaucgggauuaucucccugauccuccaaauuggaaacaucgugucuauuuggaucagccacuccauucagacaggcucucagaauuacacggggaucuguaaccagagaauuaucaccuaugagaauagcacaugggucaaccaaaccuacguuaauaucaacaauacaaacgugguggcuggacaggacaccacauccgucgcccuggcgggcaauucuagccuuugcccuauuuccgggugggcuaucuauagcaaagauaacucuauucggaucggauccaagggcgacguguucguuauucgcgaaccguuuaucagcuguucucaucuggagugcagaaccuucuuucucacgcagggcgcccugcuuaaugauaaacacuccaacgggaccgugaaggaccggagccccuaccgcgcccugaugucuuguccuaucggagaagcucccuccccuuauaauagcagauucgaguccgucgccuggucugcuagcgccugccaugauggcaugggguggcucacaauuggaaucuccggccccgacgauggggcgguggccguucugaaauacaacggaauuaucaccgaaacaauuaagagcuggcggaagcgcauccugagaacccaggagucugagugugugugcgucaacggcuccuguuuuacgaucaugacagacggcccuaauaacgggccggcuagcuauaaaauuuucaagaucgaaaaaggaaagauuaccaaaucuaucgagcucgaugcccccaauagccacuacgaagagugcuccuguuacccugacgcuggcacagugaugugcgugugccgggauaacuggcgcgggucuaauagacccugggucagcuuuaaccaaucccuggacuaucagauuggauacaucuguagcggcguuuucggggauaauccucggcccaaggacggaaagggcucuugcgacccggugaccguggauggcgccgacggggucaaaggauuuuccuaucgcuacggcaacgggguguggauuggaagaaccaagagcaauucuucccggcgcggcuucgagaugaucugggauccuaacggguggacagacacggauagcaaauuucuuguuaagcaggacguggucgcgaugaccgauugguccggcuauucuggcagcuucgugcagcaucccgaacugacaggacucgacuguaugagaccuugcuuuuggguugagcugauccgggggagaccccgcgaaaauaccacaauuuggaccuccggaucuagcaucuccuucuguggcgugaacggggauacggccaauuggagcuggcccgacggaucugagcuuccuuucacaauugauaaauga

SEQ ID NO: 207927 - RNA, 1410 nt, Artificial Sequence; identical to SEQ ID NO: 206186
  derived and/or modified CDS sequence (opt5) from neuraminidase__InfluenzaA__ABS49902

SEQ ID NO: 207928 - RNA, 1410 nt, Artificial Sequence
  derived and/or modified CDS sequence (opt5) from neuraminidase__InfluenzaA__ABS49913
augaaccccaaucagaagaucauuaccaucggcagcgugucccugacaauugccacggucugcuuccucaugcaaaucgcuauucugguuaccacagugacccuucacuuuagacaguacgagugugacucuccuacaaacaaucaggugaugccgugcgaacccaucaucauugagcggaacaucaccgaaauugucuaucugaauaacacaaccaucgagaaagaaauuuguccuaagcucguggaguaccgcaauuggagcaaaccccagugcaagaucacgggguucgccccuuuuuccaaagauaacucuauuagacugagcgcgggaggcgacaucuggguuacccgggagcccuauguguccugugauccugggaagugcuaccaauucgcucuuggacagggcacaacccuggacaauaagcauucuaacgauacaauccacgaccgcauuccgcauagaacccuccugaugaaugaacuggggguccccuuucaccucggaacgcgccagguguguaucgccuggagcuccagcucuugccaugauggcaaagccuggcugcacguuugugugacaggcgacgauaagaacgcuaccgccuccuucauuuaugacgggcggcuugucgauagcaucggaucuuggucccagaauauucugagaacacaagagagcgaaugcguguguaucaacgggaccugcaccguggucaugacagacggcucugcuuccggacgggccgauacgcgcauccucuuuauugaggagggcaaaaucguucacauuagcccucuguccgggucugcgcagcauguggaagagugcagcuguuaccccagauauccuggagugcggugcaucugucgcgacaauuggaagggcuccaacagacccgucguggacauuaacguugaagauuacagcaucgacucuuccuacgugugcagcggccuugucggggauaccccgcggaauaacgaccgcucuagcaauuccaacuguagaaauccuaacaaugagcggggaaaccacggcgugaaagggugggccuucgaugacggaaaugauguuuggaugggcagaacaaucucuaaggaccugcgcagcggguaugaaaccuuuaaggugauuggaggcugguccacacccaacagcaaaucucagaucaaucggcaggucauuguggauuccgacaacagaagcggcuacucugggaucuucuccgucgagggaaagagcugcauuaaucgcuguuuuuauguggagcucauccggggcagagaacaagagacccgcguuugguggacguccaacucuauuguggucuucugcgggacaagcggaaccuacggcaccggguccuggccugauggcgcugacaucaaucugaugcccaucuga

SEQ ID NO: 207929 - RNA, 1410 nt, Artificial Sequence; identical to SEQ ID NO: 206916
  derived and/or modified CDS sequence (opt5) from neuraminidase__InfluenzaA__ABS49968

SEQ ID NO: 207930 - RNA, 1413 nt, Artificial Sequence; identical to SEQ ID NO: 207912
  derived and/or modified CDS sequence (opt5) from neuraminidase__InfluenzaA__ABS49979

SEQ ID NO: 207931 - RNA, 1413 nt, Artificial Sequence
  derived and/or modified CDS sequence (opt5) from neuraminidase__InfluenzaA__ABS49990
augaaccccaaucagaagaucauuaccaucggcagcauuuccaucgccauugggaucaucucucugaugcuccaaauuggaaacaucauuagcaucugggcuucccacucuauucagacaggcagccagaaucauacggggaucugcaaccagagaauuaucaccuacgaaaauuccacaugggugaaccacaccuaugucaauaucaacaauacaaacguuguggccggaaaagacaagaccucugugauucuggcgggcaauagcucccuuuguagcaucucugggugggcuauuuacacaaaagauaacuccauccggauuggaagcaagggcgacgucuucgugauccgcgagccuuuuaucucuugcucccaucuggaguguagaaccuucuuucucacgcaaggcgcccugcuuaaugauaaacacagcaacgggaccguuaaggaccggucuccguaucgcgcccugauguccugcccccucggagaagcuccuagccccuacaauuccaaguucgagucuguggccuggagcgcuuccgccugucaugauggcaugggguggcugacaauuggaaucagcggcccugacaacggggcggucgccgugcugaaauauaacggaauuaucaccgaaacaauuaagucuuggaaaaagagaauccuccggacccaggaguccgagugcguuugugugaauggcagcugcuuuacgaucaugacagauggccccucuaacggggcugccagcuacaaaauuuucaagaucgaaaagggaaaagucaccaaguccauugagcugaaugcuccuaacuuucacuaugaagaguguucuugcuacccggacacaggcaccgugaugugugugugccgcgauaauuggcacgggagcaacagacccugggucuccuucaaucagaaccuugacuaccagaucggauauauuugcagcggcguuuuuggggauaauccucggcccaaagacggagagggcucuuguaacccugugaccguggauggcgccgacggggucaagggauucuccuacaaauauggcaaugggguguggaucggacgcacaaagagcaacagacugcggaaaggcuuugaaaugauuugggaccccaauggguggacggauaccgacucuaacuucuccguuaagcaagauguggucgcgaucacagacuggagcggcuacuccggaucuuuugugcagcauccggagcucaccggccuggauugcauccgcccuuguuucuggguugaacuugugagagggcugccccgggagaauacaaccauuuggacgagcggauccucuaucagcuucugcggcgucaacuccgacacagccaacuggagcuggccugauggggcugaacuccccuuuaccauugacaaguga

SEQ ID NO: 207932 - RNA, 1410 nt, Artificial Sequence; identical to SEQ ID NO: 206802
  derived and/or modified CDS sequence (opt5) from neuraminidase__InfluenzaA__ABS50001

SEQ ID NO: 207933 - RNA, 1410 nt, Artificial Sequence; identical to SEQ ID NO: 206802
  derived and/or modified CDS sequence (opt5) from neuraminidase__InfluenzaA__ABS50012

SEQ ID NO: 207934 - RNA, 1410 nt, Artificial Sequence
  derived and/or modified CDS sequence (opt5) from neuraminidase__InfluenzaA__ABS50023
augaaccccaaucagaagaucauuaccaucggcagcgugucccugacaauugccacgaucugcuuccucaugcaaauugcuguccugguuaccacagugacccuucacuuuaaacaguacgaguguaacccuccgcccaauaaccaggugaugcugugcgaaccuacaaucaucgagagaaauauuaccgaaaucgucuaucucacaaacaccacgauugagaaggaaaucugucccaaacuggccgaguaccggaauuggucuaagccucagugcaacauuaccggguucgcgcccuuuagcaaagacaauuccauccgccuuucugcuggaggcgauauuugggugacaagagagccuuauguuagcugugacccggauaagugcuaccaauucgcccuggggcagggaaccacacucaacaauggccauuccaacgacaucgugcacgaucggacccccuaucgcacgcugcugaugaaugaacucggggucccuuuucaucugggaacaaaacagguguguaucgccuggucuagcuccagcugccacgacggcaaggcuuggcuucauguuugugugaccggcgaugacgagaacgccacagcuucuuucauuuacaaugggagacuggucgauuccaucggaagcuggucuaagaaaauucuccggacccaggaauccgagugcguguguaucaacgggaccugcacaguggucaugacggacggcagcgccucuggaaaggcggauaccaaaauucuguuuaucgaggaaggcaagaucguucacacaucccuucugagcggguccgcccaacacguggaggaaugcucuuguuauccccgcuacccuggagugagaugcgucugucgggacaacuggaagggcagcaaucgccccauuguggauaucaacguuaaagacuacuccauugugagcucuuaugucugcuccggccucgugggggacaccccgagaaagaaugauagcucuagcuccucucauugucuggacccuaacaaugaggaaggaggccacgggguuaaaggaugggcuuucgaugacggcaacgauguguggauggggcggacaaucagcgagaagcugcgcuccggauacgagaccuuuaaagucauugaaggcuggagcaagcccaauucuaaacuccagaucaacagacaggugaucgucgaccggggcaaucgcuccggguauagcggaauuuucucuguggagggcaaguccugcaucaacagauguuuuuacguugaacugauucgggggagaaagcaggagacggaagugcuuuggacaagcaauuccaucgucguguucugcggaaccucuggcaccuaugggacaggcagcuggccugauggagccgacauuaaccugaugcccaucuga

SEQ ID NO: 207935 - RNA, 1410 nt, Artificial Sequence; identical to SEQ ID NO: 206802
  derived and/or modified CDS sequence (opt5) from neuraminidase__InfluenzaA__ABS50034

SEQ ID NO: 207936 - RNA, 1410 nt, Artificial Sequence
  derived and/or modified CDS sequence (opt5) from neuraminidase__InfluenzaA__ABS50045
augaaccccaaucagaagaucauuaccaucggcagcgugucccugacaauugccacgaucugcuuccucaugcaaaccgcuauucuggucacaaccguuacacuucacuuuaaacaguacgaguguaacucuccuccgaauaaccaggugaugcugugcgaacccaccaucaucgagagaaauauuacagaaaucguguaucucaccaacacgaccauugagaaggaaaucuguccuaaacuggccgaguaccggaauuggagcaagccccagugcaacauuacaggguucgcgccuuuuuccaaagacaauucuauccgccuuagcgcuggaggcgauauuugggucaccagagagcccuauguguccugugacccugauaagugcuaccaauucgcccuggggcagggaacaacccucaacaauggccauucuaacgacacgauccacgaucggacaccguaucgcacccugcugaugaaugaacucgggguucccuuucaucugggaacaagacagguguguaucgccuggagcuccagcucuugccacgacggcaaggcuuggcuucaugucugugugaccggcgaugacgagaacgccaccgcuuccuucauuuacaaugggcggcugguugauagcaucggaucuugguccaaaaagauucuccgcacacaggaaagcgagugcguguguaucaacggcacgugcaccgucgugaugacagacgggucugccuccggaaaagcggauaccaagauucuguuuaucgaggaaggcaaaaucgugcacauuagcacacuuuccgggucugcccaacacgucgaggaaugcagcuguuauccuagauaccccggaguucggugcgugugucgcgacaacuggaagggcuccaauagaccuaucguggauauuaacgucaaggacuacagcaucgugucuuccuauguuugcagcggccuggugggggacacgccccggaaaaaugauucuuucagcuccucucauugucucgacccgaacaaugaggaaggaggccacggggucaagggaugggcuuuugaugacggcaacgauguguggauggggcgcaccauuagcgagaaacugagauccggauacgagacauucaagguuaucgaaggcuggagcaaaccuaauucuaagcugcagaucaaccgccaggugauugucgagcggggcaauagauccggguauagcggaaucuuuucuguggaaggcaaauccugcauuaaccgguguuucuacgucgagcucaucagagggcgcaaggaagagaccgaggugugguggaccagcaauuccauuguuguguuuugcggaacaucuggcaccuaugggacaggcagcuggcccgacggagccgauaucaaccugaugccuauuuga

SEQ ID NO: 207937 - RNA, 1410 nt, Artificial Sequence; identical to SEQ ID NO: 206226
  derived and/or modified CDS sequence (opt5) from neuraminidase__InfluenzaA__ABS50056

SEQ ID NO: 207938 - RNA, 1410 nt, Artificial Sequence; identical to SEQ ID NO: 206252
  derived and/or modified CDS sequence (opt5) from neuraminidase__InfluenzaA__ABS50067

SEQ ID NO: 207939 - RNA, 1410 nt, Artificial Sequence; identical to SEQ ID NO: 206786
  derived and/or modified CDS sequence (opt5) from neuraminidase__InfluenzaA__ABS50078

SEQ ID NO: 207940 - RNA, 1413 nt, Artificial Sequence
  derived and/or modified CDS sequence (opt5) from neuraminidase__InfluenzaA__ABS71644
augaagcccaaccagaaaaucauuaccaucggcagcauuuccaucgccauugggaucaucucucugauucuccaaaucggaaauauuaucagcauuugggcuucccacucuauccagacagagagccagaaccauacgggcauuugcaaucagagaaucaucaccuacgaaaacuccacaugggugaauaacaccuaugucaauauuaacaauacaaacguuguggccgagaaggacaaaaccucugugacacuggcggggaauagcucccuuuguagcaucucuggaugggcuauuuacaccaaggauaacuccauccggauuggcagcaaaggggacgucuucgugauccgcgaaccuuuuaucucuugcucccaccuggaguguagaacguucuuucucacccaaggagcccugcuuaaugauaagcauagcaacggcacaguuaaggaccggucuccguaucgcgcccugauguccugcccccucggcgaagcuccuagccccuacaauuccagauucgagucuguggccuggagcgcuuccgccugucacgaugggaugggauggcugaccauuggcaucagcgggccugacaacggagcggucgccgugcugaaauauaacggcauuaucacagagaccauuaagucuuggaaaaagcggauccuccgcacgcaggaauccgagugcguuuguaugaaugggagcugcuuuacaaucaugaccgauggacccucuaacggcgcugccagcuacaaaauuuucaagaucgaaaagggcaaagugacaaagaccauggagcugaaugcuccuaacuuucauuaugaggaauguuccugcuacccggacaccgggacagucaugugugugugcagagauaauuggcacggaucuaaccggcccugggugagcuucaaucagaaccuugacuaccagauuggcuauaucugcuccggggucuuuggagauaauccucgccccaaagacggcgaggggagcuguaacccuguuacgguggauggagccgacggcgugaagggcuucucuuacaaauaugggaauggagucuggaugggcagaaccaaguccaaccggcugcgcaaaggguuugaaaugauuugggaccccaauggauggacaaacaccgauagcgacuucucugugaagcaagauguuguggcgaucacagacugguccggcuacagcggguccuuuguccagcacccggagcucaccggccuggauugcauuagaccuuguuucuggguggaacuuguucggggacugccccgcgagaauacgacaaucuggaccucuggcagcuccaucucuuucugcggggugaacagcggaaccgccaacugguccuggccugacggcgcugagcuccccuuuacaauugauaaguga

SEQ ID NO: 207941 - RNA, 1413 nt, Artificial Sequence
  derived and/or modified CDS sequence (opt5) from neuraminidase__InfluenzaA__ABS71646
augaaccccaaucagaagaucauuaccaucggcagcauuuccaucgccauugggaucaucucucugauucuccaaaucggaaacauuaucagcauuugggcuucccacucuauccagacagagagccagaaucauacgggcauuugcaaccagagaaucaucaccuacgaaaauuccacaugggugaacaauaccuaugucaacauuaauaacacaaauguuguggccgagaaagacaagaccucugugacacuggcggggaacagcucccuuuguagcaucucuggaugggcuauuuacaccaaagauaauuccauccggauuggcagcaagggggacgucuucgugauccgcgaaccuuuuaucucuugcucccaccuggaguguagaacguucuuucucacccaaggagcccugcuuaacgauaaacauagcaauggcacaguuaaggaccggucuccguaucgcgcccugauguccugcccccucggcgaagcuccuagccccuacaacuccagauucgagucuguggccuggagcgcuuccgccugucacgaugggaugggauggcugaccauuggcaucagcgggccugacaacggagcggucgccgugcugaaguauaauggcauuaucacagagaccauuaaaucuuggaagaaacggauccuccgcacgcaggaauccgagugcguuuguaugaacgggagcugcuuuacaaucaugaccgauggacccucuaauggcgcugccagcuacaagauuuucaaaaucgaaaagggcaaggugacaaaaaccauggagcugaacgcuccuaauuuucauuaugaggaauguuccugcuacccggacaccgggacagucaugugugugugcagagauaacuggcacggaucuaaucggcccugggugagcuucaaccagaaucuugacuaccagauuggcuauaucugcuccggggucuuuggagauaacccucgccccaaggacggcgaggggagcuguaauccuguuacgguggauggagccgacggcgugaaaggcuucucuuacaaguaugggaacggagucuggaugggcagaaccaaauccaaucggcugcgcaagggguuugaaaugauuugggaccccaacggauggacaaauaccgauagcgacuucucugugaaacaagauguuguggcgaucacagacugguccggcuacagcggguccuuuguccagcacccggagcucaccggccuggauugcauuagaccuuguuucuggguggaacuuguucggggacugccccgcgagaacacgacaaucuggaccucuggcagcuccaucucuuucugcggggugaacagcggaaccgccaauugguccuggccugacggcgcugagcuccccuuuacaauugauaaguga

SEQ ID NO: 207942 - RNA, 1413 nt, Artificial Sequence
  derived and/or modified CDS sequence (opt5) from neuraminidase__InfluenzaA__ABS71647
augaaccccaaucagaagaucauuaccaucggcagcauuuccaucgccauugggaucaucucucugauucuccaaaucggaaacauuaucagcauuugggcuucccacucuauccagacagagagccagaaucauacgggcauuugcaaccagagaaucaucaccuacgaaaauuccacaugggugaacaauaccuaugucaacauuaauaacacaaauguuguggccgagaaagacaagaccucugugacacuggcggggaacagcucccuuuguagcaucucuggaugggcuauuuacaccaaagauaauuccauccggauuggcagcaagggggacgucuucgugauccgcgaaccuuuuaucucuugcucccaccuggaguguagaacguucuuucucacccaaggagcccugcuuaacgauaaacauagcaauggcacaguuaaggaccggucuccguaucgcgcccugauguccugcccccucggcgaagcuccuagccccuacaacuccagauucgagucuguggccuggagcgcuuccgccugucacgaugggaugggauggcugaccauuggcaucagcgggccugacaacggagcggucgccgugcugaaguauaauggcauuaucacagagaccauuaaaucuuggcggaagcgcauccucagaacgcaggaauccgagugcguuuguaugaacgggagcugcuuuacaaucaugaccgauggacccucuaauggcgcugccagcuacaaaauuuucaagaucgaaaaaggcaaggugacaaagaccauggagcugaacgcuccuaauuuucauuaugaggaauguuccugcuacccggacaccgggacagucaugugugugugccgggauaacuggcacggaucuaaucgccccugggugagcuucaaccagaaucuugacuaccagauuggcuauaucugcuccggggucuuuggagauaacccuagacccaaagacggcgaggggagcuguaauccuguuacgguggauggagccgacggcgugaagggcuucucuuacaaauaugggaacggagucuggaugggccggaccaaguccaaucgccugagaaaaggguuugaaaugauuugggaccccaacggauggacaaauaccgauagcgacuucucugugaagcaagauguuguggcgaucacagacugguccggcuacagcggguccuuuguccagcacccggagcucaccggccuggauugcauucggccuuguuucuggguggaacuuguucgcggacugcccagagagaacacgacaaucuggaccucuggcagcuccaucucuuucugcggggugaacagcggagccgcuaauugguccuggccugacggcgccgagcuccccuuuaccauugauaaauga

SEQ ID NO: 207943 - RNA, 1413 nt, Artificial Sequence
  derived and/or modified CDS sequence (opt5) from neuraminidase__InfluenzaA__ABS71648
augaaccccaaucagaagaucauuaccaucggcagcauuuccaucgccauugggaucaucucucugauucuccaaaucggaaacauuaucagcauuugggcuucccacucuauccagacaggcaaucagaaccauacggggauuugcaaucagagaaucaucaccuacgagaacagcacaugggugaauaacaccuaugugaauauuaacaauacaaacguuguggccgaaaaagacaagaccuccgugacacuggcgggaaauucuagccuuuguuccaucagcggcugggcuauuuacaccaaagauaacucuauccggauuggguccaagggagacgucuucgugauccgcgagccuuuuaucagcugcucucaccuggaauguagaacguucuuucucacccaaggcgcccugcuuaaugauaaacauuccaacggcacaguuaaggaccggagcccguaucgcgcccugaugucuugcccccucggggaggcuccuucccccuacaacagcagauucgaauccguggccuggucugcuagcgccugucacgauggaaugggcuggcugaccauugggaucuccggaccugacaauggcgcggucgccgugcugaaguauaacgggauuaucacagagaccauuaaaagcuggaagaaacggauccuccgcacgcaggagucugaaugcguuuguaugaauggauccugcuuuacaaucaugaccgauggccccagcaacggcgcugccucuuacaagauuuucaaaaucgagaaggggaaggugacaaaaaccauugaacugaaugcuccuaacuuucauuaugaggaguguagcugcuacccggacaccggaacagucaugugugugugcagagauaauuggcacggcuccaaccggcccugggugucuuucaaucagaaccuugacuaccagaucggguauauuugcagcggagucuuuggcgauaauccucgccccaaggacggggaaggauccuguaacccuguuacgguggauggcgccgacggcgugaaaggguucagcuacaaguauggaaauggcgucuggaucgggagaaccaaaucuaaccggcugcgcaagggauuugagaugauuugggaccccaauggcuggacaaacaccgauuccgacuucagcgugaaacaagauguuguggcgaucacagacuggucuggguacuccggcagcuuuguccagcacccggaacucaccggacuggauugcaucagaccuuguuucuggguggagcuuguucggggccugcccaaggaaaacacgacaauuuggaccuccgggucuagcaucuccuucugcggagucaauucuggcaccgccaacuggagcuggccugacggggcugagcuccccuuuacaauugauaaguga

SEQ ID NO: 207944 - RNA, 1413 nt, Artificial Sequence
  derived and/or modified CDS sequence (opt5) from neuraminidase__InfluenzaA__ABS71649
augaaccccaaucagaagaucauuaccaucggcagcauuuccaucgccauugggaucaucucucugaugcuccaaauuggaaacaucauuagcaucugggcuucccacucuauucagacaggcagccagaaucauacggggaucugcaaccagagaauuaucaccuacgaaaauuccacaugggugaaccacaccuaugucaauaucaacaauacaaacguuguggccgagaaagacaagaccucugugacacuggcgggaaauagcucccuuuguagcauuucuggcugggcuaucuacaccaaagauaacuccauucggaucgggagcaagggagacgucuucgugauucgcgagccuuuuaucucuugcucccaucuggaauguagaacguucuuucucacccaaggcgcccugcuuaaugauaaacacagcaacggcacaguuaaggaccggucuccguaucgcgcccugauguccugcccccucggggaggcuccuagccccuacaauuccaaguucgaaucuguggccuggagcgcuuccgccugucaugauggaaugggcuggcugaccaucgggauuagcggaccugacaacggcgcggucgccgugcugaaauauaacgggaucauuacaggaaccaucaagucuuggaaaaagcagauucucagaacgcaggaguccgagugcguuuguaugaauggcagcugcuuuacaaucaugaccgauggccccucuaaccgggcugccagcuacaaaaucuucaagauugaaaaggggaaagugacaaaguccaucgagcugaaugcuccuaacuuucacuaugaagaguguucuugcuacccggacaccggaauugucaugugugugugccgcgauaauuggcacggcagcaacagacccuggguguccuucaaucagaaccuugacuaccaaaucggguauauuugcagcggagucuuuggcgauaauccucggcccaaagacggggagggaucuuguaacccuguuaccguggauggcgccgacggcgugaagggguucuccuacaaauaugacaauggagucuggaucggccgcacaaagagcaacagacugcggaaaggguuugaaaugauuugggaucccaauggauggacgaacaccgacucugauuucuccgugaagcaggacguuguggcgaucacagauuggagcggcuacuccgggucuuuuguccagcauccggagcucaccggccuggacugcauccgcccuuguuucuggguggaacuuguuagaggacugccccgggagaauacaaccauuuggacgagcggcuccucuaucagcuucugcggggugaacuccgauacagccaacuggagcuggccugacggagcugaacuccccuuuaccauugauaaguga

SEQ ID NO: 207945 - RNA, 1413 nt, Artificial Sequence
  derived and/or modified CDS sequence (opt5) from neuraminidase__InfluenzaA__ABS71651
augaaccccaaucagaagaucauuaccaucggcagcauuuccaucgccauugggaucaucucucugaugcuccaaauuggaaacaucauuagcaucugggcuucccacucuauucagacaggcagccagaaucauacggggaucugcaaccagagaauuaucaccuacgagaauaacacaugggugaaucacaccuaugucaacaucaauaacacaaauguuguggccggaaaagacaagaccuccgugacacuggcgggcaacucuagccuuuguuccgucagcgggugggcuauuuacaccaaagauaauucuauccggauuggauccaagggcgacguguucguuauccgcgaaccuuuuauuagcugcucucaucuggaguguagaacguucuuucucacccaaggcgcccugcuuaacgauaaacacuccaaugggacagugaaggaccggagcccguaucgcgcccugaugucuugcccccucggagaagcuccuucccccuacaacagcaaguucgaguccgucgccuggucugcuagcgccugucaugauggcaugggguggcugaccaucggaaucuccggcccugacaacggggcgguggccguucugaaauauaauggaauuaucacaggcaccauuaagagcuggaaaaagagaauccuccggacgcaggaaucugagugcguguguaugaacggcuccugcuuuacaauuaugaccgaugggcccagcaauggagcugccucuuacaaaaucuucaagaucgagaagggcaaagucacaaagagcauugaacugaacgcuccuuccuuucacuaugaggaauguucuugcuacccggacaccgggaccgugaugugugugugccgcgauaauuggcacggaagcaacagacccugggucuccuucaaucagaaccuugacuaccagaucggcuauauuugcagcgggguuuuuggagauaauccucggcccaaagacggcgagggcucuuguaacccugugacaguggauggggccgacggagucaagggcuucuccuacaaauaugggaauggaguguggcugggccgcaccaagagcaacagacuccggaaaggguuugagaugaucugggaccccaauggcuggacgaacacagauucugacuucuccguuaagcaagauguggucgcgauuaccgacuggagcggauacuccggcucuuuugugcagcauccggaacugacagggcuugauugcauccgcccuuguuucuggguugagcuggugagaggacucccccgggaaaauaccacgauuuggacaagcggcuccucuaucagcuucugcggggucaacuccaacaccgccaauuggagcuggccugacggagcugagcugcccuuuaccaucgauaaguga

SEQ ID NO: 207946 - RNA, 1413 nt, Artificial Sequence
  derived and/or modified CDS sequence (opt5) from neuraminidase__InfluenzaA__ABS71652
augaaccccaaucagaagaucauuaccaucggcagcauuuccaucgccauugggaucaucucucugaugcuccaaauuggaaacaucauuagcaucugggcuucccacucuauucagacaggcagccagaaucauacggggaucugcaaccagagaauuaucaccuacgagaauaacacaugggugaaucacaccuaugucaacaucaauaacacaaauguuguggccggaaaagacaagaccuccgugacacuggcgggcaacucuagccuuuguuccgucagcgggugggcuauuuacaccaaagauaauucuauccggauuggauccaagggcgacguguucguuauccgcgaaccuuuuauuagcugcucucaucuggaguguagaacguucuuucucacccaaggcgcccugcuuaacgauaaacacuccaaugggacagugaaggaccggagcccguaucgcgcccugaugucuugcccccucggagaagcuccuucccccuacaacagcaaguucgaguccgucgccuggucugcuagcgccugucaugauggcaugggguggcugaccaucggaaucuccggcccugacaacggggcgguggccguucugaaauauaauggaauuaucacagaaaccauuaagagcuggaaaaagagaauccuccggacgcaggagucugagugcguguguaugaacggcuccugcuuuacaauuaugaccgauggccccagcaauggggcugccucuuacaaaaucuucaagaucgaaaagggaaaagucacaaagagcauugagcugaacgcuccuuccuuucacuaugaagaguguucuugcuacccggacaccggcaccgugaugugugugugccgcgauaauuggcacgggagcaacagacccugggucuccuucaaucagaaccuugacuaccagaucggauauauuugcagcggcguuuuuggggauaauccucggcccaaagacggagagggcucuuguaacccugugacaguggauggcgccgacggggucaagggauucuccuacaaauauggcaaugggguguggaucggacgcaccaagagcaacagacugcggaaaggcuuugaaaugauuugggaccccaauggguggacgaacacagauucugacuucuccguuaagcaagauguggucgcgaucaccgacuggagcggcuacuccggaucuuuugugcagcauccggagcucacaggccuggauugcauucgcccuuguuucuggguugaacuugugagagggcugccccgggagaauaccacgaucuggacaagcggauccucuaucagcuucugcggcgucaacuccaacaccgccaauuggagcuggccugacggggcugaacuccccuuuaccauugauaaguga

SEQ ID NO: 207947 - RNA, 1413 nt, Artificial Sequence
  derived and/or modified CDS sequence (opt5) from neuraminidase__InfluenzaA__ABS71653
augaaccccaaucagaagaucauuaccaucggcagcauuuccaucgccauugggaucaucucucugaugcuccaaauuggaaacaucauuagcaucugggcuucccacucuauucagacaggcagccagaaucauacggggaucugcaaccagagaauuaucaccuacgaaaauuccacaugggugaaccacaccuaugucaauaucaacaauacaaacguuguggccggaaaagacaagaccucugugacacuggcgggcaauagcucccuuuguagcauuucugggugggcuaucuacaccaaagauaacuccauucggaucggaagcaagggcgacgucuucgugauucgcgagccuuuuaucucuugcucccaucuggaguguagaacguucuuucucacccaaggcgcccugcuuaaugauaaacacagcaacgggacaguuaaggaccggucuccguaucgcgcccugaugaucugcccccucggagaagcuccuucccccuacaauagcaaguucgaguccguggccuggucugcuagcgccugucaugauggcaugggguggcugaccauuggaaucuccggcccugacaacggggcggucgccgugcugaaauauaacggaauuaucacagaaaccauuaagagcuggaaaaagagaauccuccggacgcaggagucugagugcguuugugugaauggcuccugcuuuacaaucaugaccgauggccccagcaacggggcugccucuuacaaaauuuucaagaucgaaaagggaaaagucacaaagagccgcgagcugaaugcuccuaacuuucacuaugaagaguguuccugcuacccggacauuggcaccgugaugugugugugcagagauaauuggcacgggucuaaccggcccugggucagcuucaaucagaaccuugacuaccagaucggauauauuugcuccggcguuuuuggggauaauccucgccccaaagacggaaagggcagcuguaacccugugaccgccgauggcgcggacggggugaaaggauucucuuacaaguauggcaauggggucuggaucggaagaacaaaauccaaccggcugcgcaagggcuuugagaugauuugggaccccaauggguggacggauaccgacagcgauuucucugugaagcaagacguuguggccaucacagauugguccggcuacagcggauccuuuguccagcauccggaacucaccggccuggacugcaucagaccuuguuucuggguggagcuuguucgggggcugccccgcgaaaacacaaccauuuggacgucuggaagcuccaucucuuucugcggcguggauagcgacacagcuaauugguccuggccugauggggccgagcuccccuuuaccauugacaaauga

SEQ ID NO: 207948 - RNA, 1410 nt, Artificial Sequence
  derived and/or modified CDS sequence (opt5) from neuraminidase__InfluenzaA__ABS71655
augaaccccaucaagaaaauuaucaccauuggcagcgugucccugacaaucucuacgauuugcuucuuuaugcagaucgccauccucauuaccacagucacccugcacuucaagcaauacgaguuuaauagcccuccgaacaaucagguuaugcuuugugaacccacaaucauugagagaaacaucaccgaaauuguguaucugacaaauaccacgaucgagaaagaaauuugcccuaagcucgcugaguaccggaacugguccaaaccccaguguaauaucaccggguucgccccuuuuucuaaggacaacagcauccgccuguccgcgggaggcgauauuugggugacaagagagcccuaugucucuugcgacccugauaaguguuaccaguucgcucuugggcaaggaaccacacugaauaacgugcauagcaaugacaccguucacgaucggacgccguaucgcacacuccugaugaacgaacugggcgugcccuuucaucucgggaccaaacaggucugcaucgccugguccucuagcuccugucacgacggaaaggccuggcugcaugugugcguuacaggcgaugacaaaaaugcuaccgccagcuucauuuacaacggcagacuuguggauucuaucgucuccuggagcaaggagauucugcggacccaggaaucugagugugugugcaucaaugggacauguacgguggucaugaccgacggauccgcuagcggcaaagccgauacaaagauccucuuuauugaggaagggaagaucguucacaccuccacacugucuggaagcgcgcagcacguggaggaaugcuccugcuauccucgcuaccccggcgugagaugugucugccgggacaacuggaaagggagcaaccgcccuauuguggauaucaauauuaaggacuacucuaucguuuccagcuauguguguucuggacuugucggcgacacccccagaaagaacgauagcuccucuagcucccauugccuggacccgaauaacgaggaaggcgggcacggagugaaaggcugggccuucgaugacgggaaugauguuuggaugggacggacgaucagcgagaaacuccgcucuggcuacgagacauuuaaggugauugaagggugguccaacccuaauagcaaacugcaaaucaacagacaggucauuguggaccggggaaaucgcucuggcuauuccggcaucuucagcgucgaggggaaguccuguauuaacagaugcuuuuacguggaacugauccggggaagaaaggaggaaaccgagguucucuggaccucuaauagcauuguggucuucuguggcacauccgggaccuauggaacaggcucuuggcccgauggggcugacaucaaccugaugccuaucuga

SEQ ID NO: 207949 - RNA, 1410 nt, Artificial Sequence
  derived and/or modified CDS sequence (opt5) from neuraminidase__InfluenzaA__ABS71657
augaaccccaaucagaagaucauuaccaucggcagcgugucccugacaauuucuacgaucugcuucuuuaugcaaauugccauccucaucaccacagucacccugcacuucaaacaguacgaguuuagcuccccuccgaacaaucagguuaugcuuugugaacccacaauuaucgagagaaacauuaccgaaaucguguaucugacaaauaccacgauugagaaggaaaucugcccuaaacucgcugaguaccggaacuggucuaagccccagugugacauuaccggguucgccccuuuuagcaaagauaauuccauccgccugucugcgggaggcgacaucugggugacaagagagcccuaugucagcugcgauccugacaaguguuaccaauucgcucuugggcagggaaccacacugaacaaugugcauuccaacgauaccguucacgaccggacgccguaucgcacacuccugaugaaugaacugggcgugcccuuucaucucgggaccaagcaggucugcauugccuggucuagcuccagcugucacgauggaaaagccuggcugcaugugugcguuacaggcgacgauaagaacgcuaccgccucuuucaucuacaauggcagacuuguggacuccauugucagcuggucuaaagagauccugcggacccaggaauccgagugugugugcauuaacgggacauguacgguggucaugaccgauggaagcgcuuccggcaaggccgacacaaaaauccucuuuaucgaggaagggaagauuguucacaccucuacacugagcggauccgcgcaacacguggaggaaugcagcugcuauccucgcuaccccggcgugagaugugucugccgggauaauuggaaggggucuaaccgcccuaucguggacauuaacaucaaagacuacuccauuguuagcagauauguguguucuggacuugucggcgauacgccccggaagaaugacagcuccucuagcucccauugccuggauccgaacaaugaggaaggcgggcacggagugaaaggcugggccuucgacgaugggaacgacgcuuggaugggacgcaccaucagcgagaagucuagauccggcuacgagacauuuaaaguuaucgaaggguggagcaauccuaacucuaagcuccagauuaaucgccaggugaucgucgaucggggaaacagauccggcuauagcggcauuuucuccguggaggggaaaucuuguaucaaucggugcuuuuacgucgaacugauuagaggacgcaaggaggaaaccgaggugcuguggaccagcaacuccaucguuguguucuguggcacaucugggaccuauggaacaggcagcuggcccgacggggccgauauuaaucucaugccuaucuga

SEQ ID NO: 207950 - RNA, 1410 nt, Artificial Sequence
  derived and/or modified CDS sequence (opt5) from neuraminidase__InfluenzaA__ABS71659
augaaccccaucaagaaaauuaucaccauuggcagcgugucccugacaaucucuacgauuugcuucuuuaugcagaucgccauccucauuaccacagucacccugcacuucaagcaauacgaguuuagcuccccuccgaauaaccagguuaugcuuugugaacccacaaucauugagagaaauaucaccgaaauuguguaucugacaaacaccacgaucgagaaagaaauuugcccuaagcucgcugaguaccggaauuggucuaaaccccagugugacaucaccggguucgccccuuuuagcaaggauaacuccauccgccugucugcgggaggcgacauuugggugacaagagagcccuaugucagcugcgauccugacaaguguuaccaguucgcucuugggcaaggaaccacacugaauaacgugcauuccaaugauaccguucacgaccggacgccguaucgcacacuccugaugaacgaacugggcgugcccuuucaucucgggaccaaacaggucugcaucgccuggucuagcuccagcugucacgauggaaaggccuggcugcaugugugcguuacaggcgacgauaaaaaugcuaccgccucuuucauuuacaacggcagacuuguggacuccaucgucagcuggucuaaggagauucugcggacccaggaauccgagugugugugcaucaaugggacauguacgguggucaugaccgauggaagcgcuuccggcaaagccgacacaaagauccucuuuauugaggaagggaagaucguucacaccucuacacugagcggauccgcgcagcacguggaggaaugcagcugcuauccucgcuaccccggcgugagaugugucugccgggauaacuggaaagggucuaaucgcccuauuguggacaucaacauuaaggacuacuccaucguuagcagauauguguguucuggacuugucggcgauacgccccggaaaaacgacagcuccucuagcucccauugccuggauccgaauaacgaggaaggcgggcacggagugaagggcugggccuucgacgaugggaaugacguuuggaugggacgcaccaucggcgagaaaagcagaucuggguacgagacauuuaaggugauugaaggaugguccaacccuaauagcaaacuccaaaucaaccggcaggucauuguggaucgcggcaauagaucuggcuauuccgggaucuucagcgucgagggaaaguccuguauuaaccggugcuuuuacguggaacugaucagaggccgcaaggaggaaaccgagguucuguggaccucuaauagcauuguggucuucugugggacauccggaaccuauggcacagggucuuggcccgacggcgcugauaucaaccauaugccuaucuga

SEQ ID NO: 207951 - RNA, 1410 nt, Artificial Sequence
  derived and/or modified CDS sequence (opt5) from neuraminidase__InfluenzaA__ABS71660
augaaccccaucaagaaaauuaucaccauuggcagcgugucccugacaaucucuacgauuugcuucuuuaugcagaucgccauccucauuaccacagucacccugcacuucaagcaauacgaguuuagcuccccuccgaauaaccagguuaugcuuugugaacccacaaucauugagagaaauaucaccgaaauuguguaucugacaaacaccacgaucgagaaagaaauuugcccuaagcucgcugaguaccggaauuggucuaaaccccagugugacaucaccggguucgccccuuuuagcaaggauaacuccauccgccugucugcgggaggcgacauuugggugacaagagagcccuaugucagcugcgauccugacaaguguuaccaguucgcucuugggcaaggaaccacacugaauaacgugcauuccaaugauaccguucacgaccggacgccguaucgcacacuccugaugaacgaacugggcgugcccuuucaucucgggaccaaacaggucugcaucgccuggucuagcuccagcugucacgauggaaaggccuggcugcaugugugcguuacaggcgacgauaaaaaugcuaccgccucuuucauuuacaacggcagacuuguggacuccaucgucagcuggucuaaggagauucugcggacccaggaauccgagugugugugcaucaaugggacauguacgguggucaugaccgauggaagcgcuuccggcaaagccgacacaaagauccucuuuauugaggaagggaagaucguucacaccucuacacugagcggauccgcgcagcacguggaggaaugcagcugcuauccucgcuaccccggcgugagaugugucugccgggauaacuggaaagggucuaaucgcccuauuguggacaucaacauuaaggacuacuccaucguuagcagauauguguguucuggacuugucggcgauacgccccggaaaaacgacagcuccucuagcucccauugccuggauccgaauaacgaggaaggcgggcacggagugaagggcugggccuucgacgaugggaaugacguuuggaugggacgcaccaucagcgagaaaucuagauccggcuacgagacauuuaaggugauugaaggguggagcaacccuaauucuaaacuccaaaucaaccggcaggucauuguggaucgcggaaauagauccggcuauagcggcaucuucuccgucgaggggaagucuuguauuaaccggugcuuuuacguggaacugaucagaggacgcaaggaggaaaccgagguucuguggaccagcaauuccauuguggucuucuguggcacaucugggaccuauggaacaggcagcuggcccgacggggcugauaucaaccucaugccuaucuga

SEQ ID NO: 207952 - RNA, 1410 nt, Artificial Sequence
  derived and/or modified CDS sequence (opt5) from neuraminidase__InfluenzaA__ABS71661
auguaccccaucaagaaaauuaucaccauuggcagcgugucccugacaaucucuacgauuugcuucuuuaugcagaucgccauccucauuaccacagucacccugcacuucaagcaauaugaguuuagcuccccuccgaacaaucagguuaugcuuugugaacccacaaucauugagagaaacaucaccgaaauuguguaccugacaaauaccacgaucgagaaagaaauuugcccuaagcucgcugaguaucggaacuggucuaaaccccagugugacaucaccggguucgccccuuuuagcaaggauaauuccauccgccugucugcgggaggcgacauuugggugacaagagagcccuacgucagcugcgauccugacaaguguuaucaguucgcucuugggcaaggaaccacacugaacaaugugcauuccaacgauaccguucacgaccggacgccguaccgcacacuccugaugaaugaacugggcgugcccuuucaucucgggaccaaacaggucugcaucgccuggucuagcuccagcugucacgauggaaaggccuggcugcaugugugcguuacaggcgacgauaaaaacgcuaccgccucuuucauuuauaauggcagacuuguggacuccaucgucagcuggucuaaggagauucugcggacccaggaauccgagugugugugcaucaacgggacauguacgguggucaugaccgauggaagcgcuuccggcaaagccgacacaaagauccucuuuauugaggaagggaagaucguucacaccucuacacugagcggauccgcgcagcacguggaggaaugcagcugcuacccucgcuaccccggcgugagaugugucugccgggauaauuggaaagggucuaaccgcccuauuguggacaucaauauuaaggacuauuccaucguuagcagauacguguguucuggacuugucggcgauacgccccggaaaaacgacagcuccucuagcucccauugccuggauccgaacaaugaggaaggcgggcacggagugaagggcugggccuucgacgaugggaacgacguuuggaugggacgcaccaucagcgagaaaucuagauccggcuaugagacauuuaaggugauugaaggguggagcaauccuaacucuaaacuccaaaucaaucggcaggucauuguggaucgcggaaacagauccggcuacagcggcaucuucuccgucgaggggaagucuuguauuaaucggugcuuuuauguggaacugaucagaggacgcaaggaggaaaccgagguucuguggaccagcaacuccauuguggucuucuguggcacaucugggaccuacggaacaggcagcuggcccgacggggcugauaucaaucucaugccuaucuga

SEQ ID NO: 207953 - RNA, 1410 nt, Artificial Sequence
  derived and/or modified CDS sequence (opt5) from neuraminidase__InfluenzaA__ABS71662
augaaccccaucaagaaaauuaucaccauuggcagcgugucccugacaaucucuacgauuugcuucuuuaugcagaucgccauccucauuaccacagucacccugcacuucaagcaauacgaguuuaauagcccuccgaacaaucagguuaugcuuugugaacccacaaucauugagagaaacaucaccgaaauuguguaucugacaaauaccacgaucgagaaagaaauuugcccuaagcucgcugaguaccggaacugguccaaaccccagugugacaucaccggguucgccccuuuuucuaaggauaauagcauccgccuguccgcgggaggcgacauuugggugacaagagagcccuaugucucuugcgauccugacaaguguuaccaguucgcucuugggcaaggaaccacacugaacaaugugcauagcaacgauaccguucgggaccgcacgccguauagaacacuccugaugaaugaacugggcgugcccuuucaccucgggaccaaacaggucugcaucgccugguccucuagcuccugucaugauggaaaggccuggcugcacgugugcauuacaggcgacgauaaaaacgcuaccgccagcuucaucuacaauggccggcuuguugacucuauuguguccuggagcaaggagauccugcgcacccaggaaucugagugugucugcaucaacgggacauguacgguggugaugaccgauggauccgcuagcggcaaagccgacacaaagauucucuuuaucgaggaagggaagauuguccauaccuccacacugucuggaagcgcgcagcacguugaggaaugcuccugcuauccuagauaccccggcgugcggugugugugccgcgauaauuggaaagggagcaacagaccuaucgucgacauuaacaucaaggaccacucuaucguguccagcuacguuuguucuggacuugugggcgauacgccccggaaaaaugacagcuccucuagcucccauugccuggauccgaacaaugaggaaggcgggcacggagucaagggcugggccuucgacgaugggaacgacguguggaugggacgcaccauuagcgagaaaucuagacucggcuaugagacauuuaagguuaucgaagggugguccaauccuaacagcaaacugcaaauuaaucgccaggugaucgucgaucggggaaacagaucuggcuacuccggcauuuucagcguggaggggaaguccuguaucaaucggugcuuuuaugucgaacugauuagaggacgcaaggaggaaaccgaggugcucuggaccucuaacagcaucguuguguucuguggcacauccgggaccuacggaacaggcucuuggcccgacggggcugauaucaaucugaugccuauuuga

SEQ ID NO: 207954 - RNA, 1410 nt, Artificial Sequence
  derived and/or modified CDS sequence (opt5) from neuraminidase__InfluenzaA__ABS71663
auguaccccaucaagaaaauuaucaccauuggcagcgugucccugacaaucucuacgauuugcuucuuuaugcagaucgccauccucauuaccacagucacccugcacuucaagcaauaugaguuuaacagcccuccgaauaaccagguuaugcuuugugaacccacaaucauugagagaaauaucaccgaaauuguguaccugacaaacaccacgaucgagaaagaaauuugcccuaagcucgcugaguaucggaauugguccaaaccccagugugacaucaccggguucgccccuuuuucuaaggauaacagcauccgccuguccgcgggaggcgacauuugggugacaagagagcccuacgucucuugcgauccugacaaguguuaucaguucgcucuugggcaaggaaccacacugaauaacgugcauagcaaugauaccguucgggaccgcacgccguacagaacacuccugaugaacgaacugggcgugcccuuucaccucgggaccaaacaggucugcaucgccugguccucuagcuccugucaugauggaaaggccuggcugcacgugugcauuacaggcgacgaucagaaugcuaccgccagcuucaucuauaacggccggcuuguugacucuauuguguccuggagcaaagagauccugcgcacccaggaaucugagugugucugcaucaaugggacauguacgguggugaugaccgauggauccgcuagcggcaaggccgacacaaaaauucucuuuaucgaggaagggaagauuguccauaccuccacacugucuggaagcgcgcaacacguugaggaaugcuccugcuacccuagauaccccggcgugcggugugugugccgcgauaacuggaaggggagcaauagaccuaucgucgacauuaacaucaaagaccacucuaucguguccagcuauguuuguucuggacuugugggcgauacgccccggaagaacgacagcuccucuagcucccauugccuggauccgaauaacgaggaaggcgggcacggagucaaaggcugggccuucgacgaugggaaugacguguggaugggacgcaccauuagcgagaagucuagacucggcuacgagacauuuaaaguuaucgaagggugguccaacccuaauagcaagcugcagaugaaccgccaggugauugucgaucggggaaauagaucuggcuauuccggcaucuucagcguggaggggaaauccuguauuaaccggugcuuuuacgucgaacugaucagaggacgcaaggaggaaaccgaggugcucuggaccucuaauagcauuguuguguucuguggcacauccgggaccuauggaacaggcucuuggcccgacggggcugauaucaaccugaugccuaucuga

SEQ ID NO: 207955 - RNA, 1410 nt, Artificial Sequence
  derived and/or modified CDS sequence (opt5) from neuraminidase__InfluenzaA__ABU40956
augaaccccaaucagaagaucauuaccaucggcagcgugucccugacaauuucuacgaucugcuucuuuaugcaaauugccauccucaucaccacagucacccugcacuucaaacaguacgaguuuaacagcccuccgaauaaccagguuaugcuuugugaacccacaauuaucgagagaaauauuaccgaaaucguguaucugacaaacaccacgauugagaaggaaaucugcccuaaacucgcugaguaccggaauugguccaagccccagugugacauuaccggguucgccccuuuuucuaaagauaacagcauccgccuguccgcgggaggcgacaucugggugacaagagagcccuaugucucuugcgauccugacaauuguuaccaauucgcucuugggcagggaaccacacugaacaaugugcauagcaacgauaccguucgggaccgcacgccguauagaacacuccugaugaaugaacugggcgugcccuuucaccucgggaccaagcaggucugcauugccugguccucuagcuccugucaugauggaaaggccuggcugcacgugugcaucacaggcgacgauaaaaacgcuaccgccagcuucauuuacaauggccggcuuguugacucuaucguguccuggagcaaggagauucugcgcacccaggaaucugagugugucugcaucaacgggacauguacgguggugaugaccgauggauccgcuagcggcaaagccgacacaaagauccucuuuauugaggaagggaaaaucguccauaccuccacacugucuggaagcgcgcaacacguugaggaaugcuccugcuauccuagauaccccggcgugcggugugugugccgcgauaacuggaaggggagcaauagaccuauuaucgacauuaacaucaaggaccacucuaucgucuccagcuacguguguucuggacuuguuggcgauacgccccggaaaaaugacagcuccucuagcucccauugccuggauccgaacaaugaggaaggcgggcacggagugaagggcugggccuucgacgaugggaacgacgucuggaugggacgcaccauuagcgagaaaucuagacucggcuaugagacauuuaaggugaucgaagggugguccaauccuaaaagcaagcugcagauuaaccggcagguuaucguggaucgcggaaauagaucuggcuacuccggcauuuucagcgucgaggggaaauccuguaucaaccggugcuuuuauguggaacugauuagaggacgcaaggaggaaaccgagguccucuggaccucuaauagcaucgugguuuucuguggcacauccgggaccuacggaacaggcucuuggcccgacggggcugauaucaaccugaugccuauuuga

SEQ ID NO: 207956 - RNA, 1410 nt, Artificial Sequence
  derived and/or modified CDS sequence (opt5) from neuraminidase__InfluenzaA__ABU50651
augaaccccaaucagaagaucauuaccaucggcagcgugucccugacaauuucuacgaucugcuucuuuaugcaaauugccauccucaucaccacagucacccugcacuucaaacaguacgaguuuaacagcccuccgaauaaccagguuaugcuuugugaacccacaauuaucgagagaaauauuaccgaaaucguguaucugacaaacaccacgauugagaaggaaaucugcccuaaacucgcugaguaccggaauugguccaagccccagugugacauuaccggguucgccccuuuuucuaaagauaacagcauccgccuguccgcgggaggcgacaucugggugacaagagagcccuaugucucuugcgauccugacaaguguuaccaauucgcucuugggcagggaaccacacugaauaacgugcauagcaaugauaccguucgggaccgcacgccguauagaacacuccugaugaacgaacugggcgugcccuuucaccucgggaccaagcaggucugcauugccugguccucuagcuccugucaugauggaaaagccuggcugcacgugugcaucacaggcgacgauaagaaugcuaccgccagcuucauuuacaacggccggcuuguugacucuaucguguccuggagcaaagagauucugcgcacccaggaaucugagugugucugcaucaaugggacauguacgguggugaugaccgauggauccgcuagcggcaaggccgacacaaaaauccucuuuauugaggaagggaagaucguccauaccuccacacugucuggaagcgcgcaacacguugaggaaugcuccugcuauccuagauaccccggcgugcggugugugugccgcgauaacuggaaggggagcaacagaccuauugucgacaucaauauuaaagaccacucuaucguguccagcuacguuuguucuggacuugugggcgauacgccccggaagaacgacagcuccucuagcucccauugccuggauccgaauaacgaggaaggcgggcacggagucaaaggcugggccuucgacgaugggaaugacguguggaugggacgcaccaucagcgagaagucuagacucggcuaugagacauuuaaaguuauugaagggugguccaacccuaagagcaaacugcagaucaaucgccaggugauugucgaucggggaaacagaucuggcuacuccggcaucuucagcguggaggggaaguccuguauuaaucggugcuuuuaugucgaacugaucagaggacgcaaggaggaaaccgaggugcucuggaccucuaacagcauuguuguguucuguggcacauccgggaccuacggaacaggcucuuggcccgacggggcugauaucaaucugaugccuaucuga

SEQ ID NO: 207957 - RNA, 1410 nt, Artificial Sequence
  derived and/or modified CDS sequence (opt5) from neuraminidase__InfluenzaA__ABU80180
augaaccccaaucagaagaucauuaccaucggcagcgugucccugacaauugccacgaucugcuuccucaugcaaauugcuauccuggucaccacaguuacccuucacuuuaaacaguacgaguguaacucuuucccuaauaaccaggugaugcugugcgaaccgacaaucauugagagaaauaucaccgaaauuguguaucucacaaacaccacgaucgagaaggaaauuugucccaaacuggccgaguaccggaauuggagcaagccucagugcaacaucaccggguuugcgcccuucuccaaagacaauucuauucgccuuagcgcuggaggcgauaucugggucacaagagagccuuauguguccugugaccccgauaagugcuaccaauuugcccuggggcagggaaccacacucaacaauggccauucuaacgacaccguucacgaucggacgccuuaucgcacacugcugaugaaugaacucggggugccguuccaucugggaaccaagcaggucuguaucgccuggagcuccagcucuugccacgacggcaaagccuggcuucauguguguguuacaggcgaugacgagaacgcuaccgcuuccuuuauuuacaaugggagacugguggauagcaucggaucuugguccaagaaaauucuccggacccaggaaagcgagugcgucuguaucaacggcacaugcacgguggugaugaccgacgggucugccuccggaaaggcggauacaaaaauucuguucaucgaggaaggcaagaucguccacaccagcucccuuucugggagcgcccaacacguugaggaaugcuccuguuauccccgcuacccuggagugagaugcgugugucgggacaacuggaagggcagcaaucgccccauugucgauaucaacgugaaagacuacucuauuguuuccagcuaugugugcucuggccuggucggggacacaccuagaaagaaugauagcuccucuagcucccauugucucgaccccaacaaugaggaaggaggccacggggugaaaggaugggcuuuugaugacggcaacgauguuuggauggggcggaccaucagcgagaagcugcgcucuggauacgagacguucaaagugauugaaggcugguccaagccgaauagcaaacugcagaucaacagacaggucaucguggaccggggcaaucgcucuggguauuccggaauuuuuagcgucgagggcaaguccugcaucaacagauguuucuacguggaacucauucgggggagaaagcaggagacagaaguucuguggaccucuaauagcaucguggucuuuugcggaaccuccggcacauaugggaccggcucuuggccugauggagccgacauuaaccuuaugcccaucuga

SEQ ID NO: 207958 - RNA, 1413 nt, Artificial Sequence; identical to SEQ ID NO: 206900
  derived and/or modified CDS sequence (opt5) from neuraminidase__InfluenzaA__ABU80301

SEQ ID NO: 207959 - RNA, 1413 nt, Artificial Sequence
  derived and/or modified CDS sequence (opt5) from neuraminidase__InfluenzaA__ABU80312
augaacaccaaucagaagaucauuacaaucggcagcauuuccaucgccauugggaucaucucucugaugcuccaaauuggaaacaucauuagcaucugggcuucccacucuauucagacgggcagccagaaucauaccgggaucugcaaccagagaauuaucacauacgaaaauuccaccugggugaaccacacauaugucaauaucaacaauaccaacguuguggccggaaaagacaagacaucugugacccuggcgggcaauagcucccuuuguagcauuucugggugggcuaucuacacgaaagauaacuccauucggaucggaagcaagggcgacgucuucgugaugcgcgagcccuuuauuucuugcucccaucuggaguguagaaccuucuuucucacacaaggcgcccugcuuaaugauaaacacagcaacgggaccguuaaggaccggucuccuuaucgcgcccugauguccugcccgcucggagaagcucccagcccuuacaauuccaaguucgagucuguggccuggagcgcuuccgccugucaugauggcaugggguggcugacaaucggaaucagcggccccgacaacggggcggucgccgugcugaaauauaacggaauuaucaccgaaacgauuaagucuuggaaaaagagaauccuccggacacaggaguccgagugcguuugugugaauggcagcugcuuuaccauuaugacagauggcccuucuaacggggcugccagcuacaaaaucuucaagaucgaaaagggaaaagucaccaaguccauugagcugaaugcucccaacuuucacuaugaagaguguucuugcuacccugacaccggcacagugaugugugugugccgcgauaauuggcacgggagcaacagaccgugggucuccuucaaucagaaccuugacuaccagaucggauauauuugcagcggcguuuuuggggauaauccccggccuaaagacggagagggcucuuguaaccccgugacgguggauggcgccgacggggucaagggauucuccuacaaauauggcaaugggguguggaucggacgcaccaagagcaacagacugcggaaaggcuuugaaaugauuugggacccuaauggguggacagauaccgacucuaacuucuccguuaagcaagauguggucgcgaucacagacuggagcggcuacuccggaucuuuugugcagcaucccgagcucaccggccuggauugcauucgcccguguuucuggguugaacuugugagagggcugccucgggagaauacgacaaucuggaccagcggauccucuaucagcuucugcggcgucaacuccgacaccgccaacuggagcuggcccgauggggcugaacucccuuuuacaauugacaaguga

SEQ ID NO: 207960 - RNA, 1410 nt, Artificial Sequence; identical to SEQ ID NO: 206802
  derived and/or modified CDS sequence (opt5) from neuraminidase__InfluenzaA__ABU80323

SEQ ID NO: 207961 - RNA, 1410 nt, Artificial Sequence
  derived and/or modified CDS sequence (opt5) from neuraminidase__InfluenzaA__ABU80334
augaaccccaaucagaagaucauuaccaucggcagcgugucccugacaauugccacgaucugcuuccucaugcaaauugcuauccuggucaccacaguuacccuucacuuuaaacaguacgaguguaacucuccuccgaauaaccaggugaugcugugcgaacccacaaucauugagagaaauaucaccgaaauuguguaucucacaaacaccacgaucgagaaggaaauuuguccuaaacuggccgaguaccggaauuggagcaagccccagugcaacaucaccggguucgcgccuuuuuccaaagacaauucuauucgccuuagcgcuggaggcgauaucugggucacaagagagcccuauguguccugugacccugauaagugcuaccaauucgcccuggggcagggaaccacacucaacaauggccauucuaacgacaccguucacgaucggacgccguaucgcacacugcugaugaaugaacucggggugcccuuucaucugggaaccagacaggucuguaucgccuggagcuccagcucuugccacgacggcaaggcuuggcuucauguguguguuacaggcgaugacgagaacgccaccgcuuccuucauuuacaaugggcggcugguggauagcaucggaucuugguccaaaaagacccuccgcacacaggaaagcgagugcgucuguauuaacggcacgugcaccguggugaugacagacgggucugccuccggaaaagcggauaccaagauccuguuuauugaggaaggcaaaaucauccacauuagcacacuuuccgggucugcccaacacgucgaggaaugcagcuguuauccuagauaccccggaguucggugcgugugucgcgacaacuggaagggcuccaauagaccuaucguggauauuaacgucaaggacuacagcaucgugucuuccuauguuugcagcggccuggugggggacacgccccggaaaaaugauucuuucagcuccucucauugucucgacccgaacaaugaggaaggaggccacggggucaagggaugggcuuuugaugacggcaacgauguguggauggggcgcaccauuagcgagaaacugagauccggauacgagacauucaagguuaucgaaggcuggagcaaaccuaauucuaagcugcagaucaaccgccaggugauugucgagcggggcaauagauccggguauagcggaaucuuuucuguggaaggcaaauccugcauuaaccgguguuucuacgucgagcucaucagagggcgcaaggaagagaccgaggugugguggaccagcaauuccauuguuguguuuugcggaacaucuggcaccuaugggacaggcagcuggcccgacggagccgauaucaaccugaugccuauuuga

SEQ ID NO: 207962 - RNA, 1410 nt, Artificial Sequence; identical to SEQ ID NO: 206226
  derived and/or modified CDS sequence (opt5) from neuraminidase__InfluenzaA__ABU92762

SEQ ID NO: 207963 - RNA, 1410 nt, Artificial Sequence
  derived and/or modified CDS sequence (opt5) from neuraminidase__InfluenzaA__ABU92764
augaaccccaaucagaagaucauuaccaucggcagcgugucccugacaauugccacgaucugcuuccucaugcaaauugcuauccuggucaccacaguuacccuucacuuuaaacaguacgaguguaacucuccuccgaauaaccaggugaugcugugcgaacccacaaucauggagagaaauauuaccgaaaucguguaucucacaaacaccacgauugagaaggaaaucuguccuaaacuggccgaguaccggaauuggagcaagccccagugcaacgucaccggguucgcgccuuuuuccaaagacaauucuauucgccuuagcgcuggaggcgauaucugggugacaagagagcccuauguuuccugugacccugauaagugcuaccaauucgcccuggggcagggaaccacacucaacaauggccauucuaacgacaccgugcacgaucggacgccguaucgcacacugcugaugaaugaacucgggguccccuuucaucugggaaccagacagguguguauugccuggagcuccagcucuugccacgacggcaaggcuuggcuucauguuugugugacaggcgaugacgagaacgccaccgcuuccuucaucuacaaugggcggcuggucgauagcaucggaucuugguccaaaaagauucuccgcacccaggaaagcgagugcguguguaucaacggcacaugcacgguggucaugaccgacgggucugccuccggaaaagcggauacaaagauucuguuuaucgaggaaggcaaaauuguucacaucagcacccuuuccgggucugcccaacacguggaggaaugcagcuguuauccuagauaccccggagugcggugcgucugucgcgacaacuggaagggcuccaauagaccuaucguggauauuaacguuaaggacuacagcaucgugucuuccuaugucugcagcggccuggugggggacacaccccggaaaaaugauucuuucagcuccucucauugucucgacccgaacaaugaggaaggaggccacgggguuaagggaugggcuuuugaugacggcaacgauguguggauggggcgcaccauuagcgagaaacugagauccggauacgagacguucaaggucaucgaaggcuggagcaaaccuaauucuaagcugcagauuaaccgccaggugaucgucgagcggggcaauagauccggguauagcggaaucuuuucuguggaaggcaaauccugcauuaaccgguguuucuacguugagcucaucagagggaagaaggaagagacagaggugugguggaccagcaauuccauugucguguuuugcggaaccucuggcacauaugggaccggcagcuggcccgacggagccgauaucaaccugaugccuauuuga

SEQ ID NO: 207964 - RNA, 1410 nt, Artificial Sequence; identical to SEQ ID NO: 206226
  derived and/or modified CDS sequence (opt5) from neuraminidase__InfluenzaA__ABU92765

SEQ ID NO: 207965 - RNA, 1410 nt, Artificial Sequence; identical to SEQ ID NO: 206226
  derived and/or modified CDS sequence (opt5) from neuraminidase__InfluenzaA__ABU92766

SEQ ID NO: 207966 - RNA, 1410 nt, Artificial Sequence; identical to SEQ ID NO: 206226
  derived and/or modified CDS sequence (opt5) from neuraminidase__InfluenzaA__ABU92767

SEQ ID NO: 207967 - RNA, 1410 nt, Artificial Sequence; identical to SEQ ID NO: 206226
  derived and/or modified CDS sequence (opt5) from neuraminidase__InfluenzaA__ABU92768

SEQ ID NO: 207968 - RNA, 1410 nt, Artificial Sequence; identical to SEQ ID NO: 206133
  derived and/or modified CDS sequence (opt5) from neuraminidase__InfluenzaA__ABU92769

SEQ ID NO: 207969 - RNA, 1410 nt, Artificial Sequence; identical to SEQ ID NO: 206325
  derived and/or modified CDS sequence (opt5) from neuraminidase__InfluenzaA__ABU92770

SEQ ID NO: 207970 - RNA, 1410 nt, Artificial Sequence
  derived and/or modified CDS sequence (opt5) from neuraminidase__InfluenzaA__ABU92771
augaaccccaaucagaagaucauuaccaucggcagcgugucccugacaauugccacgaucugcuuccucaugcaaauugcuauccuggucaccacaguuacccuucacuuuaaacaguacgaguguaacucuccuccgaauaaccaggugaugcugugcgaacccacaaucauugagagaaauaucaccgaaauuguguaucucacaaacaccacgaucgagaaggaaauuuguccuaaacuggccgaguaccggaauuggagcaagccccagugcaacaucaccggguucgcgccuuuuuccaaagacaauucuauucgccuuagcgcuggaggcgauaucugggucacaagagagcccuauguguccugugacccuaacaagugcuaccaauucgcccuggggcagggaaccacacucaauaacggccauucuaaugauaccguucacgaccggacgccguaucgcacacugcugaugaacgaacucggggugcccuuucaucugggaaccaagcaggucuguaucgccuggagcuccagcucuugccacgauggcaaagccuggcuucauguguguguuacaggcgacgaugagaaugcuaccgcuuccuucauuuacaacgggagacugguggacagcaucggaucuugguccaagaaaauucuccggacccaggaaagcgagugcgucuguaucaacggcacaugcacgguggugaugaccgaugggucugccuccggaaaggcggacacaaaaauucuguuuaucgaggaaggcaagaucguccacaccagccuucuguccgggucugcccaacacguugaggaaugcagcuguuauccucgcuaccccggagugagaugcgugugucgggauaauuggaagggcuccaaccgcccuauugucgacaucaaugugaaagauuacagcauuguuucuuccuaugugugcagcggccucgucggggacacacccagaaagaacgacucuagcuccucuagccauugucuggauccgaauaacgaggaaggaggccacggggugaaaggaugggcuuucgacgauggcaaugacguuuggauggggcggaccaucuccgagaagcugcgcagcggauacgagacguuuaaagugauugaaggcuggucuaagccuaacuccaaacuccagaucaauagacaggucaucguggaucggggcaaccgcagcggguauucuggaauuuucuccgucgagggcaagagcugcaucaauagauguuuuuacguggaacugauucgggggagaaagcaggagacagaaguucuuuggaccuccaacucuaucguggucuucugcggaaccagcggcacauaugggaccggcuccuggcccgacggagccgauauuaaucugaugccuaucuga

SEQ ID NO: 207971 - RNA, 1410 nt, Artificial Sequence
  derived and/or modified CDS sequence (opt5) from neuraminidase__InfluenzaA__ABU92772
augaaccccaaucagaagaucauuaccaucggcagcgugucccugacaauugccacgaucugcuuccucaugcaaauugcuauccuggucaccacaguuacccuucacuuuaaacaguacgaguguaacucuccuccgaauaaccaggugaugcugugcgaacccacaaucauugagagaaauaucaccgaaauuguguaucucacaaacaccacgaucgagaaggaaauuuguccuaaacuggccgaguaccggaauuggagcaagccccagugcaacaucaccggguucgcgccuuuuuccaaagacaauucuauucgccuuagcgcuggaggcgauaucugggucacaagagagcccuauguguccugugacccugauaagugcuaccaauucgcccuggggcagggaaccacacucaacaauggccauucuaacgacaccguucacgaucggacgccguaucgcacacugcugaugaaugaacucggggugcccuuucaucugggaaccagacaggucuguaucgccuggagcuccagcucuugccacgacggcaaggcuuggcuucauguguguguuacaggcgaugacgagaacgccaccgcuuccuucauuuacaaugggcggcugguggauagcaucggaucuugguccaaaaacauucuccgcacccaggaaagcgagugcgucuguaucaacggcacaugcacgguggugaugaccgacgggucugccuccggaaaggcggauacaaaaauucuguuuaucgaggaaggcaagaucguccacauuagcacccuuuccgggucugcccaacacguugaggaaugcagcuguuauccuagauaccccggagugcggugcgugugucgcgacaauuggaaaggcuccaacagaccuaucgucgauauuaaugugaaggacuacagcaucguuucuuccuaugugugcagcggccuggucggggacacaccccggaagaacgauucuuucagcuccucucauugucucgacccgaauaacgaggaaggaggccacggggugaaaggaugggcuuuugaugacggcaaugauguuuggauggggcgcaccauuagcgagaagcugagauccggauacgagacguucaaagugaucgaaggcuggagcaagccuaacucuaaacugcagaucaaucggcaggucauuguggagcgcggcaacagauccggguauagcggaaucuuuucugucgaaggcaaguccugcauuaaucgguguuucuacguggagcucaucagagggcgcaaagaagagacagagguuugguggaccagcaacuccauuguggucuuuugcggaaccucuggcacauaugggaccggcagcuggcccgacggagccgauaucaaucugaugccuauuuga

SEQ ID NO: 207972 - RNA, 1410 nt, Artificial Sequence
  derived and/or modified CDS sequence (opt5) from neuraminidase__InfluenzaA__ABU92773
augaaccccaaucagaagaucauuaccaucggcagcgugucccugacaauugccacgaucugcuuccucaugcaaauugcuauccuggucaccacaguuacccuucacuuuaaacaguacgaguguaacucuccuccgaauaaccaggugaugcugugcgaacccacaaucauugagagaaauaucaccgaaacaguguaucucaccaacacgaccauugagaaggaaaucuguccuaaacuggccgaguaccggaauuggagcaagccccagugcaacauuacaggguucgcgccuuuuuccaaagacaauucuauccgccuuagcgcuggaggcgauauuugggucaccagagagcccuauguguccugugacccugauaagugcuaccaauucgcccuggggcagggaacaacccucaacaauggccauucuaacgacacgguucacgaucggacaccguaucgcacccugcugaugaaugaacucggggugcccuuucaucugggaacaagacaggucuguaucgccuggagcuccagcucuugccacgacggcaaggcuuggcuucauguguguguuaccggcgaugacgagaacgccaccgcuuccuucaucuacaaugggcggcugguggauagcauuggaucuugguccaaaaagauccuccgcacacaggaaagcgagugcgucuguauuaacggcacgugcaccguggugaugacagacgggucugccuccggaaaagcggauaccaagauccuguuuauugaggaaggcaaaaucguccacaucagcacacuuuccgggucugcccaacacguugaggaaugcagcuguuauccuagauaccccggagugcggugcgugugucgcgacaacuggaagggcuccaauagaccuauugucgauaucaacgugaaggacuacagcauuguuucuuccuaugugugcagcggccuggucggggacacgccccggaaaaaugauucuuucagcuccucucauugucucgacccgaacaaugaggaaggaggccacggggugaagggaugggcuuuugaugacggcaacgauguuuggauggggcgcaccaucagcgagaaacugagauccggauacgagacauucaaggugauugaaggcuggagcaaaccuaauucuaagcugcagaccaaccggcaggucaucguggagcgcggcaauagauccggguauagcggaaucuuuucugucgaaggcaaauccugcauuaaccgguguuucuacguggagcucaucagagggcgcaaggaagagaccgagguuugguggacaagcaauuccauuguggucuuuugcggaaccucuggcacauaugggacgggcagcuggcccgacggagccgauaucaaccugaugccuauuuga

SEQ ID NO: 207973 - RNA, 1410 nt, Artificial Sequence
  derived and/or modified CDS sequence (opt5) from neuraminidase__InfluenzaA__ABU92774
augaaccccaauagaaagaucauuaccaucggcagcgugucccugacaauugccacgaucugcuuccucaugcagauugcuauccuggucaccacaguuacccuucacuuuaaacaauacgaguguaacucuccuccgaauaaccaggugaugcugugcgaacccacaaucauugagcggaauaucaccgaaacaguguaucucaccaacacgaccauugagaaggaaaucuguccuaaacuggccgaguaccgcaauuggagcaagccccagugcaacauuacaggguucgcgccuuuuuccaaagacaauucuaucagacuuagcgcuggaggcgauauuugggucacccgggagcccuauguguccugugacccugauaagugcuaccaguucgcccuggggcaaggaacaacccucaacaauggccauucuaacgacacgguucacgaucgcacaccguauagaacccugcugaugaaugaacucggggugcccuuucaucugggaacacggcaggucuguaucgccuggagcuccagcucuugccacgacggcaaggcuuggcuucauguguguguuaccggcgaugacgagaacgccaccgcuuccuucaucuacaaugggcgccugguggauagcauuggaucuugguccaaaaagauccucagaacacaggaaagcgagugcgucuguauuaacggcacgugcaccguggugaugacagacgggucugccuccggaaaagcggauaccaagauccuguuuauugaggaaggcaaaaucguccacaucagcacacuuuccgggucugcccagcacguugaggaaugcagcuguuauccucgguaccccggagugcgcugcguguguagagacaacuggaagggcuccaaucggccuauugucgauaucaacgugaaggacuacagcauuguuucuuccuaugugugcagcggccuggucggggacacgccccgcaaaaaugauucuuucagcuccucucauugucucgacccgaacaaugaggaaggaggccacggggugaagggaugggcuuuugaugacggcaacgauguuuggauggggagaaccaucagcgagaaacugcgguccggauacgagacauucaaggugauugaaggcuggagcaaaccuaauucuaagcugcaaaccaaccgccaggucaucguggagagaggcaaucgguccggguauagcggaaucuuuucugucgaaggcaaauccugcauuaacagauguuucuacguggagcucauccgcgggcggaaggaagagaccgagguuugguggacaagcaauuccauuguggucuuuugcggaaccucuggcacauaugggacgggcagcuggcccgacggagccgauaucaaccugaugccuauuuga

SEQ ID NO: 207974 - RNA, 1410 nt, Artificial Sequence
  derived and/or modified CDS sequence (opt5) from neuraminidase__InfluenzaA__ABU92775
augaaccccaaucagaagaucauuaccaucggcagcgugucccugacaauugccacgaucugcuuccucaugcaaauugcuauccuggucaccacaguuacccuucacuuuaaacaguacgaguguaacucuccuccgaauaaccaggugaugcugugcgaacccacaaucauugagagaaauaucaccgaaauuguguaucucacaaacaccacgaucgagaaggaaauuuguccuaaacuggccgaguaccggaauuggagcaagccccagugcaacaucaccggguucgcgccuuuuuccaaagacaauucuauucgccuuagcgcuggaggcgauaucugggucacaagagagcccuauguguccugugacccugauaagugcuaccaauucgcccuggggcagggaaccacacucaacaauggccauucuaacgacaccguucacgaucggacgccguaucgcacacugcugaugaaugaacucggggugcccuuucaucugggaaccagacaggucuguaucgccuggagcuccagcucuugccacgacggcaaggcuuggcuucauguguguguuacaggcgaugacaaaaacgccaccgcuuccuucauuuacaaugggcggcugguggauagcaucggaucuugguccaagaaaauucuccgcacccaggagagcgaaugcgucuguaucaacggcacaugcacgguggugaugaccgacgggucugccuccggaaaggcggauacaaaaauucuguuuaucgaggagggcaagaucguccacauuagcacccuuuccgggucugcccaacacguugaagagugcagcuguuauccuagauaccccggagugcggugcgugugucgcgacaacuggaagggcuccaauagaccuaucgucgauauuaacgugaaagacuacagcaucguuucuuccuaugugugcagcggccuggucggggacacaccccggaagaaugauucuuucagcuccucucauugucucgacccgaacaaugaagagggaggccacggggugaaaggaugggcuuuugaugacggcaacgauguuuggauggggcgcaccauuagcgaaaagcugagauccggauacgagacguucaaagugaucgagggcuggagcaagccuaauucuaaacugcagaucaaccggcaggucauuguggaacgcggcaauagauccggguauagcggaaucuuuucugucgagggcaaguccugcauuaaccgguguuucuacguggaacucaucagagggcgcaaggaggaaacagagguuugguggaccagcaauuccauuguggucuuuugcggaaccucuggcacauaugggaccggcagcuggcccgacggagccgauaucaaccugaugccuauuuga

SEQ ID NO: 207975 - RNA, 1410 nt, Artificial Sequence; identical to SEQ ID NO: 206399
  derived and/or modified CDS sequence (opt5) from neuraminidase__InfluenzaA__ABU92777

SEQ ID NO: 207976 - RNA, 1410 nt, Artificial Sequence
  derived and/or modified CDS sequence (opt5) from neuraminidase__InfluenzaA__ABU92778
augaaccccaaucagaagaucauuaccaucggcagcgugucccugacaauuucuacgaucugcuucuuuaugcaaauugccauccucaucaccacagucacccugcacuucaaacaguacgaguuuaacagcccuccgaauaaccagguuaugcuuugugaacccacaauuaucgagagaaauauuaccgaaaucguguaucugacaaacaccacgauugagaaggaagugugcccuaaacucgcugaguaccggaauugguccaagccccaguguaacaucaccggguucgccccuuuuucuaaagacaauagcauucgccuguccgcgggaggcgauaucugggucacaagagagcccuaugugucuugcgacccugauaaguguuaccaauucgcucuugggcagggaaccacacugaacaauguucauagcaacgacaccgugcacgaucggacgccguaucgcacacuccugaugaaugaacugggcguccccuuucaucucgggaccaaacaggugugcaucgccugguccucuagcuccugucacgacggaaaggccuggcugcauguuugcgugacaggcgaugacaagaacgcuaccgccagcuucauuuacaauggcagacuugucgauucuaucguguccuggagcaaagagauucugcggacccaggaaucugagugugugugcaucaacgggacauguacggucguuaugaccgacggauccgcuagcggcaaggccgauacaaaaauucucuuuaucgaggaagggaagaucgugcacaccuccacacugucuggaagcgcgcaacacguggaggaaugcuccugcuauccucgcuaccccggcgucagaugugugugccgggacaacuggaaggggagcaaucgcccuauuguugauaucaacauuaaagacuacucuaucguguccagcuaugucuguucuggacuugugggcgacacccccagaaagaaugauagcuccucuagcucccauugccuggacccgaacaaugaggaaggcgggcacggaguuaaaggcugggccuucgaugacgggaacgauguguggaugggacggacgauuagcgagaagcuccgcucuggcuacgagacauuuaaagucaucgaagggugguccaauccuaacagcaagcugcagaucaauagacaggugauugucgaccggggaaaccgcucuggcuauuccggcaucuucagcguggaggggaaauccuguauuaauagaugcuuuuacguugaacugauccggggaagaaaggaggaaaccgaggugcucuggaccucuaacagcauugucguguucuguggcacauccgggaccuauggaacaggcucuuggcccgauggggcugacaucaaucugaugccuauuuga

SEQ ID NO: 207977 - RNA, 1410 nt, Artificial Sequence; identical to SEQ ID NO: 206297
  derived and/or modified CDS sequence (opt5) from neuraminidase__InfluenzaA__ABU92779

SEQ ID NO: 207978 - RNA, 1410 nt, Artificial Sequence; identical to SEQ ID NO: 206297
  derived and/or modified CDS sequence (opt5) from neuraminidase__InfluenzaA__ABU92780

SEQ ID NO: 207979 - RNA, 1410 nt, Artificial Sequence; identical to SEQ ID NO: 206297
  derived and/or modified CDS sequence (opt5) from neuraminidase__InfluenzaA__ABU92781

SEQ ID NO: 207980 - RNA, 1410 nt, Artificial Sequence
  derived and/or modified CDS sequence (opt5) from neuraminidase__InfluenzaA__ABU92782
augaaccccaaucagaagaucauuaccaucggcagcgugucccugacaauugccgcuaucugcuuccucaugcaaauugccauccuggucacgaccguuacacuucacuuuaaacagcaugaguguaacucuccuccgaauaaccaggugaugcugugcgaacccaccaucauugagagaaauaucacagaaauuguguaccucaccaacacaaccaucgagaaggaaauuuguccuaaacuggcggaguaucggaauuggagcaagccccagugcaacaucacgggguucgcuccuuuuuccaaagacaauucuauucgccuuagcgccggaggcgauaucugggucaccagagagcccuacguguccugugacccugauaagugcuaucaauucgcccuggggcagggaacaacccucaacaauggccacucuaacgacacaguucaugaucggaccccguaccgcacgcugcugaugaaugaacucggggugcccuuucaccugggaacaagacaggucuguaucgcuuggagcuccagcucuugccaugacggcaaggccuggcuucacguguguguuaccggcgaugacaaaaacgcuacagccuccuucauuuauaaugggcggcugguggauagcaucggaucuugguccaagaaaauucuccgcacccaggagagcgaaugcgucuguaucaacgggaccugcacaguggugaugacggacggcucugcguccggaaaggccgauaccaaaauucuguuuaucgaggagggcaagaucguccacauuagcacacuuuccgggucugcucaacauguugaagagugcagcuguuacccuagauaucccggagugcggugcgugugucgcgacaacuggaagggcuccaauagaccuaucgucgauauuaacgugaaagacuacagcaucguuucuuccuacgugugcagcggccuggucggggacacaccccggaagaaugauucuuucagcuccucucacugucucgacccgaacaaugaagagggaggccauggggugaaaggaugggccuuugaugacggcaacgauguuuggauggggcgcaccauuagcgaaaagcugagauccggauaugagaccuucaaagugaucgagggcuggagcaagccuaauucuaaacugcagaucaaccggcaggucauuguggaacgcggcaauagauccggguacagcggaaucuuuucugucgagggcaaguccugcauuaaccgguguuucuauguggaacucaucagagggcgccgggaggaaacggagguuugguggacaagcaauuccauuguggucuuuugcggaaccucuggcaccuacgggacaggcagcuggcccgacggagcugauaucaaccugaugccuauuuga

SEQ ID NO: 207981 - RNA, 1410 nt, Artificial Sequence; identical to SEQ ID NO: 206297
  derived and/or modified CDS sequence (opt5) from neuraminidase__InfluenzaA__ABU92783

SEQ ID NO: 207982 - RNA, 1410 nt, Artificial Sequence; identical to SEQ ID NO: 206297
  derived and/or modified CDS sequence (opt5) from neuraminidase__InfluenzaA__ABU92784

SEQ ID NO: 207983 - RNA, 1410 nt, Artificial Sequence; identical to SEQ ID NO: 206297
  derived and/or modified CDS sequence (opt5) from neuraminidase__InfluenzaA__ABU92785

SEQ ID NO: 207984 - RNA, 1410 nt, Artificial Sequence; identical to SEQ ID NO: 206297
  derived and/or modified CDS sequence (opt5) from neuraminidase__InfluenzaA__ABU92786

SEQ ID NO: 207985 - RNA, 1410 nt, Artificial Sequence
  derived and/or modified CDS sequence (opt5) from neuraminidase__InfluenzaA__ABU92787
augaaccccaaucagaagaucauuaccaucggcagcgugucccugacaauugccgcuaucugcuuccucaugcaaauugccauccuggucacgaccguuacacuucacuuuaaacagcaugaguguaacucuccuccgaauaaccaggugaugcugugcgaacccaccaucauugagagaaauaucacagaaauuguguaccucaccaacacaaccaucgagaaggaaauuuguccuaaacuggcggaguaucggaauuggagcaagccccagugcaacaucacgggguucgcuccuuuuuccaaagacaauucuauucgccuuagcgccggaggcgauaucugggucaccagagagcccuacguguccugugacccugauaagugcuaucaauucgcccuggggcagggaacaacccucaacaauggccacucuaacgacacaguucaugaucggaccccguaccgcacgcugcugaugaaugaacucggggugcccuuucaccugggaacaagacaggucuguaucgcuuggagcuccagcucuugccaugacggcaaggccuggcuucacguguguguuaccggcgaugacaaaaacgcuacagccuccuucauuuauaaugggcggcugguggauagcaucggaucuugguccaagaaaauucuccgcacccaggagagcgaaugcgucuguaucaacgggaccugcacaguggugaugacggacggcucugcguccggaaaggccgauaccaaaauucuguuuaucgaggagggcaagaucguccacauuagcacacuuuccgggucugcucaacauguugaagagugcagcuguuacccuagacaccccggagugcggugcgugugucgcgacaacuggaagggcuccaauagaccuaucgucgauauuaacgugaaagacuauagcaucguuucuuccuacgugugcagcggccuggucggggacacaccccggaagaaugauucuuucagcuccucucauugucucgacccgaacaaugaagagggaggccacggggugaaaggaugggccuuugaugacggcaacgauguuuggauggggcgcaccauuagcgaaaagcugagauccggauacgagaccuucaaagugaucgagggcuggagcaagccuaauucuaaacugcagaucaaccggcaggucauuguggaacgcggcaauagauccggguauagcggaaucuuuucugucgagggcaaguccugcauuaaccgguguuucuacguggaacucaucagagggcgcaaggaggaaacggagguuugguggacaagcaauuccauuguggucuuuugcggaaccucuggcaccuaugggacaggcagcuggcccgacggagcugauaucaaccugaugccuauuuga

SEQ ID NO: 207986 - RNA, 1410 nt, Artificial Sequence
  derived and/or modified CDS sequence (opt5) from neuraminidase__InfluenzaA__ABU92789
augaaccccaaucagaagaucauuaccaucggcagcgugucccugacaauuucuacgaucugcuucuuuaugcaaauugccauccucaucaccacagucacccugcacuucaaacaguacgaguuuaacccuccgcccaauaaccagguuaugcuuugugaaccuacaauuaucgagagaaauauuaccgaaaucguguaucugacaaacaccacgauugagaaggaaaucugccccaaacucgcugaguaccggaauuggagcaagccucaguguuccauuaccggguucgcccccuuuucuaaagacaacagcauccgccuguccgcgggaggcgauaucugggugacaagagagccuuaugucucuugcgacccggauaaguguuaccaauucgcucuugggcagggaaccacacugaauaacgugcauagcaaugacaccguucacgaucggacgcccuaucgcacacuccugaugaacgaacugggcgugccuuuucaucucgggaccaagcaggucugcauugccugguccucuagcuccugucacgacggaaaagccuggcugcaugugugcguuacaggcgaugacaagaaugcuaccgccagcuucaucuacaacggcagacuuguggauucuauugucuccuggagcaaagagauccugcggacccaggaaucugagugugugugcauuaaugggacauguacgguggucaugaccgacggauccgcuagcggcaaggccgauacaaaaauccucuuuaucgaggaagggaagauuguucacaccuccacacugucuggaagcgcgcaacacguggaggaaugcuccugcuauccccgcuacccuggcgugagaugugucugccgggacaacuggaaggggagcaaccgccccaucguggauauuaauaucaaagacuacucuauuguuuccagcuauguguguucuggacuugucggcgacaccccgagaaagaacgauagcuccucuagcucccauugccuggacccuaauaacgaggaaggcgggcacggagugaaaggcugggccuucgaugacgggaaugauguuuggaugggacggacgaucagcgagaagucucgcuccggcuacgagacauuuaaagugaucgaaggguggagcaaccccaauucuaagcuccagauuaacagacaggucaucguggaccggggaaaucgcuccggcuauagcggcauuuucuccgucgaggggaaaucuuguaucaacagaugcuuuuacguggaacugauucggggaagaaaggaggaaaccgagguucuguggaccagcaauuccaucguggucuucuguggcacaucugggaccuauggaacaggcagcuggccugauggggcugacauuaaccucaugcccaucuga

SEQ ID NO: 207987 - RNA, 1410 nt, Artificial Sequence; identical to SEQ ID NO: 206399
  derived and/or modified CDS sequence (opt5) from neuraminidase__InfluenzaA__ABU92790

SEQ ID NO: 207988 - RNA, 1410 nt, Artificial Sequence
  derived and/or modified CDS sequence (opt5) from neuraminidase__InfluenzaA__ABU92791
augaaccccaaucagaagaucauuaccaucggcagcgugucccugacaauuucuacgaucugcuucuuuaugcaaauugccauccucaucaccacagucacccugcacuucaaacaguacgaguuuaacagcccuccgaauaaccagguuaugcuuugugaacccacaauuaucgagagaaauauuaccgaaaucguguaucugacaaacaccacgauugagaaggaaaucugcccuaaacucgcugaguaccggaauugguccaagccccagugugacauuaccggguucgccccuuuuucuaaagauaacagcauccgccuguccgcgggaggcgacaucugggugacaagagagcccuaugucucuugcgauccugacaaguguuaccaauucgcucuugggcagggaaccacacugaauaacgugcauagcaaugauaccguucacgaccggacgccguaucgcacacuccugaugaacgaacugggcgugcccuuucaucucgggaccaagcaggucugcauugccugguccucuagcuccugucacgauggaaaagccuggcugcaugugugcguuacaggcgacgauaagaaugcuaccgccagcuucaucuacaacggcagacuuguggacucuauugucuccuggagcaaaaagauccugcggacccaggagucugaaugugugugcauuaaugggacauguacgguggucaugaccgauggauccgcuagcggcaaagccgacacaaagauccucuuuaucgaggaggggaagauuguucacaccuccacacugucuggaagcgcgcaacacguggaagagugcuccugcuauccucgcuaccccggcgugagaugugucugccgggauaacuggaaagggagcaaccgcccuaucguggacauuaauaucaaggacuacucuaccguuuccagcuauguguguucuggacuugucggcgauacgccccggaaaaacgacagcuccucuagcucccauugccuggauccgaauaacgaagagggcgggcacggagugaagggcugggccuucgacgaugggaaugacguuuggaugggaagaacaauuagcgaaaaacuccgcucuggcuacgagaccuuuaaggugaucgaggggugguccaacccuaauagcaaacugcagaucaacagacaggucauuguggaucggggaaaucgcucuggcuauuccggcaucuucagcgucgaagggaaguccuguauuaacagaugcuuuuacguggagcugauccggggaagaaaggaagagaccgaaguucucuggacaucuaauagcauuguggucuucuguggcaccuccgggacauauggaacgggcucuuggcccgacggggcugauaucaaccugaugccuauuuga

SEQ ID NO: 207989 - RNA, 1410 nt, Artificial Sequence
  derived and/or modified CDS sequence (opt5) from neuraminidase__InfluenzaA__ABU92792
augaaccccaaucagaagaucauuaccaucggcagcgugucccugacaauuucuacgaucugcuucuuuaugcaaauugccauccucaucaccacagucacccugcacuucaaacaguacguuuuuaacagcccuccgaauaaccaggugaugcuuugugagcccacaauuaucgaaagaaauauuaccgagaucguguaucugacaaacaccacgauugaaaaggagaucugcccuaaacucgcugaauaccggaauugguccaagccccagugugacauuaccggguucgccccuuuuucuaaagauaacagcauccgccuguccgcgggaggcgacaucugggucacaagagagcccuaugugucuugcgauccugacaaguguuaccaauucgcucuugggcagggaaccacacugaauaacguucauagcaaugauaccgugcacgaccggacgccguaucgcacacuccugaugaacgagcugggcguccccuuucaucucgggaccaaacaggugugcauugccugguccucuagcuccugucacgauggaaaggccuggcugcauguuugcgugacaggcgacgauaagaaugcuaccgccagcuucaucuacaacggcagacuugucgacucugugguguccuggagcaaagauauucugcggacccaggaaucugagugugucugcaucaaugggacauguacgguugugaugaccgacggauccgcuagcggcaaggccgauacaaaaauucucuuuaucgaagaggggaagaucgugcacaccuccacacugucuggaagcgcgcaacacgucgaggaaugcuccugcuauccucgcuaccccggcgugagauguguuugccgggacaacuggaaggggagcaaccgcccuauuguggacaucaauauuaaaaacuacucuaucgucuccagcuauguguguucuggacuuguuggcgauacccccagaaagacggacagcuccucuagcucccauugccuggauccgaauaacgaggaaggcgggcacggagugaaaggcugggccuucgacgaugggaaugacgucuggaugggacggacaauuagcgagaagcuccgccugggcuacgaaaccuuuaaagugaucgagggguggucuaacccuaauuccaagcugcagaucaacagacaggucauuguggaucggggaaaucgcagcggcuauucuggcaucuucuccguugaggggaaaagcuguauuaacagaugcuuuuacguggaacucauccggggaagaaaggaggaaaccgagguccuguggacauccaauucuauugugguuuucuguggcaccagcgggacauauggaacgggcuccuggcccgacggggcugauaucaaccuuaugccuauuuga

SEQ ID NO: 207990 - RNA, 1410 nt, Artificial Sequence; identical to SEQ ID NO: 206879
  derived and/or modified CDS sequence (opt5) from neuraminidase__InfluenzaA__ABU92793

SEQ ID NO: 207991 - RNA, 1410 nt, Artificial Sequence; identical to SEQ ID NO: 207986
  derived and/or modified CDS sequence (opt5) from neuraminidase__InfluenzaA__ABU92794

SEQ ID NO: 207992 - RNA, 1410 nt, Artificial Sequence; identical to SEQ ID NO: 206297
  derived and/or modified CDS sequence (opt5) from neuraminidase__InfluenzaA__ABU92795

SEQ ID NO: 207993 - RNA, 1410 nt, Artificial Sequence; identical to SEQ ID NO: 206297
  derived and/or modified CDS sequence (opt5) from neuraminidase__InfluenzaA__ABU92796

SEQ ID NO: 207994 - RNA, 1410 nt, Artificial Sequence
  derived and/or modified CDS sequence (opt5) from neuraminidase__InfluenzaA__ABU92797
augaaccccaaucagaagaucauuaccaucggcagcgugucccugacaauugccgcuaucugcuuccucaugcaaauugccauccuggucacgaccguuacacuucacuuuaaacagcaugaguguaacucuccuccgaauaaccaggugaugcugugcgaacccaccaucauugagagaaauaucacagaaauuguguaccucaccaacacaaccaucgagaaggaaauuuguccuaaacuggcggaguaucggaauuggagcaagccccagugcaacaucacgggguucgcuccuuuuuccaaagacaauucuauucgccuuagcgccggaggcgauaucugggucaccagagagcccuacguguccugugacccugauaagugcuaucaauucgcccuggggcagggaacaacccucaacaauggccacucuaacgacacaguucaugaucggaccccguaccgcacgcugcugaugaaugaacucggggugcccuuucaccugggaacaagacaggucuguaucgcuuggagcuccagcucuugccaugacggcaaggccuggcuucacguguguguuaccggcgaugacaaaaacgcuacagccuccuucauuuauaaugggcggcugguggauagcaucggaucuugguccaagcgcauucucagaacccaggagagcgaaugcgucuguaucaacgggaccugcacaguggugaugacggacggcucugcguccggaaaagccgauaccaagauucuguuuaucgaggagggcaaaaucguccacauuagcacacuuuccgggucugcucaacauguugaagagugcagcuguuacccucgguaucccggagugcgcugcguguguagagacaacuggaagggcuccaaucggccuaucgucgauauuaacgugaaggacuacagcaucguuucuuccuacgugugcagcggccuggucggggacacaccccgcaaaaaugauucuuucagcuccucucacugucucgacccgaacaaugaagagggaggccauggggugaagggaugggccuuugaugacggcaacgauguuuggauggggagaaccauuaaugaaaaacugcggagcggauaugagaccuucaaggugaucgagggcugguccaaaccuaacagcaagcugcagaucaaucgccaggucauuguggaaagaggcaaccggucuggguacuccggaaucuuuagcgucgagggcaaaucuugcauuaauagauguuucuauguggaacucauccgcgggcggaaggaggaaacggagguuugguggacauccaacagcauuguggucuuuugcggaaccuccggcaccuacgggacaggcucuuggcccgacggagcugauaucaaucugaugccuauuuga

SEQ ID NO: 207995 - RNA, 1410 nt, Artificial Sequence; identical to SEQ ID NO: 206297
  derived and/or modified CDS sequence (opt5) from neuraminidase__InfluenzaA__ABU92798

SEQ ID NO: 207996 - RNA, 1410 nt, Artificial Sequence; identical to SEQ ID NO: 206297
  derived and/or modified CDS sequence (opt5) from neuraminidase__InfluenzaA__ABU92799

SEQ ID NO: 207997 - RNA, 1410 nt, Artificial Sequence; identical to SEQ ID NO: 206297
  derived and/or modified CDS sequence (opt5) from neuraminidase__InfluenzaA__ABU92800

SEQ ID NO: 207998 - RNA, 1410 nt, Artificial Sequence
  derived and/or modified CDS sequence (opt5) from neuraminidase__InfluenzaA__ABU92801
augaaccccaaucagaagaucauuaccaucggcagcgugucccugacaauugccgcuaucugcuuccucaugcaaauugccauccuggucacgaccguuacacuucacuuuaaacagcaugaguguaacucuccuccgaauaaccaggugaugcugugcgaacccaccaucauugagagaaauaucacagaaauugugcaccucaccaacacaaccaucgagaaggaaauuuguccuaaacuggcggaguaccggaauuggagcaagccccagugcaacaucacgggguucgcuccuuuuuccaaagacaauucuauucgccuuagcgccggaggcgauaucugggucaccagagagcccuauguguccugugacccugauaagugcuaccaauucgcccuggggcagggaacaacccucaacaauggccauucuaacgacacaguucacgaucggaccccguaucgcacgcugcugaugaaugaacucggggugcccuuucaucugggaacaagacaggucuguaucgcuuggagcuccagcucuugccacgacggcaaggccuggcuucacguguguguuaccggcgaugacaaaaacgcuacagccuccuucauuuacaaugggcggcugguggauagcaucggaucuugguccaagaaaauucuccgcacccaggagagcgaaugcgucuguaucaacgggaccugcacaguggugaugacggacggcucugcguccggaaaggccgauaccaaaauucuguuuaucgaggagggcaagaucguccauauuagcacacuuuccgggucugcucaacacguugaagagugcagcuguuauccuagauaccccggagugcggugcgugugucgcgacaacuggaagggcuccaauagaccuaucgucgauauuaacgugaaagacuauagcaucguuucuuccuacgugugcagcggccuggucggggacacaccccggaagaaugauucuuucagcuccucucauugucucgacccgaacaaugaagagggaggccacggggugaaaggaugggccuuugaugacggcaacgauguuuggauggggcgcaccauuagcgaaaagcugagauccggauacgagaccuucaaagugaucgagggcuggagcaagccuaauucuaaacugcagaucaaccggcaggucauuguggaacgcggcaauagauccggguauagcggaaucuuuucugucgagggcaaguccugcauuaaccgguguuucuacguggaacucaucagagggcgcaaggaggaaacggagguuugguggacaagcaauuccauuguggucuuuugcggaaccucuggcaccuaugggacaggcagcuggcccgacggagcugauaucaaccugaugccuauuuga

SEQ ID NO: 207999 - RNA, 1410 nt, Artificial Sequence; identical to SEQ ID NO: 206297
  derived and/or modified CDS sequence (opt5) from neuraminidase__InfluenzaA__ABU92802

SEQ ID NO: 208000 - RNA, 1410 nt, Artificial Sequence; identical to SEQ ID NO: 206297
  derived and/or modified CDS sequence (opt5) from neuraminidase__InfluenzaA__ABU92804

SEQ ID NO: 208001 - RNA, 1410 nt, Artificial Sequence
  derived and/or modified CDS sequence (opt5) from neuraminidase__InfluenzaA__ABU92805
augaaccccaaucagaagaucauuaccaucggcagcgugucccugacaauuucuacgaucugcuucuuuaugcaaauugccauccucaucaccacagucacccugcacuucaaacaguacgaguuuaacagcccuccgaauaaccagguuaugcuuugugaacccacaauuaucgagagaaauauuaccgaaaucguguaucugacaaacaccacgauugagaaggaaaucugcccuaaacucgcugaguaccggaauugguccaagccccaguguaacauuaccggguucgccccuuuuucuaaagacaauagcauccgccuguccgcgggaggcgauaucugggugacaagagagcccuaugucucuugcgacccugauaaguguuaccaauucgcucuugggcagggaaccacacugaacaaugugcauagcaacgacaccguucacgaucggacgccguaucgcacacuccugaugaaugaacugggcgugcccuuucaucucgggaccaagcaggucugcauugccugguccucuagcuccugucacgacggaaaagccuggcugcaugugugcguuacaggcgaugacgagaacgcuaccgccagcuucaucuacaauggcagacuuguggauucuauugucuccuggagcaagaaaauccugcggacccaggaaucugagugugugugcauuaacgggacauguacgguggucaugaccgacggauccgcuagcggcaaggccgauacaaaaauccucuuuaucgaggaagggaagauuguucacaccuccacacugucuggaagcgcgcaacacguggaggaaugcuccugcuauccucgcuaccccggcgugagaugugucugccgggacaacuggaaggggagcaaucgcccuaucguggauauuaacaucaaagacuacucuauuguuuccagcuauguguguucuggacuugucggcgacacccccagaaagaaugauagcuccucuagcucccauugccuggacccgaacaaugaggaaggcgggcacggagugaaaggcugggccuucgaugacgggaacgauguuuggaugggacggacgaucagcgagaagcuccgcucuggcuacgagacauuuaaagugaucgaagggugguccaauccuaacagcaagcugcagauuaauagacaggucaucguggaccggggaaaccgcucuggcuauuccggcauuuucagcgucgaggggaaauccuguaucaauagaugcuuuuacguggaacugauucggggaagaaagcaggagaccgaaguucucuggaccucuaacagcaucguggucuucuguggcacauccgggaccuauggaacaggcucuuggcccgauggggcugacauuaaucugaugccuaucuga

SEQ ID NO: 208002 - RNA, 1410 nt, Artificial Sequence; identical to SEQ ID NO: 208001
  derived and/or modified CDS sequence (opt5) from neuraminidase__InfluenzaA__ABU92806

SEQ ID NO: 208003 - RNA, 1410 nt, Artificial Sequence
  derived and/or modified CDS sequence (opt5) from neuraminidase__InfluenzaA__ABU92808
augaaccccaaucagaagaucauuaccaucggcagcgugucccugacaauugccacgaucugcuuccucaugcaaauuaccauccuggucacaaccguuacacuucacuuuaaacaguacgaguguaacucuccuccgaauaaccaggugaugcugugcgaacccaccaucauugagagaaauaucacagaaauuguguaucucaccaacacgaccaucgagaaggaaauuuguccuaaacuggcugaguaccggaauuggagcaagccccagugcaacaucacaggguucgccccuuuuuccaaagacaauucuauucgccuuagcgcgggaggcgauaucugggucaccagagagcccuauguguccugugacccugauaagugcuaccaauucgcucuggggcagggaacaacccucaacaauggccauucuaacgacacgguucacgaucggacaccguaucgcacccugcugaugaaugaacucggggugcccuuucaucugggaacaagacaggucuguaucgccuggagcuccagcucuugccacgacggcaaggccuggcuucauguguguguuaccggcgaugacaaaaacgcuaccgccuccuucauuuacaaugggcggcugguggauagcaucggaucuugguccaagaaaauucuccgcacacaggagagcgaaugcgucuguaucaacggcacgugcaccguggugaugacagacgggucugcuuccggaaaggccgauaccaaaauucuguuuaucgaggagggcaagaucauucacaucagcacacuuuccgggucugcgcaacacgucgaagagugcagcuguuauccuagauaccccggaguucggugcgugugucgcgacaacuggaagggcuccaauagaccuauuguggauaucaacgucaaagacuacagcauugugucuuccuauguuugcagcggccuggugggggacacgccccggaagaaugauucuagcuccucuagccauugucucgacccgaacaaugaagagggaggccacggggucaaaggaugggccuucgaugacggcaacgauguguggauggggcgcaccaucuccgaaaagcugagaagcggauacgagacauuuaaaguuaucgagggcuggucuaagccuaauuccaaacugcagauuaaccgccaggugaucgucgaacggggcaauagaagcggguauucuggaauuuucuccguggagggcaagagcugcaucaaccgguguuuuuacgucgaacucauuagagggcgcaaggaggaaaccgaggugugguggaccuccaauucuaucguuguguucugcggaacaagcggcaccuaugggacaggcuccuggcccgacggagcugauauuaaccugaugccuaucuga

SEQ ID NO: 208004 - RNA, 1410 nt, Artificial Sequence
  derived and/or modified CDS sequence (opt5) from neuraminidase__InfluenzaA__ABU92809
augaaccccaaucagaagaucauuaccaucggcagcgugucccugacaauuucuacgaucugcuucuuuaugcaaauugccauccucaucaccacagucacccugcacuucaaacaguacgaguuuaacagcccuccgaauaaccagguuaugcuuugugaacccacaauuaucgagagaaauauuaccgaaaucguguaucugacaaacaccacgauugagaaggaaaucugcccuaaacucgcugaguaccggaauugguccaagccccaguguaacauuaccggguucgccccuuuuucuaaagacaauagcauccgccuguccgcgggaggcgauaucugggugacaagagagcccuaugucucuugcgacccugauaaguguuaccaauucgcucuugggcagggaaccacacugaacaaugugcauagcaacgacaccguucacgaucggacgccguaucgcacacuccugaugaaugaacugggcgugcccuuucaucucgggaccaagcaggucugcauugccugguccucuagcuccugucacgacggaaaagccuggcugcaugugugcguuacaggcgaugacaagaacgcuaccgccagcuucaucuacaauggcagacuuguggauucuauugucuccuggagcaaagagauccugcggacccaggaaucugagugugugugcauuaacgggacauguacgguggucaugaccgacggauccgcuagcggcaaggccgauacaaaaauccucuuuaucgaggaagggaagauuguucacaccuccacacugucuggaagcgcgcaacacguggaggaaugcuccugcuauccucgcuaccccggcgugagaugugucugccgggacaacuggaaggggagcaaucgcccuaucguggauauuaacaucaaagacuacucuauuguuuccagcuauguguguucuggacuugucggcgacacccccagaaagaaugauagcuccucuagcggccauugccuggacccgaacaaugaggaagggggacacggcgugaaagggugggccuucgaugacggaaacgauguuuggaugggccggacgaucuccgagaagcuccgcagcggguacgagacauuuaaagugaucgaaggauggucuaauccuaacuccaagcugcagauuaauagacaggucaucguggaccggggcaaccgcagcggcuauucugggauuuucuccgucgagggaaaaagcuguaucaauagaugcuuuuacguggaacugauucggggcagaaaggaggaaaccgauguucucuggaccuccaacucuaucguggucuucugugggacaagcggaaccuauggcacaggguccuggcccgacggcgcugauauuaaucugaugccuaucuga

SEQ ID NO: 208005 - RNA, 1410 nt, Artificial Sequence
  derived and/or modified CDS sequence (opt5) from neuraminidase__InfluenzaA__ABU92810
augaaccccaaucagaagaucauuaccaucggcagcgugucccugacaauugccgcuaucugcuuccucaugcaaauugccauccuggucacgaccguuacacuucacuuuaaacagcaugaguguaacucuccuccgaauaaccaggugaugcugugcgaacccaccaucauugagagaaauaucacagaaauuguguaccucaccaacacaaccaucgagaaggaaauuuguccuaaacuggcggaguaucggaauuggagcaagccccagugcaacaucacgggguucgcuccuuuuuccaaagacaauucuauucgccuuagcgccggaggcgauaucugggucaccagagagcccuacguguccugugacccugauaagugcuaucaauucgcccuggggcagggaacaacccucaacaauggccacucuaacgacacaguucaugaucggaccccguaccgcacgcugcugaugaaugaacucggggugcccuuucaccugggaacaagacaggucuguaucgcuuggagcuccagcucuugccaugacggcaaggccuggcuucacguguguguuaccggcgaugacaaaaacgcuacagccuccuucauuuauaaugggcggcugguggauagcaucggaucuugguccaagaaaauucuccgcacccaggagagcgaaugcgucuguaucaacgggaccugcacaguggugaugacggacggcucugcguccggaaaggccgauaccaaaauucuguuuaucgaggagggcaagaucguccacauuagcacacuuuccgggucugcucaacauguugaagagugcagcuguuacccuagauaucccggagugcggugcgugugucgcgacaacuggaagggcuccaauagaccuaucgucgauauuaacgugaaagacuacagcaucguuucuuccuacgugugcagcggccuggucggggacacaccccggaagaaugauucuuucagcuccucucacugucucgacccgaacaaugaagagggaggccauggggugaaaggaugggccuuugaugacggcaacgauguuuggauggggcgcaccauuagcgaaaagcugagauccggauaugagaccuucaaagugaucgagggcuggagcaagccuaauucuaaacugcagaucaaccggcaggucauuguggaaggcgggaaucgcuccggauacagcggcaucuuuucugucgaggggaaguccugcauuaacagauguuucuauguggaacucauccggggaagaaaggaggaaacggagguuugguggacaagcaauuccauuguggucuuuugcggcaccucugggaccuacggcacaggaagcuggcccgacggcgcugauaucaaccugaugccuauuuga

SEQ ID NO: 208006 - RNA, 1410 nt, Artificial Sequence
  derived and/or modified CDS sequence (opt5) from neuraminidase__InfluenzaA__ABU92811
augaaccccaaucagaagaucauuaccaucggcagcgugucccugacaauugccgcuaucugcuuccucaugcaaauugccauccuggucacgaccguuacacuucacuuuaaacagcaugaguguaacucuccuccgaauaaccaggugaugcugugcgaacccaccaugaucgagagaaauauuacagaaaucguguaccucaccaacacaaccauugagaaggaaaucuguccuaaacuggcggaguaucggaauuggagcaagccccagugcaacauuacgggguucgcuccuuuuuccaaagacaauucuauccgccuuagcgccgucggagauauuugggugaccagagagcccuacguuuccugugacccugauaagugcuaucaauucgcccugggccaggggacaacccucaacaauggacacucuaacgacacagugcaugaucggaccccguaccgcacgcugcugaugaaugaacucggcguccccuuucaccuggggacaagacagguguguaucgcuuggagcuccagcucuugccaugacggaaaggccuggcuucacguuugugugaccggcgaugacaaaaacgcuacagccuccuucaucuauaauggccggcuggucgauagcauugggucuugguccaagaaaauccuccgcacccaggagagcgaaugcguguguauuaacggaaccugcacaguggucaugacggacggcucugcguccgggaaggccgauaccaaaauccuguuuauugaggagggaaagaucguucacaucagcacacuuuccggcucugcucaacauguggaagagugcagcuguuacccuagauaucccggggugcggugcgucugucgcgacaacuggaagggauccaauagaccuauuguggauaucaacguuaaagacuacagcauugugucuuccuacgucugcagcggccuggugggcgacacaccccggaagaaugauucuuucagcuccucucacugucucgacccgaacaaugaagaagggggacauggcguuaaagggugggccuuugaugacggaaacgauguguggaugggccgcaccaucagcgagaagcugagauccggguaugagaccuucaaagucauugagggauggagcaagccuaauucuaaacugcagaucaaccgccaggugaucgucgaacggggcaauagauccggcuacagcgggaucuuuucuguggagggaaaguccugcauuaaccgguguuucuauguugaacucauuagaggccgcaaggaggaaacggaggugugguggacaagcaauuccaucgucguguuuugcgggaccucuggaaccuacggcacagggagcuggcccgacggcgcugauauuaaccugaugccuaucuga

SEQ ID NO: 208007 - RNA, 1410 nt, Artificial Sequence; identical to SEQ ID NO: 206297
  derived and/or modified CDS sequence (opt5) from neuraminidase__InfluenzaA__ABU92814

SEQ ID NO: 208008 - RNA, 1410 nt, Artificial Sequence; identical to SEQ ID NO: 206786
  derived and/or modified CDS sequence (opt5) from neuraminidase__InfluenzaA__ABU92815

SEQ ID NO: 208009 - RNA, 1410 nt, Artificial Sequence; identical to SEQ ID NO: 206297
  derived and/or modified CDS sequence (opt5) from neuraminidase__InfluenzaA__ABU92816

SEQ ID NO: 208010 - RNA, 1410 nt, Artificial Sequence
  derived and/or modified CDS sequence (opt5) from neuraminidase__InfluenzaA__ABU92817
augaaccccaaucagaagaucauuaccaucggcagcgugucccugacaauugccgcuaucugcuuccucaugcaaauugccauccuggucacgaccguuacacuucacuuuaaacagcaugaguguaacucuccuccgaauaaccaggugaugcugugcgaacccaccaucauugagagaaauaucacagaaauuguguaccucaccaacacaaccaucgagaaggaaauuuguccuaaacuggcggaguaucggaauuggagcaagccccagugcaacaucacgggguucgcuccuuuuuccaaagacaauucuauucgccuuagcgccggaggcgauaucugggucaccagagagcccuacguguccugugacccugauaagugcuaucaauucgcccuggggcagggaacaacccucaacaauggccacucuaacgacacaguucaugaucggaccccguaccgcacgcugcugaugaaugaacucggggugcccuuucaccugggaacaagacaggucuguaucgcuuggagcuccagcucuugccaugacggcaaggccuggcuucacguguguguuaccggcgaugacaaaaacgcuacagccuccuucauuuauaaugggcggcugguggauagcaucggaucuugguccaagaaaauucuccgcacccaggagagcgaaugcgucuguaucaacgggaccugcacaguggugaugacggacggcucugcguccggaaaggccgauaccaaaauucuguuuaucgaggagggcaagaucguccacauuagcacacuuuccgggucugcucaacauguugaagagugcagcuguuacccuagauaucccggagugcggugcgugugucgcgacaacuggaagggcuccaauagaccuaucgucgauauuaacgugaaagacuacagcaucguuucuuccuacgugugcagcggccuggucggggacacaccccggaagaaugauucuuucagcuccucucacugucucgacccgaacaaugaagagggaggccauggggugaaaggaugggccuuugaugacggcaacgauguuuggauggggcgcaccauuagcgaaaagcugagauccggauaugagaccuucaaagugaucgagggcuggagcaagccuaauucuaaacugcagaucaaccggcaggucauuguggaacgcggcaauagauccggguacagcggaaucuuuucugucgaguccaagagcugcauuaaccgguguuucuauguggaacucaucagaggccgcaaggaggaaacggagguuugguggacauccaauucuauuguggucuuuugcgggaccagcggaaccuacggcacaggguccuggcccgacggcgcugauaucaaccugaugccuauuuga

SEQ ID NO: 208011 - RNA, 1410 nt, Artificial Sequence; identical to SEQ ID NO: 206297
  derived and/or modified CDS sequence (opt5) from neuraminidase__InfluenzaA__ABU92818

SEQ ID NO: 208012 - RNA, 1410 nt, Artificial Sequence; identical to SEQ ID NO: 206297
  derived and/or modified CDS sequence (opt5) from neuraminidase__InfluenzaA__ABU92819

SEQ ID NO: 208013 - RNA, 1410 nt, Artificial Sequence; identical to SEQ ID NO: 206297
  derived and/or modified CDS sequence (opt5) from neuraminidase__InfluenzaA__ABU92821

SEQ ID NO: 208014 - RNA, 1410 nt, Artificial Sequence; identical to SEQ ID NO: 206297
  derived and/or modified CDS sequence (opt5) from neuraminidase__InfluenzaA__ABU92822

SEQ ID NO: 208015 - RNA, 1410 nt, Artificial Sequence; identical to SEQ ID NO: 206209
  derived and/or modified CDS sequence (opt5) from neuraminidase__InfluenzaA__ABU92823

SEQ ID NO: 208016 - RNA, 1410 nt, Artificial Sequence
  derived and/or modified CDS sequence (opt5) from neuraminidase__InfluenzaA__ABU92824
augaaccccaaucagaagaucauuaccaucggcagcgugucccugacaauugccgcuaucugcuuccucaugcaaauugccauccuggucacgaccguuacacuucacuuuaaacagcaugaguguaacucuccuccgaauaaccaggugaugcugugcgaacccaccaucauugagagaaauaucacagaaauuguguaccucaccaacacaaccaucgagaaggaaauuuguccuaaacuggcggaguaucggaauuggagcaagccccagugcaacaucacgggguucgcuccuuuuuccaaagacaauucuauucgccuuagcgccggaggcgauaucugggucaccagagagcccuacguguccugugacccugauaagugcuaucaauucgcccuggggcagggaacaacccucaacaauggccacucuaacgacacaguucaugaucggaccccguaccgcacgcugcugaugaaugaacucggggugcccuuucaccugggaacaagacaggucuguaucgcuuggagcuccagcucuugccaugacggcaaggccuggcuucacguguguguuaccggcgaugacaaaaacgcuacagccuccuucauuuauaaugggcggcugguggauagcaucggaucuugguccaagaaaauucuccgcacccaggagagcgaaugcgucuguaucaacgggaccugcacaguggugaugacggacggcucugcguccggaaaggccgauaccaaaauucuguuuaucgaggagggcaagaucguccacauuagcacacuuuccgggucugcucaacauguugaagagugcagcuguuacccuagauaucccggagugcggugcgugugucgcgacaacuggaagggcuccaauagaccuaucgucgauauuaacgugaaagacuacagcaucguuucuuccuacgugugcagcggccuggucggggacacaccccggcgcaaugauucuuucagcuccucucacugucucgacccgaacaaugaagagggaggccauggggugaagggaugggccuuugaugacggcaacgauguuuggauggggagaaccauuagcgaaaaacugcgguccggauaugagaccuucaaggugaucgagggcuggagcaaaccuaauucuaagcugcagaucaaccgccaggucauuguggaaagaggcaaucgguccggguacagcggaaucuuuucugucgagggcaaauccugcauuaacagauguuucuauguggaacucauccgcgggcggaaggaggaaacggagguuugguggacaagcaauuccauuguggucuuuugcggaaccucuggcaccuacgggacaggcagcuggcccgacggagcugauaucaaccugaugccuauuuga

SEQ ID NO: 208017 - RNA, 1410 nt, Artificial Sequence
  derived and/or modified CDS sequence (opt5) from neuraminidase__InfluenzaA__ABU92825
augaaccccaaucagaagaucauuaccaucggcagcgugucccugacaauuucuacgaucugcuucuuuaugcaaauugccauccucaucaccacagucacccugcacuucaaacaguacgaguuuaacagcccuccgaauaaccagguuaugcuuugugaacccacaauuaucgagagaaauauuaccgaaaucguguaucugacaaacaccacgauugagaaggaaaucugcccuaaacucgcugaguaccggaauugguccaagccccagugugacauuaccggguucgccccuuuuucuaaagauaacagcauccgccuguccgcgggaggcgacaucugggugacaagagagcccuaugucucuugcgauccuaauaaguguuaccaauucgcucuugggcagggaaccacacugaacaaugugcauagcaacgacaccguucacgaucggacgccguaucgcacacuccugaugaaugaacugggcgugcccuuucaucucgggaccaagcaggucugcauugccugguccucuagcuccugucacgacggaaaagccuggcugcaugugugcguuacaggcgaugacaagaacgcuaccgccagcuucaucuacaauggcagacuuguggauucuauugucuccuggagcaaaaagauccugcggacccaggagucugaaugugugugcauuaacgggacauguacgguggucaugaccgacggauccgcuagcggcaaagccgauacaaagauccucuuuaucgaggaggggaagauuguucacaccuccacacugucuggaagcgcgcaacacguggaagagugcuccugcuauccucgcuaccccggcgugagaugugucugccgggacaacuggaaagggagcaaucgcccuaucguggauauuaacaucaaggacuacucuauuguuuccagcuauguguguucuggacuugucggcgacacccccagaaagaaugauagcuccucuagcucccauugccuggacccgaacaaugaagagggcgggcacggagugaaaggcugggccuucgaugacgggaacgauguuuggaugggacggacgaucagcgaaaaaucucgcuccggcuacgagacauuuaaggugaucgagggguggagcaauccuaacucuaaacuccagauuaauagacaggucaucguggaccggggaaaccgcuccggcuauagcggcauuuucuccgucgaagggaagucuuguaucaauagaugcuuuuacguggagcugauucggggaagaaaggaagagaccgaaguucuguggaccagcaacuccaucguggucuucuguggcacaucugggaccuauggaacaggcagcuggcccgauggggcugacauuaaucucaugccuaucuga

SEQ ID NO: 208018 - RNA, 1410 nt, Artificial Sequence; identical to SEQ ID NO: 208017
  derived and/or modified CDS sequence (opt5) from neuraminidase__InfluenzaA__ABU92826

SEQ ID NO: 208019 - RNA, 1410 nt, Artificial Sequence; identical to SEQ ID NO: 206297
  derived and/or modified CDS sequence (opt5) from neuraminidase__InfluenzaA__ABU92827

SEQ ID NO: 208020 - RNA, 1410 nt, Artificial Sequence; identical to SEQ ID NO: 206297
  derived and/or modified CDS sequence (opt5) from neuraminidase__InfluenzaA__ABU92828

SEQ ID NO: 208021 - RNA, 1410 nt, Artificial Sequence; identical to SEQ ID NO: 206786
  derived and/or modified CDS sequence (opt5) from neuraminidase__InfluenzaA__ABU92829

SEQ ID NO: 208022 - RNA, 1410 nt, Artificial Sequence
  derived and/or modified CDS sequence (opt5) from neuraminidase__InfluenzaA__ABU92830
augaaccccaaucagaagaucauuaccaucggcagcgugucccugacaauugccgcuaucugcuuccucaugcaaauugccauccuggucacgaccguuacacuucacuuuaaacagcaugaguguaacucuccuccgaauaaccaggugaugcugugcgaacccaccaucauugagagaaauaucacagaaauuguguaccucaccaacacaaccaucgagaaggaaauuuguccuaaacuggcggaguaucggaauuggagcaagccccagugcaacaucacgggguucgcuccuuuuuccaaagacaauucuauucgccuuagcgccggaggcgauaucugggucaccagagagcccuacguguccugugacccugauaagugcuaucaauucgcccuggggcagggaacaacccucaacaauggccacucuaacgacacaguucaugaucggaccccguaccgcacgcugcugaugaaugaacucggggugcccuuucaccugggaacaagacaggucuguaucgcuuggagcuccagcucuugccaugacggcaaggccuggcuucacguguguguuaccggcgaugacaaaaacgcuacagccuccuucauuuauaaugggcggcugguggauagcaucggaucuugguccaagaaaauucuccgcacccaggagagcgaaugcgucuguaucaacgggaccugcacaguggugaugacggacggcucugcguccggaaaggccgauaccaaaauucuguuuaucgaggagggcaagaucguccacauuagcacacuuuccgggucugcucaacauguugaagagugcagcuguuacccuagauaucccggagugcggugcgugugucgcgacaacuggaagggcuccaauagaccuaucgucgauauuaacgugaaagacuacagcaucguuucuuccuacgugugcagcggccuggucggggacacaccccggaagaaugauucuuucagcuccucucgcugucucgacccgaacaaugaagagggaggccacggggugaaaggaugggccuuugaugacggcaacgauguuuggauggggagaaccauuagcgaaaagcugcgguccggauaugagaccuucaaagugaucgagggcuggagcaagccuaauucuaaacugcagaucaaccgccaggucauuguggaaagaggcaaucgguccggguacagcggaaucuuuucugucgagggcaaguccugcauuaacagauguuucuauguggaacucauccgcgggcggaaggaggaaacggagguuugguggacaagcaauuccauuguggucuuuugcggaaccucuggcaccuacgggacaggcagcuggcccgacggagcugauaucaaccugaugccuauuuga

SEQ ID NO: 208023 - RNA, 1410 nt, Artificial Sequence; identical to SEQ ID NO: 206297
  derived and/or modified CDS sequence (opt5) from neuraminidase__InfluenzaA__ABU92831

SEQ ID NO: 208024 - RNA, 1410 nt, Artificial Sequence; identical to SEQ ID NO: 206297
  derived and/or modified CDS sequence (opt5) from neuraminidase__InfluenzaA__ABU92832

SEQ ID NO: 208025 - RNA, 1410 nt, Artificial Sequence; identical to SEQ ID NO: 206297
  derived and/or modified CDS sequence (opt5) from neuraminidase__InfluenzaA__ABU92833

SEQ ID NO: 208026 - RNA, 1410 nt, Artificial Sequence
  derived and/or modified CDS sequence (opt5) from neuraminidase__InfluenzaA__ABU92834
augaaccccaaucagaagaucauuaccaucggcagcgugucccugacaauugccgcuaucugcuuccucaugcacauugccauccuggucacgaccguuacacuucauuuuaaacaacacgaguguaacucuccuccgaauaaccaggugaugcugugcgaacccaccaucauugagagaaauaucacagaaauuguguaccucaccaacacaaccaucgagaaggaaauuuguccuaaacuggcggaguaucggaauuggagcaagccccagugcaacaucacgggguucgcuccuuuuuccaaagacaauucuauucgccuuagcgccggaggcgauaucugggucaccagagagcccuacguguccugugacccugauaagugcuaucaguucgcccuggggcaaggaacaacccucaacaauggccauucuaacgacacaguucacgaucggaccccguaccgcacgcugcugaugaaugaacucggggugcccuuucaucugggaacaagacaggucuguaucgcuuggagcuccagcucuugccacgacggcaaggccuggcuucacguguguguuaccggcgaugacgagaacgcuacagccuccuucauuuauaaugggcggcugguggauagcaucggaucuugguccaaaaagauucuccgcacccaggaaagcgagugcgucuguaucaacgggaccugcacaguggugaugacggacggcucugcguccggaaaagccgauaccaagauucuguuuaucgaggaaggcaaaaucguccauauuagcacacuuuccgggucugcucagcacguugaggaaugcagcuguuacccuagauaucccggagugcggugcgugugucgcgacaacuggaagggcuccaauagaccuaucgucgauauuaacgugaaggacuacagcaucguuucuuccuacgugugcagcggccuggucggggacacaccccggaaaaaugauucuuucagcuccucucauugucucgacccgaacaaugaggaaggaggccacggggugaagggaugggccuuugaugacggcaacgauguuuggauggggcgcaccauuagcgagaaacugagauccggauaugagaccuucaaggugaucgaaggcuggagcaaaccuaauucuaagcugcaaaucaaccggcaggucauuguggagcgcggcaauagauccggguacagcggaaucuuuucugucgaaggcaaauccugcauuaaccgguguuucuauguggagcucaucagagggcgcaaggaagagacggagguuugguggacaagcaauuccauuguggucuuuugcggaaccucuggcaccuacgggacaggcagcuggcccgacggagcugauaucucccugaugccuauuuga

SEQ ID NO: 208027 - RNA, 1410 nt, Artificial Sequence; identical to SEQ ID NO: 206297
  derived and/or modified CDS sequence (opt5) from neuraminidase__InfluenzaA__ABU92835

SEQ ID NO: 208028 - RNA, 1410 nt, Artificial Sequence; identical to SEQ ID NO: 206297
  derived and/or modified CDS sequence (opt5) from neuraminidase__InfluenzaA__ABU92836

SEQ ID NO: 208029 - RNA, 1410 nt, Artificial Sequence
  derived and/or modified CDS sequence (opt5) from neuraminidase__InfluenzaA__ABU92837
augaaccccaaucagaagaucauuaccaucggcagcgugucccugacaauuucuacgaucugcuucuuuaugcaaauugccauccucaucaccacagucacccugcacuucaaacaguacgaguuuaacagcccuccgaauaaccagguuaugcuuugugaacccacaauuaucgagagaaauauuaccgaaaucguguaucugacaaacaccacgauugagaaggaaaucugcccuaaacucgcugaguaccggaauugguccaagccccagugugacauuaccggguucgccccuuuuucuaaagauaacagcauccgccuguccgcgggaggcgacaucugggugacaagagagcccuaugucucuugcgauccugacaaguguuaccaauucgcucuugggcagggaaccacacugaauaacgugcauagcaaugauaccguucacgaccggacgccguaucgcacacuccugaugaacgaacugggcgugcccuuucaucucgggaccaagcaggucugcauugccugguccucuagcuccugucacgauggaaaagccuggcugcaugugugcguuacaggcgacgauaagaaugcuaccgccagcuucaucuacaacggcagacuuguggacucuauugucuccuggagcaaaaagauccugcggacccaggagucugaaugugugugcauuaaugggacauguacgguggucaugaccgauggauccgcuagcggcaaagccgacacaaagauccucuuuaucgaggaggggaagauuguucacaccuccacacugucuggaagcgcgcaacacguggaagagugcuccugcuauccucgcuaccccggcgugagaugugucugccgggauaacuggaaagggagcaaccgcccuaucguggacauuaauaucaaggacuacucuauugccuccagcuauguuuguucuggacuugugggcgauacccccagaaagaacgacagcuccucuagcucccauugccuggauccgaauaacgaagagggcgggcacggagucaaaggcugggcuuucgacgaugggaaugacguguggaugggacggacgaucagcgaaaaacuccgcucuggcuacgagacauuuaagguuaucgaggggugguccaacccuaauagcaaacugcagauuaacagacaggugaucgucgaucggggaaaucgcucuggcuauuccggcauuuucagcguggaagggaaguccugugucaacagaugcuuuuacguggagcugauccggggaagaaaggaagagaccgaaguucucuggaccucuaauagcauuguggucuucuguggcacauccgggaccuauggaacaggcucuuggcccgacggggccgauaucaaccugaugccuauuuga

SEQ ID NO: 208030 - RNA, 1410 nt, Artificial Sequence; identical to SEQ ID NO: 206297
  derived and/or modified CDS sequence (opt5) from neuraminidase__InfluenzaA__ABU92838

SEQ ID NO: 208031 - RNA, 1410 nt, Artificial Sequence; identical to SEQ ID NO: 206133
  derived and/or modified CDS sequence (opt5) from neuraminidase__InfluenzaA__ABU92839

SEQ ID NO: 208032 - RNA, 1410 nt, Artificial Sequence
  derived and/or modified CDS sequence (opt5) from neuraminidase__InfluenzaA__ABU92840
augaaccccaaucagaagaucauuaccaucggcagcgugucccugacaauugccacgaucugcuuccucaugcaaauugcuauccuggucaccacaguuacccuucacuuuaaacaguacgaguguaacucuccuccgaauaaccaggugaugcugugcgaacccacaaucauugagagaaauaucaccgaaauuguguaucucacaaacaccacgaucgagaaggaaauuuguccuaaacuggccgaguaccggaauuggagcaagccccagugcaacaucaccggguucgcgccuuuuuccaaagacaauucuauucgccuuagcgcuggaggcgauaucugggucacaagagagcccuauguguccugugacccugauaagugcuaccaauucgcccuggggcagggaaccacacucaacaauggccauucuaacgacaccguucacgaucggacgccguaucgcacacugcugaugaaugaacucggggugcccuuucaucugggaaccaagcaggucuguaucgccuggagcuccagcucuugccacgacggcaaagccuggcuucauguguguguuacaggcgaugacgagaacgcuaccgcuuccuucauuuacaaugggagacugguggauagcaucggaucuugguccaagaaaauucuccggacccaggaaagcgagugcgucuguaucaacggcacaugcacgguggugaugaccgacgggucugccuccggaaaggcggauacaaaaauucuguuuaucgaggaaggcaagaucguccacauuagccuucuguccgggucugcccaacacguugaggaaugcagcuguuauccucgcuaccccggagugagaugcgugugucgggacaacuggaagggcuccaaucgcccuaucgucgauauuaacgugaaagacuacagcaucguuucuuccuaugugugcagcggccucgucggggacacccccagaaagaaugauucuagcuccucuagccauugucuggacccgaacaaugaggaaggaggccacggggugaaaggaugggcuuucgaugacggcaacgauguuuggauggggcggacaauuuccgagaagcugcgcagcggauacgagaccuuuaaagugaucgaaggcuggucuaagccuaauuccaaacuccagaucaacagacaggucauuguggaccgggauaaucgcagcggcuauucugggaucuucuccgucgagggaaagagcugcauuaacagauguuuuuacguggaacugauccggggcagaaagcaggagacggaaguucuuuggacauccaauucuauuguggucuucugcgggaccagcggaaccuauggcacaggguccuggcccgacggcgccgauaucaaccugaugccuauuuga

SEQ ID NO: 208033 - RNA, 1410 nt, Artificial Sequence
  derived and/or modified CDS sequence (opt5) from neuraminidase__InfluenzaA__ABU92841
augaaccccaaucagaagaucauuaccaucggcagcgugucccugacaauugccacgaucugcuuccucaugcaaauugcuauccuggucaccacaguuacccuucacuuuaaacaguacgaguguaacucuccuccgaauaaccaggugaugcugugcgaacccacaaucauugagagaaauaucaccgaaauuguguaucucacaaacaccacgaucgagaaggaaauuuguccuaaacuggccgaguaccggaauuggagcaagccccagugcaacaucaccggguucgcgccuuuuuccaaagacaauucuauucgccuuagcgcuggaggcgauaucugggucacaagagagcccuauguguccugugacccugauaagugcuaccaauucgcccuggggcagggaaccacacucaacaauggccauucuaacgacaccguucacgaucggacgccguaucgcacacugcugaugaaugaacucggggugcccuuucaucugggaaccaagcaggucuguaucgccuggagcuccagcucuugccacgacggcaaagccuggcuucauguguguguuacaggcgaugacgagaacgcuaccgcuuccuucauuuacaaugggagacugguggauagcaucggaucuugguccaagaaaauucuccggacccaggaaagcgagugcgucuguaucaacggcacaugcacgguggugaugaccgacgggucugccuccggaaaggcggauacaaaaauucuguuuaucgaggaaggcaagaucguccacaccagccuucuguccgggucugcccaacacguugaggaaugcagcuguuauccucgcuaccccggagugagaugcgugugucgggacaacuggaagggcuccaaucgcccuauugucgauaucaacgugaaagacuacagcauuguuucuuccuaugugugcagcggccucgucggggacacacccagaaagaaugauucuagcuccucuagccauugucuggacccgaacaaugaggaaggaggccacggggugaaaggaugggcuuucgaugacggcaacgauguuuggauggggcggaccaucuccgagaagcugcgcagcggauacgagacguuuaaagugauugaaggcuggucuaagccuaauuccaaacuccagaucaacagacaggucaucguggaccgggauaaucgcagcggcuauucugggauuuucuccgucgagggaaagagcugcaucaacagauguuuuuacguggaacugauucggggcagaaagcaggagacagaaguucuuuggaccuccaauucuaucguggucuucugcgggaccagcggaacauauggcaccggguccuggcccgacggcgccgauauuaaccugaugccuaucuga

SEQ ID NO: 208034 - RNA, 1410 nt, Artificial Sequence
  derived and/or modified CDS sequence (opt5) from neuraminidase__InfluenzaA__ABU92842
augaaccccaaucagaagaucauuaccaucggcagcgugucccugacaauugccacgaucugcuuccucaugcaaauugcuauccuggucaccacaguuacccuucacuuuaaacaguacgacuguaacucuccuccgaauaaccaggugaugcugugcgagcccacaaucauugaaagaaauaucaccgagauuguguaucucacaaacaccacgaucgaaaaggagauuuguccuaaacuggccgaauaccggaauuggagcaagccccagugcaacaucaccggguucgcgccuuuuuccaaagauaauucuauucgccuuagcgcuggaggcgacaucugggucacaagagagcccuauguguccugugauccugacaagugcuaccaauucgcccuggggcagggaaccacacucaacaauggccauucuaacgauaccguucacgaccggacgccguaucgcacacugcugaugaaugagcucggggugcccuuucaucugggaaccaagcaggucuguaucgccuggagcuccagcucuugccacgauggcaaagccuggcuucauguguguguuacaggcgacgaugaaaacgcuaccgcuuccuucauuuacaaugggagacugguggacagcaucggaucuugguccaagaaaauucuccggacccaggagagcgaaugcgucuguaucaacggcacaugcacgguggugaugaccgaugggucugccuccggaaaggcggacacaaaaauucuguuuaucgaggagggcaagaucguccacaccagccuucuguccgggucugcccaacacguugaagagugcagcuguuauccucgcuaccccggagugagaugcgugugucgggauaacuggaagggcuccaaucgcccuauugucgacaucaacgugaaagacuacagcauuguuucuuccuaugugugcagcggccucgucggggauacacccagaaagaaugacucuagcuccucuagccauugucuggauccgaacaaugaagagggaggccacggggugaaaggaugggcuuucgacgauggcaacgacguuuggauggggcggaccaucuccgaaaagcugcgcagcggauacgagacguuuaaagugauugagggcuggucuaagccuaauuccaaacuccagaucaacagacaggucaucguggaucggggcaaucgcagcggguauucuggaauuuucuccgucgaaggcaagagcugcaucaacagauguuuuuacguggagcugauucgggggagaaagcaggaaacagagguucuuuggaccuccaauucuaucguggucuucugcggaaccagcggcacauaugggaccggcuccuggcccgacggagccgauauuaaccugaugccuaucuga

SEQ ID NO: 208035 - RNA, 1410 nt, Artificial Sequence; identical to SEQ ID NO: 206133
  derived and/or modified CDS sequence (opt5) from neuraminidase__InfluenzaA__ABU92843

SEQ ID NO: 208036 - RNA, 1410 nt, Artificial Sequence; identical to SEQ ID NO: 207821
  derived and/or modified CDS sequence (opt5) from neuraminidase__InfluenzaA__ABU92844

SEQ ID NO: 208037 - RNA, 1410 nt, Artificial Sequence; identical to SEQ ID NO: 206133
  derived and/or modified CDS sequence (opt5) from neuraminidase__InfluenzaA__ABU92845

SEQ ID NO: 208038 - RNA, 1410 nt, Artificial Sequence; identical to SEQ ID NO: 206133
  derived and/or modified CDS sequence (opt5) from neuraminidase__InfluenzaA__ABU92846

SEQ ID NO: 208039 - RNA, 1410 nt, Artificial Sequence; identical to SEQ ID NO: 206133
  derived and/or modified CDS sequence (opt5) from neuraminidase__InfluenzaA__ABU92847

SEQ ID NO: 208040 - RNA, 1410 nt, Artificial Sequence; identical to SEQ ID NO: 206133
  derived and/or modified CDS sequence (opt5) from neuraminidase__InfluenzaA__ABU92848

SEQ ID NO: 208041 - RNA, 1410 nt, Artificial Sequence; identical to SEQ ID NO: 206786
  derived and/or modified CDS sequence (opt5) from neuraminidase__InfluenzaA__ABU92849

SEQ ID NO: 208042 - RNA, 1410 nt, Artificial Sequence
  derived and/or modified CDS sequence (opt5) from neuraminidase__InfluenzaA__ABU92850
augaaccccaaucagaagaucauuaccaucggcagcgugucccugacaauuucuacgaucugcuucuuuaugcaaauugccauccucaucaccacagucacccugcacuucaaacaguacgaguuuaacagcccuccgaauaaccagguuaugcuuugugaacccacaauuaucgagagaaauauuaccgaaaucguguaucugacaaacaccacgauugagaaggaaaucugcccuaaacucguggaguaccggaauugguccaagccccagugugacauuaccggguucgcuccuuuuucuaaagauaacagcauccgccuguccgccggaggcgacaucugggucacaagagagcccuaugugucuugcgauccugacaaguguuaccaauucgcgcuugggcagggaaccacacugaauaacguucauagcaaugauaccgugcacgaccggacgccguaucgcacacuccugaugaccgaacugggcguccccuuucaucucgggacaaaacaggugugcauugcuugguccucuagcuccugucacgauggaaaagccuggcugcauguuugcgugaccggcgacgauaagaacgccaccgcuagcuucaucuacaauggcagacuugucgacucuauuguguccuggagcaaaaagauccugcggacacaggagucugaaugugugugcauuaacgggacguguaccgucguuaugacagauggauccgccagcggcaaagcugacaccaagauccucuuuaucgaggaggggaagauugugcacacauccacccugucuggaagcgcccaacacguggaagagugcuccugcuauccucgcuaccccggcgucagaugugugugccgggauaauuggaaagggagcaaccgcccuaucguugacauuaacaucaaggacuacucuauuguguccagcuaugucuguucuggacuugugggcgauacgcccagaaagaaugacagcuccucuagcucccauugccuggauccgaacaaugaagagggcgggcacggaguuaagggcugggcguucgacgaugggaacgacguguggaugggacggacaaucagcgaaaaacuccgcucuggcuacgagaccuuuaaggucaucgaggggugguccaauccuaacagcaaacugcagauuaauagacaggugaucgucgaucggggaaaccgcucuggcuauuccggcauuuucagcguggaagggaaguccuguaucaauagaugcuuuuacguugagcugauucggggaagaaaggaagagaacgaagugcucuggaccucuaauagcaucgucguguucuguggcacauccgggaccuauggaacaggcucuuggcccgacggggccgauauuaaccugaugccuaucuga

SEQ ID NO: 208043 - RNA, 1410 nt, Artificial Sequence
  derived and/or modified CDS sequence (opt5) from neuraminidase__InfluenzaA__ABU92851
augaaccccaaucagaagaucauuaccaucggcagcgugucccugacaauuucuacgaucugcuucuuuaugcaaauugccauccucaucaccacagucacccugcacuucaaacaguacgaguuuaacagcccuccgaauaaccagguuaugcuuugugaacccacaauuaucgagagaaauauuaccgaaaucguguaucugacaaacaccacgauugagaaggaaaucugcccuaaacucgcugaguaccggaauugguccaagccccaguguucuauuaccggguucgccccuuuuagcaaagacaacuccauccgccugucugcgggaggcgauaucugggugacaagagagcccuaugucagcugcgacccugauaaguguuaccaauucgcucuugggcagggaaccacacugaauaacgugcauuccaaugacaccguucacgaucggacgccguaucgcacacuccugaugaacgaacugggcgugcccuuucaucucgggaccaagcaggucugcauugccuggucuagcuccagcugucacgacggaaaagccuggcugcaugugugcguuacaggcgaugacaagaaugcuaccgccucuuucaucuacaacggcagacuuguggauuccauugucagcuggucuaaagagauccugcggacccaggaauccgagugugugugcauuaaugggacauguacgguggucaugaccgacggaagcgcuuccggcaaggccgauacaaaaauccucuuuaucgaggaagggaagauuguucacaccucuacacugagcggauccgcgcaacacguggaggaaugcagcugcuauccucgcuaccccggcgugagaugugucugccgggacaacuggaaggggucuaaccgcccuaucguggauauuaauaucaaagacuacuccauuguuagcucuuauguguguagcggacuugucggcgacacccccagaaaggaugacuccucuagcuccagccauugccuggauccgaacaaugaggaaggcgggcacggagugaaaggcugggccuucgacgaugggaacgacguuuggaugggacggacgaucucugagaagucccgcagcggcuacgagacauuuaaagugaucgaaggguggucuaauccuaacuccaagcuccagauuaauagacaggucaucguggaucggggaaaccgcagcggcuauuccggcauuuucucugucgaggggaaaagcuguaucaauagaugcuuuuacguggaacugauucggggaagaaaggaggaaaccgagguucuguggaccuccaacucuaucguggucuucuguggcacaagcgggaccuauggaacaggcuccuggcccgacggggcugauauuaaucucaugccuaucuga

SEQ ID NO: 208044 - RNA, 1410 nt, Artificial Sequence; identical to SEQ ID NO: 206297
  derived and/or modified CDS sequence (opt5) from neuraminidase__InfluenzaA__ABU92852

SEQ ID NO: 208045 - RNA, 1410 nt, Artificial Sequence
  derived and/or modified CDS sequence (opt5) from neuraminidase__InfluenzaA__ABU92853
augaaccccaaucagaagaucauuaccaucggcagcgugucccugacaauugccgcuaucugcuuccucaugcaaauugccauccuggucacgaccguuacacuucacuuuaaacagcaugaguguaacucuccuccgaagaaucaggugaugcugugcgaacccaccaucauugagagaaacaucacagaaauuguguacaugaccaauacaaccaucgagaaagaaauuuguccuaagcucgcggaguaucggaacuggagcaaaccccagugcaauaucacgggguucgcuccuuuuuccaaggacaacucuauucgccugagcgccggaggcgauaucugggucaccagagagcccuacguguccugugacccugauaagugcuaucaauucgcccuugggcagggaacaacccugaauaacggccacucuaaugacacaguucaugaucggaccccguaccgcacgcuccugaugaacgaacugggggugcccuuucaccucggaacaagacaggucuguaucgcuuggagcuccagcucuugccaugacggcaaagccuggcugcacguguguguuaccggcgaugacaagaaugcuacagccuccuucauuuauaacgggcggcuuguggauagcaucgucucuugguccaaaaagauucugcgcacccaggagagcgaaugcguguguaucaauggaaccugcacaguggucaugacggacggcucugcguccgggaaagccgauaccaagauucucuuuaucgaggagggaaagaucguucacauuagcacacuguccggcucugcucaacauguggaagagugcagcuguuacccuagauaucccggggugcggugcgucugucgcgacaacuggaaaggauccaacagaccuaucguggauauuaauguuaaggacuacagcaucgugucuuccuacgucugcagcggccuugugggcgacacaccccggaaaaacgauucuuucagcuccucucacugucuggacccgaauaacgaagaagggggacauggcguuaaggggugggccuuugaugacggaaaugauguguggaugggccgcaccauuagcgagaaacucagauccggguaugagaccuucaaggucaucgagggauggagcaaaccuaacucuaagcugcagaucaaucgccaggugauugucgaacggggcaacagauccggcuacagcgggaucuuuucuguggagggaaaguccugcauuaaucgguguuucuauguugaacugaucagaggccgcaaagaggaaacggaggugugguggacaagcaacuccauugucguguuuugcgggaccucuggaaccuacggcacagggagcuggcccgacggcgcugauaucaaucucaugccuauuuga

SEQ ID NO: 208046 - RNA, 1410 nt, Artificial Sequence; identical to SEQ ID NO: 206297
  derived and/or modified CDS sequence (opt5) from neuraminidase__InfluenzaA__ABU92854

SEQ ID NO: 208047 - RNA, 1410 nt, Artificial Sequence
  derived and/or modified CDS sequence (opt5) from neuraminidase__InfluenzaA__ABU92855
augaaccccaaucagaagaucauuaccaucggcagcgugucccugacaauugccgcuaucugcuuccucaugcaaauugccauccuggucacgaccguuacacuucacuuuaaacagcaugaguguaacucuccuccgaauaaccaggugaugcugugcgaacccaccaucauugagagaaauaucacagaaauuguguaccucaccaacacaaccaucgagaaggaaauuuguccuaaacuggcggaguaucggaauuggagcaagccccagugcaacaucacgggguucgcuccuuuuuccaaagacaauucuauucgccuuagcgccggaggcgauaucugggucaccagagagcccuacguguccugugacccugauaagugcuaucaauucgcccuggggcagggaacaacccucaacaauggccacucuaacgacacaguucaugaucggaccccguaccgcacgcugcugaugaaugaacucggggugcccuuucaccugggaacaagacaggucuguaucgcuuggagcuccagcucuugccaugacggcaaggccuggcuucacguguguguuaccggcgaugacaaaaacgcuacagccuccuucauuuauaaugggcggcugguggauagcaucggaucuugguccaagaaaauucuccgcacccaggagagcgaaugcgucuguaucaacgggaccugcacaguggugaugacggacggcucugcguccggaaaggccgauaccaaaauucuguuuaucgaggagggcaagaucguccacauuagcacacuuuccgggucugcucaacauguugaagagugcagcuguuacccuagauaucccggagugcggugcgugugucgcgacaacuggaagggcuccaauagaccuaucgucgauauuaacgugaaagacuacagcaucguuucuuccuacgugugcagcggccuggucggggacacaccccggaagaaugauucuuucagcuccucucacugucucgacccgaacaaugaagagggaggccauggggugaaaggaugggccuuugaugacggcaacgauguuuggauggggcgcaccauuagcgaaaagcugagauccggauaugagaccuucaaagugaucgagggcuggagcaagccuaauucuaaacugcagaucaaccggcaggucauuaucgaacgcggcaauagauccggguacagcggaaucuuuucuguggagggcaaguccugcauuaaccgguguuucuaugucgaacucauuagagggcgcaaggaggaaacggaggugugguggacaagcaauuccaucguuguguuuugcggaaccucuggcaccuacgggacaggcagcuggcccgacggagcugauauuaaccugaugccuaucuga

SEQ ID NO: 208048 - RNA, 1410 nt, Artificial Sequence; identical to SEQ ID NO: 206217
  derived and/or modified CDS sequence (opt5) from neuraminidase__InfluenzaA__ABU92856

SEQ ID NO: 208049 - RNA, 1410 nt, Artificial Sequence; identical to SEQ ID NO: 206297
  derived and/or modified CDS sequence (opt5) from neuraminidase__InfluenzaA__ABU92857

SEQ ID NO: 208050 - RNA, 1410 nt, Artificial Sequence
  derived and/or modified CDS sequence (opt5) from neuraminidase__InfluenzaA__ABU92858
augaaccccaaucagaagaucauuaccaucggcagcgugucccugacaauuucuacgaucugcuucuuuaugcaaauugccauccucaucaccacagucacccugcacuucaaacaguacgaguuuaacagcccuccgaauaaccagguuauucuuugugaacccacaaucauugagagaaauaucaccgaaauuguguaucugacaaacaccacgaucgagaaggaaauuugcccuaaacucgcugaguaccggaauugguccaagccccagugugacaucaccggguucgccccuuuuucuaaagauaacagcauccgccuguccgcgggaggcgacauuugggugacaagagagcccuaugucucuugcgauccugacaaguguuaccaauucgcucuugggcagggaaccacacugaauaacgugcauagcaaugauaccguucacgaccggacgccguaucgcacacuccugaugaacgaacugggcgugcccuuucaucucgggaccaagcaggucugcaucgccugguccucuagcuccugucacgauggaaaagccuggcugcaugugugcguuacaggcgacgauaagaaugcuaccgccagcuucauuuacaacggcagacuuguggacucuaucgucuccuggagcaaaaagauucugcggacccaggagucugaaugugugugcaucaaugggacauguacgguggucaugaccgauggauccgcuagcggcaaagccgacacaaagauccucuuuauugaggaggggaagaucguucacaccuccacacugucuggaagcgcgcaacacguggaagagugcuccugcuauccucgcuaccccggcgugagaugugucugccgggauaacuggaaagggagcaaccgcccuauuguggacaucaauauuaaggacuacucuaucguuuccagcuauguguguucuggacuugucggcgauacccccagaaagaacgacagcuccucuagcucccauugccuggauccgaauaacgaagagggcgggcacggagugaaaggcugggccuucgacgaugggaaugacguuuggaugggacggacgaucagcgaaaaacuccgcucuggcuacgagacauuuaaggugauugaggggugguccaacccuaauagcaaacugcagaucaacagacaggucauuguggaucggggaaaucgcucuggcuauuccggcaucuucagcgucgaagggaaguccuguauuaacagaugcuuuuacguggagcugauccggggaagaaaggaagagaccgaaguucucuggaccucuaauagcauuguggucuucuguggcacauccgggaccuauggaacaggcucuuggcccgacggggcugauaucaaccugaugccuaucuga

SEQ ID NO: 208051 - RNA, 1410 nt, Artificial Sequence
  derived and/or modified CDS sequence (opt5) from neuraminidase__InfluenzaA__ABU92859
augaaccccaaucagaagaucauuaccaucggcagcgugucccugacaauugccgcuaucugcuuccucaugcaaauugccauccuggucacgaccguuacacuucacuuuaaacagcaugaguguaacucuccuccgaauaaccaggugaugcugugcgaacccaccaucauugagagaaauaucacagaaauuguguaccucaccaacacaaccaucgagaaggaaauuuguccuaaacuggcgggguaucggaauuggagcaagccccagugcaacaucacgggauucgcuccuuuuuccaaagacaauucuauucgccuuagcgccggcggggauaucugggucaccagagagcccuacguguccugugacccugauaagugcuaucaauucgcccugggacagggcacaacccucaacaaugggcacucuaacgacacaguucaugaucggaccccguaccgcacgcugcugaugaaugagcucggagugcccuuucaccugggcacaagacaggucuguaucgcuuggagcuccagcucuugccaugacggcaaggccuggcuucacguguguguuaccggggaugacaaaaacgcuacagccuccuucauuuauaauggacggcugguggauagcaucggcucuugguccaagaaaauucuccgcacccaggaaagcgagugcgucuguaucaacgggaccugcacaguggugaugacggacggaucugcguccggcaaggccgauaccaaaauucuguuuaucgaagaggggaagaucguccacauuagcacacuuuccggaucugcucaacauguugaggaaugcagcuguuacccuagauaucccggcgugcggugcgugugucgcgacaacuggaagggcuccaauagaccuaucgucgauauuaacgugaaagacuacagcaucguuucuuccuacgugugcagcgggcuggucggagacacaccccggaagaaugauucuuucagcuccucucacugucucgacccgaacaaugaggaaggcgggcauggagugaaaggcugggccuuugaugacgggaacgauguuuggaugggacgcaccauuagcgagaagcugagauccggcuaugaaaccuucaaagugaucgagggcuggagcaagccuaauucuaaacugcagaucaaccggcaggucauuguggagcgcgggaauagauccggauacagcggcaucuuuucugucgaagggaaguccugcauuaaccgguguuucuauguggagcucaucagaggacgcaaggaagagacggaaguuugguggacaagcaauuccauuguggucuuuugcggcaccucugggaccuacggcacaggaagcuggcccgacggcgcugauaucaaccugaugccuauuuga

SEQ ID NO: 208052 - RNA, 1410 nt, Artificial Sequence
  derived and/or modified CDS sequence (opt5) from neuraminidase__InfluenzaA__ABU92860
augaaccccaaucagaagaucauuaccaucggcagcgugucccugacaauugccgcuaucugcuuccucaugcaaauugccauccuggucacgaccguuacacuucacuuuaaacagcaugaguguaacucuccuccgaauaaccaggugaugcugugcgaacccaccaucauugagagaaauaucacagaaauuguguaccucaccaacacaaccaucgagaaggaaauuuguccuaaacuggcggaguaucggaauuggagcaagccccagugcaacaucacgggguucgcuccuuuuuccaaagacaauucuauucgccuuagcgccggaggcgauaucugggucaccagagagcccuacguguccugugacccugauaagugcuaucaauucgcccuggggcagggaacaacccucaacaauggccacucuaacgacacaguucaugaucggaccccguaccgcacgcugcugaugaaugaacucggggugcccuuucaccugggaacaagacaggucuguaucgcuuggagcuccagcucuugccaugacggcaaggccuggcuucacguguguguuaccggcgaugacaaaaacgcuacagccuccuucauuuauaaugggcggcugguggauagcaucggaucuugguacaagaaaauucuccgcacccaggaguccgaaugcgucuguaucaacgggaccugcacaguggugaugacggacggcagcgcgucuggaaaggccgauaccaaaauucuguuuaucgaggagggcaagaucguccacauuuccacacuuagcggguccgcucaacauguugaagagugcucuuguuauccuagauaccccggagugcggugcgugugucgcgacaacuggaagggcagcaauagaccuaucgucgauauuaacgugaaagacuacuccaucauuagcucuuauguuugcuccggccuggugggggacacaccccggaagaaugauagcuucucuagcucccacugucucgacccgaacaaugaagagggaggccauggggucaaaggaugggccuuugaugacggcaacgauguguggauggggcgcaccaucucugaaaagcugagaagcggauacgagaccuucaaaguuaucgagggcugguccaagccuaauagcaaacugcagauuaaccgccaggugaucgucgaacggggcaauagaucuggguauuccggaauuuuuagcguggagggcaagucuugcaucaaccgguguuucuacgucgaacucauuagagggcgcaaggaggaaacggaggugugguggacauccaauagcaucguuguguuuugcggaaccuccggcaccuaugggacaggcucuuggcccgacggagcugauauuaaccugaugccuaucuga

SEQ ID NO: 208053 - RNA, 1410 nt, Artificial Sequence
  derived and/or modified CDS sequence (opt5) from neuraminidase__InfluenzaA__ABU92861
augaaccccaaucagaagaucauuaccaucggcagcgugucccugacaauugccgcuaucugcuuccucaugcaaauugccauccuggucacgaccguuacacuucacuuuaaacagcaugaguguaacucuccuccgaauaaccaggugaugcugugcgaacccaccaucauugagagaaauaucacagaaauuguguaccucaccaacacaaccaucgagaaggaaauuuguccuaaacuggcggaguaucggaauuggagcaagccccagugcaacaucacgggguucgcuccuuuuuccaaagacaauucuauucgccuuagcgccggaggcgauaucugggucaccagagagcccuacguguccugugacccugauaagugcuaucaauucgcccuggggcagggaacaacccucaacaauggccacucuaacgacacaguucaugaucggaccccguaccgcacgcugcugaugaaugaacucggggugcccuuucaccugggaacaagacaggucuguauggcuuggagcuccagcucuugccaugacggcaaggccuggcuucacguguguguuaccggcgaugacaaaaacgcuacagccuccuucaucuauaaugggcggcugguggauagcauuggaucuugguccaagaaaauccuccgcacccaggagagcgaaugcgucuguauuaacgggaccugcacaguggugaugacggacggcucugcguccggaaaggccgauaccaaaauccuguuuauugaggagggcaagaucguccacaucagcacacuuuccgggucugcucaacauguugaagagugcagcuguuacccuagauaucccggagugcggugcgugugucgcgacaacuggaagggcuccaauagaccuauugucgauaucaacgugaaagacuacagcauuguuucuuccuacgugugcagcggccuggucggggacacaccccggaagaaugauucuuucagcuccucucacugucucgacccgaacaaugaagagggaggccauggggugaaaggaugggccuuugaugacggcaacgauguuuggauggggcgcaccaucagcgaaaagcugagauccggauaugagaccuucaaagugauugagggcuggagcaagccuaauucuaaacugcagaucaaccggcaggucaucguggaacgcggcaauagauccggguacagcggaaucuuuucugucgagggcaaguccugcauuaaccgguguuucuauguggaacucauuagagggcgcaaggaggaaacggagguuugguggacaagcaauuccaucguggucuuuugcggaaccucuggcaccuacgggacaggcagcuggcccgacggagcugauauuaaccugaugccuaucuga

SEQ ID NO: 208054 - RNA, 1410 nt, Artificial Sequence
  derived and/or modified CDS sequence (opt5) from neuraminidase__InfluenzaA__ABU92862
augaaccccaaucagaagaucauuaccaucggcagcgugucccugacaauugccgcuaucugcuuccucaugcaaauugccauccuggucacgaccguuacacuucacuuuaaacagcaugaguguaacucuccuccgaauaaccaggugaugcugugcgaacccaccaucauugagagaaauaucacagaaauuguguaccucaccaacacaaccaucgagaaggaaauuuguccuaaacuggcggaguaucggaauuggagcaagccccagugcaacaucacgggguucgcuccuuuuucccgcgacaauucuauuagacuuagcgccggaggcgauaucugggucacccgggagcccuacguguccugugacccugauaaaugcuaucaauucgcccuggggcagggaacaacccucaacaauggccacucuaacgacacaguucaugaucgcaccccguacagaacgcugcugaugaaugaacucggggugcccuuucaccugggaacacggcaggucuguaucgcuuggagcuccagcucuugccaugacggcaaggccuggcuucacguguguguuaccggcgaugacaagaacgcuacagccuccuucauuuauaaugggcgccugguggauagcaucggaucuugguccaaaaagauucucagaacccaggagagcgaaugcgucuguaucaacgggaccugcacaguggugaugacggacggcucugcguccggaaaagccgauaccaagauucuguuuaucgaggagggcaaaaucguccacauuagcacacuuuccgggucugcucaacauguugaagagugcagcuguuacccucgguaucccggagugcgcugcguguguagagacaacuggaagggcuccaaucggccuaucgucgauauuaacgugaaggacuacagcaucguuucuuccuacgugugcagcggccuggucggggacacaccccgcaaaaaugauucuuucagcuccucucacugucucgacccgaacaaugaagagggaggccauggggugaagggaugggccuuugaugacggcaacgauguuuggauggggagaaccauuagcgaaaaacugcgguccggauaugagaccuucaaggugaucgagggcuggagcaaaccuaauucuaagcugcagaucaaccgccaggucauuguggaaagaggcaaucgguccggguacagcggaaucuuuucugucgagggcaaauccugcauuaacagauguuucuauguggaacucauccgcgggcggaaggaggaaacggagguuugguggacaagcaauuccauuguggucuuuugcggaaccucuggcaccuacgggacaggcagcuggcccgacggagcugauaucaaccugaugccuauuuga

SEQ ID NO: 208055 - RNA, 1410 nt, Artificial Sequence; identical to SEQ ID NO: 206297
  derived and/or modified CDS sequence (opt5) from neuraminidase__InfluenzaA__ABU92863

SEQ ID NO: 208056 - RNA, 1410 nt, Artificial Sequence
  derived and/or modified CDS sequence (opt5) from neuraminidase__InfluenzaA__ABU92865
augaaccccaaucagaagaucauuaccaucggcagcgugucccugacaauuucuacgaucugcuucuuuaugcaaauugccauccucaucaccacagucacccugcacuucaaacaguacgaguuuaacagcccuccgaauaaccagguuaugcuuugugaacccacaauuaucgagagaaauauuaccgaaaucguguaucugacaaacaccacgauugagaaggaaaucugcccuaaacucgcugaguaccggaauugguccaagccccagugugacauuaccggguucgccccuuuuucuaaagauaacagcauccgccuguccgcgggaggcgacaucugggugacaagagagcccuaugucucuugcgaucuugacaaguguuaccaauucgcucuggggcagggaaccacacucaauaacgugcauagcaaugauaccguucacgaccggacgccuuaucgcacacugcugaugaacgaacucggcgugccguuucaucuggggaccaagcaggucugcauugccugguccucuagcuccugucacgauggaaaagccuggcuucaugugugcguuacaggcgacgauaagaaugcuaccgccagcuucaucuacaacggcagacugguggacucuauugucuccuggagcaaaaagauccuccggacccaggagucugaaugugugugcauuaaugggacauguacgguggucaugaccgauggauccgcuagcggcaaagccgacacaaagauccuguuuaucgaggaggggaagauuguucacaccuccacacuuucuggaagcgcgcaacacguggaagagugcuccugcuauccccgcuacccuggcgugagaugugucugccgggauaacuggaaagggagcaaccgccccaucguggacauuaauaucaaggacuacucuauuguuuccagcuauguguguucuggacuggucggcgauaccccucggaaaaacgacagcuccucuagcucccauugccucgaucccaauaacgaagagggcgggcacggagugaagggcugggccuucgacgaugggaaugacguuuggaugggaagaacgaucagcgaaaaacugcgcucuggcuacgagacauuuaaggugaucgaggggugguccaacccgaauagcaaacugcagauuaacagacaggucaucguggaucggggaaaucgcucuggcuauuccggcauuuucagcgucgaagggaaguccuguaucaacagaugcuuuuacguggagcucauucggggaagaaaggaagagaccgaaguucuguggaccucuaauagcaucguggucuucuguggcacauccgggaccuauggaacaggcucuuggccugacggggcugauauuaaccuuaugcccaucuga

SEQ ID NO: 208057 - RNA, 1410 nt, Artificial Sequence
  derived and/or modified CDS sequence (opt5) from neuraminidase__InfluenzaA__ABU92866
augaaccccaaucagaagaucauuaccaucggcagcgugucccugacaauuucuacgaucugcuucuuuaugcaaauugccauccucaucaccacagucacccugcacuucaaacaguacgaguuuaacagcccuccgaauaaccagguuaugcuuugugaacccacaauuaucgagagaaauauuaccgaaaucguguaucugacaaacaccacgauugagaaggaagugugcccuaaacucgcugaguaccggaauugguccaagccccagugugacaucaccggguucgccccuuuuucuaaagauaacagcauucgccuguccgcgggaggcgacaucugggucacaagagagcccuaugugucuugcgauccugacaaguguuaccaauucgcucuugggcagggaaccacacugaauaacguucauagcaaugauaccgugcacgaccggacgccguaucgcacacuccugaugaacgaacugggcguccccuuucaucucgggaccaaacaggugugcaucgccugguccucuagcuccugucacgauggaaaggccuggcugcauguuugcgugacaggcgacgauaagaaugcuaccgccagcuucauuuacaacggcagacuugucgacucuaucguguccuggagcaaagagauucugcggacccaggaaucugagugugugugcaucaaugggacauguacggucguuaugaccgauggauccgcuagcggcaaggccgacacaaaaauucucuuuaucgaggaagggaagaucgugcacaccuccacacugucuggaagcgcgcaacacguggaggaaugcuccugcuauccucgcuaccccggcgucagaugugugugccgggauaacuggaaggggagcaaccgcccuauuguugacaucaauauuaaagacuacucuaucguguccagcuaugucuguucuggacuugugggcgauacccccagaaagaacgacagcuccucuaauagccauugccuggauccgaacaaugaggaaggcgggcacggaguuaaaggcugggccuucgacgaugggaacgacguguggaugggacggacgauuuccgagaagcuccgcagcggcuacgagacauuuaaagucaucgaaggguggucuaauccuaacuccaagcugcagaucaauagacaggugauugucgaucggggaaaccgcagcggcuauucuggcaucuucuccguggaggggaaaagcuguauuaauagaugcuuuuacguugaacugauccggggaagaaaggaggaaaccgaggugcucuggaccuccaacucuauugucguguucuguggcacaagcgggaccuauggaacaggcuccuggcccgacggggcugauaucaaucugaugccuauuuga

SEQ ID NO: 208058 - RNA, 1410 nt, Artificial Sequence; identical to SEQ ID NO: 206879
  derived and/or modified CDS sequence (opt5) from neuraminidase__InfluenzaA__ABU92867

SEQ ID NO: 208059 - RNA, 1410 nt, Artificial Sequence; identical to SEQ ID NO: 207986
  derived and/or modified CDS sequence (opt5) from neuraminidase__InfluenzaA__ABU92868

SEQ ID NO: 208060 - RNA, 1410 nt, Artificial Sequence; identical to SEQ ID NO: 206766
  derived and/or modified CDS sequence (opt5) from neuraminidase__InfluenzaA__ABU92869

SEQ ID NO: 208061 - RNA, 1410 nt, Artificial Sequence; identical to SEQ ID NO: 207956
  derived and/or modified CDS sequence (opt5) from neuraminidase__InfluenzaA__ABU92870

SEQ ID NO: 208062 - RNA, 1410 nt, Artificial Sequence
  derived and/or modified CDS sequence (opt5) from neuraminidase__InfluenzaA__ABU92872
augaaccccaaucagaagaucauuaccaucggcagcgugucccugacaauugccgcuaucugcuuccucaugcaaauugccauccuggucacgaccguuacacuucacuuuaaacagcaugaguguaacucuccuccgaauaaccaggugaugcugugcgaacccaccaucauugagagaaauaucacagaaauuguguaccucaccaacacaaccaucgagaaggaaauuuguccuaaacuggcggaguaucggaauuggagcaagccccagugcaacaucacgggguucgcuccuuuuuccaaagacaauucuauucgccuuagcgccggaggcgauaucugggucaccagagagcccuacguguccugugacccugauaagugcuaucaauucgcccuggggcagggaacaacccucaacaauggccacucuaacgacacaguucaugaucggaccccguaccgcacgcugcugaugaaugaacucggggugcccuuucaccugggaacaagacaggucuguaucgcuuggagcuccagcucuugccaugacggcaaggccuggcuucacguguguguuaccggcgaugacaaaaacgcuacagccuccuucauuuauaaugggcggcugguggauagcaucggaucuugguccaagaaaauucuccgcacccaggagagcgaaugcgucuguaucaacgggaccugcacaguggugaugacggacggcucugcguccggaaaggccgauaccaaaauucuguuuaucgaggagggcaagaucguccacauuagcacacuuuccgggucugcucaacauguugaagagugcagcuguuacccuagauaucccggagugcggugcgugugucgcgacaacuggaagggcuccaauagaccuaucgucgauauuaacgugaaagacuacaauaucguuagcucuuacgugugcuccggccuggucggggacacaccccggaagaacgauagcuucucuagcucccacugucucgacccgaauaacgaagagggaggccauggggugaaaggaugggccuuugaugacggcaaugauguuuggauggggcgcaccauuucugaaaagcugagaagcggauaugagaccuucaaagugaucgagggcugguccaagccuaacagcaaacugcagaucaaucggcaggucauuguggaacgcggcaacagaucuggguacuccggaaucuuuagcgucgagggcaagucuugcauuaaucgguguuucuauguggaacucaucagagggcgcaaggaggaaacggagguuugguggacauccaacagcauuguggucuuuugcggaaccuccggcaccuacgggacaggcucuuggcccgacggagcugauaucaaucugaugccuauuuga

SEQ ID NO: 208063 - RNA, 1410 nt, Artificial Sequence
  derived and/or modified CDS sequence (opt5) from neuraminidase__InfluenzaA__ABU92873
augaaccccaaucagaagaucauuaccaucggcagcgugucccugacaauuucuacgaucugcuucuuuaugcaaauugccauccucaucaccacagucacccugcacuucaaacaguacgaguuuaacagcccuccgaauaaccagguuaugcuuugugaacccacaauuaucgagagaaauauuaccgaaaucguguaucugacaaacaccacgauugagaaggaaaucugcccuaaacucgcugaguaccggaauugguccaagccccaguguaacauuaccggguucgccccuuuuucuaaagacaauagcauccgccuguccgcgggaggcgauaucugggugacaagagagcccuaugucucuugcgacccugauaaguguuaccaauucgcucuugggcagggaaccacacugaacaaugugcauagcaacgacaccguucacgaucggacgccguaucgcacacuccugaugaaugaacugggcgugcccuuucaucucgggaccaagcaggucugcauugccugguccucuagcuccugucacgacggaaaagccuggcugcaugugugcguuacaggcgaugacgagaacgcuaccgccagcuucaucuacaauggcagacuuguggauucuauugucuccuggagcaagaaaauccugcggacccaggaaucugagugugugugcauuaacgggacauguacgguggucaugaccgacggauccgcuagcggcaaggccgauacaaaaauccucuuuaucgaggaagggaagauuguucacaccuccacacugucuggaagcgcgcaacacguggaggaaugcuccugcuauccucgcuaccccggcgugagaugugucugccgggacaacuggaaggggagcaaucgcccuaucguggauauuaacaucaaagacuacucuauuguuuccagcuauguguguucuggacuugucggcgacacccccagaaagaaugauagcuccucuagcucccauugccuggacccgaacaaugaggaaggcgggcacggagugaaaggcugggccuucgaugacgggaacgauguuuggaugggacggacgaucagcgagaagcuccgcucuggcuacgagacauuuaaagugaucgaagggugguccaauccuaacagcaagcugcagauuaauagacaggucaucguggaccggggaaaccgcucuggcuauuccggcauuuucagcgucgaggggaaauccuguaucaauagaugcuuuuacguggaacugauucggggaagaaagcaggagaccgaaguucucuggaccucuaacagcaucguggucuucuguggcacauccgggaccuauggaacaggcucuuggcccgauggggcugacauuaauaucaugccuaucuga

SEQ ID NO: 208064 - RNA, 1410 nt, Artificial Sequence; identical to SEQ ID NO: 208001
  derived and/or modified CDS sequence (opt5) from neuraminidase__InfluenzaA__ABU92874

SEQ ID NO: 208065 - RNA, 1410 nt, Artificial Sequence; identical to SEQ ID NO: 206297
  derived and/or modified CDS sequence (opt5) from neuraminidase__InfluenzaA__ABU92875

SEQ ID NO: 208066 - RNA, 1410 nt, Artificial Sequence; identical to SEQ ID NO: 206297
  derived and/or modified CDS sequence (opt5) from neuraminidase__InfluenzaA__ABU92876

SEQ ID NO: 208067 - RNA, 1410 nt, Artificial Sequence; identical to SEQ ID NO: 206217
  derived and/or modified CDS sequence (opt5) from neuraminidase__InfluenzaA__ABU92877

SEQ ID NO: 208068 - RNA, 1410 nt, Artificial Sequence; identical to SEQ ID NO: 206297
  derived and/or modified CDS sequence (opt5) from neuraminidase__InfluenzaA__ABU92878

SEQ ID NO: 208069 - RNA, 1410 nt, Artificial Sequence
  derived and/or modified CDS sequence (opt5) from neuraminidase__InfluenzaA__ABU92879
augaaccccaaucagaagaucauuaccaucggcagcgugucccugacaauugccacgaucugcuuccucaugcaaauugcuauccuggucaccacaguuacccuucacuuuaaacagcaugaguguaacucuccuccgaauaaccaggugaugcugugcgaacccacaaucauugagagaaauaucaccgaaauuguguaccucacaaacaccacgaucgagaaggaaauuuguccuaaacuggccgaguaucggaauuggagcaagccccagugcaacaucaccggguucgcgccuuuuuccaaagacaauucuauucgccuuagcgcuggaggcgauaucugggucacaagagagcccuacguguccugugacccugauaagugcuaucaauucgcccuggggcagggaaccacacucaacaauggccacucuaacgacaccguucaugaucggacgccguaccgcacacugcugaugaaugaacucggggugcccuuucaccugggaaccagacaggucuguaucgccuggagcuccagcucuugccaugacggcaaggcuuggcuucacguguguguuacaggcgaugacaaaaacgccaccgcuuccuucauuuauaaugggcggcugguggauagcaucggaucuugguccaagaaaauucuccgcacccaggagagcgaaugcgucuguaucaacggcacaugcacgguggugaugaccgacgggucugccuccggaaaggcggauacaaaaauucuguuuaucgaggagggcaagaucguccacauuagcacccuuuccgggucugcccaacauguugaagagugcagcuguuacccuagauaucccggagugcggugcgugugucgcgacaacuggaagggcuccaauagaccuaucgucgauauuaacgugaaagacuacagcaucguuucuuccuacgugugcagcggccuggucggggacacaccccggaagaaugauucuuucagcuccucucacugucucgacccgaacaaugaagagggaggccauggggugaaaggaugggcuuuugaugacggcaacgauguuuggauggggcgcaccauuagcgaaaagcugagauccggauaugagacguucaaagugaucgagggcuggagcaagccuaauucuaaacugcagaucaaccggcaggucauuguggaacgcggcaauagauccggguacagcggaaucuuuucugucgagggcaaguccugcauuaaccgguguuucuauguggaacucaucagagggcgcaagggagagacagaaguuugguggaccagcaauuccauuguggucuuuugcggcaccucugggacauacggcaccggaagcuggcccgacggcgccgauaucaaccugaugccuauuuga

SEQ ID NO: 208070 - RNA, 1410 nt, Artificial Sequence; identical to SEQ ID NO: 208062
  derived and/or modified CDS sequence (opt5) from neuraminidase__InfluenzaA__ABU92880

SEQ ID NO: 208071 - RNA, 1410 nt, Artificial Sequence; identical to SEQ ID NO: 206297
  derived and/or modified CDS sequence (opt5) from neuraminidase__InfluenzaA__ABU92881

SEQ ID NO: 208072 - RNA, 1410 nt, Artificial Sequence; identical to SEQ ID NO: 206297
  derived and/or modified CDS sequence (opt5) from neuraminidase__InfluenzaA__ABU92882

SEQ ID NO: 208073 - RNA, 1410 nt, Artificial Sequence
  derived and/or modified CDS sequence (opt5) from neuraminidase__InfluenzaA__ABU92883
augaaccccaaucagaagaucauuaccaucggcagcgugucccugacaauugccgcuaucugcuuccucaugcaaauugccauccuggucacgaccguuacacuucacuuuaaacagcaugaguguaacucuccuccgaagaaucaggugaugcugugcgaacccaccaucauugagagaaacaucacagaaauuguguaccucaccaauacaaccaucgagaaagaaauuuguccuaagcuggcggaguaucggaacuggagcaaaccccagugcaauaucacgggguucgcuccuuuuuccaaggacaacucuauucgccuuagcgccggaggcgauaucugggucaccagagagcccuacguguccugugacccugauaagugcuaucaauucgcccuggggcagggaacaacccucaauaacggccacucuaaugacacaguucaugaucggaccccguaccgcacgcugcugaugaacgaacucggggugcccuuucaccugggaacaagacaggucuguaucgcuuggagcuccagcucuugccaugacggcaaagccuggcuucacguguguguuaccggcgaugacaagaaugcuacagccuccuucauuuauaacgggcggcugguggauagcaucgucucuugguccaaaaagauucuccgcacccaggagagcgaaugcguguguaucaauggaaccugcacaguggucaugacggacggcucugcguccgggaaagccgauaccaagauucuguuuaucgaggagggaaagaucguucacauuagcacacuuuccggcucugcucaacauguggaagagugcagcuguuacccuagauaucccggggugcggugcgucugucgcgacaacuggaaaggauccaacagaccuaucguggauauuaauguuaaggacuacagcaucgugucuuccuacgucugcagcggccuggugggcgacacaccccggaaaaacgauucuuucagcuccucucacugucucgacccgaauaacgaagaagggggacauggcguuaaggggugggccuuugaugacggaaaugauguguggaugggccgcaccauuagcgagaaacugagauccggguaugagaccuucaaggucaucgagggauggagcaaaccuaacucuaagcugcagaucaaucgccaggugauugucgaacggggcaacagauccggcuacagcgggaucuuuucuguggagggaaaguccugcauuaaucgguguuucuauguugaacucaucagaggccgcaaagaggaaacggaggugugguggacaagcaacuccauugucguguuuugcgggaccucuggaaccuacggcacagggagcuggcccgacggcgcugauaucaaucugaugccuauuuga

SEQ ID NO: 208074 - RNA, 1410 nt, Artificial Sequence; identical to SEQ ID NO: 206297
  derived and/or modified CDS sequence (opt5) from neuraminidase__InfluenzaA__ABU92884

SEQ ID NO: 208075 - RNA, 1410 nt, Artificial Sequence; identical to SEQ ID NO: 206297
  derived and/or modified CDS sequence (opt5) from neuraminidase__InfluenzaA__ABU92885

SEQ ID NO: 208076 - RNA, 1410 nt, Artificial Sequence; identical to SEQ ID NO: 206786
  derived and/or modified CDS sequence (opt5) from neuraminidase__InfluenzaA__ABU92886

SEQ ID NO: 208077 - RNA, 1410 nt, Artificial Sequence; identical to SEQ ID NO: 206297
  derived and/or modified CDS sequence (opt5) from neuraminidase__InfluenzaA__ABU92887

SEQ ID NO: 208078 - RNA, 1410 nt, Artificial Sequence
  derived and/or modified CDS sequence (opt5) from neuraminidase__InfluenzaA__ABU92888
augaaccccaaucagaagaucauuaccaucggcagcgugucccugacaauuucuacgaucugcuucuuuaugcaaauugccauccucaucaccacagucacccugcacuucaaacaguacgaguuuaacagcccuccgaauaaccagguuaugcuuugugaacccacaauuaucgagagaaauauuaccgaaaucguguaucugacaaacaccacgauugagaaggaaaucugcccuaaacucgcugaguaccggaauugguccaagccccaguguaacauuaccggguucgccccuuuuucuaaagacaauagcauccgccuguccgcgggaggcgauaucugggugacaagagagcccuaugucucuugcgacccugauaaguguuaccaauucgcucuugggcagggaaccacacugaacaaugugcauagcaacgacaccguucacgaucggacgccguaucgcacacuccugaugaaugaacugggcgugcccuuucaucucgggaccaagcaggucugcauugccugguccucuagcuccugucacgacggaaaagccuggcugcaugugugcguuacaggcgaugacgagaacgcuaccgccagcuucaucuacaauggcagacuuguggauucuauugucuccuggagcaagaaaauccugcggacccaggaaucugagugugugugcauuaacgggacauguacgguggucaugaccgacggauccgcuagcggcaaggccgauacaaaaauccucuuuaucgaggaagggaagauuguucacaccuccacacugucuggaagcgcgcaacacguggaggaaugcuccugcuauccucgcuaccccggcgugagaugugucugccgggacaacuggaaggggagcaaucgcccuaucguggauauuaacaucaaagacuacucuauuaucuccagcuauguuuguucuggacuugugggcgacacccccagaaagaaugauagcuccucuagcucccauugccuggacccgaacaaugaggaaggcgggcacggagucaaaggcugggccuucgaugacgggaacgauguguggaugggacggacgaucagcgagaagcuccgcucuggcuacgagacauuuaaaguuguggaagggugguccaauccuaacagcaagcugcagauuaauagacaggucaucguggaccgggauaaccgcucuggauauuccggcauuuucagcgucgagggcaaauccuguaucaauagaugcuuuuacguggaacugauucgggggagaaaccaggagaccgaaguucucuggaccucuaauagcaucguggucuucuguggaacauccggcaccuaugggacaggaucuuggcccgacggcgcugauauuaaccugaugccuaucuga

SEQ ID NO: 208079 - RNA, 1410 nt, Artificial Sequence; identical to SEQ ID NO: 208001
  derived and/or modified CDS sequence (opt5) from neuraminidase__InfluenzaA__ABU92889

SEQ ID NO: 208080 - RNA, 1410 nt, Artificial Sequence
  derived and/or modified CDS sequence (opt5) from neuraminidase__InfluenzaA__ABU92890
augaaccccaaucagaagaucauuaccaucggcagcgugucccugacaauugccgcuaucugcuuccucaugcaaauugccauccuggucacgaccguuacacuucacuuuaaacagcaugaguguaacucuccuccgaauaaccaggugaugcugugcgaacccaccaucauugagagaaauaucacagaaauuguguaccucaccaacacaaccaucgagaaggaaauuuguccuaaacuggcggaguaucggaauuggagcaagccccagugcaacaucacgggguucgcuccuuuuuccaaagacaauucuauucgccuuagcgccggaggcgauaucugggucaccagagagcccuacguguccugugacccugauaagugcuaucaauucgcccuggggcagggaacaacccucaacaauggccacucuaacgacacaguucaugaucggaccccguaccgcacgcugcugaugaaugaacucggggugcccuuucaccugggaacaagacaggucuguaucgcuuggagcuccagcucuugccaugacggcaaggccuggcuucacguguguguuaccggcgaugacaaaaacgcuacagccuccuucauuuauaaugggcggcugguggauagcaucggaucuugguccaagaaaauucuccgcacccaggagagcgaaugcgucuguaucaacgggaccugcacaguggugaugacggacggcucugcguccggaaaggccgauaccaaaauucuguuuaucgaggagggcaagaucguccacauuagcacacuuuccgggucugcucaacauguugaagagugcagcuguuacccuagauaucccggagugcggugcgugugucgcgacaacuggaagggcuccaauagaccuaucgucgauauuaacgugaaagacuacagcaucguuucuuccuacgugugcagcggccuggucggggacacaccccggaagaaugauucuuucagcuccucucacugucucgacccgaacaaugaagagggaggccauggggugaaaggaugggccuuugaugacggcaacgauguuuggauggggcgcaccauuagcgaaaagcugagauccggauaugagaccuucaaagugaucgagggcuggagcaagccuaauucuaaacugcagaucaaccggcaggucauuguggaacgcggcaauagauccggguacagcggaaucuuuucugucgagggcaaguccugcauuaaccgguguuucuauguggaacucguuagagggcgcaaggaggaaacggaggugugguggacaagcaauuccaucgucguguuuugcggaaccucuggcaccuacgggacaggcagcuggcccgacggagcugauauuaaccugaugccuaucuga

SEQ ID NO: 208081 - RNA, 1410 nt, Artificial Sequence; identical to SEQ ID NO: 208017
  derived and/or modified CDS sequence (opt5) from neuraminidase__InfluenzaA__ABU92891

SEQ ID NO: 208082 - RNA, 1410 nt, Artificial Sequence
  derived and/or modified CDS sequence (opt5) from neuraminidase__InfluenzaA__ABU92892
augaaccccaaucagaagaucauuaccaucggcagcgugucccugacaauuucuacgaucugcuucuuuaugcaaauugccauccucaucaccacagucacccugcacuucaaacaguacgaguuuaacagcccuccgaauaaccagguuaugcuuugugaacccacaauuaucgagagaaauauuaccgaaaucguguaucugacaaacaccacgauugagaaggaaaucugcccuaaacucgcugaguaccggaauugguccaagccccagugugacauuaccggguucgccccuuuuucuaaagauaacagcauccgccuguccgcgggaggcaauaucugggugacaagagagcccuaugucucuugcgacccugauaaguguuaccaauucgcucuugggcagggaaccacacugaacaaugugcauagcaacgacaccguucacgaucggacgccguaucgcacacuccugaugaaugaacugggcgugcccuuucaucucgggaccaagcaggucugcauugccugguccucuagcuccugucacgacggaaaagccuggcugcaugugugcguuacaggcgaugacaagaacgcuaccgccagcuucaucuacaauggcagacuuguggauucuauugucuccuggagcaaaaagauccugcggacccaggagucugaaugugugugcauuaacgggacauguacgguggucaugaccgacggauccgcuagcggcaaagccgauacaaagauccucuuuaucgaggaggggaagauuguucacaccuccacacugucuggaagcgcgcaacacguggaagagugcuccugcuauccucgcuaccccggcgugagaugugucugccgggacaacuggaaagggagcaaucgcccuaucguggauauuaacaucaaggacuacucuauuguuuccagcuauguguguucuggacuugucggcgacacccccagaaagaaugauagcuccucuagcucccauugccuggacccgaacaaugaagagggcgggcacggagugaaaggcugggccuucgaugacgggaacgauguuuggaugggacggacgaucagcgaaaaacuccgcucuggcuacgagacauuuaaggugaucgaggggugguccaauccuaacagcaaacugcagauuaauagacaggucaucguggaccggggaaaccgcucuggcuauuccggcauuuucagcgucgaagggaaguccuguaucaauagaugcuuuuacguggagcugauucggggaagaaaggaagagaccgaaguucucuggaccucuaacagcaucguggucuucuguggcacauccgggaccuauggaacaggcucuuggcccgauggggcugacauuaaucugaugccuaucuga

SEQ ID NO: 208083 - RNA, 1410 nt, Artificial Sequence; identical to SEQ ID NO: 206879
  derived and/or modified CDS sequence (opt5) from neuraminidase__InfluenzaA__ABU92893

SEQ ID NO: 208084 - RNA, 1410 nt, Artificial Sequence
  derived and/or modified CDS sequence (opt5) from neuraminidase__InfluenzaA__ABU92895
augaaccccaaucagaagaucauuaccgugggcagcgucucccugacaaucucuacgauuugcuucuuuaugcaaaucgccauucucaucaccacaguuacccugcacuucaaacaguacgaguuuaacagcccuccgaauaaccaggugaugcuuugugaacccacaaucauugagagaaauaucaccgaaauuguguaucugacaaacaccacgaucgagaaggaaauuugcccuaaacucgcugaguaccggaauugguccaagccccagugugacaucaccggguucgccccuuuuucuaaagauaacagcauucgccuguccgcgggaggcgacaucugggucacaagagagcccuaugugucuugcgauccugacaaguguuaccaauucgcucuugggcagggaaccacacugaauaacguucauagcaaugauaccgugcacgaccggacgccguaucgcacacuccugaugaacgaacugggcguccccuuucaucucgggaccaaacaggugugcaucgccugguccucuagcuccugucacgauggaaaggccuggcugcauguuugcgugacaggcgacgauaagaaugcuaccgccagcuucauuuacaacggcagacuugucgacucuaucguguccuggagcaaagagauucugcggacccaggaaucugagugugugugcaucaaugggacauguacggucguuaugaccgauggauccgcuagcggcaaggccgacacaaaaauucucuuuaucgaggaagggaagaucgugcacaccuccacacugucuggaagcgcgcaacacguggaggaaugcuccugcuauccucgcuaccccggcgucagaugugugugccgggauaacuggaaggggagcaaccgcccuauuguugacaucaauauuaaagacuacucuaucgccuccagcuauguguguucuggacuugucggcgauacccccagaaagaacgacagcuccucuagcucccauugccuggauccgaauaacgaggaaggcgggcacggagugaaaggcugggcuuucgacgaugggaaugacguuuggaugggacggacgauuagcgagaagcuccgcucuggcuacgagacauuuaaagugaucgaagggugguccaacccuaauagcaagcugcagaucaacagacaggucauuguggaucggggaaaucgcucuggcuauuccggcaucuucagcgucgaggggaaauccuguauuaacagaugcuuuuacguggaacugauccggggaagaaaggaggaaaccgagguucucuggaccucuaauagcauuguggucuucuguggcacauccgggaccuauggaacaggcucuuggcccgacggggccgauaucaaccugaugccuauuuga

SEQ ID NO: 208085 - RNA, 1410 nt, Artificial Sequence
  derived and/or modified CDS sequence (opt5) from neuraminidase__InfluenzaA__ABU92896
augaaccccaaucagaagaucauuaccaucggcagcgugucccugacaauuucuacgaucugcuucuuuaugcaaauugccauccucaucaccacagucacccugcacuucaaacaguacgaguuuaacagcccuccgaauaaccagguuaugcuuugugaacccacaauuaucgagagaaauauuaccgaaaucguguaucugacaaacaccacgauugagaaggaaaucugcccuaaacucgcugaguaccggaauugguccaagccccagugugacauuaccggguucgccccuuuuucuaaagauaacagcauccgccuguccgcgggaggcgacaucugggugacaagagagcccuaugucucuugcgauccugacaaguguuaccaauucgcucuugggcagggaaccacacugaauaacgugcauagcaaugauaccguucgggaccgcacgccguauagaacacuccugaugaacgaacugggcgugcccuuucaccucgggaccaagcaggucugcauugccugguccucuagcuccugucaugauggaaaagccuggcugcacgugugcaucacaggcaaugacaagaacgcuaccgccagcuucauuuacaauggccggcuuguugauucuaucguguccuggagcaaagagauucugcgcacccaggaaucugagugugucugcaucaacgggacauguacgguggugaugaccgacggauccgcuagcggcaaggccgauacaaaaauccucuuuauugaggaagggaagaucguccauaccuccacacugucuggaagcgcgcaacacguugaggaaugcuccugcuauccuagauaccccggcgugcggugugugugccgcgacaacuggaaggggagcaauagaccuauugucgauaucaacauuaaagaccacucuaucguguccagcuacguuuguucuggacuugugggcgacacgccccggaagaaugauagcuccucuagcucccauugccuggacccgaacaaugaggaaggcgggcacggagucaaaggcugggccuucgaugaccgcaacgauguguggauggggagaaccaucagcgagaagucucggcucggauaugagacauuuaaaguuauugaaggcugguccaauccuaacagcaagcugcagaucaaucgccaggugauugucgacagagggaaccggucuggauacuccggcaucuucagcguggagggcaaauccuguauuaauagaugcuuuuaugucgaacugauccgcgggcggaaggaggaaaccgaggugcucuggaccucuaacagcauuguuguguucuguggaacauccggcaccuacgggacaggaucuuggcccgauggcgcugacaucaaucugaugccuaucuga

SEQ ID NO: 208086 - RNA, 1410 nt, Artificial Sequence
  derived and/or modified CDS sequence (opt5) from neuraminidase__InfluenzaA__ABU92897
augaaccccaaucagaagaucauuaccaucggcagcgugucccugacaauuucuacgaucugcuucuuuaugcaaauugccauccucaucaccacagucacccugcacuucaaacaguacgagcuuaacagcccuccgaauaaccagguuaugcugugugaacccacaauuaucgagagaaauauuaccgaaaucguguaucucacaaacaccacgauugagaaggaaaucugcccuaaacuggcugaguaccggaauugguccaagccccaguguaacauuaccggguuugccccuuucucuaaagacaauagcauccgccuuuccgcgggaggcgauaucugggugacaagagagcccuaugucucuugcgacccugauaaguguuaccaauuugcucuggggcagggaaccacacucaacaaugugcauagcaacgacaccguucacgaucggacgccguaucgcacacugcugaugaaugaacucggcgugcccuuccaucuggggaccaagcaggucugcauugccugguccuccucuuccugucacgacggaaaagccuggcuucaugugugcguuacaggcgaugacaagaacgcuaccgccagcuuuaucuacaauggcagacugguggauucuauugucuccuggagcaaagagauccuccggacccaggaaucugagugugugugcauuaacgggacauguacgguggucaugaccgacggauccgcuagcggcaaggccgauacaaaaauccuguucaucgaggaagggaagauuguucacaccuccacacuuucuggaagcgcgcaacacguggaggaaugcuccugcuauccucgcuaccccggcgugagaugugucugccgggacaacuggaaggggagcaaucgcccuaucguggauauuaacaucaaagacuacucuauuguuuccagcuauguguguucuggacuggucggcgacacccccagaaagaaugauagcuccucuagcucccauugccucgacccgaacaaugaggaaggcgggcacggagugaaaggcugggccuuugaugacgggaacgauguuuggaugggacggacgaucagcgagaagucucgcuccggcuacgagacauucaaagugaucgaaggguggagcaauccuaacucuaagcugcagauuaauagacaggucaucguggaccggggaaaccgcuccggcuauagcggcauuuuuagcgucgaggggaaaucuuguaucaauagaugcuucuacguggaacugauucggggaagaaaggaggaaaccgagguucucuggaccagcaacuccaucguggucuuuuguggcacaucugggaccuauggaacaggcagcuggcccgauggggcugacauuaaucugaugccuaucuga

SEQ ID NO: 208087 - RNA, 1410 nt, Artificial Sequence
  derived and/or modified CDS sequence (opt5) from neuraminidase__InfluenzaA__ABU92898
augaaccccaaucagaagaucauuaccaucggcagcgugucccugacaauuucuacgaucugcuucuuuaugcaaauugccauccucaucaccacagucacccugcacuucaaacaguacgaguuuaacagcccuccgaauaaccagguuaugcuuugugaacccacaauuaucgagagaaauauuaccgaaaucguguaucugacaaacaccacgauugagaaggaaaucugcccuaaacucgcugaguaccggaauugguccaagccccagugugacauuaccggguucgccccuuuuucuaaagauaacagcauccgccuguccgcgggaggcgacaucugggugacaagagagcccuaugucucuugcgauccugacaaguguuaccaauucgcucuugggcagggaaccacacugaauaacgugcauagcaaugauaccguucacgaccggacgccguaucgcacacuccugaugaacgaacugggcgugcccuuucaucucgggaccaagcaggucugcauugccugguccucuagcuccugucacgauggaaaagccuggcugcaugugugcguuacaggcgacgauaagaaugcuaccgccagcuucaucuacaacggcagacuuguggacucugucguguccuggagcaaagauauucugcggacccaggagucugaaugugugugcaucaaugggacauguacggucguuaugaccgacggauccgcuagcggcaaggccgauacaaaaauucucuuuaucgaggaggggaagaucgugcacaccuccacacugucuggaagcgcgcaacacguggaagagugcuccugcuauccucgcuaccccggcgucagaugugugugccgggacaacuggaaggggagcaaccgcccuauuguugacaucaauauuaaaaacuacucuaucguguccagcuaugucuguucuggacuugugggcgauacccccagaaagacggacagcuccucuagcucccauugccuggauccgaauaacgaagagggcgggcacggaguuaaaggcugggccuucgacgaugggaaugacguguggaugggacggacaauuagcgaaaagcuccgccugggcuacgagaccuuuaaagucaucgagggguggucuaacccuaauuccaagcugcagaucaacagacaggugauugucgaucggggaaaucgcaccggcuauagcggcaucuucucuguggaagggaaauccuguauuaacagaugcuuuuacguugagcucauccggggaagaaaggaagagacagaagugcuguggaccagcaauuccauugucguguucuguggcacaucugggacguauggaaccggcagcuggcccgacggggcugauaucaaccuuaugccuauuuga

SEQ ID NO: 208088 - RNA, 1410 nt, Artificial Sequence; identical to SEQ ID NO: 206297
  derived and/or modified CDS sequence (opt5) from neuraminidase__InfluenzaA__ABU92899

SEQ ID NO: 208089 - RNA, 1410 nt, Artificial Sequence
  derived and/or modified CDS sequence (opt5) from neuraminidase__InfluenzaA__ABU92900
augaaccccaaucagaagaucauuaccaucggcagcgugucccugacaauugccgcuaucugcuuccucaugcaaauugccauccuggucacgaccguuacacuucacuuuaaacagcaugaguguaacccuccgcccaauaaccaggugaugcugugcgaaccuaccaucauugagagaaauaucacagaaauuguguaccucaccaacacaaccaucgagaaggaaauuugucccaaacuggcggaguaucggaauuggucuaagccucagugcaacaucacgggguucgcucccuuuagcaaagacaauuccauucgccuuucugccggaggcgauaucugggucaccagagagccuuacgugagcugugacccggauaagugcuaucaauucgcccuggggcagggaacaacccucaacaauggccacuccaacgacacaguucaugaucggacccccuaccgcacgcugcugaugaaugaacucggggugccuuuucaccugggaacaagacaggucuguaucgcuuggucuagcuccagcugccaugacggcaaggccuggcuucacguguguguuaccggcgaugacaaaaacgcuacagccucuuucauuuauaaugggcggcugguggauuccaucggaagcuggucuaagaaaauucuccgcacccaggaguccgaaugcgucuguaucaacgggaccugcacaguggugaugacggacggcagcgcgucuggaaaggccgauaccaaaauucuguuuaucgaggagggcaagaucguccacauuuccacacuuagcggguccgcucaacauguugaagagugcucuuguuaccccagauauccuggagugcggugcgugugucgcgacaacuggaagggcagcaauagacccaucgucgauauuaacgugaaagacuacuccaucguuagcucuuacgugugcuccggccuggucggggacaccccgcggaagaaugauagcuucucuagcucccacugucucgacccuaacaaugaagagggaggccauggggugaaaggaugggccuuugaugacggcaacgauguuuggauggggcgcacaauuucugaaaagcugagaagcggauaugagaccuucaaagugaucgagggcugguccaagcccaauagcaaacugcagaucaaccggcaggucauuguggaacgcggcaauagaucuggguacuccggaaucuuuagcgucgagggcaagucuugcauuaaccgguguuucuauguggaacucaucagagggcgcaaggaggaaacggagguuugguggacauccaauagcauuguggucuuuugcggaaccuccggcaccuacgggacaggcucuuggccugacggagcugauaucaaccugaugcccauuuga

SEQ ID NO: 208090 - RNA, 1410 nt, Artificial Sequence
  derived and/or modified CDS sequence (opt5) from neuraminidase__InfluenzaA__ABU92901
augaaccccaaucagaagaucauuaccaucggcagcgugucccugacaauugccgcuaucugcuuccucaugcaaauugccauccuggucacgaccguuacacuucacuuuaaacagcaugaguguaacucuccuccgaauaaccaggugaugcugugcgaacccaccaucauugagagaaauaucacagaaauuguguaccucaccaacacaaccaucgagaaggaaauuuguccuaaacuggcggaguaucggaauuggagcaagccccagugcaacaucacgggguucgcuccuuuuuccaaagacaauucuauucgccuuagcgccggaggcgauaucugggucaccagagagcccuacguguccugugacccugauaagugcuaucaauucgcccuggggcagggaacaacccucaacaauggccacucuaacgacacaguucaugaucggaccccguaccgcacgcugcugaugaaugaacucggggugcccuuucaccugggaacaagacaggucuguaucgcuuggagcuccagcucuugccaugacggcaaggccuggcuucacguguguguuaccggcgaugacaaaaacgcuacagccuccuucauuuauaaugggcggcugguggauagcaucucuuccuggagcaagaaaauucuccgcacccaggagucugaaugcgucuguaucaacggaaccugcacaguggugaugacggacggcuccgcgagcgggaaggccgauaccaaaauucuguuuaucgaggagggaaagaucguccacauuuccacacuuucuggcagcgcucaacauguugaagagugcuccuguuacccuagauaucccggggugcggugcgugugucgcgacaacuggaagggaagcaauagaccuaucgucgauauuaacgugaaagacuacucuaucguuuccagcuacgugugcucuggccuggucggcgacacaccccggaagaaugauagcuucuccucuagccacugucucgacccgaacaaugaagaagggggacauggcgugaaagggugggccuuugaugacggaaacgauguuuggaugggccgcaccauuuccgagaagcugagaagcggguaugagaccuucaaagugaucgagggauggucuaagccuaauuccaaacugcagaucaaccggcaggucauuguggaacgcggcaauagaagcggcuacucugggaucuuuuccgucgagggaaagagcugcauuaaccgguguuucuauguggaacucaucagaggccgcaaggaggaaacggagguuugguggacauccaauucuauuguggucuuuugcgggaccagcggaaccuacggcacaggguccuggcccgacggcgcugauaucaaccugaugccuauuuga

SEQ ID NO: 208091 - RNA, 1410 nt, Artificial Sequence; identical to SEQ ID NO: 206297
  derived and/or modified CDS sequence (opt5) from neuraminidase__InfluenzaA__ABU92902

SEQ ID NO: 208092 - RNA, 1410 nt, Artificial Sequence; identical to SEQ ID NO: 206297
  derived and/or modified CDS sequence (opt5) from neuraminidase__InfluenzaA__ABU92903

SEQ ID NO: 208093 - RNA, 1410 nt, Artificial Sequence; identical to SEQ ID NO: 207252
  derived and/or modified CDS sequence (opt5) from neuraminidase__InfluenzaA__ABU92904

SEQ ID NO: 208094 - RNA, 1410 nt, Artificial Sequence; identical to SEQ ID NO: 206297
  derived and/or modified CDS sequence (opt5) from neuraminidase__InfluenzaA__ABU92905

SEQ ID NO: 208095 - RNA, 1410 nt, Artificial Sequence
  derived and/or modified CDS sequence (opt5) from neuraminidase__InfluenzaA__ABU92906
augaaccccaaucagaagaucauuaccaucggcagcgugucccugacaauugccgcuaucugcuuccucaugcaaauugccauccuggucacgaccguuacacuucacuuuaaacagcaugaguguaacucuccuccgaauaaccaggugaugcugugcgaacccaccaucauugagagaaauaucacagaaauuguguaccucaccaacacaaccaucgagaaggaaauuuguccuaaacuggcggaguaucggaauuggagcaagccccagugcaacaucacgggguucgcuccuuuuuccaaagacaauucuauucgccuuagcgccggaggcgauaucugggucaccagagagcccuacguguccugugacccugauaagugcuaucaauucgcccuggggcagggaacaacccucaacaauggccacucuaacgacacaguucaugaucggaccccguaccgcacgcugcugaugaaugaacucggggugcccuuucaccugggaacaagacaggucuguaucgcuuggagcuccagcucuugccaugacggcaaggccuggcuucacguguguguuaccggcgaugacaaaaacgcuacagccuccuucauuuauaaugggcggcugguggauagcaucggaucuugguccaagaaaauucuccgcacccaggagagcgaaugcgucuguaucaacgggaccugcacaguggugaugacggacggcucugcguccggaaaggccgauaccaaaauucuguuuaucgaggagggcaagaucguccacauuagcacacuuuccgggucugcucaacauguugaagagugcagcuguuacccuagauaucccggagugcggugcgugugucgcgacaacuggaagggcuccaauagaccuaucgucgauauuaacgugaaagacuacagcaucguuucuuccuacgugugcagcggccuggucggggacacaccccggaagaaugauucuuucagcuccucucacugucucgacccgaacaaugaagagggaggccauggggugaaaggaugggccuuugaugacggcaacgauguuuggauggggcgcaccauuagcgaaaagcugagauccggauaugagaccuucaaagugaucgagggcuggagcaagccuaauucuaaacugcagaucaaccggcaggucauuguggaacgcggcaauagauccggguacagcggaaucuuuucugucgagggcaaguccugcauuaaccgguguuucuauguggaacucaucagagggcgcaaggaggaaacggagguuugguggacaagcaauuccauuguggucuuuugcggaaccucuggcaccuacgggacaggcagcuggcccgacggagcugauaucaaacugaugccuauuuga

SEQ ID NO: 208096 - RNA, 1410 nt, Artificial Sequence
  derived and/or modified CDS sequence (opt5) from neuraminidase__InfluenzaA__ABU92907
augaaccccaaucagaagaucauuaccaucggcagcauuucccugacaaucgccgcuauuugcuuccucaugcaaaucgccauccuggugacgaccgucacacuucacuuuaaacagcaugaguguaacucuccuccgaauaaccagguuaugcugugcgaacccaccauuaucgagagaaauauuacagaaaucguguaccucaccaacacaaccauugagaaggaaaucuguccuaaacuggcggaguaucggaauuggagcaagccccagugcaacauuacgggguucgcuccuuuuuccaaagacaauucuauccgccuuagcgccggaggcgauaucugggugaccagagagcccuacgucuccugugacccugauaagugcuaucaauucgcccuggggcagggaacaacccucaacaauggccacucuaacgacacagugcaugaucggaccccguaccgcacgcugcugaugaaugaacucgggguucccuuucaccugggaacaagacagguguguauugcuuggagcuccagcucuugccaugacggcaaggccuggcuucacgucugugugaccggcgaugacaaaaacgcuacagccuccuucaucuauaaugggcggcugguugauagcauuggaucuugguccaagaaaauccuccgcacccaggagagcgaaugcguguguauuaacgggaccugcacagucgugaugacggacggcucugcguccggaaaggccgauaccaaaauccuguuuaucgaggagggcaagauugugcacaucagcacacuuuccgggucugcucaacaugucgaagagugcagcuguuacccuagauaucccggaguucggugcgugugucgcgacaacuggaagggcuccaauagaccuauuguggauaucaacgucaaagacuacagcauugugucuuccuacguuugcagcggccuggugggggacacaccccggaagaaugauucuuucagcuccucucacugucucgacccgaacaaugaagagggaggccauggggucaaaggaugggccuuugaugacggcaacgauguguggauggggcgcaccaucagcgaaaagcugagauccggauaugagaccuucaaaguuaucgagggcuggagcaagccuaauucuaaacugcagauuaaccgccaggugaucgucgaacggggcaauagauccggguacagcggaaucuuuucuguggagggcaaguccugcauuaaccgguguuucuaugucgaacucauuagagggcgcaaggaggaaacggaggugugguggacaagcaauuccaucguuguguuuugcggaaccucuggcaccuacgggacaggcagcuggcccgacggagcugauauuaaccugaugccuaucuga

SEQ ID NO: 208097 - RNA, 1410 nt, Artificial Sequence; identical to SEQ ID NO: 206297
  derived and/or modified CDS sequence (opt5) from neuraminidase__InfluenzaA__ABU92908

SEQ ID NO: 208098 - RNA, 1410 nt, Artificial Sequence; identical to SEQ ID NO: 206297
  derived and/or modified CDS sequence (opt5) from neuraminidase__InfluenzaA__ABU92909

SEQ ID NO: 208099 - RNA, 1410 nt, Artificial Sequence
  derived and/or modified CDS sequence (opt5) from neuraminidase__InfluenzaA__ABU92910
augaaccccaaucagaagaucauuaccaucggcagcgugucccugacaauugccacgaucugcuuccucacccaaauugcuauccugaucacaaccgucacacuucacuuuaaacaguacgaguguaacucuccuccgaauaaccagguuaugcugugcgaacccaccauuaucgagagaaauauuacagaaaucguguaucucaccaacacgaccauugagaaggaaaucuguccuaaacuggccgaguaccggaauuggagcaagccccagugcaacauuacaggguucgcgccuuuuuccaaagacaauucuauccgccuuagcgcuggaggcgauaucugggugaccagagagcccuaugucuccugugacccugauaagugcuaccaauucgcccuggggcagggaacaacccucaacaauggccauucuaacgacacggugcacgaucggacaccguaucgcacccugcugaugaaugaacucgggguucccuuucaucugggaacaaaacagguguguauugccuggagcuccagcucuugccacgacggcaaggcuuggcuucaugucugugugaccggcgaugacaagaacgccaccgcuuccuucaucuacaaugggagacugguugauagcauuggaucuugguccaaaaagauccuccggacacaggagagcgaaugcguguguauuaacggcacgugcaccgucgugaugacagacgggucugccuccggaaaagcggauaccaagauccuguuuaucgaggagggcaagauugugcacacaagccuucuguccgggucugcccaacacgucgaagagugcagcuguuauccucgcuaccccggaguuagaugcgugugucgggacaacuggaaaggcuccaaucgcccuaucguggauauuaacgucagagacuacagcaucgugucuuccuauguuugcagcggccucgugggggacacgccccggaagaaugauucuagcuccucuagccauugucuggacccgaacaaugaagagggaggccacggggucaaaggaugggcuuucgaugacggcaacgauguguggauggggcgcaccauuuccgaaaagcugagaagcggauacgagacauuuaaaguuaucgagggcuggucuaagccuaauuccaaacuccagaucaaccgccaggugauugucgacaagggcaaucggagcggguauucuggaaucuucuccguggaaggcaagagcugcauuaacagauguuuuuacgucgagcugauccgggggagaaaucaggaaaccgaggugcuuuggaccuccaacucuauuguuguguucugcggaacaagcggcaccuaugggacaggcuccuggcccgauggagccgacaucaaucugaugccuauuuga

SEQ ID NO: 208100 - RNA, 1410 nt, Artificial Sequence
  derived and/or modified CDS sequence (opt5) from neuraminidase__InfluenzaA__ABU92911
augaaccccaaucagaagaucauuaccaucggcagcgugucccugacaauugccacgaucugcuuccucacccaaauugcuauccuggucacaaccguuacacuucacuuuaaacaguacgaguguaacucuccuccgaauaaccaggugaugcugugcgaacccaccaucauugagagaaauaucacagaaauuguguaucucaccaacacgaccaucgagaaggaaauuuguccuaaacaggccgaguaccggaauuggagcaagccccaaugcaacaucacaggguucgcgccuuuuuccaaagacaauucuauucgccugagcgcuggaggcgauaucugggucaccagagagcccuauguguccugugacccugauaagugcuaccaguucgcccuugggcagggaacaacccugaacaauggccauucuaacgacacgguucacgaucggacaccguaucgcacccuccugaugaaugaacugggggugcccuuucaucucggaacaaagcaggucuguaucgccuggagcuccagcucuugccacgacggcaaggcuuggcugcauguguguguuaccggcgaugacaaaaacgccaccgcuuccuucauuuacaaugggagacuuguggauagcaucggaucuugguccaaaaagauucugcggacacaagagagcgaaugcgucuguaucaacggcacgugcaccguggugaugacagacgggucugccuccggaaaagcggauaccaagauucucuuuaucaaggagggcaaaaucguccacacaagccugcuuuccgggucugcccagcacguugaggaaugcagcuguuauccucgcuaccccggagugagaugcgugugucgggacaacuggaagggcuccaaucgcccuauugucgauaucaacgugaaagacuacagcauuguuucuuccuaugugugcagcggccuggucggggacacccccagaaagaaugauucuagcuccucuagccauugucucgacccgaacaaugaggaaggaggccacggggugaaaggaugggcuuucgaugacggcaacgauguuuggauggggcggacgaucuccgagaagcugcgcagcggauacgaaacauuuaaagugauugagggcuggucuaagccuaauuccaagcugcagaucaacagacaggucaucguggaccgggauaaucgcagcggcuauucugggauuuucuccgucgagggaaaaagcugcaucaacagauguuuuuacguggaacucauucggggcagaaaucaagagaccgaaguucuguggaccuccaacucuaucguggucuucugcgggacaagcggaaccuauggcacaggguccuggcccgacggcgccgauauuaaucuuaugccuaucuga

SEQ ID NO: 208101 - RNA, 1410 nt, Artificial Sequence
  derived and/or modified CDS sequence (opt5) from neuraminidase__InfluenzaA__ABU92913
augaaccccaaucagaagaucauuaccaucggcagcgugucccugacaauugccacgaucugcuuccucacccaaauugcuauccuggucacaaccguuacacuucacuuuaaacaguacgaguguaacucuccuccgaauaaccaggugaugcugugcgaacccaccaucauugagagaaauaucacagaaauuguguaucucaccaacacgaccaucgagaaggaaauuuguccuaaacuggccgaguaccggaauuggagcaagccccagugcaacaucacaggguucgcgccuuuuuccaaagacaauucuauucgccuuagcgcuggaggcgauaucugggucaccagagagcccuauguguccugugacccugauaagugcuaccaauucgcccuggggcagggaacaacccucaacaauggccauucuaacgacacgguucacgaucggacaccguaucgcacccugcugaugaaugaacucggggugcccuuucaucugggaacaaagcaggucuguaucgccuggagcuccagcucuugccacgacggcaaggcuuggcuucauguguguguuaccggcgaugacaaaaacgccaccgcuuccuucauuuacaaugggagacugguggauagcaucggaucuugguccaaaaagauucuccggacacaggagagcgaaugcgucuguaucaacggcacgugcaccguggugaugacagacgggucugccuccggaaaagcggauaccaagauucuguuuaucaaggagggcaaaaucguccacacaagccuucuguccgggucugcccaacacguugaggaaugcagcuguuauccucgcuaccccggagugagaugcgugugucgggacaacuggaagggcuccaaucgcccuauugucgauaucaacgugaaagacuacagcauuguuucuuccuaugugugcagcggccucgucggggacacccccagaaagaaugauucuagcuccucuagccauugucuggacccgaacaaugaggaaggaggccacggggugaaaggaugggcuuucgaugacggcaacgauguuuggauggggcggacgaucuccgagaagcugcgcagcggauacgaaacauuuaaagugauugagggcuggucuaagccuaauuccaagcuccagaucaacagacaggucaucguggaccgggauaaucgcagcggcuauucugggauuuucuccgucgagggaaaaagcugcaucaacagauguuuuuacguggaacugauucggggcagaaaucaggagaccgaaguucuuuggaccuccaacucuaucguggucuucugcgggacaagcggaaccuauggcacaggguccuggcccgacggcgccgauauuaaucugaugccuaucuga

SEQ ID NO: 208102 - RNA, 1413 nt, Artificial Sequence
  derived and/or modified CDS sequence (opt5) from neuraminidase__InfluenzaA__ABV29560
augaaccccaaucagaagaucauuaccaucggcagcauuuccaucgccauugggaucaucucucugaugcuccaaauuggaaacaucauuagcaucugggcuucccacucuauucagacaggcagccagaaucauacggggaucugcaaccagagaauuaucaccuacgagaauagcacaugggugaaccacaccuaugucucuaucaauaacacaaauguuguggccggaaaagacaagaccagcgugacacuggcgggcaacuccagccuuuguucuauuuccgggugggcuaucuacaccaaagauaauagcauucggaucggaucuaagggcgacgucuucgugauucgcgaaccuuuuaucuccugcagccaucuggaguguagaacguucuuucucacccaaggcgcccugcuuaacgauaaacacucuaaugggacaguuaaggaccgguccccguaucgcgcccugaugagcugcccccucggagaagcuccuucccccuacaacucuaaguucgagagcguggccugguccgcuagcgccugucaugauggcaugggguggcugaccaucggaauuucuggcccugacaauggggcggucgccgugcugaaauauaacggaaucauuacagaaaccaucaaguccuggaaaaagcggauucucagaacgcaggagagcgagugcguuugugugaacggcucuugcuuuacaaucaugaccgauggccccagcaauggggcugccuccuacaaaaucuucaagauugaaaagggaaaagucacaaagucuaucgagcugaacgcuccuaauuuucacuaugaagaguguagcugcuacccggacaccggcaccgugaugugugugugccgcgauaacuggcacggguccaauagacccugggucagcuucaaccagaaucuugacuaccagauuggauauaucugcucuggcguuuuuggggauaacccucggcccaaagacggaaagggcuccuguaauccugugacaguggauggcgccgacggggucaaaggauucagcuacaaguauggcaacgggguguggauuggacgcacgaaaucuaauagacugcggaagggcuuugagaugaucugggaccccaacggguggaccgauacagacuccgauuucagcguuaagcaagacguggucgcgauuaccgauugguccggcuacucuggauccuuugugcagcauccggaacucacaggccuggacugcauccgcccuuguuucuggguugagcuugugagagggcugccccgggaaaauaccacgaucuggacauccggaucuagcauuuccuucugcggcgucgauagcgacaccgccaacuggucuuggccugauggggcugagcuccccuuuaccaucgacaaauga

SEQ ID NO: 208103 - RNA, 1413 nt, Artificial Sequence; identical to SEQ ID NO: 208102
  derived and/or modified CDS sequence (opt5) from neuraminidase__InfluenzaA__ABV29571

SEQ ID NO: 208104 - RNA, 1413 nt, Artificial Sequence; identical to SEQ ID NO: 208102
  derived and/or modified CDS sequence (opt5) from neuraminidase__InfluenzaA__ABV29582

SEQ ID NO: 208105 - RNA, 1413 nt, Artificial Sequence; identical to SEQ ID NO: 208102
  derived and/or modified CDS sequence (opt5) from neuraminidase__InfluenzaA__ABV29615

SEQ ID NO: 208106 - RNA, 1413 nt, Artificial Sequence
  derived and/or modified CDS sequence (opt5) from neuraminidase__InfluenzaA__ABV29637
augaaccccaaucagaagaucauuaccaucggcagcauuuccaucgccauugggaucaucucucugaugcuccaaauuggaaacaucauuagcaucugggcuucccacucuauucagacaggcagccagaaucauacggggaucugcaaccagagaauuaucaccuacgagaauagcacaugggugaaccacaccuaugucaauaucaacaauacaaacguuguggccggaaaagacaagaccucugugacacuggcgggcaauagcucccuuuguagcauuucugggugggcuaucuacaccaaagauaacuccauucggaucggaagcaagggcgacgucuucgugauucgcgaaccuuuuaucucuugcucccaucuggaguguagaacguucuuucucacccaaggcgcccugcuuaaugauaaacacagcaacgggacaguuaaggaccggucuccguaucgcgcccugauguccugcccccucggagaagcuccuagccccuacaauuccaaguucgagucuguggccuggagcgcuuccgccugucaugauggcaugggguggcugaccaucggaauuagcggcccugacaacggggcggucgccgugcugaaauauaacggaaucauuacagaaaccaucaagucuuggaaaaagcggauucucagaacgcaggaguccgagugcguuugugugaauggcagcugcuuuacaaucaugaccgauggccccucuaacgggacagcuagcuacaaaaucuucaagauugaaaagggaaaagucaccaaguccaucgagcugaaugccccuaacuuucacuaugaagaguguucuugcuacccggacaccggcacagugaugugugugugccgcgauaauuggcacgggagcaacagacccugggucuccuucaaucagaaccuugacuaccagguuggauauauuugcagcggcguguuuggggauaauccucggcccaaagacggaaagggcucuuguaacccuaugacgguggauggcgcugacggggucaaaggauucuccuacaaguauggcaaugggguguggaucggacgcaccaaaagcaacaagcugagaaagggcuuugagaugauuugggaccccaauggguggacagauaccgacucugauuucuccguuaaacaagacguggucgccaucagcgauugguccggcuacucuggauccuuugugcagcauccggaacucacaggccuggacugcauucggccuuguuucuggguugagcuugugcgcgggcugcccagagaaaacaccacgaucuggacauccggaucuagcaucuccuucugcggcgucgauagcgacaccgcgaauuggucuuggccugauggggccgagcuccccuuuaccauugacaaguga

SEQ ID NO: 208107 - RNA, 1413 nt, Artificial Sequence; identical to SEQ ID NO: 208102
  derived and/or modified CDS sequence (opt5) from neuraminidase__InfluenzaA__ABV29648

SEQ ID NO: 208108 - RNA, 1413 nt, Artificial Sequence; identical to SEQ ID NO: 208102
  derived and/or modified CDS sequence (opt5) from neuraminidase__InfluenzaA__ABV29659

SEQ ID NO: 208109 - RNA, 1413 nt, Artificial Sequence; identical to SEQ ID NO: 208102
  derived and/or modified CDS sequence (opt5) from neuraminidase__InfluenzaA__ABV29670

SEQ ID NO: 208110 - RNA, 1413 nt, Artificial Sequence
  derived and/or modified CDS sequence (opt5) from neuraminidase__InfluenzaA__ABV29681
augaaccccaaucagaagaucauuaccaucggcagcauuuccaucgccauugggaucaucucucugaugcuccaaauuggaaacaucauuagcaucugggcuucccacucuauucagacaggcagccagaaucauacggggaucugcaaccagagaauuaucaccuacgagaauagcacaugggugaaccacaccuaugucucuaucaauaacacaaauguuguggccggaaaagacaagaccagcgugacacuggcgggcaacuccagccuuuguucuauuuccgggugggcuaucuacaccaaagauaauagcauucggaucggaucuaagggcgacgucuucgugauucgcgaaccuuuuaucuccugcagccaucuggaguguagaacguucuuucucacccaaggcgcccugcuuaacgauaaacacucuaaugggacaguuaaggaccgguccccguaucgcgcccugaugagcugcccccucggagaagcuccuucccccuacaacucuaaguucgagagcguggccugguccgcuagcgccugucaugauggcaugggguggcugaccaucggaauuucuggcccugacaauggggcggucgccgugcugaaauauaacggaaucauuacagaaaccaucaaguccuggaaaaagcggauucucagaacgcaggagagcgagugcguuugugugaacggcucuugcuuuacaaucaugaccgauggccccagcaauggggcugccuccuacaaaaucuucaagauugaaaagggaaaagucacaaagucuaucgagcugaacgcuccuaauuuucacuaugaagaguguagcugcuacccggacaccggcaccgugaugugugugugccgcgauaacuggcacggguccaauagacccugggucagcuucaaccagaaucuugacuaccagauuggauauaucugcucuggcguuuuuggggauaacccucggcccaaagacggaaagggcuccuguaauccugugacaguggauggcgccgacggggucaaaggauucagcuacaaguauggcaacgggguguggauuggacgcacgaaaucuaauagacugcggaagggcuuugagaugaucugggaccccaacggguggaccgauacagacuccgauuucagcguuaagcaagacguggucgcgauuaccgauugguccggcuacucuggauccuuugugcagcauccggaacucacaggccuggacugcauccgcccuuguuucuggguugagcuugugagagggcugccccgggaaaauaccacgaucuggacauccggaucuagcauuuccuucugcggcaucgauagcgacaccgccaacuggucuuggccugauggggcugagcuccccuuuaccauugacaaauga

SEQ ID NO: 208111 - RNA, 1413 nt, Artificial Sequence; identical to SEQ ID NO: 208102
  derived and/or modified CDS sequence (opt5) from neuraminidase__InfluenzaA__ABV29692

SEQ ID NO: 208112 - RNA, 1413 nt, Artificial Sequence; identical to SEQ ID NO: 208102
  derived and/or modified CDS sequence (opt5) from neuraminidase__InfluenzaA__ABV29703

SEQ ID NO: 208113 - RNA, 1410 nt, Artificial Sequence
  derived and/or modified CDS sequence (opt5) from neuraminidase__InfluenzaA__ABV29714
augaaccccaaucagaagaucauuaccaucggcagcgugucccugacaauuucuacgaucugcuucuuuaugcaaauugccauccucaucaccacagucacccugcacuucaaacaguacgaguuuaacagcccuccgaauaaccagguuaugcuuugugaacccacaauuaucgagagaaauauuaccgaaaucguguaucugacaaacaccacgauugagaaggaaaucugcccuaaacucgcugaguaccggaauugguccaagccccagugugacauuaccggguucgccccuuuuucuaaagauaacagcauccgccuguccgcgggaggcgacaucugggugacaagagagcccuaugucucuugcgauccugacaaguguuaccaauucgcucuugggcagggaaccacacugaauaacgugcauagcaaugauaccguucgggaccgcacgccguauagaacacuccugaugaacgaacugggcgugcccuuucaccucgggaccaagcaggucugcauugccugguccucuagcuccugucaugauggaaaagccuggcugcacgugugcaucacaggcgacgauaagaaugcuaccgccagcuucauuuacaacggccggcuuguugacucuaucguguccuggagcaaagagauucugcgcacccaggaaucugagugugucugcaucaaugggacauguacgguggugaugaccgauggauccgcuagcggcgaggccgacacaaagauccucuuuauugaagaggggaaaaucguccauaccuccacacugucuggaagcgcgcaacacguugaagagugcuccugcuauccuagauaccccggcgugcggugugugugccgcgauaacuggaaggggagcaacagaccuauugucgacaucaauauuaaggaccacucuaucguguccagcuacguuuguucuggacuugugggcgauacgccccggaaaaacgacagcuccucuagcucccauugccuggauccgaauaacgaagagggcgggcacggagucaagggcugggccuucgacgaugggaaugacguguggaugggacgcaccaucagcgagaaaucuagacucggcuaugaaacauuuaagguuauugaggggugguccaacccuaaaagcaagcugcagaucaaucgccaggugauugucgaucggggaaacagaucuggcuacuccggcaucuucagcguggaagggaaauccuguauuaaucggugcuuuuaugucgagcugaucagaggacgcaaggaagagaccgaggugcucuggaccucuaacagcauuguuguguucuguggcacauccgggaccuacggaacaggcucuuggcccgacggggcugauaucaaucugaugccuaucuga

SEQ ID NO: 208114 - RNA, 1410 nt, Artificial Sequence
  derived and/or modified CDS sequence (opt5) from neuraminidase__InfluenzaA__ABV29725
augaaccccaaucagaagaucauuaccaucggcagcgugucccugacaauuucuacgaucugcuucuuuaugcaaaccgccauucucaucacaaccgucacacugcacuucaaacaguacgaguuuaacagcccuccgaauaaccaggggaugcuuugugaacccaccaucauugagagaaauaucacagaaauuguuuaucugaccaacacgaccaucgagaaggaaauuugcccuaaacucgcugaguaccggaauugguccaagccccagugugacaucacaggauucgccccuuuuucuaaagauaacagcauucgccuguccgcgggcggggacaucugggugaccagagagcccuaugugucuugcgauccugacaaguguuaccaauucgcucuuggacagggcacaacccugaauaacguccauagcaaugauacggugcgggaccgcacaccguauagaacccuccugaugaacgaacuggggguucccuuucaccucggaacaaaacaggugugcaucgccugguccucuagcuccugucaugauggcaaggccuggcugcacgucugcauuaccggcgacgauaagaaugcuaccgccagcuucaucuacaacgggcggcuuguggacucuauuguuuccuggagcaaagagauccugcgcacacaggaaucugagugugugugcauuaauggaacguguaccgucgugaugacagauggcuccgcuagcgggaaggccgacaccaaaauccucuuuaucgaggaaggaaagauugugcauacauccacccugucuggcagcgcgcaacacgucgaggaaugcuccugcuucccuagauaucccgggguucggugugugugccgcgauaacuggaagggaagcaacagaccuaucguggacauuaauaucaaagaccacucuauugucuccagcuacguguguucuggccuuguuggcgauacgccccggaagaacgacagcuccucuagcucccauugccuggauccgaauaacgaggaagggggacacggcgugaaagggugggccuuugacgauggaaaugacgucuggaugggccgcacaaucagcgagaagucuagacucggguacgagaccuucaaagugaucgaaggaugguccaacccuaagagcaaacugcagauuaaucggcagguuaucguggaucgcggcaacagaucuggcuauuccgggauuuuuagcgucgagggaaaguccuguaucaaucggugcuucuacguggaacugauuagaggccgcaaggaggaaaccgagguccucuggacaucuaacagcaucgugguuuucugugggaccuccggaacauauggcacggggucuuggcccgacggcgcugauauuaaucugaugccuaucuga

SEQ ID NO: 208115 - RNA, 1413 nt, Artificial Sequence
  derived and/or modified CDS sequence (opt5) from neuraminidase__InfluenzaA__ABV29736
augaaccccaaucagaagaucauuaccaucggcagcauuuccaucgccauugggaucaucucucugaugcuccaaauuggaaacaucauuagcaucugggcuucccacucuauucagacaggcagccagaaucauacggggaucugcaaccagagaauuaucaccuacgaaaauuccacaugggugaaccacaccuaugucaauaucaacaauacaaacguugugaccggaaaagacaagacaucugugacccuggccggcaauagcucccuuuguagcauuucugggugggcgaucuacacgaaagauaacuccauucggaucggaagcaagggcgacgucuucgugauucgcgagccuuuuaucucuugcucccaucuggaguguagaaccuucuuucucacacaaggcgcucugcuuaaugauaaacacagcaacgggaccguuaaggaccggucuccguaucgcgcccugauguccugcccccucggagaagccccuagccccuacaauuccaaguucgagucuguggcuuggagcgccuccgcuugucaugauggcaugggguggcugacaaucggaauuagcggcccugacaacggggccgucgcggugcugaaauauaacggaaucauuaccgaaacgaucaagucuuggaaaaagcggauucucagaacacaggaguccgagugcguuugugugaauggcagcugcuuuaccaucaugacagauggccccucugacggggccgcuagcuacaaaaucuucaagauugaaaagggaaaagucaccaaguccaucgagcugaacgccccuaauuuucacuaugaagaguguucuugcuacccggauaccggcacagugaugugugugugccgcgacaacuggcacgggagcaauagacccugggucuccuucaaccagaaucuugauuaccagauuggauauaucugcagcggcguuuuuggggacaacccucggcccaaagauggaaagggcucuuguaauccugugacgguggacggcgcugacggggucaaaggauucuccuacaaguauggcaacgggguguggauuggacgcaccaaaagcaauaagcugagaaagggcuuugagaugaucugggaucccaacggguggacagacaccgauaaugacuucucuguuaaacaagauguggucgccauuacagacugguccggcuacagcggauccuuugugcagcauccggaacucaccggccuggauugcauccggccuuguuucuggguugagcuugugcgcgggcugcccagagaaaacacgacaaucuggaccucuggaagcuccauuucuuucugcggcgucgacagcgauaccgcgaauugguccuggccugacggggccgagcuccccuuuacaaucgauaaguga

SEQ ID NO: 208116 - RNA, 1413 nt, Artificial Sequence
  derived and/or modified CDS sequence (opt5) from neuraminidase__InfluenzaA__ABV29747
augaaccccaaucagaagaucauuaccaucggcagcauuuccaucgccauugggaucaucucucugaugcuccaaauuggaaacaucauuagcaucugggcuucccacucuauucagacaggcagccagaaucauacggggaucugcaaccagagaauuaucaccuacgagaauagcacaugggugaaccacaccuaugucucuaucaauaacacaaauguuguggccggaaaagacaagaccagcgugacacuggcgggcaacuccagccuuuguucuauuuccgggugggcuaucuacaccaaagauaauagcauucggaucggaucuaagggcgacgucuucgugauucgcgaaccuuuuaucuccugcagccaucuggaguguagaacguucuuucucacccaaggcgcccugcuuaacgauaaacacucuaaugggacaguuaaggaccgguccccguaucgcgcccugaugagcugcccccucggagaagcuccuucccccuacaacucuaaguucgagagcguggccugguccgcuagcgccugucaugauggcaugggguggcugaccaucggaauuucuggcccugacaauggggcggucgccgugcugaaauauaacggaaucauuacagaaaccaucaaguccuggaaaaagcggauucucagaacgcaggagagcgagugcguuugugugaacggcucuugcuuuacaaucaugaccgauggccccagcaauggggcugccuccuacaaaaucuucaagauugaaaagggaaaagucacaaagucuaucgagcugaacgcuccuaauuuucacuaugaagaguguagcugcuacccggacaccggcaccgugaugugugugugccgcgauaacuggcacggguccaauagacccugggucagcuucaaccagaaucuugacuaccagauuggauauaucugcucuggcguuuuuggggauaacccucggcccaaagacggaaagggcuccuguaauccugugacaguggauggcgccgacggggucaaaggauucagcuacaaguauggcaacgggguguggauuggacgcacgaaaucuaauagacugcggaagggcuuugagaugaucugggaccccaacggguggaccgauacagacuccgauuucagcguucgccaagacguggucgcgauuaccgauugguccggcuacucuggauccuuugugcagcauccggaacucacaggccuggacugcaucagaccuuguuucuggguugagcuugugcgggggcugccccgcgaaaauaccacgaucuggacauccggaucuagcauuuccuucugcggcgucgauagcgacaccgccaacuggucuuggccugauggggcugagcuccccuuuaccaucgacaaguga

SEQ ID NO: 208117 - RNA, 1413 nt, Artificial Sequence; identical to SEQ ID NO: 208102
  derived and/or modified CDS sequence (opt5) from neuraminidase__InfluenzaA__ABV29769

SEQ ID NO: 208118 - RNA, 1413 nt, Artificial Sequence
  derived and/or modified CDS sequence (opt5) from neuraminidase__InfluenzaA__ABV29780
augaaccccaaucagaagaucauuaccaucggcagcauuuccaucgccauugggaucaucucucugaugcuccaaauuggaaacaucauuagcaucugggcuucccacucuauucagacaggcagccagaaucauacggggaucugcaaccagagaauuaucaccuacgaaaauuccacaugggugaaccacaccuaugucaauaucaacaauacaaacguugugaccggaaaagacaagacaucugugacccuggccggcaauagcucccuuuguagcauuucugggugggcgaucuacacgaaagauaacuccauucggaucggaagcaagggcgacgucuucgugauucgcgagccuuuuaucucuugcucccaucuggaguguagaaccuucuuucucacacaaggcgcucugcuuaaugauaaacacagcaacgggaccguuaaggaccggucuccguaucgcgcccugauguccugcccccucggagaagccccuagccccuacaauuccaaguucgagucuguggcuuggagcgccuccgcuugucaugauggcaugggguggcugacaaucggaauuagcggcccugacaacggggccgucgcggugcugaaauauaacggaaucauuaccgaaacgaucaagucuuggaaaaagcggauucucagaacacaggaguccgagugcguuugugugaauggcagcugcuuuaccaucaugacagauggccccucugacggggccgcuagcuacaaaaucuucaagauugaaaagggaaaagucaccaaguccaucgagcugaacgccccuaauuuucacuaugaagaguguucuugcuacccggauaccggcacagugaugugugugugccgcgacaacuggcacgggagcaauagacccugggucuccuucaaccagaaucuugauuaccagauuggauauaucugcagcggcguuuuuggggacaacccucggcccaaagauggaaagggcucuuguaauccugugacgguggacggcgcugacggggucaaaggauucuccuacaaguauggcaacgggguguggauuggacgcaccaaaagcucuaagcugagaaagggcuuugagaugaucugggaucccaauggguggacagacaccgauaacgacuucuccguuaaacaagauguggucgccauuacagacuggagcggcuacuccggaucuuuugugcagcauccggaacucaccggccuggauugcauccggccuuguuucuggguugagcuugugcgcgggcugcccagagaaaauacgacaaucuggaccagcggauccucuauuagcuucugcggcgucgacuccgauaccgcgaacuggagcuggccugacggggccgagcuccccuuuacaaucgauaaguga

SEQ ID NO: 208119 - RNA, 1413 nt, Artificial Sequence; identical to SEQ ID NO: 208102
  derived and/or modified CDS sequence (opt5) from neuraminidase__InfluenzaA__ABV29791

SEQ ID NO: 208120 - RNA, 1413 nt, Artificial Sequence; identical to SEQ ID NO: 208102
  derived and/or modified CDS sequence (opt5) from neuraminidase__InfluenzaA__ABV29802

SEQ ID NO: 208121 - RNA, 1410 nt, Artificial Sequence; identical to SEQ ID NO: 207956
  derived and/or modified CDS sequence (opt5) from neuraminidase__InfluenzaA__ABV29824

SEQ ID NO: 208122 - RNA, 1413 nt, Artificial Sequence; identical to SEQ ID NO: 208102
  derived and/or modified CDS sequence (opt5) from neuraminidase__InfluenzaA__ABV29835

SEQ ID NO: 208123 - RNA, 1413 nt, Artificial Sequence
  derived and/or modified CDS sequence (opt5) from neuraminidase__InfluenzaA__ABV29846
augaaccccaaucagaagaucauuaccaucggcagcauuuccaucgccauugggaucaucucucugaugcuccaaauuggaaacaucauuagcaucugggcuucccacucuauucagaucggcagccagaaucauacagggauuugcaaccagagaaucaucacguacgaaaauuccaccugggugaaccacacauaugucaauauuaacaauaccaacguuguggccggaaaagacaagacaucugugacccuggcgggcaauagcucccuuuguagcaucucugggugggcuauuuacacaaaagauaacuccauccggauuggaagcaagggcgacgucuucgugauccgcgagccuuuuaucucuugcucccaucuggaguguagaaccuucuuucucacgcaaggcgcccugcuuaaugauaaacacagcaacgggaccguuaaggaccggucuccguaucgcgcccugauguccugcccccucggagaagcuccuagccccuacaauuccaaguucgagucuguggccuggagcgcuuccgccugucaugauggcaugggguggcugacaauuggaaucagcggcccugacaacggggcggucgccgugcugaaauauaacggaauuaucaccgaaacaauuaagucuuggaaaaagagaauccuccggacccaggaguccgagugcguuugugugaauggcagcugcuuuacgaucaugacagauggccccucuaacggggcugccagcuacaaaauuuucaagaucgaaaagggaaaagucaccaaguccauugagcugaaugcuccuaacuuucacuaugaagaguguucuugcuacccggacacaggcaccgugaugugugugugccgcgauaauuggcacgggagcaacagacccugggucuccuucaaucagaaccuugacuaccagguuggauauaucugcagcggcguguuuggggauaauccucggcccaaagacggaaagggcucuuguaacccuaugaccguggauggcgccgacggggucaaaggauucuccuacaaguauggcaaugggguguggauuggacgcacaaaaagcaacaagcugagaaagggcuuugagaugaucugggaccccaauggguggacggauaccgacucugauuucuccguuaaacaagacguggucgcgauuacagauuggagcggcuacuccggaucuuuugugcagcauccggaacucaccggccuggacugcauccggccuuguuucuggguugagcuugugcgcgggcugcccagagaaaacacaaccaucuggacgagcggauccucuauuagcuucugcggcgucgauuccgacacagccaauuggagcuggccugauggggcugagcuccccuuuaccaucgacaaguga

SEQ ID NO: 208124 - RNA, 1413 nt, Artificial Sequence
  derived and/or modified CDS sequence (opt5) from neuraminidase__InfluenzaA__ABV29879
augaaccccaaucagaagaucauuaccaucggcagcauuuccaucgccauugggaucaucucucugaugcuccaaauuggaaacaucauuagcaucugggcuucccacucuauucagacaggcagccagaaucauacggggaucugcaaccagagaauuaucaccuacgagaauagcacaugggugaaccacaccuaugucucuaucaauaacacaaauguuguggccggaaaagacaagaccagcgugacacuggcgggcaacuccagccuuuguucuauuuccgggugggcuaucuacaccaaagauaauagcauucggaucggaucuaagggcgacgucuucauuauccgcgaaccuuuuaucuccugcagccaucuggaguguagaacguucuuucucacccaaggcgcccugcuuaacgauaaacacucuaaugggacagugaaggaccgguccccguaucgcgcccugaugagcugcccccucggagaagcuccuucccccuacaacucuaaguucgagagcguugccugguccgcuagcgccugucaugauggcaugggguggcugaccauuggaaucucuggcccugacaauggggcgguggccguccugaaauauaacggaauuaucacagaaaccauuaaguccuggaaaaagagaauccuccggacgcaggagagcgagugcguguguguuaacggcucuugcuuuacaaucaugaccgauggccccagcaauggggcugccuccuacaaaauuuucaagaucgaaaagggaaaagugacaaagucuauugagcugaacgcuccuaauuuucacuaugaagaguguagcugcuacccggacaccggcaccgucaugugugugugccgcgauaacuggcacggguccaauagacccugggugagcuucaaccagaaucuugacuaccagaucggauauauuugcucuggcgucuuuggggauaacccucggcccaaagacggaaagggcuccuguaauccuguuacaguggauggcgccgacggggugaaaggauucagcuacaaguauggcaacggggucuggaucggacgcacgaaaucuaauagacugcggaagggcuuugagaugauuugggaccccaacggguggaccgauacagacuccgauuucagcgugaagcaagacguuguggcgaucaccgauugguccggcuacucuggauccuuuguccagcauccggaacucacaggccuggacugcauccgcccuuguuucuggguggagcuuguuagagggcugccccgggaaaauaccacgauuuggacauccggaucuagcaucuccuucugcggcguggauagcgacaccgccaacuggucuuggccugauggggcugagcuccccuuuaccauugacaaauga

SEQ ID NO: 208125 - RNA, 1413 nt, Artificial Sequence; identical to SEQ ID NO: 208102
  derived and/or modified CDS sequence (opt5) from neuraminidase__InfluenzaA__ABV29890

SEQ ID NO: 208126 - RNA, 1410 nt, Artificial Sequence; identical to SEQ ID NO: 207956
  derived and/or modified CDS sequence (opt5) from neuraminidase__InfluenzaA__ABV29901

SEQ ID NO: 208127 - RNA, 1410 nt, Artificial Sequence
  derived and/or modified CDS sequence (opt5) from neuraminidase__InfluenzaA__ABV29912
augaaccccaaucagaagaucauuaccaucggcagcgugucccugacaauuucuacgaucugcuucuuuaugcaaauugccauccucaucaccacagucacccugcacuucaaacaguacgaguuuaacagcccuccgaauaaccagguuaugcuuugugaacccacaauuaucgagagaaauauuaccgaaaucguguaucugacaaacaccacgauugagaaggaaaucugcccuaaacucgcugaguaccggaauugguccaagccccagugugacauuaccggguucgccccuuuuucuaaagauaacagcauccgccuguccgcgggaggcgacaucugggugacaagagagcccuaugucucuugcgauccugacaaguguuaccaauucgcucuugggcagggaaccacacugaauaacgugcauagcaaugauaccguucacgaccggacgccguaucgcacacuccugaugaacgaacugggcgugcccuuucaucucgggaccaagcaggucugcauugccugguccagcagcuccugucacgauggaaaagccuggcugcaugugugcguuacaggcgacgauaagaaugcuaccgccagcuucaucuacaacggcagacuuguggacucuauugucuccuggagcaaagauauccugcggacccaggagucugaauguauuugcaucaaugggacauguacgguggugaugaccgacggauccgcuagcggcaaggccgauacaaaaauccucuuuauugaggaggggaagaucguccacaccuccacacugucuggaagcgcgcaacacguugaagagugcuccugcuauccucgcuaccccggcgugagaugugugugccgggacaacuggaaggggagcaaccgcccuauugucgacaucaauauuaaagauuacucuaucguguccagcuauguuuguucuggacuugugggcgacacccccagaaagaacgauagcuccucuagcucccauugccuggacccgaauaacgaagagggcgggcacggagucaaaggcugggccuucgaugacgggaaugauguguggaugggacggacgaucagcgaaaagcuccgccugggcuacgagacauuuaaaguuauugagggguggucuaacccuaauuccaagcugcagaucaacagacaggugauugucgacaaaggaaaucggagcggcuauucuggcaucuucuccguggaagggaagucuuguauuaaccgcugcuuuuacgucgagcucaucagaggacggaaggaagagaccgaagugcuguggaccuccaauucuauuguuguguucuguggcacaagcgggaccuauggaacaggcuccuggcccgauggggcugacaucaaccuuaugccuaucuga

SEQ ID NO: 208128 - RNA, 1413 nt, Artificial Sequence
  derived and/or modified CDS sequence (opt5) from neuraminidase__InfluenzaA__ABV29923
augaaccccaaucagaagaucauuaccaucggcagcauuuccaucgccauugggaucaucucucugaugcuccaaauuggaaacaucauuagcaucugggcuucccacucuauucagacaggcagccagaaucauacggggaucugcaaccagagaauuaucaccuacgaaaauuccacaugggugaaccacaccuaugucaauaucaacaauacaaacguuguggccggaaaagacaagaccucugugacacuggcgggcaauagcucccuuuguagcauuucugggugggcuaucuacaccaaagauaacuccauucggaucggaagcaagggcgacgucuucgugauucgcgagccuuuuaucucuugcucccaucuggaguguagaacguucuuucucacccaaggcgcccugcuuaaugauaaacacagcaacgggacaguuaaggaccggucuccguaucgcgcccugauguccugcccccucggagaagcuccuagccccuacaauuccaaguucgagucuguggccuggagcgcuuccgccugucaugauggcaugggguggcugaccaucggaauuagcggcccugacaacggggcggucgccgugcugaaauauaacggaaucauuacagaaaccaucaagucuuggaaaaagcggauucucagaacgcaggaguccgagugcguuugugugaauggcagcugcuuuacaaucaugaccgauggccccucuaacggggcugccagcuacaaaaucuucaagauugaaaagggaaaagucacaaaguccaucgagcugaaugcuccuaacuuucacuaugaagaguguucuugcuacccggacaccggcaccgugaugugugugugccgcgauaauuggcacgggagcaacagacccugggucuccuucaaucagaaccuugacuaccagguuggauauauuugcagcggcguguuuggggauaauccucggcccaaagacggaaagggcucuuguaacccuaugacaguggauggcgccgacggggucaaaggauucuccuacaaguauggcaaugggguguggaucggacgcacgaaaagcaacaagcugagaaagggcuuugagaugauuugggaccccaauggguggaccgauacagacucugauuucuccguuaaacaagacguggucgcgaucaccgauuggagcggcuacuccggaucuuuugugcagcauccggaacucacaggccuggacugcauucggccuuguuucuggguugagcuugugcgcgggcugcccagagaaaacgccaccaucuggacgagcggauccucuaucagcuucugcggcgucgauuccgacacagcuaauuggagcuggccugauggggccgagcuccccuuuaccauugacaaguga

SEQ ID NO: 208129 - RNA, 1410 nt, Artificial Sequence
  derived and/or modified CDS sequence (opt5) from neuraminidase__InfluenzaA__ABV29934
augaaccccaaucagaagaucauuaccaucggcagcgugucccugacaauuucuacgaucugcuucuuuaugcaaauugccauccucaucaccacagucacccugcacuucaaacaguacgaguuuaacagcccuccgaauaaccagguuaugcuuugugaacccacaauuaucgagagaaauauuaccgaaaucguguaucugacaaacaccacgauugagaaggaaaucugcccuaaacucgcugaguaccggaauugguccaagccccagugugacauuaccggguucgccccuuuuucuaaagauaacagcauccgccuguccgcgggaggcgacaucugggugacaagagagcccuaugucucuugcgauccugacaaguguuaccaauucgcucuugggcagggaaccacacugaauaacgugcauagcaaugauaccguucgggaccgcacgccguauagaacacuccugaugaacgaacugggcgugcccuuucaccucgggaccaagcaggucugcauugccugguccagcagcuccugucaugauggaaaagccuggcugcacgugugcaucacaggcgacgauaagaaugcuaccgccagcuucauuuacaacggccggcuuguugacucuaucguguccuggagcaaagagauucugcgcacccaggaaucugagugugucugcaucaaugggacauguacgguggugaugaccgauggauccgcuagcggcaaggccgacacaaaaauccucuuuauugaggaagggaagaucguccauaccuccacacugucuggaagcgcgcaacacguugaggaaugcuccugcuauccuagauaccccggcgugcggugugugugccgcgauaacuggaaggggagcaacagaccuauugucgacaucaauauuaaagaccacucuaucguguccagcuacguuuguucuggacuugugggcgauacgccccggaagaacgacagcuccucuagcucccauugccuggauccgaauaacgaggaaggcgggcacggagucaaaggcugggccuucgacgaugggaaugacguguggaugggacgcaccaucagcgagaagucuagacucggcuaugagacauuuaaaguuauugaagggugguccaacccuaagagcaaacugcagaucaaucgccaggugauugucgaucggggaaacagaaccggcuacucuggcaucuucuccguggaggggaagucuuguauuaaucggugcuuuuaugucgaacugaucagaggacgcaaggaggaaaccgaggugcucuggacauccaacucuauuguuguguucuguggcaccagcgggacauacggaacgggcuccuggcccgacggggcugauaucaaucugaugccuaucuga

SEQ ID NO: 208130 - RNA, 1413 nt, Artificial Sequence; identical to SEQ ID NO: 208115
  derived and/or modified CDS sequence (opt5) from neuraminidase__InfluenzaA__ABV29945

SEQ ID NO: 208131 - RNA, 1413 nt, Artificial Sequence
  derived and/or modified CDS sequence (opt5) from neuraminidase__InfluenzaA__ABV29956
augaaccccaaucagaagaucauuaccaucggcagcauuuccaucgccauugggaucaucucucugaugcuccaaauuggaaacaucauuagcaucugggcuucccacucuauucagacaggcagccagaaucauacggggaucugcaaccagagaauuaucaccuacgagaauagcacaugggugaaccacaccuaugucucuaucaauaacacaaauguuguggccggaaaagacaagaccagcgugacacuggcgggcaacuccagccuuuguucuauuuccgggugggcuaucuacaccaaagauaauagcauucggaucggaucuaagggcgacgucuucgugauucgcgaaccuuuuaucuccugcagccaucuggaguguagaacguucuuucucacccaaggcgcccugcuuaacgauaaacacucuaaugggacaguuaaggaccgguccccguaucgcgcccugaugagcugcccccucggagaagcuccuucccccuacaacucuaaguucgagagcguggccugguccgcuagcgccugucaugauggcaugggguggcugaccaucggaauuucuggcccugacaauggggcggucgccgugcugaaauauaagggaaucauuacagaaaccaucaaauccuggaagaaacggauucucagaacgcaggagagcgagugcguuugugugaacggcucuugcuuuacaaucaugaccgauggccccagcaacggggcugccuccuacaagaucuucaagauugaaaaaggaaaggucacaaaaucuaucgagcugaaugcuccuaacuuucacuaugaagaguguagcugcuacccggacaccggcaccgugaugugugugugccgcgauaauuggcacggguccaacagacccugggucagcuucaaucagaaccuugacuaccagauuggauauaucugcucuggcguuuuuggggauaauccucggcccaaggacggaaaaggcuccuguaacccugugacaguggauggcgccgacggggucaagggauucagcuacaaauauggcaaugggguguggauuggacgcacgaagucuaacagacugcggaagggcuuugagaugaucugggaccccaauggguggaccgauacagacuccgauuucagcguuaaacaagacguggucgcgauuaccgauugguccggcuacucuggauccuuugugcagcauccggaacucacaggccuggacugcauccgcccuuguuucuggguugagcuugugagagggcugccccgggaaaacaccacgaucuggacauccggaucuagcauuuccuucugcggcgucgauagcgacaccgccaauuggucuuggccugauggggcugagcuccccuuuaccaucgacaaguga

SEQ ID NO: 208132 - RNA, 1413 nt, Artificial Sequence
  derived and/or modified CDS sequence (opt5) from neuraminidase__InfluenzaA__ABV29989
augaaccccaaucagaagaucauuaccaucggcagcauuuccaucgccauugggaucaucucucugaugcuccaaauuggaaacaucauuagcaucugggcuucccacucuauucagacaggcagccagaaucauacggggaucugcaaccagagaauuaucaccuacgagaauagcacaugggugaaccacaccuaugucucuaucaauaacacaaauguuguggccggaaaagacaagaccagcgugacacuggcgggcaacuccagccuuuguucuauuuccgggugggcuaucuacaccaaagauaauagcauucggaucggaucuaagggcgacgucuucgugaugcgcgaaccuuuuauuuccugcagccaucuggaguguagaacguucuuucucacccaaggcgcccugcuuaacgauaaacacucuaaugggacaguuaaggaccgguccccguaucgcgcccugaugagcugcccccucggagaagcuccuucccccuacaacucuaaguucgagagcguggccugguccgcuagcgccugucaugauggcaugggguggcugaccaucggaaucucuggcccugacaauggggcggucgccgugcugaaauauaacggaauuaucacagaaaccauuaaguccuggaaaaagagaauccuccggacgcaggagagcgagugcguuugugugaacggcucuugcuuuacaauuaugaccgauggccccagcaauggggcugccuccuacaaaaucuucaagaucgaaaagggaaaagucacaaagucuauugagcugaacgcuccuaauuuucacuaugaagaguguagcugcuacccggacaccggcaccgugaugugugugugccgcgauaacuggcacggguccaauagacccugggucagcuucaaccagaaucuugacuaccagaucggauauauuugcucuggcguuuuuggggauaacccucggcccaaagacggaaagggcuccuguaauccugugacaguggauggcgccgacggggucaaaggauucagcuacaaguauggcaacgggguguggaucggacgcacgaaaucuaauagacugcggaagggcuuugagaugauuugggaccccaacggguggaccgauacagacuccgauuucagcguuaagcaagacguggucgcgaucaccgauugguccggcuacucuggauccuuugugcagcauccggaacucacaggccuggacugcauucgcccuuguuucuggguugagcuugugagagggcugccccgggaaaauaccacgaucuggacauccggaucuagcaucuccuucugcggcgucgauagcgacaccgccaacuggucuuggccugauggggcugagcuccccuuuaccauugacaaauga

SEQ ID NO: 208133 - RNA, 1413 nt, Artificial Sequence; identical to SEQ ID NO: 208102
  derived and/or modified CDS sequence (opt5) from neuraminidase__InfluenzaA__ABV30000

SEQ ID NO: 208134 - RNA, 1413 nt, Artificial Sequence; identical to SEQ ID NO: 208102
  derived and/or modified CDS sequence (opt5) from neuraminidase__InfluenzaA__ABV30011

SEQ ID NO: 208135 - RNA, 1413 nt, Artificial Sequence; identical to SEQ ID NO: 208102
  derived and/or modified CDS sequence (opt5) from neuraminidase__InfluenzaA__ABV30022

SEQ ID NO: 208136 - RNA, 1413 nt, Artificial Sequence
  derived and/or modified CDS sequence (opt5) from neuraminidase__InfluenzaA__ABV30044
augaaccccaaucagaagaucauuaccaucggcagcauuuccaucgccauugggaucaucucucugaugcuccaaauuggaaacaucauuagcaucugggcuucccacucuauucagacaggcagccagaaucauacggggaucugcaaccagagaauuaucaccuacgaaaauuccacaugggugaaccacaccuaugucaauaucaacaauacaaacguuguggccggaaaagacaagaccucuggcacacuggcggggaauagcucccuuuguagcauuucuggaugggcuaucuacaccaaagauaacuccauucggaucggcagcaagggcgacguguucgucauucgcgagccuuuuaucucuugcucccaucuggaguguagaacguucuuucucacccaaggggcccugcuuaaugauaaacacagcaacggaacagugaaggaccggucuccguaucgcgcccugauguccugcccccucggcgaagcuccuagccccuacaauuccaaguucgagucuguugccuggagcgcuuccgccugucaugaugggaugggauggcugaccaucggcauuagcgggccugacaacggagcgguggccguccugaaauauaacggcaucauuacagaaaccaucaagucuuggaaaaagcggauucucagaacgcaggaguccgagugcguguguguuaauggcagcugcuuuacaaucaugaccgaugggcccucuaacggagcugccagcuacaaaaucuucaagauugaaaagggcaaagugacaaaguccaucgagcugaaugcuccuaacuuucacuaugaagaguguucuugcuacccggacaccgggaccgucaugugugugugccgcgauaauuggcacggaagcaacagacccuggguguccuucaaucagaaccuugacuaccaggucggcuauauuugcagcgggguuuuuggagauaauccucggcccaaagacggcaagggcucuuguaacccuaugacaguggauggggccgacggagugaaaggcuucuccuacaaguaugggaauggagucuggaucggccgcacgaaaagcaacaagcugagaaagggguuugagaugauuugggaccccaauggcuggaccgauacagacucugauuucuccgugaaacaagacguuguggcgaucaccgauuggagcggauacuccggcucuuuuguccagcauccggaacucacagggcuggacugcauucggccuuguuucuggguggagcuuguucgcggacugcccagagaaaacaccacgaucuggacaagcggcuccucuaucagcuucugcgggguggauuccgacaccgccaauuggagcuggccugauggagcugagcuccccuuuaccauugacaaguga

SEQ ID NO: 208137 - RNA, 1413 nt, Artificial Sequence
  derived and/or modified CDS sequence (opt5) from neuraminidase__InfluenzaA__ABV30055
augaaccccaaucagaagaucauuaccaucggcagcauuuccaucgccauugggaucaucucucugaugcuccaaauuggaaacaucauuagcaucugggcuucccacucuauucagacaggcagccagaaucauacggggaucugcaaccagagaauuaucaccuacgaaaauuccacaugggugaaccacaccuaugucaauaucaacaauacaaacguuguggccggaaaagacaagaccucugugacacuggcgggcaauagcucccuuuguagcauuucugggugggcuaucuacaccaaagauaacuccauucggaucggaagcaagggcgacgucuucgugauucgcgagccuuuuaucucuugcucccaucuggaguguagaacguucuuucucacccaaggcgcccugcuuaaugauaaacacagcaacgggacaguuaaggaccggucuccguaucgcgcccugauguccugcccccucggagaagcuccuagccccuacaauuccaaguucgagucuguggccuggagcgcuuccgccugucaugauggcaugggguggcugaccaucggaauuagcggcccugacaacggggcggucgccgugcugaaauauaacggaaucauuacagaaaccaucaagucuuggaaaaagcggauucucagaacgcaggaguccgagugcguuugugugaauggcagcugcuuuacaaucaugaccgauggccccucuaacggggcugccagcuacaaaaucuucaagauugaaaagggaaaagucacaaaguccaucgagcugaaugcuccuaacuuucacuaugaagaguguucuugcuacccggacaccggcaccgugaugugugugugccgcgauaauuggcacgggagcaacagacccugggucuccuucaaucagaaccuugacuaccagguuggauauauuugcagcggcguguuuggggauaauccucggcccaaagacggaaagggcucuuguaacccuaugacaguggauggcgccgacggggucaaaggauucuccuacaaguauggcaaugggguguggaucggacgcacgaaaagcaacaagcugagaaagggcuuugagaugauuugggaccccaauggguggaccgauacagacucugauuucuccguuaaacaagacguggucgcgaucaccgauuggagcggcuacuccggaucuuuugugcagcauccggaacucacaggccuggacugcauucggccuuguuucuggguugagcuugugcgcgggcugcccagagaaaacaccacgaucuggacaagcggauccucuaucagcuucugcggcgucgauuccgacaccgccaauuggagcuggccugauggggcugagcuccccuuuaccauugacaaguga

SEQ ID NO: 208138 - RNA, 1410 nt, Artificial Sequence
  derived and/or modified CDS sequence (opt5) from neuraminidase__InfluenzaA__ABV30077
augaaccccaaucagaagaucauuaccaucggcagcgugucccugacaauuucuacgaucugcuucuuuaugcaaaccgccauucucaucacaaccgucacacugcacuucaaacaguacgaguuuaacagcccuccgaauaaccagguuaugcuuugugaacccaccaucauugagagaaauaucacagaaauuguguaucugaccaacacgaccaucgagaaggaaauuugcccuaaacucgcugaguaccggaauugguccaagccccagugugacaucacaggguucgccccuuuuucuaaagauaacagcauucgccuguccgcgggaggcgacaucugggugaccagagagcccuaugucucuugcgauccugacaaguguuaccaauucgcucuugggcagggaacaacccugaauaacgugcauagcaaugauacgguucgggaccgcacaccguauagaacccuccugaugaacgaacugggcgugcccuuucaccucgggacaaagcaggucugcaucgccugguccucuagcuccugucaugauggaaaagccuggcugcacgugugcauuaccggcgacgauaagaaugcuaccgccagcuucaucuacaacggccggcuuguugacucuauuguguccuggagcaaagagauccugcgcacacaggaaucugagugugucugcauuaaugggacguguaccguggugaugacagauggauccgcuagcggcaaggccgacaccaaaauccucuuuaucgaggaagggaagauuguccauacauccacccugucuggaagcgcgcaacacguugaggaaugcuccugcuauccuagauaccccggcgugcggugugugugccgcgauaacuggaaggggagcaacagaccuaucgucgacauuaauaucaaagaccacucuauuguguccagcuacguuuguucuggacuugugggcgauacgccccggaagaacgacagcuccucuagcucccauugccuggauccgaauaacgaggaaggcgggcacggagucaaaggcugggccuucgacgaugggaaugacguguggaugggacgcacaaucagcgagaagucuagacucggcuaugagaccuuuaaaguuaucgaagggugguccaacccuaagagcaaacugcagauuaaucgccaggugaucgucgaucggggaaacagaucuggcuacuccggcauuuucagcguggaggggaaguccuguaucaaucggugcuuuuaugucgaacugauuagaggacgcaaggaggaaaccgaggugcucuggacaucuaacagcaucguuguguucuguggcaccuccgggacauacggaacgggcucuuggcccgacggggcugauauuaaucugaugccuaucuga

SEQ ID NO: 208139 - RNA, 1413 nt, Artificial Sequence; identical to SEQ ID NO: 208102
  derived and/or modified CDS sequence (opt5) from neuraminidase__InfluenzaA__ABV30088

SEQ ID NO: 208140 - RNA, 1413 nt, Artificial Sequence; identical to SEQ ID NO: 208102
  derived and/or modified CDS sequence (opt5) from neuraminidase__InfluenzaA__ABV30099

SEQ ID NO: 208141 - RNA, 1413 nt, Artificial Sequence
  derived and/or modified CDS sequence (opt5) from neuraminidase__InfluenzaA__ABV30110
augaaccccaaucagaagaucauuaccaucggcagcauuuccaucgccauugggaucaucucucugaugcuccaaauuggaaacaucauuagcaucugggcuucccacucuauucagacaggcagccagaaucauacggggaucugcaaccagagaauuaucaccuacgaaaauuccacaugggugaaccacaccuaugucucuaucaauaacacaaauguuguggccggaaaagacaagaccagcgugacacuggcgggcaacuccagccuuuguucuauuuccgggugggcuaucuacaccaaagauaauagcauucggaucggaucuaagggcgacgucuucgugauucgcgagccuuuuaucuccugcagccaucuggaguguagaacguucuuucucacccaaggcgcccugcuuaacgauaaacacucuaaugggacaguuaaggaccgguccccguaucgcgcccugaugagcugcccccucggagaagcuccuucccccuacaacucuaaguucgagagcguggccugguccgcuagcgccugucaugauggcaugggguggcugaccaucggaauuucuggcccugacaauggggcggucgccgugcugaaauauaacggaaucauuacaggcaccaucaaguccuggaaaaagcggauucucagaacgcaggaaagcgagugcguuugugugaacggcucuugcuuuacaaucaugaccgaugggcccagcaauggagcugccuccuacaaaaucuucaagauugagaagggcaaagucacaaagucuaucgaacugaacgcuccuaauuuucacuaugaggaauguagcugcuacccggacaccgggaccgugaugugugugugccgcgauaacuggcacggauccaauagacccugggucagcuucaaccagaaucuugacuaccagauuggcuauaucugcucugggguuuuuggagauaacccucggcccaaagacggcaagggcuccuguaauccugugacaguggauggggccgacggagucaaaggcuucagcuacaaguaugggaacggaguguggauuggccgcacgaaaucuaauagacugcggaagggguuugagaugaucugggaccccaacggcuggaccgauacagacuccgauuucagcguuaagcaagacguggucgcgauuaccgauugguccggauacucuggcagcuuugugcagcauccggagcucacagggcuggacugcauccgcccuuguuucuggguugaacuugugagaggacugccccgggagaauaccacgaucuggacauccggcucuagcauuuccuucugcggggucgauagcgacaccgccaacuggucuuggccugauggagcugaacuccccuuuaccaucgacaaauga

SEQ ID NO: 208142 - RNA, 1413 nt, Artificial Sequence; identical to SEQ ID NO: 208102
  derived and/or modified CDS sequence (opt5) from neuraminidase__InfluenzaA__ABV30132

SEQ ID NO: 208143 - RNA, 1413 nt, Artificial Sequence
  derived and/or modified CDS sequence (opt5) from neuraminidase__InfluenzaA__ABV30143
augaaccccaaucagaagaucauuaccaucggcagcauuuccaucgccauugggaucaucucucugaugcuccaaauuggaaacaucauuagcaucugggcuucccacucuauucagacaggcagccagaaucauacggggaucugcaaccagagaauuaucaccuacgaaaauuccacaugggugaaccacaccuaugucaauaucaacaauacaaacguuguggccggaaaagacaagaccucugugacacuggcgggcaauagcucccuuuguagcauuucugggugggcuaucuacaccaaagauaacuccauucggaucggaagcaagggcgacgucuucgugauucgcgagccuuuuaucucuugcucccaucuggaguguagaacguucuuucucacccaaggcgcccugcuuaaugauaaacacagcaacgggacaguuaaggaccggucuccguaucgcgcccugauguccugcccccucggagaagcuccuagccccuacaauuccaaguucgagucuguggccuggagcgcuuccgccugucaugauggcaugggguggcugaccaucggaauuagcggcccugacaacggggcggucgccgugcugaaauauaacggaaucauuacagaaaccaucaagucuuggaaaaagcggauucucagaacgcaggaguccgagugcguuugugugaauggcagcugcuuuacaaucaugaccgauggccccucuaacggggcugccagcuacaaaaucuucaagauugaaaagggaaaagucacaaaguccaucgagcugaaugcuccuaacuuucacuaugaagaguguucuugcuacccggacaccggcaccgugaugugugugugccgcgauaauuggcacgggagcaacagacccugggucuccuucaaucagaaccuugacuaccagauuggauauaucugcagcggcguuuuuggggauaauccucggcccaaagacggaaagggcucuuguaacccugugacaguggauggcgccgacggggucaaaggauucuccuacaaguauggcaaugggguguggauuggacgcacgaaaagcaacagacugcggaagggcuuugagaugaucugggaccccaauggguggaccaacacagauucugacuucuccguuaagcaagauguggucgcgauuaccgacuggagcggcuacuccggaucuuuugugcagcauccggaacucacaggccuggauugcauccgcccuuguuucuggguugagcuugugagagggcugccccgggaaaauaccacgaucuggacaagcggauccucuauuagcuucugcggcgucgacuccgauaccgccaacuggagcuggccugacggggcugagcuccccuuuaccaucgauaaauga

SEQ ID NO: 208144 - RNA, 1413 nt, Artificial Sequence; identical to SEQ ID NO: 208128
  derived and/or modified CDS sequence (opt5) from neuraminidase__InfluenzaA__ABV30154

SEQ ID NO: 208145 - RNA, 1413 nt, Artificial Sequence
  derived and/or modified CDS sequence (opt5) from neuraminidase__InfluenzaA__ABV30165
augaaccccaaucagaagaucauuaccaucggcagcauuuccaucgccauugggaucaucucucugaugcuccaaauuggaaacaucauuagcaucugggcuucccacucuauucagacaggcagccagaaucauacggggaucugcaaccagagaauuaucaccuacgaaaauuccacaugggugaaccacaccuaugucucuaucaauaacacaaauguuguggccggaaaagacaagaccagcgugacacuggcgggcaaccuuucccuguguagcauuucugggugggcuaucuacaccaaagauaauuccauucggaucggaagcaagggcgacgucuucgugauucgcgagccuuuuaucucuugcucccaucucgaguguagaacguucuuucugacccaaggcgcccuucugaacgauaaacacagcaaugggacaguuaaggaccggucuccguaucgcgcccucauguccugcccccugggagaagcuccuagccccuacaacuccaaguucgagucuguggccuggagcgcuuccgccugucaugauggcaugggguggcugaccaucggaauuagcggcccugacaauggggcggucgccgugcucaaauauaacggaaucauuacagaaaccaucaagucuuggaaaaagcggauucugagaacgcaggaguccgagugcguuugugugaacggcagcugcuuuacaaucaugaccgauggccccucuaauggggcugccagcuacaaaaucuucaagauugaaaagggaaaagucacaaaguccaucgagcuuaacgcuccuaauuuucacuaugaagaguguucuugcuacccggacaccggcaccgugaugugugugugccgcgauaacuggcacgggagcaauagacccugggucuccuucaaccagaaucuggacuaccagauuggauauaucugcagcggcguuuuuggggauaacccucggcccaaagacggaaagggcucuuguaauccugugacaguggauggcgccgacggggucaaaggauucuccuacaaguauggcaacgggguguggauuggacgcacgaaaagcaauagacuccggaagggcuuugagaugaucugggaccccaacggguggaccgauacagacucugauuucuccguuaagcaagacguggucgcgauuaccgauuggagcggcuacuccggaucuuuugugcagcauccggaacugacaggccuugacugcauccgcccuuguuucuggguugagcuggugagagggcucccccgggaaaauaccacgaucuggacaagcggauccucuauuagcuucugcggcgucgauuccgacaccgccaacuggagcuggccugauggggcugagcugcccuuuaccaucgacaaauga

SEQ ID NO: 208146 - RNA, 1413 nt, Artificial Sequence; identical to SEQ ID NO: 208102
  derived and/or modified CDS sequence (opt5) from neuraminidase__InfluenzaA__ABV30187

SEQ ID NO: 208147 - RNA, 1413 nt, Artificial Sequence; identical to SEQ ID NO: 208102
  derived and/or modified CDS sequence (opt5) from neuraminidase__InfluenzaA__ABV30198

SEQ ID NO: 208148 - RNA, 1410 nt, Artificial Sequence; identical to SEQ ID NO: 207956
  derived and/or modified CDS sequence (opt5) from neuraminidase__InfluenzaA__ABV30209

SEQ ID NO: 208149 - RNA, 1410 nt, Artificial Sequence; identical to SEQ ID NO: 208138
  derived and/or modified CDS sequence (opt5) from neuraminidase__InfluenzaA__ABV30220

SEQ ID NO: 208150 - RNA, 1410 nt, Artificial Sequence; identical to SEQ ID NO: 208138
  derived and/or modified CDS sequence (opt5) from neuraminidase__InfluenzaA__ABV30231

SEQ ID NO: 208151 - RNA, 1410 nt, Artificial Sequence
  derived and/or modified CDS sequence (opt5) from neuraminidase__InfluenzaA__ABV30264
augaaccccaaucagaagaucauuaccaucggcagcgugucccugacaauuucuacgaucugcuucuuuaugcaaauugccauccucaucaccacagucacccugcacuucaaacaguacgaguuuagcuccccuccgaacaaucagguuaugcuuugugaacccacaauuaucgagagaaacauuaccgaagugguguaucugacaaauaccacgaucgagaaggaaauuugcccuaaacucgcugaguaccggaacuggucuaagccccagugugacaucaccggguucgccccuuuuagcaaagauaauuccauucgccugucugcgggaggcgacaucugggucacaagagagcccuaugugagcugcgauccugacaaguguuaccaauucgcucuugggcagggaaccacacugaacaauguucauuccaacgauaccgugcacgaccggacgccguaucgcacacuccugaugaaugaacugggcguccccuuucaucucgggaccaaacaggugugcaucgccuggucuagcuccagcugucacgauggaaaggccuggcugcauguuugcgugacaggcgacgauaagaacgcuaccgccucuuucauuuacaauggcagacuugucgacuccaucgugagcuggucuaaagagauucugcggacccaggaauccgagugugugugcaucaacgggacauguacggucguuaugaccgauggaagcgcuuccggcaaggccgacacaaaaauucucuuuaucgaggaagggaagaucgugcacaccucuacacugagcggauccgcgcaacacguggaggaaugcagcugcuauccucgcuaccccggcgucagaugugugugccgggauaauuggaaggggucuaaccgcccuauuguugacaucaacauuaaagacuacuccaucgugagcagauaugucuguucuggacuugugggcgauacgccccggaagaaugacagcuccucuagcucccauugccuggauccgaacaaugaggaaggcgggcacggaguuaaaggcugggccuucgacgaugggaacgacguguggaugggacgcaccauuagcgagaagucuagauccggcuacgagacauuuaaagucaucgaaggguggagcaauccuaacucuaagcuccagaucaaucgccaggugauugucgaucggggaaacagauccggcuauagcggcaucuucuccguggaggggaaaucuuguauuaaucggugcuuuuacguugaacugaucagaggacgcaaggaggaaaccgaggugcuguggaccagcaacuccauugucguguucuguggcacaucugggaccuauggaacaggcagcuggcccgacggggcugauaucaaucucaugccuauuuga

SEQ ID NO: 208152 - RNA, 1410 nt, Artificial Sequence
  derived and/or modified CDS sequence (opt5) from neuraminidase__InfluenzaA__ABV30275
augaaccccaaucagaagaucauuaccaucggcagcgugucccugacaauuucuacgaucugcuucuuuaugcaaaccgccauucucaucacaaccgucacacugcacuucaaacaguacgaguuuaacagcaccccuaauaaccagguuaugcuuugugaaccgacaaucauugagagaaauaucaccgaaauuguguaucugacgaacaccacaaucgagaaggaaauuugccccaaacucgcugaguaccggaauugguccaagccucagugugacaucaccggguucgcccccuuuucuaaagauaacagcauucgccuguccgcgggaggcgacaucugggugacaagagagccuuaugucucuugcgaucccgacaaguguuaccaauucgcucuugggcagggaaccacgcugaauaacgugcauagcaaugauacaguucgggaccgcaccccuuauagaacacuccugaugaacgaacugggcgugccguuucaccucgggaccaagcaggucugcaucgccugguccagcagcuccugucaugauggaaaagccuggcugcacgugugcauuaccggcgacgauaagaaugcuacagccagcuucaucuacaacggccggcuuguugacucuauuguguccuggagcaaagagauccugcgcacgcaggaaucugagugugucugcauuaaugggaccuguacaguggugaugaccgauggauccgcuagcggcaaggccgacacaaaaauccucuuuaucgaggaagggaagauuguccauaccuccacgcugucuggaagcgcgcaacacguugaggaaugcuccugcuaucccagauacccuggcgugcggugugugugccgcgauaacuggaaggggagcaacagacccaucgucgacauuaauaucaaagaccacucuauuguguccagcuacguuuguucuggacuugugggcgauacaccucggaagaacgacagcuccucuagcucccauugccuggaucccaauaacgaggaaggcgggcacggagucaaaggcugggccuucgacgaugggaaugacguguggaugggacgcaccaucagcgagaagucuagacucggcuaugagaccuuuaaaguuaucgaagggugguccaacccgaagucuaaacugcagauuaaucgccaggugaucgucgaucggggaaacagaucuggcuacuccggcauuuucagcguggaggggaaguccuguaucaaucggugcuuuuaugucgaacugauuagaggacgcaaggaggaaacagaggugcucuggaccucuaacagcaucguuguguucuguggcacauccgggacguacggaaccggcucuuggccugacggggcugauauuaaucugaugcccaucuga

SEQ ID NO: 208153 - RNA, 1413 nt, Artificial Sequence; identical to SEQ ID NO: 208143
  derived and/or modified CDS sequence (opt5) from neuraminidase__InfluenzaA__ABV30297

SEQ ID NO: 208154 - RNA, 1413 nt, Artificial Sequence
  derived and/or modified CDS sequence (opt5) from neuraminidase__InfluenzaA__ABV30308
augaaccccaaucagaagaucauuaccaucggcagcauuuccaucgccauugggaucaucucucugaugcuccaaauuggaaacaucauuagcaucugggcuucccacucuauucagacaggcagccagaaucauacggggaucugcaaccagagaauuaucaccuacgagaauagcacaugggugaaccacaccuaugucucuaucaauaacacaaauguuguggccggaaaagacaagaccagcgugacacuggcgggcaacuccagccuuuguucuauuuccgggugggcuaucuacaccaaagauaauagcauucggaucggaucuaagggcgacgucuucgugauucgcgaaccuuuuaucuccugcagccaucuggaguguagaacguucuuucucacccaaggcgcccugcuuaacgauaaacacucuaaugggacaguuaaggaccgguccccguaucgcgcccugaugagcugcccccucggagaagcuccuucccccuacaacucuaaguucgagagcguggccugguccgcuagcgccugucaugauggcaugggguggcugaccaucggaauuucuggcccugacaauggggcggucgccgugcugaaauauaacggaaucauuacagaaaccaucaaguccuggaaaaagcggauucucagaacgcaggagagcgagugcguuugucugaacggcucuugcuuuacaaucaugaccgauggccccagcaauggggcugccuccuacaaaaucuucaagauugaaaagggaaaagugacaaagucuaucgagcuuaacgcuccuaauuuucacuaugaagaguguagcugcuacccggacaccggcaccgucaugugugugugccgcgauaacuggcacggguccaauagacccugggugagcuucaaccagaaucuggacuaccagauuggauauaucugcucuggcgucuuuggggauaacccucggcccaaagacggaaagggcuccuguaauccuguuacaguggauggcgccgacggggugaaaggauucagcuacaaguauggcaacggggucuggauuggacgcacgaaaucuaauagacuccggaagggcuuugagaugaucugggaccccaacggguggaccgauacagacuccgauuucagcgugaagcaagacguuguggcgauuaccgauugguccggcuacucuggauccuuuguccagcauccggaacugacaggccuugacugcauccgcccuuguuucuggguggagcugguuagagggcucccccgggaaaauaccacgaucuggacauccggaucuagcauuuccuucugcggcguggauagcgacaccgccaacuggucuuggccugauggggcugagcugcccuuuaccaucgacaaauga

SEQ ID NO: 208155 - RNA, 1413 nt, Artificial Sequence
  derived and/or modified CDS sequence (opt5) from neuraminidase__InfluenzaA__ABV30319
augaaccccaaucagaagaucauuaccaucggcagcauuuccaucgccauugggaucaucucucugaugcuccaaauuggaaacaucgugagcauuugggcuucccacucuauccagacaggcagccagaaucauacggggauuugcaaccagagaaucauuaccuacgagaauagcacaugggucaaccacaccuauguuucuaucaauaacacaaaugugguggccggaaaagacaagaccagcgucacacuggcgggcaacuccagccuuuguucuaucuccgggugggcuauuuacaccaaagauaauagcauccggauuggaucuaagggcgacguguucguuauccgcgaaccuuuuauuuccugcagccaucuggaguguagaacguucuuucucacccaaggcgcccugcuuaacgauaaacacucuaaugggacagugaaggaccgguccccguaucgcgcccugaugagcugcccccucggagaagcuccuucccccuacaacucuaaguucgagagcgucgccugguccgcuagcgccugucaugauggcaugggguggcugaccaucggaaucucuggcccugacaauggggcgguggccguucugaaauauaacggaauuaucacagaaaccauuaaguccuggaaaaagagaauccuccggacgcaggagagcgagugcgugugugucaacggcucuugcuuuacaauuaugaccgauggccccagcaauggggcugccuccuacaaaaucuucaagaucgaaaagggaaaagugacaaagucuauugagcugaacgcuccuaauuuucacuaugaagaguguagcugcuacccggacaccggcaccgugaugugugucugccgcgauaacuggcacggguccaauagacccuggguuagcuucaaccagaaucuugacuaccagaucggauauauuugcucuggcguguuuggggauaacccucggcccaaagacggaaagggcuccuguaauccugugacagucgauggcgccgacggggugaaaggauucagcuacaaguauggcaacgggguuuggaucggacgcacgaaaucuaauagacugcggaagggcuuugagaugauuugggaccccaacggguggaccgauacagacuccgauuucagcgugaagcaagacgucguggcgaucaccgauugguccggcuacucuggauccuuuguucagcauccggaacucacaggccuggacugcauucgcccuuguuucuggguggagcuugucagagggcugccccgggaaaauaccacgaucuggacauccggaucuagcaucuccuucugcggcguggauagcgacaccgccaacuggucuuggccugauggggcugagcuccccuuuaccauugacaaauga

SEQ ID NO: 208156 - RNA, 1413 nt, Artificial Sequence; identical to SEQ ID NO: 208143
  derived and/or modified CDS sequence (opt5) from neuraminidase__InfluenzaA__ABV30330

SEQ ID NO: 208157 - RNA, 1413 nt, Artificial Sequence; identical to SEQ ID NO: 208102
  derived and/or modified CDS sequence (opt5) from neuraminidase__InfluenzaA__ABV30341

SEQ ID NO: 208158 - RNA, 1413 nt, Artificial Sequence; identical to SEQ ID NO: 208102
  derived and/or modified CDS sequence (opt5) from neuraminidase__InfluenzaA__ABV30363

SEQ ID NO: 208159 - RNA, 1413 nt, Artificial Sequence; identical to SEQ ID NO: 208102
  derived and/or modified CDS sequence (opt5) from neuraminidase__InfluenzaA__ABV30374

SEQ ID NO: 208160 - RNA, 1410 nt, Artificial Sequence
  derived and/or modified CDS sequence (opt5) from neuraminidase__InfluenzaA__ABV30385
augaaccccaaucagaagaucauuaccaucggcagcgugucccugacaauuucuacgaucugcuucuuuaugcaaauugccauccucaucaccacagucacccugcacuucaaacaguacgaguuuagcccuccgcccaacaaucagguuaugcuuugugaaccuacaauuaucgagagaaacauuaccgaaaucguguaucugacaaauaccacgauugagaaggaaaucugccccaaacucgcugaguaccggaacugguccaagccucagugugacauuaccggguucgcccccuuuucuaaagauaauagcauccgccuguccgcgggaggcgacaucugggugacaagagagccuuaugucucuugcgauccggacaaguguuaccaauucgcucuugggcagggaaccacacugaacaaugugcauagcaacgauaccguucacgaccggacgcccuaucgcacacuccugaugaaugaacugggcgugccuuuucaucucgggaccaagcaggucugcauugccugguccagcagcuccugucacgauggaaaagccuggcugcaugugugcguuacaggcgacgauaagaacgcuaccgccagcuucaucuacaauggcagacuuguggacucuauugucuccuggagcaaagagauccugcggacccaggaaucugagugugugugcauuaacgggacauguacgguggucaugaccgauggauccgcuagcggcaaggccgacacaaaaauccucuuuaucgaggaagggaagauuguucacaccuccacacugucuggaagcgcgcaacacguggaggaaugcuccugcuauccccgcuacccuggcgugagaugugucugccgggauaauuggaaggggagcaaccgccccaucguggacauuaacaucaaagacuacucuauuguuuccagauauguguguagcggacuugucggcgauaccccgcggaagaaugacucuagcuccucuagccauugccuggauccuaacaaugaggaaggcgggcacggagugaaaggcugggccuucgacgaugggaacgacguuuggaugggacgcacgaucuccgagaagucuagaucuggcuacgagacauuuaaagugaucgaagggugguccaaucccaacagcaagcuccagauuaaucggcaggucaucguggaucgcggaaacagaucuggcuauuccggcauuuucagcgucgaggggaaauccuguaucaaucggugcuuuuacguggaacugauuagaggacgcaaggaggaaaccgagguucuguggaccucuaacagcaucguggucuucuguggcacauccgggaccuauggaacaggcucuuggccugacggggcugauauuaaucucaugcccaucuga

SEQ ID NO: 208161 - RNA, 1410 nt, Artificial Sequence
  derived and/or modified CDS sequence (opt5) from neuraminidase__InfluenzaA__ABV30396
augaaccccaaucagaagaucauuaccaucggcagcgugucccugacaauuucuacgaucugcuucuuuaugcaaauugccauccucaucaccacagucacccugcacuucaaacaguacgaguuuaacagcuccccuaauaaccagguuaugcuuugugaaccgacaauuaucgagagaaauauuaccgaaaucguguaucugacaaacaccacgauugagaaggaaaucugccccaaacucucugaguaccggaauuggagcaagccucaguguaacauuaccggguucgcucccuuuuccaaagacaauucuauccgccugagcgccggaggcgauaucugggugacaagagagccuuaugucuccugcgaccccgauaaguguuaccaauucgcgcuugggcagggaaccacacugaacaaugugcauagcaacgacaccguucacgaucggacgccuuaucgcacacuccugaugaaugaacugggcgugccguuucaucucgggaccaagcaggucugcauugcuuggucuuccagcucuugucacgacggaaaagccuggcugcaugugugcguuacaggcgaugacaagaacgccaccgcuuccuucaucuacaauggcagacuuguggauagcauugucucuugguccaaagagauccugcggacccaggaaagcgagugugugugcauuaacgggacauguacgguggucaugaccgacggauccgccucuggcaaggcugauacaaaaauccucuuuaucgaggaagggaagauuguucacaccagcacacuguccggaagcgcccaacacguggaggaaugcucuugcuauccccgcuacccuggcgugagaugugucugccgggacaacuggaagggguccaaucgccccaucguggauauuaacaucaaagacuacagcauuguuucuagcuauguguguuccggacuugucggcgacaccccuagaaagaaugauucuagcuccagcucucauugccuggaccccaacaaugaggaaggcgggcacggagugaaaggcugggcguucgaugacgggaacgauguuuggaugggacggacgaucuccgagaagcuccgcagcggcuacgagacauuuaaagugaucgaaggguggucuaauccgaacuccaagcugcagauuaauagacaggucaucguggaccggggaaaccgcagcggcuauuccggcauuuucucugucgaggggaaaagcuguaucaauagaugcuuuuacguggaacugauucggggaagaaaggaggaaaacgagguucucuggaccuccaauucuaucguggucuucuguggcaccagcgggacauauggaaccggcuccuggccugauggggccgacauuaaccugaugcccaucuga

SEQ ID NO: 208162 - RNA, 1410 nt, Artificial Sequence
  derived and/or modified CDS sequence (opt5) from neuraminidase__InfluenzaA__ABV30407
augaaccccaaucagaagaucauuaccaucggcagcgugucccugacaauuucuacgaucugcuucuuuaugcaaauugccauccucaucaccacagucacccugcacuucaaacaguacgaguuuaacagcccuccgaauaaccagguuaugcuuugugaacccacaauuaucgagagaaauauuaccgaaaucguguaucugacaaacaccacgauugagaaggaaaucugcccuaaacucgcugaguaccggaauugguccaagccccagugugacauuaccggguucgccccuuuuucuaaagauaacagcauccgccuguccgcgggaggcgacaucugggugacaagagagcccuaugucucuugcgauccugacaaguguuaccaauucgcucuugggcagggaaccacacugaauaacgugcauagcaaugauaccguucgggaccgcacgccguauagaacacuccugaugaacgaacugggcgugcccuuucaccucgggaccaagcaggucugcauugccugguccagcagcuccugucaugauggaaaagccuggcugcacgugugcaucacaggcgacgauaagaaugcuaccgccagcuucauuuacaacggccggcuuguugacucuaucguguccuggagcaaagagauucugcgcacccaggaaucugagugugucugcaucaaugggacauguacgguggugaugaccgauggauccgcuagcggcaaggccgacacaaaaauccucuuuauugaggaagggaagaucguccauaccuccacacugucuggaagcgcgcaacacguugaggaaugcuccugcuauccuagauaccccggcgugcggugugugugccgcgauaacuggaaggggagcaacagaccuauugucgacaucaauauuaaagaccacucuaucguguccagcuacguuuguucuggacuugugggcgauacgccccggaagaacgacagcuccucuagcggccauugccuggauccgaauaacgaggaagggggacacggcgucaaagggugggccuucgacgauggaaaugacguguggaugggccgcaccaucuccgagaagucuagacucggguaugagacauuuaaaguuauugaaggauggucuaacccuaaguccaaacugcagaucaaucgccaggugauugucgaucggggcaacagaagcggcuacucugggaucuucuccguggagggaaagagcuguauuaaucggugcuuuuaugucgaacugaucagaggccgcaaggaggaaaccgaggugcucuggaccuccaacucuauuguuguguucugugggacaagcggaaccuacggcacaggguccuggcccgacggcgcugauaucaaucugaugccuaucuga

SEQ ID NO: 208163 - RNA, 1410 nt, Artificial Sequence
  derived and/or modified CDS sequence (opt5) from neuraminidase__InfluenzaA__ABV30418
augaaccccaaucagaagaucauuaccaucggcagcgugucccugacaauuucuacgaucugcuucuuuaugcaaauugccauccucaucaccacagucacccugcacuucaaacaguacgaguuuagcucccuuccuaacaaucagguuaugcugugugaaccgacaauuaucgagagaaacauuaccgaaaucguguaucucacaaauaccacgauugagaaggaaaucugccccaaacuggcugaguaccggaacuggucuaagccucagugugacauuaccggguucgcccccuuuagcaaagauaauuccauccgccuuucugcgggaggcgacaucugggugacaagagagccuuaugucagcugcgaucccgacaaguguuaccaauucgcucuggggcagggaaccacacucaacaaugugcauuccaacgauaccguucacgaccggacgccuuaucgcacacugcugaugaaugaacucggcgugccguuucaucuggggaccaagcaggucugcauugccuggucuagcuccagcugucacgauggaaaagccuggcuucaugugugcguuacaggcgacgauaagaacgcuaccgccucuuucaucuacaauggcagacugguggacuccauugucagcuggucuaaagagauccuccggacccaggaauccgagugugugugcauuaacgggacauguacgguggucaugaccgauggaagcgcuuccggcaaggccgacacaaaaauccuguuuaucgaggaagggaagauuguucacaccucuacacuuagcggauccgcgcaacacguggaggaaugcagcugcuauccccgcuacccuggcgugagaugugucugccgggauaauuggaaggggucuaaccgccccaucguggacauuaacaucaaagacuacuccauuguuagcagauauguguguucuggacuggucggcgauaccccucggaagaaugacagcuccucuagcucccauugccucgaucccaacaaugaggaaggcgggcacggagugaaaggcugggccuucgacgaugggaacgacguuuggaugggacgcacgaucagcgagaagucuagauccggcuacgagacauuuaaagugaucgaaggguggagcaauccgaacucuaagcugcagauuaaucggcaggucaucguggaucgcggaaacagauccggcuauagcggcauuuucuccgucgaggggaaaucuuguaucaaucggugcuuuuacguggaacugauuagaggacgccgggaggaaaccgagguucucuggaccagcaacuccaucguggucuucuguggcacaucugggaccuauggaacaggcagcuggccugacggggcugauauuaaucugaugcccaucuga

SEQ ID NO: 208164 - RNA, 1410 nt, Artificial Sequence; identical to SEQ ID NO: 208129
  derived and/or modified CDS sequence (opt5) from neuraminidase__InfluenzaA__ABV30429

SEQ ID NO: 208165 - RNA, 1410 nt, Artificial Sequence; identical to SEQ ID NO: 208129
  derived and/or modified CDS sequence (opt5) from neuraminidase__InfluenzaA__ABV30440

SEQ ID NO: 208166 - RNA, 1410 nt, Artificial Sequence; identical to SEQ ID NO: 208129
  derived and/or modified CDS sequence (opt5) from neuraminidase__InfluenzaA__ABV30451

SEQ ID NO: 208167 - RNA, 1413 nt, Artificial Sequence; identical to SEQ ID NO: 208102
  derived and/or modified CDS sequence (opt5) from neuraminidase__InfluenzaA__ABV30462

SEQ ID NO: 208168 - RNA, 1410 nt, Artificial Sequence; identical to SEQ ID NO: 208129
  derived and/or modified CDS sequence (opt5) from neuraminidase__InfluenzaA__ABV30473

SEQ ID NO: 208169 - RNA, 1410 nt, Artificial Sequence
  derived and/or modified CDS sequence (opt5) from neuraminidase__InfluenzaA__ABV30484
augaaccccaaucagaagaucauuaccaucggcagcgugucccugacaauuucuacgaucugcuucuuuaugcaaauugccauccucaucaccacagucacccugcacuucaaacaguacgaguuuaacagcccuccgaauaaccagguuaugcuuugugaacccacaauuaucgagagaaauauuaccgaaaucguguaucugacaaacaccacgauugagaaggaaaucugcccuaaacucgcugaguaccggaauugguccaagccccagugugacauuaccggguucgccccuuuuucuaaagauaacagcauccgccuguccgcgggaggcgacaucugggugacaagagagcccuaugucucuugcgauccugacaaguguuaccaauucgcucuugggcagggaaccacacugaauaacgugcauagcaaugauaccguucacgaccggacgccguaucgcacacuccugaugaacgaacugggcgugcccuuucaucucgggaccaagcaggucugcauugccugguccucuagcuccugucacgauggaaaagccuggcugcaugugugcguuacaggcgacgauaagaaugcuaccgccagcuucaucuacaacggcagacuuguggacucuauugucuccuggagcaaagagauccugcggacccaggaaucugagugugugugcauuaaugggacauguacgguggucaugaccgauggauccgcuagcggcaaggccgacacaaaaauccucuuuaucgaggaagggaagauuguucacaccuccacacugucuggaagcgcgcaacacguggaggaaugcuccugcuauccucgcuaccccggcgugagaugugucugccgggauaacuggaaggggagcaaccgcccuaucguggacauuaauaucaaagacuacucuauuguuuccagauauguguguagcggacuugucggcgauacgccccggaagaacgacucuagcuccaauucucauugccuggauccgaacaaugaggaaggcgggcacggagugaaaggcugggccuucgacgaugggaacgacguuuggaugggacgcaccaucagcgagaaguccagaagcggcuacgagacauuuaaagugaucgaaggguggucuaauccuaacuccaagcuccagauuaaucggcaggucaucguggaucgcggaaacagaagcggcuauucuggcauuuucuccgucgaggggaaaagcuguaucaaucggugcuuuuacguggaacugauuagaggacgcaaggaggaaaccgagguucuguggaccuccaacucuaucguggucuucuguggcacaagcgggaccuauggaacaggcuccuggcccgacggggcugauauuaaucucaugccuaucuga

SEQ ID NO: 208170 - RNA, 1413 nt, Artificial Sequence; identical to SEQ ID NO: 208141
  derived and/or modified CDS sequence (opt5) from neuraminidase__InfluenzaA__ABV30495

SEQ ID NO: 208171 - RNA, 1413 nt, Artificial Sequence; identical to SEQ ID NO: 208102
  derived and/or modified CDS sequence (opt5) from neuraminidase__InfluenzaA__ABV30506

SEQ ID NO: 208172 - RNA, 1410 nt, Artificial Sequence; identical to SEQ ID NO: 208138
  derived and/or modified CDS sequence (opt5) from neuraminidase__InfluenzaA__ABV30517

SEQ ID NO: 208173 - RNA, 1413 nt, Artificial Sequence
  derived and/or modified CDS sequence (opt5) from neuraminidase__InfluenzaA__ABV30528
augaacagcaaucagaagaucauuaccaucggcuccauuucuaucgccauugggaucaucagccugaugcuccaaauuggaaacaucauuuccaugugggcuucucacagcauccagacaggcucccagaaucauacggggauuugcaaccagagaaucauuaccuacgagaauagcacaugggugaaccacaccuaugucaauaucaacaauacaaacguuguggccggaaaagacaagaccagcgugacacuggcgggcaauuccagccuuuguucuaucuccgggugggcuauuuacaccaaagauaacagcauccggauuggaucuaagggcgacgucuucgugauccgcgaacccuuuauuuccugcagccaucuggaguguagaacguucuuucucacccaaggcgcccugcuuaaugauaaacacucuaacgggacaguuaaggaccgguccccuuaucgcgcccugaugagcugcccgcucggagaagcucccuccccuuacaauucuaaguucgagagcguggccugguccgcuagcgccugucaugauggcaugggguggcugaccaucggaaucucuggccccgacaacggggcggucgccgugcugaaauauaacggaauuaucacagaaaccauuaaguccuggaaaaagagaauccuccggacgcaggagagcgagugcguuugugugaauggcucuugcuuuacaauuaugaccgauggcccuagcaacggggcugccuccuacaaaaucuucaagaucgaaaagggaaaagucacaaagucuauugagcugaaugcucccaacuuucacuaugaagaguguagcugcuacccugacaccggcaccgugaugugugugugccgcgauaauuggcacggguccaacagaccgugggucagcuucaaucagaaccuugacuaccagguuggauauaucugcucuggcguguuuggggauaauccccggccuaaagacggaaagggcuccuguaaccccaugacaguggauggcgccgacggggucaaaggauucagcuacaaguauggcaaugggguguggauuggacgcacgaaaucuaacaagcugagaaagggcuuugagaugaucugggacccuaauggguggaccgauacagacuccgauuucagcguuaaacaagacguggucgcgauuaccgauugguccggcuacucuggaucuuuugugcagcaucccgaacucacaggccuggacugcauccggccguguuucuggguugagcuugugcgcgggcugccuagagaaaacgccaccauuuggacguccggaucuagcaucuccuucugcggcgucgauagcgacacagcuaauuggucuuggcccgauggggccgagcucccuuuuaccaucgacaaguga

SEQ ID NO: 208174 - RNA, 1413 nt, Artificial Sequence; identical to SEQ ID NO: 208102
  derived and/or modified CDS sequence (opt5) from neuraminidase__InfluenzaA__ABV30539

SEQ ID NO: 208175 - RNA, 1413 nt, Artificial Sequence; identical to SEQ ID NO: 208102
  derived and/or modified CDS sequence (opt5) from neuraminidase__InfluenzaA__ABV30561

SEQ ID NO: 208176 - RNA, 1413 nt, Artificial Sequence; identical to SEQ ID NO: 208102
  derived and/or modified CDS sequence (opt5) from neuraminidase__InfluenzaA__ABV30572

SEQ ID NO: 208177 - RNA, 1413 nt, Artificial Sequence; identical to SEQ ID NO: 208102
  derived and/or modified CDS sequence (opt5) from neuraminidase__InfluenzaA__ABV30583

SEQ ID NO: 208178 - RNA, 1413 nt, Artificial Sequence; identical to SEQ ID NO: 208102
  derived and/or modified CDS sequence (opt5) from neuraminidase__InfluenzaA__ABV30594

SEQ ID NO: 208179 - RNA, 1413 nt, Artificial Sequence
  derived and/or modified CDS sequence (opt5) from neuraminidase__InfluenzaA__ABV30605
augaaccccaaucagaagaucauuaccaucggcagcauuuccaucgccauugggaucaucucucugaugcuccaaauuggaaacaucauuagcaucugggcuucccacucuauucagacaggcagccagaaucauacggggaucugcaaccagagaauuaucaccuacgagaauagcacaugggugaaccacaccuaugucucuaucaauaacacaaauguuguggugggaaaagacaagaccagcgucacacuggccggcaacuccagccuuuguucuauuuccgggugggcgaucuacaccaaagauaauagcauucggaucggaucuaagggcgacguguucguuauucgcgaaccuuuuaucuccugcagccaucuggaguguagaacguucuuucucacccaaggcgcucugcuuaacgauaaacacucuaaugggacagugaaggaccgguccccguaucgcgcccugaugagcugcccccucggagaagccccuucccccuacaacucuaaguucgagagcgucgcuugguccgccagcgcuugucaugauggcaugggguggcugaccaucggaauuucuggcccugacaauggggccguggcgguucugaaauauaacggaaucauuacagaaaccaucaaguccuggaaaaagcggauucucagaacgcaggagagcgagugcgugugugucaacggcucuugcuuuacaaucaugaccgauggccccagcaauggggccgcuuccuacaaaaucuucaagauugaaaagggaaaagugacaaagucuaucgagcugaacgccccuaauuuucacuaugaagaguguagcugcuacccggacaccggcaccgugaugugugucugccgcgauaacuggcacggguccaauagacccuggguuagcuucaaccagaaucuugacuaccagauuggauauaucugcucuggcguguuuggggauaacccucggcccaaagacggaaagggcuccuguaauccugugacagucgauggcgcugacggggugaaaggauucagcuacaaguauggcaacgggguuuggauuggacgcacgaaaucuaauagacugcggaagggcuuugagaugaucugggaccccaacggguggaccgauacagacuccgauuucagcgugaagcaagacgucguggccauuaccgauugguccggcuacucuggauccuuuguucagcauccggaacucacaggccuggacugcauccgcccuuguuucuggguggagcuugucagagggcugccccgggaaaauaccacgaucuggacauccggaucuagcauuuccuucugcggcguggauagcgacaccgcgaacuggucuuggccugauggggccgagcuccccuuuaccaucgacaaauga

SEQ ID NO: 208180 - RNA, 1413 nt, Artificial Sequence; identical to SEQ ID NO: 208102
  derived and/or modified CDS sequence (opt5) from neuraminidase__InfluenzaA__ABV30616

SEQ ID NO: 208181 - RNA, 1413 nt, Artificial Sequence; identical to SEQ ID NO: 208102
  derived and/or modified CDS sequence (opt5) from neuraminidase__InfluenzaA__ABV30627

SEQ ID NO: 208182 - RNA, 1410 nt, Artificial Sequence
  derived and/or modified CDS sequence (opt5) from neuraminidase__InfluenzaA__ABV30649
augaaccccaaucagaagaucauuaccaucggcagcgugucccugacaauuucuacgaucugcuucuuuaugcaaauugccauccucaucaccacagucacccugcacuucaaacaguacgaguuuaacagcccuccgaauaaccagguuaugcuuugugaacccacaauuaucgagagaaauauuaccgaaaucguguaucugacaaacaccacgauugagaaggaaaucugcccuaaacucgcugaguaccggaauugguccaagccccagugugacauuaccggguucgccccuuuuucuaaagauaacagcauccgccuguccgcgggaggcgacaucugggugacaagagagcccuaugucucuugcgauccugacaaguguuaccaauucgcucuugggcagggaaccacacugaauaacgugcauagcaaugauaccguucgggaccgcacgccguauagaacacuccugaugaacgaacugggcgugcccuuucaccucgggaccaagcaggucugcauugccugguccucuagcuccugucaugauggaaaagccuggcugcacgugugcaucacaggcgacgauaagaaugcuaccgccagcuucauuuacaacggccggcuuguugacucuaucguguccuggagcaaagagauucugcgcacccaggaaucugagugugucugcaucaaugggacauguacgguggugaugaccgauggauccgcuagcggcaacgccgacacaaagauccucuuuauugaggaagggaaaaucguccauaccuccacacugucuggaagcgcgcaacacguugaggaaugcuccugcuauccuagauaccccggcgugcggugugugugccgcgauaacuggaaggggagcaauagaccuauugucgacaucaacauuaaggaccacucuaucguguccagcuacguuuguucuggacuugugggcgauacgccccggaaaaaugacagcuccucuagcucccauugccuggauccgaacaaugaggaaggcgggcacggagucaagggcugggccuucgacgaugggaacgacguguggaugggacgcaccaucagcgagaaaucuagacucggcuaugagacauuuaagguuauugaagggugguccaauccuaaaagcaagcugcagaucaaccgccaggugauugucgaucggggaaauagaucuggcuacuccggcaucuucagcguggaggggaaauccuguauuaaccggugcuuuuaugucgaacugaucagaggacgcaaggaggaaaccgaggugcucuggaccucuaauagcauuguuguguucuguggcacauccgggaccuacggaacaggcucuuggcccgacggggcugauaucaaccugaugccuaucuga

SEQ ID NO: 208183 - RNA, 1410 nt, Artificial Sequence; identical to SEQ ID NO: 207956
  derived and/or modified CDS sequence (opt5) from neuraminidase__InfluenzaA__ABV30660

SEQ ID NO: 208184 - RNA, 1413 nt, Artificial Sequence
  derived and/or modified CDS sequence (opt5) from neuraminidase__InfluenzaA__ABV45852
augaaccccaaucagaagaucauuaccaucggcagcauuuccaucgccauugggaucaucucucugaugcuccaaauuggaaacaucauuagcaucugggcuucccacucuauucagacaggcagccagaaucauacggggaucugcaaccagagaauuaucaccuacgaaaauuccacaugggugaaccacaccuaugucaauaucaacaauacaaacguuguggccggaaaagacaagaccucugugacacuggcgggcaauagcucccuuuguagcauuucugggugggcuaucuacaccaaagauaacuccauucggaucggaagcaagggcgacgucuucgugauucgcgagccuuuuaucucuugcucccaucuggaguguagaacguucuuucucacccaaggcgcccugcuuaaugauaaacacagcaacgggacaguuaaggaccggucuccguaucgcgcccugauguccugcccccucggagaagcuccuagccccuacaauuccaaguucgagucuguggccuggagcgcuuccgccugucaugauggcaugggguggcugaccaucggaauuagcggcccugacaacggggcggucgccgugcugaaauauaacggaaucauuacagaaaccaucaagucuuggaaaaagcggauucucagaacgcaggaguccgagugcguuugugugaauggcagcugcuuuacaaucaugaccgauggccccaacaauggggcugccucuuacaaaaucuucaagauugaaaagggaaaagucacaaagagcaucgagcugaacgcuccuaauuuucacuaugaagaguguuccugcuacccggacaccggcaccgugaugugugugugccgcgauaacuggcacgggucuaauagacccugggucagcuucaaccagaaucuugacuaccagauuggauauaucugcuccggcguuuuuggggauaacccucggcccaaagacggagagggcagcuguaauccugugacaguggauggcgccgacggggucaagggauucucuuacaaauauggcaacgggguguggauuggacgcacgaaguccaauagacugcggaaaggcuuugaaaugaucugggaccccaacggguggaccgauacagacagcaauuucucuguuaagcaagauguggucgcgauuaccgacugguccggcuacagcggauccuuugugcagcauccggagcucacaggccuggauugcauccgcccuuguuucuggguugaacuugugagagggcugccccgggagaacaccacgaucuggacaucuggaagcuccauuucuuucugcggcgucaacagcgacaccgccaauugguccuggccugauggggcugaacuccccuuuaccaucgacaaguga

SEQ ID NO: 208185 - RNA, 1410 nt, Artificial Sequence; identical to SEQ ID NO: 207956
  derived and/or modified CDS sequence (opt5) from neuraminidase__InfluenzaA__ABV45863

SEQ ID NO: 208186 - RNA, 1413 nt, Artificial Sequence
  derived and/or modified CDS sequence (opt5) from neuraminidase__InfluenzaA__ABV45874
augaaccccaaucagaagaucauuaccaucggcagcauuuccaucgccauugggaucaucucucugaugcuccaaauuggaaacaucauuagcaucugggcuuccuacucuauucagacaggcagccagaaucacacggggaucugcaaccagagaauuaucaccuaugagaauagcacaugggugaaccauaccuacgucucuaucaauaacacaaauguuguggccggaaaagacaagaccagcgugacacuggcgggcaacuccagccuuuguucuauuuccgggugggcuaucuauaccaaagauaauagcauucggaucggaucuaagggcgacgucuucgugauucgcgaaccuuuuaucuccugcagccaccuggaguguagaacguucuuucucacccaaggcgcccugcuuaacgauaaacauucuaaugggacaguuaaggaccgguccccguaccgcgcccugaugagcugcccccucggagaagcuccuucccccuauaacucuaaguucgagagcguggccugguccgcuagcgccugucacgauggcaugggguggcugaccaucggaauuucuggcccugacaauggggcggucgccgugcugaaauacaacggaaucauuacagaaaccaucaaguccuggaaaaagcggauucucagaacgcaggagagcgagugcguuugugugaacggcucuugcuuuacaaucaugaccgauggccccagcaauggggcugccuccuauaaaaucuucaagauugaaaagggaaaagucacaaagucuaucgagcugaacgcuccuaauuuucauuacgaagaguguagcugcuacccggacaccggcaccgugaugugugugugccgcgauaacuggcacggguccaauagacccugggucagcuucaaccagaaucuugacuaucagauuggauacaucugcucuggcguuuuuggggauaacccucggcccaaagacggaaagggcuccuguaauccugugacaguggauggcgccgacggggucaaaggauucagcuauaaguacggcaacgggguguggauuggacgcacgaaaucuaauagacugcggaagggcuuugagaugaucugggaccccaacggguggaccgauacagacuccgauuucagcguuaagcaagacguggucgcgauuaccgauugguccggcuauucuggauccuuugugcagcacccggaacucacaggccuggacugcauccgcccuuguuucuggguugagcuugugagagggcugccccgggaaaauaccacgaucuggacauccggaucuagcauuuccuucugcggcgucgauagcgacaccgccaacuggucuuggccugauggggcugagcuccccuuuaccaucgacaaauga

SEQ ID NO: 208187 - RNA, 1413 nt, Artificial Sequence; identical to SEQ ID NO: 208102
  derived and/or modified CDS sequence (opt5) from neuraminidase__InfluenzaA__ABV45885

SEQ ID NO: 208188 - RNA, 1413 nt, Artificial Sequence; identical to SEQ ID NO: 208115
  derived and/or modified CDS sequence (opt5) from neuraminidase__InfluenzaA__ABV45896

SEQ ID NO: 208189 - RNA, 1413 nt, Artificial Sequence; identical to SEQ ID NO: 208102
  derived and/or modified CDS sequence (opt5) from neuraminidase__InfluenzaA__ABV45918

SEQ ID NO: 208190 - RNA, 1413 nt, Artificial Sequence
  derived and/or modified CDS sequence (opt5) from neuraminidase__InfluenzaA__ABV45929
augaaccccaaucagaagaucauuaccaucggcagcauuuccaucgccauugggaucaucucucugaugcuccaaauuggaaacaucauuagcaugugggcuucccacucuauccagacaggcagccagaaucauacggggauuugcaaccagagaaucauuaccuacgaaaauuccacaugggugaaccacaccuaugucaauaucaacaauacaaacguugugaccggaaaagacaagacaucugugacccuggccggcaauagcucccuuuguagcaucucugggugggcgauuuacacgaaagauaacuccauccggauuggaagcaagggcgacgucuucgugauccgcgagccuuuuauuucuugcucccaucuggaguguagaaccuucuuucucacacaaggcgcucugcuuaaugauaaacacagcaacgggaccguuaaggaccggucuccguaucgcgcccugauguccugcccccucggagaagccccuagccccuacaauuccaaguucgagucuguggcuuggagcgccuccgcuugucaugauggcaugggguggcugacaaucggaaucagcggcccugacaacggggccgucgcggugcugaaauauaacggaauuaucaccgaaacgauuaagucuuggaaaaagagaauccuccggacacaggaguccgagugcguuugugugaauggcagcugcuuuaccauuaugacagauggccccucugacggggccgcuagcuacaaaaucuucaagaucgaaaagggaaaagucaccaaguccauugagcugaacgccccuaauuuucacuaugaagaguguucuugcuacccggauaccggcacagugaugugugugugccgcgacaacuggcacgggagcaauagacccugggucuccuucaaccagaaucuugauuaccagaucggauauauuugcagcggcguuuuuggggacaacccucggcccaaagauggaaagggcucuuguaauccugugacgguggacggcgcugacggggucaaaggauucuccuacaaguauggcaacgggguguggaucggacgcaccaaaagcaauaagcugagaaagggcuuugagaugauuugggaucccaacggguggacagacaccgauaaugacuucucuguuaaacaagauguggucgccaucacagacugguccggcuacagcggauccuuugugcagcauccggaacucaccggccuggauugcauucggccuuguuucuggguugagcuugugcgcgggcugcccagagaaaacgcgacgaucuggacaucuggaagcuccaucucuuucugcggcgucgacagcgauaccgccaauugguccuggccugacggggcugagcuccccuuuaccauugauaaguga

SEQ ID NO: 208191 - RNA, 1413 nt, Artificial Sequence
  derived and/or modified CDS sequence (opt5) from neuraminidase__InfluenzaA__ABV45940
augaaccccaaucagaagaucauuaccaucggcagcauuuccaucgccauugggaucaucucucugaugcuccaaauuggaaacaucauuagcaucugggcuucccacucuauucagacaggcagccagaaucauacggggaucugcaaccagagaauuauccgguacgagaauagcaccugggugaaccacacauaugucaauaucaacaauaccaacguuguggccggaaaagacaagacaucugugacccuggcgggcaauagcucccuuuguagcauuucugggugggcuaucuacacaaaagauaacuccauucgcaucggaagcaagggcgacgucuucgugauuagagaaccuuuuaucucuugcucccaucuggagugucggaccuucuuucucacgcaaggcgcccugcuuaaugauaaacacagcaacgggaccguuaaggaccgcucuccguauagagcccugauguccugcccccucggagaagcuccuagccccuacaauuccaaguucgagucuguggccuggagcgcuuccgccugucaugauggcaugggguggcugacaaucggaauuagcggcccugacaacggggcggucgccgugcugaaauauaacggaaucauuaccgaaacaaucaagucuuggaaaaagcagauucuccggacccaggaguccgagugcguuugugugaauggcagcugcuuuacgaucaugacagauggccccucuaacggggcugccagcuacaaaaucuucaagauugaaaagggaaaagucaccaaguccaucgagcugaaugcuccuaacuuucacuaugaagaguguucuugcuacccggacacaggcaccgugaugugugugugccgcgauaauuggcacgggagcaacagacccugggucuccuucaaucagagccuugacuaccaaguuggauauauuugcucuggcguguuuggggauaacccucggcccaaagacggaaagggcuccuguaauccuaugaccguggauggcgccgacggggucaaaggauucagcuacaaguauggcaacgggguguggaucggacgcacaaaaucuaauaagcugagaaagggcuuugagaugauuugggaccccaacggguggacggauaccgacuccgauuucagcguuaaacaggacguggucgcgaucacagauugguccggcuacucuggauccuuugugcagcauccggaacucaccggccuggacugcauucggccuuguuucuggguugagcuugugcgcgggcugcccagagaaaauacaaccaucuggacguccggaucuagcaucuccuucugcggcgucgauagcgacacagccaacuggucuuggccugauggggcugagcuccccuuuaccauugacaaguga

SEQ ID NO: 208192 - RNA, 1413 nt, Artificial Sequence; identical to SEQ ID NO: 208128
  derived and/or modified CDS sequence (opt5) from neuraminidase__InfluenzaA__ABV45951

SEQ ID NO: 208193 - RNA, 1410 nt, Artificial Sequence
  derived and/or modified CDS sequence (opt5) from neuraminidase__InfluenzaA__ABV45973
augaaccccaaucagaagaucauuaccaucggcagcgugucccugacaauuucuacgaucugcuucuuuaugcaaauugccauccucaucaccacagucacccugcacuucaaacaguacgaguuuaacagcccuccgaauaaccagguuaugcuuugugaacccacaauuaucgagagaaauauuaccgaaaucguguaucugacaaacaccacgauugagaaggaaaucugcccuaaacucgcugaguaccggaauugguccaagccccagugugacauuaccggguucgccccuuuuucuaaagauaacagcauccgccuguccgcgggaggcgacaucugggugacaagagagcccuaugucucuugcgauccugacaaguguuaccaauucgcucuugggcagggaaccacacugaauaacgugcauagcaaugauaccguucgggaccgcacgccguauagaacacuccugaugaacgaacugggcgugcccuuucaccucgggaccaagcaggucugcauugccugguccucuagcuccugucaugauggaaaagccuggcugcacgugugcaucacaggcgacgauaagaaugcuaccgccagcuucauuuacaacggccggcuuguugacucuaucguguccuggagcaaagagauucugcgcacccaggaaucugagugugucugcaucaaugggacauguacgguggugaugaccgauggauccgcuagcggcgaggccgacacaaagauccucuuuauugaagaggggaaaaucguccauaccuccacacugucuggaagcgcgcaacacguugaagagugcuccugcuauccuagauaccccggcgugcggugugugugccgcgauaacuggaaggggagcaacagaccuauugucgacaucaauauuaaggaccacucuaucguguccagcuacguuuguucuggacuugugggcgauacgccccggaaaaacgacagcuccucuagcucccauugccuggauccgaauaacgaagagggcgggcacggagucaagggcugggccuucgacgaugggaaugacguguggaugggacgcaccaucagcgagaaaucuagacucggcuaugaaacauuuaagguuauugaggggugguccaacccuaaaagcaagcugcagaucaaucgccaggugauugucgaucggggaaacagaucuggcuacuccggcaucuucagcguggaagggaaauccuguauuaaucggugcuuuuaugucgagcugaucagaggacgcaaggaagagaccgacgugcucuggaccucuaacagcauuguuguguucuguggcacauccgggaccuacggaacaggcucuuggcccgauggggcugacaucaaucugaugccuaucuga

SEQ ID NO: 208194 - RNA, 1410 nt, Artificial Sequence
  derived and/or modified CDS sequence (opt5) from neuraminidase__InfluenzaA__ABV45984
augaaccccaaucagaagaucauuaccaucggcagcgugucccugacaauuucuacgaucugcuucuuuaugcaaauugccauccucgucaccacaguuacccugcacuucaaacaguacgaguuuaacagcccuccgaauaaccaggugaugcuuugugaacccacaaucauugagagaaauaucaccgaaauuguguaucugacaaacaccacgaucgagaaggaaauuugcccuaaacucgcugaguaccggaauugguccaagccccagugugacaucaccggguucgccccuuuuucuaaagauaacagcauucgccuguccgcgggaggcgacaucugggucacaagagagcccuaugugucuugcgauccugacaaguguuaccaauucgcucuugggcagggaaccacacugaauaacguucauagcaaugauaccgugcgggaccgcacgccguauagaacacuccugaugaacgaacugggcguccccuuucaccucgggaccaaacaggugugcaucgccugguccucuagcuccugucaugauggaaaggccuggcugcacguuugcauuacaggcgacgauaagaaugcuaccgccagcuucaucuacaacggccggcuuguggacucuauugucuccuggagcaaagagauccugcgcacccaggaaucugagugugugugcauuaaugggacauguacgguggucaugaccgauggauccgcuagcggcaaggccgacacaaaaauccucuuuaucgaggaagggaagauuguucauaccuccacacugucuggaagcgcgcaacacguggaggaaugcuccugcuauccuagauaccccggcgugcggugugucugccgcgauaacuggaaggggagcaacagaccuaucguggacauuaauaucaaagaccacucuauuguuuccagcuacguguguucuggacuugucggcgauacgccccggaagaacgacagcuccucuagcucccauugccuggauccgaauaacgaggaaggcgggcacggagugaaaggcugggccuucgacgaugggaaugacguuuggaugggacgcaccaucagcgagaagucuagacucggcuaugagacauuuaaagugaucgaagggugguccaacccuaagagcaaacugcagauuaaucggcaggucaucguggaucgcggaaacagaucuggcuacuccggcauuuucagcgucgaggggaaguccuguaucaaucggugcuuuuauguggaacugauuagaggacgcaaggaggaaaccgagguucucuggaccucuaacagcaucguggucuucuguggcacauccgggaccuacggaacaggcucuuggcccgacggggcugauauuaaucugaugccuaucuga

SEQ ID NO: 208195 - RNA, 1410 nt, Artificial Sequence; identical to SEQ ID NO: 207956
  derived and/or modified CDS sequence (opt5) from neuraminidase__InfluenzaA__ABV45995

SEQ ID NO: 208196 - RNA, 1413 nt, Artificial Sequence; identical to SEQ ID NO: 208115
  derived and/or modified CDS sequence (opt5) from neuraminidase__InfluenzaA__ABV82554

SEQ ID NO: 208197 - RNA, 1410 nt, Artificial Sequence; identical to SEQ ID NO: 208138
  derived and/or modified CDS sequence (opt5) from neuraminidase__InfluenzaA__ABV82565

SEQ ID NO: 208198 - RNA, 1410 nt, Artificial Sequence; identical to SEQ ID NO: 208138
  derived and/or modified CDS sequence (opt5) from neuraminidase__InfluenzaA__ABW36171

SEQ ID NO: 208199 - RNA, 1413 nt, Artificial Sequence; identical to SEQ ID NO: 208154
  derived and/or modified CDS sequence (opt5) from neuraminidase__InfluenzaA__ABW36193

SEQ ID NO: 208200 - RNA, 1413 nt, Artificial Sequence; identical to SEQ ID NO: 208102
  derived and/or modified CDS sequence (opt5) from neuraminidase__InfluenzaA__ABW36204

SEQ ID NO: 208201 - RNA, 1413 nt, Artificial Sequence
  derived and/or modified CDS sequence (opt5) from neuraminidase__InfluenzaA__ABW36215
augaaccccaaucagaagaucauuaccaucggcagcauuuccaucgccauugggaucaucucucugaugcuccaaauuggaaacaucauuagcaucugggcuucccacucuauucagacaggcagccagaaucauacggggaucugcaaccagagaauuaucaccuacgagaauagcacaugggugaaccacaccuaugucaauaucaacaauacaaacguuguggccggaaaagacaagaccucugugacacuggcgggcaauagcucccuuuguagcauuucugggugggcuaucuacaccaaagauaacuccauucggaucggaagcaagggcgacgucuucgugauucgcgaaccuuuuaucucuugcucccaucuggaguguagaacguucuuucucacccaaggcgcccugcuuaaugauaaacacagcaacgggacaguuaaggaccggucuccguaucgcgcccugauguccugcccccucggagaagcuccuagccccuacaauuccaaguucgagucuguggccuggagcgcuuccgccugucaugauggcaaaggguggcugaccaucggaauuagcggcccugacaacggggcggucgccgugcugaaguauaacggaaucauuacagaaaccaucaaaucuuggaauaagcagauucucagaacgcaggaguccgagugcguuugugugaacggcagcugcuuuacaaucaugaccgauggccccucuaauggggcugccagcuacaaaaucuucaagauugaaaagggaaaagucacaaaguccaucgagcugaacgcuccuaauuuucacuaugaagaguguucuugcuacccggacaccggcaccgugaugugugugugccgggauaacuggcacgggagcaaucgccccugggucuccuucaaccagaaucuugacuaccaaauuggauauaucugcagcggcguuuuuggggauaacccuagacccaaagacggacggggcucuuguaauccugugacaguggauggcgccgacggggucaagggauucuccuacaaauauggcaacgggguguggauuggacgcacgaaguccaauagacugcggaaaggcuuugagaugaucugggaccccaacggguggaccgauacagacucucauuucuccguuaagcaggauguggucgcgauuaccgacuggagcggcuacuccggaucuuuugugcagcacccggaacucacaggccuggauugcaucaagccuuguuucuggguugagcuugugcgcgggcugcccagagaaaauaccacgaucuggacaagcggauccucuauuagcuucugcggcgucgacuccgauaccgccaacuggagcuggccugacggggcugagcuccccuuuaucauugauaaauga

SEQ ID NO: 208202 - RNA, 1413 nt, Artificial Sequence; identical to SEQ ID NO: 208102
  derived and/or modified CDS sequence (opt5) from neuraminidase__InfluenzaA__ABW36226

SEQ ID NO: 208203 - RNA, 1413 nt, Artificial Sequence
  derived and/or modified CDS sequence (opt5) from neuraminidase__InfluenzaA__ABW36237
augaaccccaaucagaagaucauuaccaucggcagcauuuccaucacaauugggaucaucucucugaugcuccaaauuggaaacaucauuagcaucugggccucccacucuauucagacgggcagccagaaucauaccgggaucugcaaccagagaauuaucacauacgaaaauuccaccugggugaaccacacauaugucaauaucaacaauaccaacguuguggcuggaaaagacaagacaucugugacccuggccggcaauagcucccuuuguagcauuucugggugggcgaucuacacgaaagauaacuccauucggaucggaagcaagggcgacgucuucgugauucgcgagccuuuuaucucuugcucccaucuggaguguagaaccuucuuucucacacaaggcgcucugcuuaaugauaaacacagcaacgggaccguuaaggaccggucuccguaucgcgcccugauguccugcccccucggagaagccccuagccccuacaauuccaaguucgagucuguggcuuggagcgccuccgcuugucaugauggcaugggguggcugacaaucggaauuagcggcccugacaacggggccgucgcggugcugaaauauaacggaaucauuaccgaaacgaucaagucuuggaaaaagcggauucucagaacacaggaguccgagugcguuugugugaauggcagcugcuuuaccaucaugacagauggccccucuaacggggccgcuagcuacaaaaucuucaagauugaaaagggaaaagucaccaaguccaucgagcugaaugccccuaacuuucacuaugaagaguguucuugcuacccggacaccggcacagugaugugugugugccgcgauaauuggcacgggagcaacagacccugggucuccuucaaucagaaccuugacuaccagguuggauauauuugcagcggcguguuuggggauaauccucggcccaaagacggaaagggcucuuguaacccuaugacgguggauggcgcugacggggucaaaggauucuccuacaaguauggcaaugggguguggaucggacgcaccaaaagcaacaagcugagaaagggcuuugagaugauuugggaccccaauggguggacagauaccgacucugauuucuccguuaaacaagacguggucgccaucacagauuggagcggcuacuccggaucuuuugugcagcauccggaacucaccggccuggacugcauucggccuuguuucuggguugagcuugugcgcgggcugcccagagaaaacacgacaaucuggaccagcggauccucuaucagcuucugcggcgucgauuccgacaccgcgaauuggagcuggccugauggggccgagcuccccuuuacaauugacaaguga

SEQ ID NO: 208204 - RNA, 1413 nt, Artificial Sequence; identical to SEQ ID NO: 208102
  derived and/or modified CDS sequence (opt5) from neuraminidase__InfluenzaA__ABW36248

SEQ ID NO: 208205 - RNA, 1413 nt, Artificial Sequence
  derived and/or modified CDS sequence (opt5) from neuraminidase__InfluenzaA__ABW36259
augaaccccaaucagaagaucauuaccaucggcagcauuuccaucgccauugggaucaucucucugaugcuccaaauuggaaacaucauuagcaucugggcuucccacucuauucagacaggcagccagaauaacacggggaucugcaaucagagaauuaucaccuacgagaacuccacaugggugaaucauaccuaugucaacaucaauaacacaaauguuguggccggaaaagacaagaccucugugacacuggcgggcaacagcucccuuuguagcauuucugggugggcuaucuacaccaaagauaauuccauucggaucggaagcaagggcgacgucuucgugauucgcgaaccuuuuaucucuugcucccaccuggaguguagaacguucuuucucacccaaggcgcccugcuuaacgauaaacauagcaaugggacaguuaaggaccggucuccguaucgcgcccugauguccugcccccucggagaagcuccuagccccuacaacuccaaguucgagucuguggccuggagcgcuuccgccugucacgauggcaugggguggcugaccaucggaauuagcggcccugacaacggggcggucgccgugcugaaauauaauggaaucauuacaggcaccaucaagucuuggaaaaagcagauucucagaacgcaggaauccgagugcguuuguaugaacggcagcugcuuuacaaucaugaccgaugggcccucuaaucgggcugccagcuacaaaaucuucaagauugagaagggaaaagugacaaaguccaucgaacugaacgcuccuaauuuucauuaugaggaauguucuugcuacccggacaccggcauugucaugugugugugccgcgauaacuggcacgggagcaauagacccuggguguccuucaaccagaaucuugacuaccaaaucggauauauuugcagcggcguccugggggauaacccucggcccgaggacggagagggcucuuguaauccuguuaccguggauggcgccgacggggugaaaggauuuuccuacaaguaugacaacggcgucuggaucgggcgcacaaaaagcaauagacuccggaagggauucgaaaugauuugggaucccaacggcuggacgaauaccgacucugauuuuuccgugaaacaggacguuguggcgaucacagauuggagcggguacuccggcucuuucguccagcacccggagcugaccggacuugacugcauccgcccuuguuuuuggguggaacugguuagaggccucccccgggagaacacaaccauuuggacgagcggguccucuaucagcuucugcggaguguccagcgauacagccaacuggucuuggccugacggcgcugaacugcccuucaccauugauaaguga

SEQ ID NO: 208206 - RNA, 1413 nt, Artificial Sequence; identical to SEQ ID NO: 208102
  derived and/or modified CDS sequence (opt5) from neuraminidase__InfluenzaA__ABW36281

SEQ ID NO: 208207 - RNA, 1413 nt, Artificial Sequence; identical to SEQ ID NO: 208102
  derived and/or modified CDS sequence (opt5) from neuraminidase__InfluenzaA__ABW36292

SEQ ID NO: 208208 - RNA, 1413 nt, Artificial Sequence; identical to SEQ ID NO: 208115
  derived and/or modified CDS sequence (opt5) from neuraminidase__InfluenzaA__ABW36303

SEQ ID NO: 208209 - RNA, 1413 nt, Artificial Sequence
  derived and/or modified CDS sequence (opt5) from neuraminidase__InfluenzaA__ABW36314
augaaccccaaucagaagaucauuaccaucggcagcauuugcauggccaucgggauuaucucccugauccuccaaauuggaaacaucauuucuaucugggugagccacuccauucagacaggcucucagaaucauacggggaucuguaaccagagaauuaucaccuacgagaauagcacaugggucaaccaaaccuauguuaauaucuccaacacaaaugugguggcuggaaaagacaccacaucuaugacccuggccggcaacagcucccuuugcccuauucgggggugggcgaucuacagcaaggauaauucuauucgcaucggauccaaaggcgacgucuucgugauuagagaaccguuuaucagcuguucucaccuggagugccggacguucuuucucacccagggcgcucugcuuaacgauaagcauuccaaugggacaguuaaagaccgcagccccuauagagcccugaugucuuguccuaucggagaagcccccuccccuuacaacagccgguucgaguccguggcuuggucugccagcgcuugccacgauggcaugggguggcucaccauuggaaucuccggccccgacgauggggccgucgcggugcugaaguauaauggaauuaucacagaaaccauuaagagcuggcgcaaacagauccugagaacgcaggagucugaguguguuugcgugaacggcuccuguuuuacaaucaugaccgacggcccuagcgaugggcaagccucuuaccggauuuucaagaucgaaaaaggaaagauuacaaaaagcaucgagcucgacgcuccgaacuuucauuaugaagagugcuccuguuaccccgauaccggcaccgucaugugcgugugccgcgacaauuggcacgggucuaacagaccuugggugagcuucaaucagaaccuggauuaccagauuggauauaucuguuccggcgucuuuggggacaauccccggccuaaggacggaaagggcagcugcgaucccguuaacguggacggcgccgauggggugaaaggauucucuuaccgcuauggcaauggggucuggauuggaagaacaaaguccaacagcucucggaaaggcuuugagaugaucugggacccgaauggguggacggauaccgacuccaacuuccuugugaagcaggauguuguggcuaugacagacuggagcggcuacuccggaucuuuuguccaacacccugaacugaccggccucgauuguaugcgccccugcuucuggguggagcugaucagagggcggccuagagagaaaacaaccauuuggacgagcggauccucuaucagcuucuguggcguuaauuccgacacagugaacuggagcuggcccgauggggccgaacuucccuuuaccauugacaaguga

SEQ ID NO: 208210 - RNA, 1410 nt, Artificial Sequence
  derived and/or modified CDS sequence (opt5) from neuraminidase__InfluenzaA__ABW38366
augaaccccaaucagaagaucauuaccaucggcagcgugucccugacaauuucuacgaucugcuucuuuaugcaaauugccauccucaucaccacagucacccugcacuucaaacaguacgaguuuaacagcccuccgaauaaccagguuaugcuuugugaacccacaauuaucgagagaaauauuaccgaaaucguguaucugacaaacaccacgauugagaaggaaaucugcccuaaacucgcugaguaccggaauugguccaagccccaguguaacauuaccggguucgccccuuuuucuaaagacaauagcauccgccuguccgcgggaggcgauaucugggugacaagagagcccuaugucucuugcgacccugauaaguguuaccaauucgcucuugggcagggaaccacacugaacaaugugcauagcaacgacaccguucacgaucggacgccguaucgcacacuccugaugaaugaacugggcgugcccuuucaucucgggaccaagcaggucugcauugccugguccucuagcuccugucacgacggaaaagccuggcugcaugugugcguuacaggcgaugacaagaacgcuaccgccagcuucaucuacaauggcagacuuguggauucuauugcuuccuggagcaaagagauccugcggacccaggaaucugagugugucugcauuaacgggacauguacgguggugaugaccgacggauccgccagcggcaaggcggauacaaaaauccucuuuaucgaggaagggaagauuguccacaccuccacacugucuggaagcgcccaacacguugaggaaugcuccugcuauccucgcuaccccggcgugagaugugugugccgggacaacuggaaggggagcaaucgcccuaucgucgauauuaacaucaaagacuacucuauuguguccagcuauguuuguucuggacuugugggcgacacccccagaaagaaugauagcuccucuagcucccauugccuggacccgaacaaugaggaaggcgggcacggagucaaaggcugggcuuucgaugacgggaacgauguguggaugggacggacgaucagcgagaagcuccgcucuggcuacgagacauuuaaaguuaucgaagggugguccaauccuaacagcaagcugcagauuaauagacaggugaucgucgaccggggaaaccgcucuggcuauuccggcauuuucagcguggaggggaaauccuguaucaauagaugcuuuuacgucgaacugauucggggaagaaaggaggaaaccgaggugcucuggaccucuaacagcaucguuguguucuguggcacauccgggaccuauggaacaggcucuuggcccgauggggccgacauuaaucugaugccuaucuga

SEQ ID NO: 208211 - RNA, 1413 nt, Artificial Sequence; identical to SEQ ID NO: 208201
  derived and/or modified CDS sequence (opt5) from neuraminidase__InfluenzaA__ABW39780

SEQ ID NO: 208212 - RNA, 1413 nt, Artificial Sequence
  derived and/or modified CDS sequence (opt5) from neuraminidase__InfluenzaA__ABW39809
augaaccccaaucagaagaucauuaccaucggcagcauuuccaucgccauugggaucaucucucugaugcuccaaauuggaaacaucauuagcaucugggcuucccacucuauucagacaggcagccagaaucauacggggaucugcaaccagagaauuaucaccuacgaaaauuccacaugggugaaccacaccuaugucucuaucaauaacacaaauguuguggccggaaaagacaagacccuggugacacuugcgggcaacagcucccuguguagcauuucugggugggcuaucuacaccaaagauaauuccauucggaucggaagcaagggcgacgucuucgugauucgcgagccuuuuaucucuugcucccaucucgaguguagaacguucuuucugacccaaggcgcccuucugaacgauaaacacagcaaugggacaguuaaggaccggucuccguaucgcgcccucauguccugcccccugggagaagcuccuagccccuacaacuccaaguucgagucuguggccuggagcgcuuccgccugucaugauggcaugggguggcugaccaucggaauuagcggcccugacaauggggcggucgccgugcucaaauauaacggaaucauuacagaaaccaucaagucuuggaaaaagcggauucugagaacgcaggaguccgagugcguuugugugaacggcagcugcuuuacaaucaugaccgauggccccucuaauggggcugccagcuacaaaaucuucaagauugaaaagggaaaagucacaaaguccaucgagcuuaacgcuccuaauuuucacuaugaagaguguucuugcuacccggacaccggcaccgugaugugugugugccgcgauaacuggcacgggagcaauagacccugggucuccuucaaccagaaucuggacuaccagauuggauauaucugcagcggcguuuuuggggauaacccucggcccaaagacggaaagggcucuuguaauccugugacaguggauggcgccgacggggucaaaggauucuccuacaaguauggcaacgggguguggauuggacgcacgaaaagcaauagacuccggaagggcuuugagaugaucugggaccccaacggguggaccgauacagacucugauuucuccguuaagcaagacguggucgcgauuaccgauuggagcggcuacuccggaucuuuugugcagcauccggaacugacaggccuugacugcauccgcccuuguuucuggguugagcuggugagagggcucccccgggaaaauaccacgaucuggacaagcggauccucuauuagcuucugcggcgucgauuccgacaccgccaacuggagcuggccugauggggcugagcugcccuuuaccaucgacaaauga

SEQ ID NO: 208213 - RNA, 1413 nt, Artificial Sequence; identical to SEQ ID NO: 208115
  derived and/or modified CDS sequence (opt5) from neuraminidase__InfluenzaA__ABW39820

SEQ ID NO: 208214 - RNA, 1413 nt, Artificial Sequence
  derived and/or modified CDS sequence (opt5) from neuraminidase__InfluenzaA__ABW39831
augaaccccaaucagaagaucauuaccaucggcagcauuuccaucgccauugggaucaucucucugaugcuccaaauuggaaacaucauuagcaucugggcuucccacucuauucagacaggcagccagaaucauacggggaucugcaaccagagaauuaucaccuacgaaaauuccacaugggugaaccacaccuaugucaauaucaacaauacaaacguuguggccggaaaagacaagaccccugugacacuggucggcaauucuagccuuuguuccauuagcgggugggcgaucuacaccaaagauaacucuauucggaucggauccaagggcgacguguucguuauucgcgagccguuuaucagcugcucucaucuggaguguaaaacguucuuucucacccaaggcgcucugcuuaaugauaagcacuccaacgggacagugaaggacagaagccccuaucgggcccugaugucuugcccucucggagaagcccccuccccuuacaauagcaaauucgaguccgucgcuuggucugccagcgcuugucaugauggcaucggguggcugaccauuggaaucuccggccccgacaacggggccguggcgguucugaaguauaacggaauuaucacaggcaccauuaaaagcuggaagaaacagauccuccgcacgcaggaaucugagugcguguguaugaauggcuccugcuuuacaaucaugaccgaugggccuagcaacggagccgcuucuuacaagauuuucaagaucgagaaaggcaaggucacaaaaagcauggaacugaaugccccgaacuuucacuaugaggaauguuccugcuaccccgacaccgggaccgugaugugugugugcagagauaauuggcacggaucuaaccggccuugggucagcuucaaucagaaccuugacuaccaaauuggcuauaucugcuccgggguuuuuggagauaauccccgcccuaaggacggcgagggcagcuguaaccccgugacaguggauggggcuaauggagucaaaggcuucucuuacaaguaugggaacggaguguggauuggcagaacgaaauccaaucggauccgcaagggguuugagaugauuugggacccgaacggcuggaccaauacagacagcgauuucucuguuaagcaggacaucguggccaucaccgauugguccggauacagcggcuccuuuguccagcauccugaacugacagggcucgacugcauuagacccuguuucuggguggagcugguucggggacuuccucgcgaaaacaccacgaucuggacaucuggcagcuccauuucuuucugcggggugaacggagauaucgcgaauuggagcuggcccgacggcgccgagcugcccuuuaccauugauaaauga

SEQ ID NO: 208215 - RNA, 1413 nt, Artificial Sequence; identical to SEQ ID NO: 208128
  derived and/or modified CDS sequence (opt5) from neuraminidase__InfluenzaA__ABW39842

SEQ ID NO: 208216 - RNA, 1413 nt, Artificial Sequence; identical to SEQ ID NO: 208102
  derived and/or modified CDS sequence (opt5) from neuraminidase__InfluenzaA__ABW39864

SEQ ID NO: 208217 - RNA, 1410 nt, Artificial Sequence; identical to SEQ ID NO: 208138
  derived and/or modified CDS sequence (opt5) from neuraminidase__InfluenzaA__ABW39875

SEQ ID NO: 208218 - RNA, 1413 nt, Artificial Sequence
  derived and/or modified CDS sequence (opt5) from neuraminidase__InfluenzaA__ABW39886
augaaccccaaucagaagaucauuaccaucggcagcauuuccaucgccauugggaucaucucucugauucuccaaaucggaaacauuaucagcauuugggcuucccacucuauccagacaagaaaucagaaccauacgggcauuugcaaucagcggaucaucaccuacgagaacagcacaugggugaaucacaccuaugucuccauuaacaauacaaacguuguggccgggaaagacaagaccucugugacacuggcgggaaauagcucccuuuguagcaucucuggcugggcuauuuacaccaaagauaacuccauccgcauugggagcaagggagacgucuucgugaucagagaaccuuuuaucucuugcucccaucuggagugucggacguucuuucucacccaaggcgcccugcuuaaugauaaacacagcaacggcacaguuaaggaccgcucuccguauagagcccugauguccugcccccucggggaagcuccuagccccuacaauuccaaguucgagucuguggccuggagcgcuuccgccugucaugauggaaugggcuggcugaccauugggaucagcggaccugacaacggcgcggucgccgugcugaaauauaacgggauuaucacagaaaccauuaagucuuggaaaaagcggauccuccgcacgcaggaguccgagugcguuugugugaauggaagcugcuuuacaaucaugaccgauggccccucuaacggcgcugccagcuacaaaauuuucaagaucgaaaaggggaaagucacaaaguccauugagcugaaugcuccuaacuuucacuaugaagaguguucuugcuacccggacaccggaaccgugaugugugugugcagagauaauuggcacggcagcaaccggcccugggucuccuucaaucagaaccuugacuaccagaucggguauauuugcagcggaguuuuuggcgauaauccucgccccaaagacgggaagggaucuuguaacccugugacaguggauggcgccgacggcgucaaaggguucuccuacaaguauggaaauggcguguggaucgggagaacgaaaagcaaccggcugcgcaagggauuugagaugauuugggaccccaauggcuggaccgauacagacucugauuucuccguuaagcaagacguggucgcgaucaccgauuggagcggguacuccggcucuuuugugcagcauccggaacucacaggacuggacugcaucagaccuuguuucuggguugagcuugugcggggccugccccgcgaaaacaccacgauuuggacaagcggguccucuaucagcuucugcggagucgauuccgacaccgccaauuggagcuggccugauggcgcugagcuccccuuuaccauugacaaauga

SEQ ID NO: 208219 - RNA, 1413 nt, Artificial Sequence; identical to SEQ ID NO: 208102
  derived and/or modified CDS sequence (opt5) from neuraminidase__InfluenzaA__ABW39897

SEQ ID NO: 208220 - RNA, 1413 nt, Artificial Sequence
  derived and/or modified CDS sequence (opt5) from neuraminidase__InfluenzaA__ABW39908
augaaccccaaucagaagaucauuaccaucggcagcauuuccaucgccauugggaucacaucucugaugcuccaaaucggaaacauuaucagcauuugggcuucccacucuauccagacgggcagccagaaucauaccgggauuugcaaccagagaaucauuacauacgagaauagcaccugggugaaccacacauaugucucuaucaauaacaccaauguuguggccggaaaagacaagacaagcgugacccuggcgggcaacuccagccuuuguucuaucuccgggugggcuauuuacacgaaagauaauagcauccggauuggaucuaagggcgacgucuucgugauccgcgaaccuuuuauuuccugcagccaucuggaguguagaaccuucuuucucacacaaggcgcccugcuuaacgauaaacacucuaaugggaccguuaaggaccgguccccguaucgcgcccugaugagcugcccccucggagaagcuccuucccccuacaacucuaaguucgagagcguggccugguccgcuagcgccugucaugauggcaugggguggcugacaaucggaaucucuggcccugacaauggggcggucgccgugcugaaauauaacggaauuaucaccgaaacgauuaaguccuggaaaaagagaauccuccggacacaggagagcgagugcguuugugugaacggcucuugcuuuaccauuaugacagauggccccagcaauggggcugccuccuacaaaaucuucaagaucgaaaagggaaaagucaccaagucuauugagcugaacgcuccuaauuuucacuaugaagaguguagcugcuacccggacaccggcacagugaugugugugugccgcgauaacuggcacggguccaauagacccugggucagcuucaaccagaaucuugacuaccagaucggauauauuugcucuggcguuuuuggggauaacccucggcccaaagacggaaagggcuccuguaauccugugacgguggauggcgccgacggggucaaaggauucagcuacaaguauggcaacgggguguggaucggacgcaccaaaucuaauagacugcggaagggcuuugagaugauuugggaccccaacggguggacagauaccgacuccgauuucagcguuaagcaagacguggucgcgaucacagauugguccggcuacucuggauccuuugugcagcauccggaacucaccggccuggacugcauucgcccuuguuucuggguugagcuugugagagggcugccccgggaaaauacgacaaucuggaccuccggaucuagcaucuccuucugcggcgucgauagcgacaccgccaacuggucuuggccugauggggcugagcuccccuuuacaauugacaaauga

SEQ ID NO: 208221 - RNA, 1413 nt, Artificial Sequence
  derived and/or modified CDS sequence (opt5) from neuraminidase__InfluenzaA__ABW39930
augaaccccaaucagaagaucauuaccaucggcagcauuuccaucgccauugggaucaucucucugaugcuccaaauuggaaacaucauuagcaucugggcuucccacucuauucagacaggcagccagaaucauacggggaucugcaaccagagaauuaucaccuacgagaauagcacaugggugaaccacaccuaugucucuaucaauaacacaaauguuguggccggaaaagacaagaccagcgugacacuggcgggcaacuccagccuuuguucuauuuccgggugggcuaucuacaccaaagauaauagcauucggaucggaucuaagggcgacgucuucgugauucgcgaaccuuuuaucuccugcagccaucuggaguguagaacguucuuucucacccaaggcgcccugcuuaacgauaaacacucuaaugggacaguuaaggaccgguccccguaucgcgcccugaugagcugcccccucggagaagcuccuucccccuacaacucuaaguucgagagcguggccugguccgcuagcgccugucaugauggcaugggguggcugaccaucggaauuucuggcccugacaauggggcggucgccgugcugaaauauaacggaaucauuacagaaaccaucaaguccuggaaaaagcggauucucagaacgcaggagagcgagugcguuugugugaacggcucuugcuuuacaaucaugaccgauggccccagcgacggggcugccuccuacaaaaucuucaagauugaaaagggaaaagucacaaagucuaucgagcugaaugcuccuaacuuucacuaugaagaguguagcugcuacccggauaccggcaccgugaugugugugugccgcgacaauuggcacggguccaacagacccugggucagcuucaaucagaaccuugauuaccagauuggauauaucugcucuggcguuuuuggggacaauccucggcccaaagauggaaagggcuccuguaacccugugacaguggacggcgccgacggggucaaaggauucagcuacaaguauggcaaugggguguggauuggacgcacgaaaucuaacagacugcggaagggcuuugagaugaucugggaucccaauggguggaccgacacagauuccgacuucagcguuaagcaagauguggucgcgauuaccgacugguccggcuacucuggauccuuugugcagcauccggaacucacaggccuggauugcauccgcccuuguuucuggguugagcuugugagagggcugccccgggaaaacaccacgaucuggacauccggaucuagcauuuccuucugcggcgucgacagcgauaccgccaauuggucuuggccugacggggcugagcuccccuuuaccaucgauaaauga

SEQ ID NO: 208222 - RNA, 1413 nt, Artificial Sequence
  derived and/or modified CDS sequence (opt5) from neuraminidase__InfluenzaA__ABW39952
augaaccccaaucagaagaucauuaccaucggcagcauuuccaucacaauugggaucaucucucugaugcuccaaauuggaaacaucauuagcaucugggccucccacucuauucagacgggcagccagaaucauaccgggaugugcaaccagagaaucauuacauacgagaauagcaccugggugaaccacacauaugucucuaucaauaacaccaauguuguggcuggaaaagacaagacaagcgugacccuggccggcaacuccagccuuuguucuaucuccgggugggcgauuuacacgaaagauaauagcauccggauuggaucuaagggcgacgucuucgugauccgcgaaccuuuuauuuccugcagccaucuggaguguagaaccuucuuucucacacaaggcgcucugcuuaacgauaaacacucuaaugggaccguuaaggaccgguccccguaucgcgcccugaugagcugcccccucggagaagccccuucccccuacaacucuaaguucgagagcguggcuugguccgccagcgcuugucaugauggcaugggguggcugacaaucggaaucucuggcccugacaauggggccgucgcggugcugaaauauaacggaauuaucaccgaaacgauuaaguccuggaaaaagagaauccuccggacacaggagagcgagugcguuugugugaacggcucuugcuuuaccauuaugacagauggccccagcaauggggccgcuuccuacaaaaucuucaagaucgaaaagggaaaagucaccaagucuauugagcugaacgccccuaauuuucacuaugaagaguguagcugcuacccggacaccggcacagugaugugugugugccgcgauaacuggcacggguccaauagacccugggucagcuucaaccagaaucuugacuaccagaucggauauauuugcucuggcguuuuuggggauaacccucggcccaaagacggaaagggcuccuguaauccugugacgguggauggcgcugacggggucaaaggauucagcuacaaguauggcaacgggguguggaucggacgcaccaaaucuaauagacugcggaagggcuuugagaugauuugggaccccaacggguggacagauaccgacuccgauuucagcguuaagcaagacguggucgccaucacagauugguccggcuacucuggauccuuugugcagcauccggaacucaccggccuggacugcauucgcccuuguuucuggguugagcuugugagagggcugccccgggaaaauacgacaaucuggaccuccggaucuagcaucuccuucugcggcgucgauagcgacaccgcgaacuggucuuggccugauggggccgagcuccccuuuacaauugacaaauga

SEQ ID NO: 208223 - RNA, 1413 nt, Artificial Sequence; identical to SEQ ID NO: 208102
  derived and/or modified CDS sequence (opt5) from neuraminidase__InfluenzaA__ABW39963

SEQ ID NO: 208224 - RNA, 1413 nt, Artificial Sequence; identical to SEQ ID NO: 208102
  derived and/or modified CDS sequence (opt5) from neuraminidase__InfluenzaA__ABW39985

SEQ ID NO: 208225 - RNA, 1413 nt, Artificial Sequence
  derived and/or modified CDS sequence (opt5) from neuraminidase__InfluenzaA__ABW39996
augaaccccaaucagaagaucauuaccaucggcagcauuuccaucgccauugggaucaucucucugaugcuccaaauuggaaacaucauuagcaucugggcuucccacucuauucagacaggcagccagaaucauacggggaucugcaaccagagaauuaucaccuacgaaaauuccacaugggugaaccacaccuaugucaauaucaacaauacaaacguuguggccggaaaagacaagaccucugugacacuggcgggcaauagcucccuuuguagcauuucugggugggcuaucuacaccaaagauaacuccauucggaucggaagcaagggcgacgucuucgugauucgcgagccuuuuaucucuugcucccaucuggaguguagaacguucuuucucacccaaggcgcccugcuuaaugauaaacacagcaacgggacaguuaaggaccggucuccguaucgcgcccugauguccugcccccucggagaagcuccuagccccuacaauuccaaguucgagucuguggccuggagcgcuuccgccugucaugauggcaugggguggcugaccaucggaauuagcggcccugacaacggggcggucgccgugcugaaauauaacggaaucauuacagaaaccaucaagucuuggaaaaagcggauucucagaacgcaggaguccgagugcguuugugugaauggcagcugcuuuacaaucaugaccgauggccccucuaacgggacagcuagcuacaaaaucuucaagauugaaaagggaaaagucaccaaguccaucgagcugaaugccccuaacuuucacuaugaagaguguucuugcuacccggacaccggcacagugaugugugugugccgcgauaauuggcacgggagcaacagacccugggucuccuucaaucagaaccuugacuaccagguuggauauauuugcagcggcguguuuggggauaauccucggcccaaagacggaaagggcucuuguaacccuaugacgguggauggcgcugacggggucaaaggauucuccuacaaguauggcaaugggguguggaucggacgcaccaaaagcaacaagcugagaaagggcuuugagaugauuugggaccccaauggguggacagauaccgacucugauuucuccguuaaacaagacguggucgccaucacagauuggagcggcuacuccggaucuuuugugcagcauccggaacucaccggccuggacugcauucggccuuguuucuggguugagcuugugcgcgggcugcccagagaaaacacgacaaucuggaccagcggauccucuaucagcuucugcggcgucgauuccgacaccgcgaauuggagcuggccugauggggccgagcuccccuuuacaauugacaaguga

SEQ ID NO: 208226 - RNA, 1413 nt, Artificial Sequence; identical to SEQ ID NO: 208102
  derived and/or modified CDS sequence (opt5) from neuraminidase__InfluenzaA__ABW40007

SEQ ID NO: 208227 - RNA, 1413 nt, Artificial Sequence
  derived and/or modified CDS sequence (opt5) from neuraminidase__InfluenzaA__ABW40018
augaaccccaaucagaagaucauuaccaucggcagcauuuccaucgccauugggaucaucucucugaugcuccaaauuggaaacaucauuagcaucugggcuucccacucuauucagacaggcagccagaaucauacggggaucugcaaccagagaauuaucaccuacgaaaauuccacaugggugaaccacaccuaugucaauaucaacaauacaaacguuguggccggaaaagacaagaccucugugacacuggcgggcaauagcucccuuuguagcauuucugggugggcuaucuacaccaaagauaacuccauucggaucggaagcaagggcgacgucuucgugauucgcgagccuuuuaucucuugcucccaucuggaguguagaacguucuuucucacccaaggcgcccugcuuaaugauaaacacagcaacgggacaguuaaggaccggucuccguaucgcgcccugauguccugcccccucggagaagcuccuagccccuacaauuccaaguucgagucuguggccuggagcgcuuccgccugucaugauggcaugggguggcugaccaucggaauuagcggcccugacaacggggcggucgccgugcugaaauauaacggaaucauuacagaaaccaucaagucuuggaaaaagcggauucucagaacgcaggaguccgagugcguuugugugaauggcagcugcuuuacaaucaugaccgauggccccucuaacggggcugccagcuacaaaaucuucaagauugaaaagggaaaagucacaaaguccaucgagcugaaugcuccuaacuuucacuaugaagaguguucuugcuacccggacaccggcaccgugaugugugugugccgcgauaauuggcacgggagcaacagacccugggucuccuucaaucagaaccuugacuaccagauuggauauaucugcagcggcguuuuuggggauaauccucggcccaaagacggaaagggcucuuguaacccugugacaguggauggcgccgacgggauuaaaggauucuccuacaaguauggcaauggggucuggaucggacgcacgaaaagcaacagacugcggaagggcuuugagaugauuugggaccccaauggguggaccaacacagauucugacuucuccgugaagcaagauguuguggcgaucaccgacuggagcggcuacuccggaucuuuuguccagcauccggaacucacaggccuggauugcauccgcccuuguuucuggguggagcuuguuagagggcugccccgggaaaauaccacgauuuggacaagcggauccucuaucagcuucugcggcguggacggggauaccgccaacugguccuggccugacggagcugagcuccccuuuaccauugauaaauga

SEQ ID NO: 208228 - RNA, 1410 nt, Artificial Sequence; identical to SEQ ID NO: 207956
  derived and/or modified CDS sequence (opt5) from neuraminidase__InfluenzaA__ABW40029

SEQ ID NO: 208229 - RNA, 1413 nt, Artificial Sequence
  derived and/or modified CDS sequence (opt5) from neuraminidase__InfluenzaA__ABW40040
augaaccccaaucagaagaucauuaccaucggcagcauuuccaucgccauugggaucaucucucugaugcuccaaauuggaaacaucauuagcaucugggcuucccacucuauucagacaggcagccagaaucauacggggaucugcaaccagagaauuaucaccuacgagaauagcacaugggugaaccacaccuaugucucuaucaauaacacaaauguuguggccggaaaagacaagaccagcgugacacuggcgggcaacuccagccuuuguucuauuuccgggugggcuaucuacaccaaagauaauagcauucggaucggaucuaagggcgacgucuucgugauucgcgaaccuuuuaucuccugcagccaucuggaguguagaacguucuuucucacccaaggcgcccugcuuaacgauaaacacucuaaugggacaguuaaggaccgguccccguaucgcgcccugaugagcugcccccucggagaagcuccuucccccuacaacucuaaguucgagagcguggccugguccgcuagcgccugucaugauggcaugggguggcugaccaucggaauuucuggcccugacaauggggcggucgccgugcugaaauauaacggaaucauuacagaaaccaucaaguccuggaaaaagcggauucucagaacgcaggagagcgagugcguuugugugaacggcucuugcuuuacaaucaugaccgauggccccagcaauggggcugccuccuacaaaaucuucaagauugaaaagggaaaagucacaaagucuaucgagcugaacgcuccuaauuuucacuaugaagaguguagcugcuacccggacaccggcaccgugaugugugugugccgcgauaacuggcacggguccaauagacccugggucagcuucaaccagaaucuugacuaccagauuggauauaucugcucuggcguuuuuggggauaacccucggcccaaagacggaaagggcuccuguaauccugugacaguggauggcgccgacggggucaaaggauucagcuacaaguauggcaacgggauuuggaucggacgcacgaaaucuaauagacugcggaagggcuuugagaugauuugggaccccaacggguggaccgauacagacuccgauuucagcgugaagcaagacguuguggcgaucaccgauugguccggcuacucuggauccuuuguccagcauccggaacucacaggccuggacugcauccgcccuuguuucuggguggagcuuguuagagggcugccccgggaaaauaccacgauuuggacauccggaucuagcaucuccuucugcggcguggauagcgacaccgccaacuggucuuggccugauggggcugagcuccccuuuaccauugacaaauga

SEQ ID NO: 208230 - RNA, 1413 nt, Artificial Sequence; identical to SEQ ID NO: 208102
  derived and/or modified CDS sequence (opt5) from neuraminidase__InfluenzaA__ABW40051

SEQ ID NO: 208231 - RNA, 1413 nt, Artificial Sequence; identical to SEQ ID NO: 208102
  derived and/or modified CDS sequence (opt5) from neuraminidase__InfluenzaA__ABW40062

SEQ ID NO: 208232 - RNA, 1410 nt, Artificial Sequence; identical to SEQ ID NO: 208138
  derived and/or modified CDS sequence (opt5) from neuraminidase__InfluenzaA__ABW40084

SEQ ID NO: 208233 - RNA, 1413 nt, Artificial Sequence
  derived and/or modified CDS sequence (opt5) from neuraminidase__InfluenzaA__ABW40095
augaaccccaaucagaagaucauuaccaucggcagcauuuccguggccaucgggauuaucucucugaugcuccaaaucggaaacauuaucagcauuugggcuucccacucuauccagacaggcagccagaaucauacggggauuugcaaccagagaaucauuaccuacgagaauagcacaugggucaaccacaccuauguuucuaucaauaacacaaaugugguggccggaaaagacaagaccagcgucacacuggcgggcaacuccagccuuuguucuaucuccgggugggcuauuuacaccaaagauaauagcauccggauuggaucuaagggcgacguguucguuauccgcgaaccuuuuauuuccugcagccaucuggaguguagaacguucuuucucacccaaggcgcccugcuuaacgauaaacacucuaaugggacagugaaggaccgguccccguaucgcgcccugaugagcugcccccucggagaagcuccuucccccuacaacucuaaguucgagagcgucgccugguccgcuagcgccugucaugauggcaugggguggcugaccaucggaaucucuggcccugacaauggggcgguggccguucugaaauauaacggaauuaucacagaaaccauuaaguccuggaaaaagagaauccuccggacgcaggagagcgagugcgugugugucaacggcucuugcuuuacaauuaugaccgauggccccagcaauggggcugccuccuacaaaaucuucaagaucgaaaagggaaaagugacaaagucuauugagcugaacgcuccuaauuuucacuaugaagaguguagcugcuacccggacaccggcaccgugaugugugucugccgcgauaacuggcacggguccaauagacccuggguuagcuucaaccagaaucuugacuaccagaucggauauauuugcucuggcguguuuggggauaacccucggcccaaagacggaaagggcuccuguaauccuaugacaguggauggcgccgacggggucaaaggauucagcuacaaguauggcaacgggguguggaucggacgcacgaaaucuaauagacugcggaagggcuuugagaugauuugggaccccaacggguggaccgauacagacuccgauuucagcguuaagcaagacguggucgcgaucaccgauugguccggcuacucuggauccuuugugcagcauccggaacucacaggccuggacugcauucgcccuuguuucuggguugagcuugugagagggcugccccgggaaaauaccacgaucuggacauccggaucuagcaucuccuucugcggcgucgauagcgacaccgccaacuggucuuggccugauggggcugagcuccccuuuaccauugacaaauga

SEQ ID NO: 208234 - RNA, 1413 nt, Artificial Sequence
  derived and/or modified CDS sequence (opt5) from neuraminidase__InfluenzaA__ABW40106
augaaccccaaucagaagaucauuaccaucggcagcauuuccaucgccauugggaucaucucucugaugcuccaaauuggaaacaucauuagcaucugggcuucccacucuauucagacaggcagccagaaucauacggggaucugcaaccagagaauuaucaccuacgagaauagcacaugggugaaccacaccuaugucucuaucaauaacacaaauguuguggccggaaaagacaagaccagcgugacacuggcgggcaacuccagccuuuguucuauuuccgggugggcuaucuacaccaaagauaauagcauucggaucggaucuaagggcgacgucuucgugauucgcgaaccuuuuaucuccugcagccaucuggaguguagaacguucuuucucacccaaggcgcccugcuuaacgauaaacacucuaaugggacaguuaaggaccgguccccguaucgcgcccugaugagcugcccccucggagaagcuccuucccccuacaacucuaaguucgagagcguggccugguccgcuagcgccugucaugauggcaugggguggcugaccaucggaauuucuggcccugacaauggggcggucgccgugcugaaauauaacggaaucauuacagaaaccaucaaguccuggaaaaagcggauucucagaacgcaggagagcgagugcguuugucugaacggcucuugcuuuacaaucaugaccgauggccccagcaauggggcugccuccuacaaaaucuucaagauugaaaagggaaaagugacaaagucuaucgagcuuaacgcuccuaauuuucacuaugaagaguguagcugcuacccggacaccggcaccgucaugugugugugccgcgauaacuggcacggguccaauagacccugggugagcuucaaccagaaucuggacuaccagauuggauauaucugcucuggcgucuuuggggauaacccucggcccaaagacggaaagggcuccuguaauccuguuacaguggauggcgccgacggggugaaaggauucagcuacaaguauggcaacggggucuggauuggacgcacgaaaucuaauagacuccggaagggcuuugagauggugugggaccccaacggguggaccgauacagacuccgauuucagcguuaagcaagacguggucgcgaucaccgauugguccggcuacucuggauccuuugugcagcauccggaacugacaggccuugacugcauucgcccuuguuucuggguugagcuggugagagggcucccccgggaaaauaccacgaucuggacauccggaucuagcaucuccuucugcggcgucgauagcgacaccgccaacuggucuuggccugauggggcugagcugcccuuuaccauugacaaauga

SEQ ID NO: 208235 - RNA, 1413 nt, Artificial Sequence; identical to SEQ ID NO: 208102
  derived and/or modified CDS sequence (opt5) from neuraminidase__InfluenzaA__ABW40117

SEQ ID NO: 208236 - RNA, 1413 nt, Artificial Sequence; identical to SEQ ID NO: 208102
  derived and/or modified CDS sequence (opt5) from neuraminidase__InfluenzaA__ABW40128

SEQ ID NO: 208237 - RNA, 1410 nt, Artificial Sequence; identical to SEQ ID NO: 207956
  derived and/or modified CDS sequence (opt5) from neuraminidase__InfluenzaA__ABW40139

SEQ ID NO: 208238 - RNA, 1413 nt, Artificial Sequence; identical to SEQ ID NO: 208102
  derived and/or modified CDS sequence (opt5) from neuraminidase__InfluenzaA__ABW40150

SEQ ID NO: 208239 - RNA, 1413 nt, Artificial Sequence; identical to SEQ ID NO: 208102
  derived and/or modified CDS sequence (opt5) from neuraminidase__InfluenzaA__ABW40161

SEQ ID NO: 208240 - RNA, 1410 nt, Artificial Sequence
  derived and/or modified CDS sequence (opt5) from neuraminidase__InfluenzaA__ABW40172
augaaccccaaucagaagaucauuaccaucggcagcgugucccugacaauuucuacgaucugcuucuuuaugcaaauugccauccucaucaccacagucacccugcacuucaaacaguacgaguuuaacagcccuccgaauaaccagguuaugcuuugugaacccacaauuaucgagagaaauauuaccgaaaucguguaucugacaaacaccacgauugagaaggaaaucugcccuaaacucgcugaguaccggaauugguccaagccccagugugacauuaccggguucgccccuuuuucuaaagauaacagcauccgccuguccgcgggaggcgacaucugggugacaagagagcccuaugucucuugcgauccugacaaguguuaccaauucgcucuugggcagggaaccacacugaauaacgugcauagcaaugauaccguucgggaccgcacgccguauagaacacuccugaugaacgaacugggcgugcccuuucaccucgggaccaagcaggucugcauugccugguccucuagcuccugucaugauggaaaagccuggcugcacgugugcaucacaggcgacgauaagaaugcuaccgccagcuucauuuacaacggccggcuuguugacucuaucguguccuggagcaaagagauucugcgcacccaggaaucugagugugucugcaucaaugggacauguacgguggugaugaccgauggauccgcuagcggcaaggccgacacaaaaauccucuuuauugaggaagggaagaucguccauaccuccacacugucuggaagcgcgcaacacguugaggaaugcuccugcuauccuagauaccccggcgugcggugugugugccgcgauaacuggaaggggagcaacagaccuauugucgacaucaauauuaaagaccacucuaucguguccagcuacguuuguucuggacuugugggcgauacgccccggaagaacgacagcuccucuagcucccauugccuggauccgaauaacgaggaaggcgggcacggagucaaaggcugggccuucgacgaugggaaugacguguggaugggacgcaccaucagcgagaagucuagacucggcuaugagacauuuaaaguuauugaagggugguccaacccuaagagcaaacugcagaucaaucgccaggugauugucgaucggggaaacagaucuggcuacuccggcaucuucagcguggaggggaaguccuguauuaaucggugcuuuuaugucgaacugaccagaggacgcaaggaggaaaccgaggugcucuggacaucuaacagcaucguuguguucuguggcaccuccgggacauacggaacgggcucuuggcccgacggggcugauauuaaucugaugccuaucuga

SEQ ID NO: 208241 - RNA, 1413 nt, Artificial Sequence; identical to SEQ ID NO: 208102
  derived and/or modified CDS sequence (opt5) from neuraminidase__InfluenzaA__ABW40183

SEQ ID NO: 208242 - RNA, 1410 nt, Artificial Sequence; identical to SEQ ID NO: 207956
  derived and/or modified CDS sequence (opt5) from neuraminidase__InfluenzaA__ABW40194

SEQ ID NO: 208243 - RNA, 1413 nt, Artificial Sequence; identical to SEQ ID NO: 208137
  derived and/or modified CDS sequence (opt5) from neuraminidase__InfluenzaA__ABW40205

SEQ ID NO: 208244 - RNA, 1413 nt, Artificial Sequence; identical to SEQ ID NO: 208141
  derived and/or modified CDS sequence (opt5) from neuraminidase__InfluenzaA__ABW40216

SEQ ID NO: 208245 - RNA, 1413 nt, Artificial Sequence; identical to SEQ ID NO: 208141
  derived and/or modified CDS sequence (opt5) from neuraminidase__InfluenzaA__ABW40227

SEQ ID NO: 208246 - RNA, 1413 nt, Artificial Sequence; identical to SEQ ID NO: 208102
  derived and/or modified CDS sequence (opt5) from neuraminidase__InfluenzaA__ABW40238

SEQ ID NO: 208247 - RNA, 1410 nt, Artificial Sequence
  derived and/or modified CDS sequence (opt5) from neuraminidase__InfluenzaA__ABW40249
augaaccccaaucagaagaucauuaccaucggcagcgugucccugacaauuucuacgaucugcuucuuuaugcaaauugccauccucaucaccacagucacccugcacuucaaacaguacgaguuuaacagcccuccgaauaaccagguuaugcuuugugaacccacaauuaucgagagaaauauuaccgaaaucguguaucugacaaacaccacgauugagaaggaaaucugcccuaaacucgcugaguaccggaauugguccaagccccagugugacauuaccggguucgccccuuuuucuaaagauaacagcauccgccuguccgcgggaggcgacaucugggugacaagagagcccuaugucucuugcgauccugacaaguguuaccaauucgcucuugggcagggaaccacacugaauaacgugcauagcaaugauaccguucgggaccgcacgccguauagaacacuccugaugaacgaacugggcgugcccuuucaccucgggaccaagcaggucugcauugccugguccucuagcuccugucaugauggaaaagccuggcugcacgugugcaucacaggcgacgauaagaaugcuaccgccagcuucauuuacaacggccggcuuguugacucuaucguguccuggagcaaagagauucugcgcacccaggaaucugagugugucugcaucaaugggacauguacgguggugaugaccgauggauccgcuagcggcaaggccgacacaaaaauccucuuuauugaggaagggaagaucguccauaccuccacacugucuggaagcgcgcaacacguugaggaaugcuccugcuauccuagauaccccggcgugcggugugugugccgcgauaacuggaaggggagcaacagaccuauugucgacaucaauauuaaagaccacucuaucguguccagcuacguuuguucuggacuugugggcgauacgccccggaagaacgacagcuccucuagcucccauugccuggauccgaauaacgaggaaggcgggcacggagucaaaggcugggccuucgacgaugggaaugacguguggaugggacgcaccaucagcgagaagucuagacucggcuaugagacauuuaaaguuauugaagggugguccaaccauaagagcaaacugcagaucaaucgccaggugauugucgaucggggaaacagaucuggcuacuccggcaucuucagcguggaggggaaguccuguauuaaucggugcuuuuaugucgaacugaucagaggacgcaaggaggaaaccgaggugcucuggaccucuaacagcauuguuguguucuguggcacauccgggaccuacggaacaggcucuuggccugacggggcugauaucaaucugaugcccaucuga

SEQ ID NO: 208248 - RNA, 1413 nt, Artificial Sequence; identical to SEQ ID NO: 208102
  derived and/or modified CDS sequence (opt5) from neuraminidase__InfluenzaA__ABW40260

SEQ ID NO: 208249 - RNA, 1410 nt, Artificial Sequence
  derived and/or modified CDS sequence (opt5) from neuraminidase__InfluenzaA__ABW40271
augaaccccaaucagaagaucauuaccaucggcagcgugucccugacaauuucuacgaucugcuucuuuaugcaaauugccauccucaucaccacagucacccugcacuucaaacaguacgaguuuaacagcccuccgaauaaccagguuaugcuuugugaacccacaauuaucgagagaaauauuaccgaaaucguguaucugacaaacaccacgauugagaaggaaaucugcccuaaacucgcugagcaucggaauugguccaagccccagugugacauuaccggguucgccccuuuuucuaaagauaacagcauccgccuguccgcgggaggcgacaucugggugacaagagagcccuacgucucuugcgauccugacaaguguuaucaauucgcucuugggcagggaaccacacugaauaacgugcacagcaaugauaccguucgggaccgcacgccguacagaacacuccugaugaacgaacugggcgugcccuuucaucucgggaccaagcaggucugcauugccugguccucuagcuccugucacgauggaaaagccuggcugcaugugugcaucacaggcgacgauaagaaugcuaccgccagcuucauuuauaacggccggcuuguugacucuaucguguccuggagcaaagagauucugcgcacccaggaaucugagugugucugcaucaaugggacauguacgguggugaugaccgauggauccgcuagcggcaaggccgacacaaaaauccucuuuauugaggaagggaagaucguccacaccuccacacugucuggaagcgcgcaacacguugaggaaugcuccugcuacccuagauaucccggcgugcggugugugugccgcgauaacuggaaggggagcaacagaccuauugucgacaucaauauuaaagaccauucuaucguguccagcuacguuuguucuggacuugugggcgauacgccccggaagaacgacagcuccucuagcucccacugccuggauccgaauaacgaggaaggcgggcauggagucaaaggcugggccuucgacgaugggaaugacguguggaugggacgcaccaucagcgagaagucuagacucggcuacgagacauuuaaaguuauugaagggugguccaacccuaagagcaaacugcagaucaaucgccaggugauugucgaucggggaaacagaucuggcuauuccggcaucuucagcguggaggggaaguccuguauuaaucggugcuuuuacgucgaacugaucagaggacgcaaggaggaaaccgaggugcucuggaccucuaacagcauuguuguguucuguggcacauccgggaccuauggaacaggcucuuggcccgacggggcugauaucaaucugaugccuaucuga

SEQ ID NO: 208250 - RNA, 1413 nt, Artificial Sequence; identical to SEQ ID NO: 208102
  derived and/or modified CDS sequence (opt5) from neuraminidase__InfluenzaA__ABW40282

SEQ ID NO: 208251 - RNA, 1413 nt, Artificial Sequence; identical to SEQ ID NO: 208137
  derived and/or modified CDS sequence (opt5) from neuraminidase__InfluenzaA__ABW40293

SEQ ID NO: 208252 - RNA, 1413 nt, Artificial Sequence; identical to SEQ ID NO: 208102
  derived and/or modified CDS sequence (opt5) from neuraminidase__InfluenzaA__ABW40304

SEQ ID NO: 208253 - RNA, 1413 nt, Artificial Sequence; identical to SEQ ID NO: 208102
  derived and/or modified CDS sequence (opt5) from neuraminidase__InfluenzaA__ABW40315

SEQ ID NO: 208254 - RNA, 1410 nt, Artificial Sequence; identical to SEQ ID NO: 207956
  derived and/or modified CDS sequence (opt5) from neuraminidase__InfluenzaA__ABW40326

SEQ ID NO: 208255 - RNA, 1413 nt, Artificial Sequence; identical to SEQ ID NO: 208143
  derived and/or modified CDS sequence (opt5) from neuraminidase__InfluenzaA__ABW40337

SEQ ID NO: 208256 - RNA, 1413 nt, Artificial Sequence; identical to SEQ ID NO: 208137
  derived and/or modified CDS sequence (opt5) from neuraminidase__InfluenzaA__ABW40359

SEQ ID NO: 208257 - RNA, 1413 nt, Artificial Sequence
  derived and/or modified CDS sequence (opt5) from neuraminidase__InfluenzaA__ABW40370
augaaccccaaucagaagaucauuaccaucggcagcauuuccaucgccauugggaucaucucucugaugcuccaaauuggaaacaucauuagcaucugggcuucccacucuauucagacaggcagccagaaucauacggggaucugcaaccagagaauuaucaccuacgaaaauuccacaugggugaaccacaccuaugucucuaucaauaacacaaauguuguggccggaaaagacaagaccagcgugacacuggcgggcaacuccagccuuuguucuauuuccgggugggcuaucuacaccaaagauaauagcauucggaucggaucuaagggcgacgucuucgugauucgcgagccuuuuaucuccugcagccaucuggaguguagaacguucuuucucacccaaggcgcccugcuuaacgauaaacacucuaaugggacaguuaaggaccgguccccguaucgcgcccugaugagcugcccccucggagaagcuccuucccccuacaacucuaaguucgagagcguggccugguccgcuagcgccugucaugauggcaugggguggcugaccaucggaauuucuggcccugacaauggggcggucgccgugcugaaauauaacggaaucauuacagaaaccaucaaguccuggaaaaagcggauucucagaacgcaggagagcgagugcguuugugugaacggcucuugcuuuacaaucaugaccgauggccccagcaauggggcugccuccuacaaaaucuucaagauugaaaagggaaaagucacaaagucuaucgagcugaacgcuccuaauuuucacuaugaagaguguagcugcuacccggacuccggcaccgugaugugugugugccgcgauaacuggcacgggagcaauagacccugggucucuuucaaccagaaucuugacuaccagauuggauauaucugcuccggcguuuuuggggauaacccucggcccaaagacggaaagggcagcuguaauccugugaccguggauggcgccgacggggucaaaggauucucuuacaaguauggcaacgggguguggauuggacgcacaaaauccaauagacugcggaagggcuuugagaugaucugggaccccaacggguggacggauaccgacagcgauuucuccguuaagcaagacguggucgcgauuacagauuggucuggcuacagcggauccuuugugcagcauccggaacucaccggccuggacugcauccgcccuuguuucuggguugagcuugugagagggcugccccgggaaaauacaaccaucuggacgucuggaagcuccauuagcuucugcggcgucgauucugacacagccaacugguccuggccugauggggcugagcuccccuuuaccaucgacaaauga

SEQ ID NO: 208258 - RNA, 1413 nt, Artificial Sequence; identical to SEQ ID NO: 208102
  derived and/or modified CDS sequence (opt5) from neuraminidase__InfluenzaA__ABW40403

SEQ ID NO: 208259 - RNA, 1413 nt, Artificial Sequence
  derived and/or modified CDS sequence (opt5) from neuraminidase__InfluenzaA__ABW40414
augaaccccaaucagaagaucauuaccaucggcagcauuuccaucgccauugggaucaucucucugaugcuccaaauuggaaacaucauuagcaucugggcuucccacucuauucagacaggcagccagaaucauacggggaucugcaaccagagaauuaucaccuacgagaauagcacaugggugaaccacaccuaugucucuaucaauaacacaaauguuguggccggaaaagacaagaccagcgugacacuggcgggcaacuccagccuuuguucuauuuccgggugggcuaucuacaccaaagauaauagcauucggaucggaucuaagggcgacgucuucgugauucgcgaaccuuuuaucuccugcagccaucuggaguguagaacguucuuucucacccaaggcgcccugcuuaacgauaaacacucuaaugggacaguuaaggaccgguccccguaucgcgcccugaugagcugcccccucggagaagcuccuucccccuacaacucuaaguucgagagcguggccugguccgcuagcgccugucaugauggcaugggguggcugaccaucggaauuucuggcccugacaauggggcggucgccgugcugaaauauaacggaaucauuacagaaaccaucaaguccuggaaaaagcggauucucagaacgcaggagagcgagugcguuugugugaacggcucuugcuuuacaaucaugaccgauggccccagcaauggggcugccuccuacaaaaucuucaagauugaaaagggaaaagucacaaagucuaucgagcugaacgcuccuaauuuucacuaugaagaguguagcugcuacccggacaccggcaccgugaugugugugugccgcgauaacuggcacggguccaauagacccugggucagcuucgaccagaaccuugauuaccagauuggauauaucugcucuggcguuuuuggggacaauccucggcccaaagauggaaagggcuccuguaacccugugacaguggacggcgccgacggggucaaaggauucagcuacaaguauggcaaugggguguggauuggacgcacgaaaucuaacagacugcggaagggcuuugagaugaucugggaucccaauggguggaccgacacagauuccgacuucagcguuaagcaagauguggucgcgauuaccgacugguccggcuacucuggauccuuugugcagcauccggaacucacaggccuggauugcauccgcccuuguuucuggguugagcuugugagagggcugccccgggaaaacaccacgaucuggacauccggaucuagcauuuccuucugcggcgucgacagcgauaccgccaauuggucuuggccugacggggcugagcuccccuuuaccaucgauaaauga

SEQ ID NO: 208260 - RNA, 1413 nt, Artificial Sequence; identical to SEQ ID NO: 208102
  derived and/or modified CDS sequence (opt5) from neuraminidase__InfluenzaA__ABW40425

SEQ ID NO: 208261 - RNA, 1413 nt, Artificial Sequence; identical to SEQ ID NO: 208143
  derived and/or modified CDS sequence (opt5) from neuraminidase__InfluenzaA__ABW40436

SEQ ID NO: 208262 - RNA, 1413 nt, Artificial Sequence
  derived and/or modified CDS sequence (opt5) from neuraminidase__InfluenzaA__ABW40447
augaaccccaaucagaagaucauuaccaucggcagcauuuccaucgccauugggaucaucucucugaugcuccaaauuggaaacaucauuagcaucugggcuucccacucuauucagacaggcagccagaaucauacggggaucugcaaccagagaauuaucaccuacgaaaauuccacaugggugaaccacaccuaugucaauaucaacaauacaaacguuguggccggaaaagacaagaccucugugacacuggcgggcaauagcucccuuuguagcauuucugggugggcuaucuacaccaaagauaacuccauucggaucggaagcaagggcgacgucuucgugauucgcgagccuuuuaucucuugcucccaucuggaguguagaacguucuuucucacccaaggcgcccugcuuaaugauaaacacagcaacgggacaguuaaggaccggucuccguaucgcgcccugauguccugcccccucggagaagcuccuagccccuacaauuccaaguucgagucuguggccuggagcgcuuccgccugucaugauggcaugggguggcugaccaucggaauuagcggcccugacaacggggcggucgccgugcugaaauauaacggaaucauuacagaaaccaucaagucuuggaaaaagcggauucucagaacgcaggaguccgagugcguuugugugaauggcagcugcuuuacaaucaugaccgauggccccucuaacggggcugccagcuacaaaaucuucaagauugaaaagggaaaagucacaaaguccaucgagcugaaugcuccuaacuuucacuaugaagaguguucuugcuacccggacaccggcaccgugaugugugugugccgcgauaauuggcacgggagcaacagacccugggucuccuucaaucagaaccuugacuaccagguuggauauauuugcagcggcguguuuggggauaauccucggcccaaagacggaaagggcucuuguaacccuaugacaguggauggcgccgacggggucaaaggauucuccuacaaguauggcaaugggguguggaucggacgcacgaaaagcaacaagcugagaaagggcuuugagaugauuugggaccccaauggguggaccgauacagacucugauuucuccguuaaacaagacguggucgcgaucaccgauuggagcggcuacuccggaucuuuugugcagcauccggaacucacaggccugaacugcauucggccuuguuucuggguugagcuugugcgcgggcugcccagagaaaauaccacgaucuggacaagcggauccucuaucagcuucugcggcgucgacuccgauaccgccaacuggagcuggccugacggggcugagcuccccuuuaccauugauaaguga

SEQ ID NO: 208263 - RNA, 1413 nt, Artificial Sequence; identical to SEQ ID NO: 208128
  derived and/or modified CDS sequence (opt5) from neuraminidase__InfluenzaA__ABW40458

SEQ ID NO: 208264 - RNA, 1413 nt, Artificial Sequence; identical to SEQ ID NO: 208102
  derived and/or modified CDS sequence (opt5) from neuraminidase__InfluenzaA__ABW40469

SEQ ID NO: 208265 - RNA, 1413 nt, Artificial Sequence; identical to SEQ ID NO: 208102
  derived and/or modified CDS sequence (opt5) from neuraminidase__InfluenzaA__ABW40491

SEQ ID NO: 208266 - RNA, 1413 nt, Artificial Sequence; identical to SEQ ID NO: 208102
  derived and/or modified CDS sequence (opt5) from neuraminidase__InfluenzaA__ABW40502

SEQ ID NO: 208267 - RNA, 1413 nt, Artificial Sequence; identical to SEQ ID NO: 208143
  derived and/or modified CDS sequence (opt5) from neuraminidase__InfluenzaA__ABW40513

SEQ ID NO: 208268 - RNA, 1413 nt, Artificial Sequence; identical to SEQ ID NO: 208102
  derived and/or modified CDS sequence (opt5) from neuraminidase__InfluenzaA__ABW40524

SEQ ID NO: 208269 - RNA, 1413 nt, Artificial Sequence
  derived and/or modified CDS sequence (opt5) from neuraminidase__InfluenzaA__ABW40546
augaaccccaaucagaagaucauuaccaucggcagcauuuccaucgccauugggaucaucucucugaugcuccaaauuggaaacaucauuagcaucugggcuucccacucuauucagacaggcagccagaaucauacggggaucugcaaccagagaauuaucaccuacgaaaauuccacaugggugaaccacaccuaugucaauaucaacaauacaaacguuguggccggaaaagacaagaccucugugacacuggcgggcaauagcucccuuuguagcauuucugggugggcuaucuacaccaaagauaacuccauucggaucggaagcaagggcgacgucuucgugauucgcgagccuuuuaucucuugcucccaucuggaguguagaacguucuuucucacccaaggcgcccugcuuaaugauaaacacagcaacgggacaguuaaggaccggucuccguaucgcgcccugauguccugcccccucggagaagcuccuagccccuacaauuccaaguucgagucuguggccuggagcgcuuccgccugucaugauggcaugggguggcugaccaucggaauuagcggcccugacaacggggcggucgccgugcugaaauauaacggaaucauuacagaaaccaucaagucuuggaaaaagcggauucucagaacgcaggaguccgagugcguuugugugaauggcagcugcuuuacaaucaugaccgauggccccucuaacggggcugccagcuacaaaaucuucaagauugaaaagggaaaagucacaaaguccauggagcugaaugcuccuaacuuucacuaugaagaguguucuugcuacccggacaccggcaccgugaugugugugugccgcgauaauuggcacgggagcaacagacccugggucuccuucaaucagaaccuugacuaccagaucggauauauuugcagcggcguuuuuggggauaauccucggcccaaagacggaaagggcucuuguaacccugugacaguggauggcgccgacggggucaaaggauucuccuacaaguauggcaaugggguguggaucggacgcacgaaaagcaacagacugcggaagggcuuugagaugauuugggaccccaauggguggaccgauacagacucugauuucuccguuaagcaagacguggucgcgaucaccgauuggagcggcuacuccggaucuuuugugcagcauccggaacucacaggccuggacugcauucgcccuuguuucuggguugagcuugugagagggcugccccgggaaaacaccacgaucuggacaagcggauccucuaucagcuucugcggcgucgauuccgacaccgccaauuggagcuggccugauggggcugagcuccccuuuaccauugacaaauga

SEQ ID NO: 208270 - RNA, 1413 nt, Artificial Sequence; identical to SEQ ID NO: 208102
  derived and/or modified CDS sequence (opt5) from neuraminidase__InfluenzaA__ABW40557

SEQ ID NO: 208271 - RNA, 1413 nt, Artificial Sequence
  derived and/or modified CDS sequence (opt5) from neuraminidase__InfluenzaA__ABW40568
augaaccccaaucagaagaucauuaccaucggcagcauuuccaucgccauugggaucaucucucugaugcuccaaauuggaaacaucauuagcaucugggcuucccacucuauucagacaggcagccagaaucauacggggaucugcaaccagagaauuaucaccuacgagaauagcacaugggugaaccacaccuaugucucuaucaauaacacaaauguuguggccggaaaagacaagaccagcgugacacuggcgggcaacuccagccuuuguucuauuuccgggugggcuaucuacaccaaagauaauagcauucggaucggaucuaagggcgacgucuucgugauucgcgaaccuuuuaucuccugcagccaucuggaguguagaacguucuuucucacccaaggcgcccugcuuaacgauaaacacucuaaugggacaguuaaggaccgguccccguaucgcgcccugaugagcugcccccucggagaagcuccuucccccuacaacucuaaguucgagagcguggccugguccgcuagcgccugucaugauggcaugggguggcugaccaucggaauuucuggcccugacaauggggcggucgccgugcugaaauauaacggaaucauuacagaaaccaucaaguccuggaaaaagcagauucucagaacgcaggagagcgagugcguuugugugaacggcucuugcuuuacaaucaugaccgauggccccagcaauggggcugccuccuacaaaaucuucaagauugaaaagggaaaagucacaaagucuaucgagcugaacgcuccuaauuuucacuaugaagaguguagcugcuacccggacaccggcaccgugaugugugugugccgggauaacuggcacggguccaaucgccccugggucagcuucaaccagaaucuugacuaccaaauuggauauaucugcucuggcguuuuuggggauaacccuagacccaaagacggaaagggcuccuguaauccugugacaguggauggcgccgacggggucaaaggauucagcuacaaguauggcaacgggguguggauuggacggacgaaaucuaaucgccugagaaagggcuuugagaugaucugggaccccaacggguggaccgauacagacuccgauuucagcguuaagcaggacguggucgcgauuaccgauugguccggcuacucuggauccuuugugcagcauccggaacucacaggccuggacugcauccggccuuguuucuggguugagcuugugcgcgggcugcccagagaaaauaccacgaucuggacauccggaucuagcauuuccuucugcggcgucgauagcgacaccgccaacuggucuuggccugauggggcugagcuccccuuuaccaucgacaaauga

SEQ ID NO: 208272 - RNA, 1413 nt, Artificial Sequence
  derived and/or modified CDS sequence (opt5) from neuraminidase__InfluenzaA__ABW40579
augaaccccaaucagaagaucauuaccaucggcagcauuuccaucgccauugggaucaucucucugaugcuccaaauuggaaacaucauuagcaucugggcuucccacucuauucagacaggcagccagaaucauacggggaucugcaaccagagaauuaucaccuacgaaaauuccacaugggugaaccacaccuaugucucuaucaauaacacaaauguuguggccggaaaagacaagaccagcgugacacuggcgggcaacuccagccuuuguucuauuuccgggugggcuaucuacaccaaagauaauagcauucggaucggaucuaagggcgacgucuucgugauucgcgagccuuuuaucuccugcagccaucuggaguguagaacguucuuucucacccaaggcgcccugcuuaacgauaaacacucuaaugggacaguuaaggaccgguccccguaucgcgcccugaugagcugcccccucggagaagcuccuucccccuacaacucuaaguucgagagcguggccugguccgcuagcgccugucaugauggcaugggguggcugaccaucggaauuucuggcccugacaauggggcggucgccgugcugaaauauaacggaaucauuacagaaaccaucaaguccuggaaaaagcggauucucagaacgcaggagagcgagugcguuugugugaacggcucuugcuuuacaaucaugaccgauggccccaauaacggggcugccagcuacaaaaucuucaagauugaaaagggaaaagucacaaaguccaucgagcugaaugcuccuaacuuucacuaugaagaguguucuugcuacccggacaccggcaccgugaugugugugugccgcgauaauuggcacgggagcaacagacccugggucuccuucaaucagaaccuugacuaccagauuggauauaucugcagcggcguuuuuggggauaauccucggcccaaagacggaaagggcucuuguaacccugugacaguggauggcgccgacggggucaaaggauucuccuacaaguauggcaaugggguguggauuggacgcacgaaaagcaacagacugcggaagggcuuugagaugaucugggaccccaauggguggaccgauacagacucugauuucuccguuaagcaagacguggucgcgauuaccgauuggagcggcuacuccggaucuuuugugcagcauccggaacucacaggccuggacugcauccgcccuuguuucuggguugagcuugugagagggcugccccgggaaaacaccacgaucuggacaagcggauccucuauuagcuucugcggcgucgauuccgacaccgccaauuggagcuggccugauggggcugagcuccccuuuaccaucgacaaauga

SEQ ID NO: 208273 - RNA, 1413 nt, Artificial Sequence
  derived and/or modified CDS sequence (opt5) from neuraminidase__InfluenzaA__ABW40601
augaaccccaaucagaagaucauuaccaucggcagcauuuccaucgccauuggggugaucucucugaugcuccaaaucggaaacauuaucagcauuugggcuucccacucuauccagacaggcagccagaaucauacggggauuugcaaccagagaaucauuaccuacgaaaauuccacaugggucaaccacaccuauguuaauaucaacaauacaaacgugguggccggaaaagacaagaccucugucacacuggcgggcaauagcucccuuuguagcaucucugggugggcuauuuacaccaaagauaacuccauccggauuggaagcaagggcgacguguucguuauccgcgagccuuuuauuucuugcucccaucuggaguguagaacguucuuucucacccaaggcgcccugcuuaaugauaaacacagcaacgggacagugaaggaccggucuccguaucgcgcccugauguccugcccccucggagaagcuccuagccccuacaauuccaaguucgagucugucgccuggagcgcuuccgccugucaugauggcaugggguggcugaccaucggaaucagcggcccugacaacggggcgguggccguucugaaauauaacggaauuaucacagaaaccauuaagucuuggaaaaagagaauccuccggacgcaggaguccgagugcgugugugucaauggcagcugcuuuacaauuaugaccgauggccccucuaacggggcugccagcuacaaaaucuucaagaucgaaaagggaaaagugacaaaguccauugagcugaaugcuccuaacuuucacuaugaagaguguucuugcuacccggacaccggcaccgugaugugugucugccgcgauaauuggcacgggagcaacagacccuggguuuccuucaaucagaaccuugacuaccagaucggauauauuugcagcggcguguuuggggauaauccucggcccaaagacggaaagggcucuuguaacccugugacagucgauggcgccgacgggaucaaaggauucuccuacaaguauggcaaugggguguggauuggacgcacgaaaagcaacagacugcggaagggcuuugagaugaucugggaccccaauggguggaccaacacagauucugacuucuccguuaagcaagauguggucgcgauuaccgacuggagcggcuacuccggaucuuuugugcagcauccggaacucacaggccuggauugcauccgcccuuguuucuggguugagcuugugagagggcugccccgggaaaauaccacgaucuggacaagcggauccucuauuagcuucugcggcgucgacggggauaccgccaacugguccuggccugacggagcugagcuccccuuuaccaucgauaaauga

SEQ ID NO: 208274 - RNA, 1413 nt, Artificial Sequence; identical to SEQ ID NO: 208137
  derived and/or modified CDS sequence (opt5) from neuraminidase__InfluenzaA__ABW40612

SEQ ID NO: 208275 - RNA, 1413 nt, Artificial Sequence; identical to SEQ ID NO: 208102
  derived and/or modified CDS sequence (opt5) from neuraminidase__InfluenzaA__ABW40623

SEQ ID NO: 208276 - RNA, 1410 nt, Artificial Sequence; identical to SEQ ID NO: 207956
  derived and/or modified CDS sequence (opt5) from neuraminidase__InfluenzaA__ABW40634

SEQ ID NO: 208277 - RNA, 1413 nt, Artificial Sequence; identical to SEQ ID NO: 208102
  derived and/or modified CDS sequence (opt5) from neuraminidase__InfluenzaA__ABW40645

SEQ ID NO: 208278 - RNA, 1410 nt, Artificial Sequence
  derived and/or modified CDS sequence (opt5) from neuraminidase__InfluenzaA__ABW40656
augaaccccaaucagaagaucauuaccaucggcagcgugucccugacaauuucuacgaucugcuucuuuaugcaaauugccauccucaucaccacagucacccugcacuucaaacaguacgaguuuaacagcccuccgaauaaccagguuaugcuuugugaacccacaauuaucgagagaaauauuaccgaaaucguguaucugacaaacaccacgauugagaaggaaaucugcccuaaacucgcugaguaccggaauugguccaagccccagugugacauuaccggguucgccccuuuuucuaaagauaacagcauccgccuguccgcgggaggcgggaucugggugacaagagagcccuaugucucuugcgacccugauaaguguuaccaauucgcucuuggacagggcaccacacugaauaacgugcauagcaaugacaccguucgggaucgcacgccguauagaacacuccugaugaacgaacugggggugcccuuucaccucggaaccaagcaggucugcauugccugguccucuagcuccugucaugacggcaaagccuggcugcacgugugcaucacaggcgaugacaagaaugcuaccgccagcuucauuuacaacgggcggcuuguugauucuaucguguccuggagcaaagagauucugcgcacccaggaaucugagugugucugcaucaauggaacauguacgguggugaugaccgacggcuccgcuagcgggaaggccgauacaaaaauccucuuuauugaggaaggaaagaucguccauaccuccacacugucuggcagcgcgcaacacguugaggaaugcuccugcuauccuagauaccccggggugcggugugugugccgcgacaacuggaagggaagcaacagaccuauugucgauaucaauauuaaagaccacucuaucguguccagcuacguuuguucuggccuugugggcgacacgccccggaagaacgauagcuccucuagcucccauugccuggacccgaauaacgaggaagggggacacggcgucaaagggugggccuucgaugacggaaaugauguguggaugggccgcaccaucagcgagaagucuagacucggguaugagacauuuaaaguuauugaaggaugguccaacccuaagagcaaacugcagaucaaucgccaggugauugucgaccggggcaacagaucuggcuacuccgggaucuucagcguggagggaaaguccuguauuaaucggugcuuuuaugucgaacugaucagaggccgcaaggaggaaaccgaggugcucuggaccucuaacagcauuguuguguucugugggacauccggaaccuacggcacagggucuuggcccgauggcgcugacaucaaucugaugccuaucuga

SEQ ID NO: 208279 - RNA, 1413 nt, Artificial Sequence; identical to SEQ ID NO: 208143
  derived and/or modified CDS sequence (opt5) from neuraminidase__InfluenzaA__ABW40667

SEQ ID NO: 208280 - RNA, 1413 nt, Artificial Sequence; identical to SEQ ID NO: 208128
  derived and/or modified CDS sequence (opt5) from neuraminidase__InfluenzaA__ABW40678

SEQ ID NO: 208281 - RNA, 1413 nt, Artificial Sequence; identical to SEQ ID NO: 208137
  derived and/or modified CDS sequence (opt5) from neuraminidase__InfluenzaA__ABW71297

SEQ ID NO: 208282 - RNA, 1413 nt, Artificial Sequence; identical to SEQ ID NO: 208143
  derived and/or modified CDS sequence (opt5) from neuraminidase__InfluenzaA__ABW71308

SEQ ID NO: 208283 - RNA, 1413 nt, Artificial Sequence; identical to SEQ ID NO: 208102
  derived and/or modified CDS sequence (opt5) from neuraminidase__InfluenzaA__ABW71319

SEQ ID NO: 208284 - RNA, 1413 nt, Artificial Sequence; identical to SEQ ID NO: 208102
  derived and/or modified CDS sequence (opt5) from neuraminidase__InfluenzaA__ABW71330

SEQ ID NO: 208285 - RNA, 1413 nt, Artificial Sequence
  derived and/or modified CDS sequence (opt5) from neuraminidase__InfluenzaA__ABW71341
augaaccccaaucagaagaucauuaccaucggcagcauuuccaucgccauugggaucaucucucugaugcuccaaauuggaaacaucauuagcaucugggcuucccacucuauucagacaggcagccagaaucauacggggaucugcaaccagagaauuaucaccuacgagaauagcacaugggugaaccacaccuaugucucuaucaauaacacaaauguuguggccggaaaagacaagaccagcgugacacuggcgggcaacuccagccuuuguucuauuuccgggugggcuaucuacaccaaagauaauagcauucggaucggaucuaagggcgacgucuucgugauucgcgaaccuuuuaucuccugcagccaucuggaguguagaacguucuuucucacccaaggcgcccugcuuaacgauaaacacucuaaugggacaguuaaggaccgguccccguaucgcgcccugaugagcugcccccucggagaagcuccuucccccuacaacucuaaguucgagagcguggccugguccgcuagcgccugucaugauggcaugggguggcugaccaucggaauuucuggcccugacaauggggcggucgccgugcugaaauauaacggaaucauuacagaaaccaucaaguccuggaaaaagcggauucucagaacgcaggagagcgagugcguuugugugaacggcucuugcuuuacaaucaugaccgauggccccagcaauggggcugccuccuacaaaaucuucaagauugaaaagggaaaagucacaaagucuaucgagcugaacgcuccuaauuuucacuaugaagaguguagcugcuacccggacaccggcaccgugaugugugugugccgcgauaacuggcacggguccaauagacccugggucagcuucaaccagaaucuugacuaccagauuggauauaucugcucuggcguuuuuggggauaacccucggcccaaagacggaaagggcuccuguaauccugugacaguggauggcgccgacggggucaaaggauucagcuacaaguauggcaacgggguguggcugggacgcacgaaaucuaauagacuccggaagggcuuugagaugauuugggaccccaacggguggaccgauacagacuccgauuucagcguuaagcaagacguggucgcgaucaccgauugguccggcuacucuggauccuuugugcagcauccggaacugacaggccuugacugcauucgcccuuguuucuggguugagcuggugagagggcucccccgggaaaauaccacgaucuggacauccggaucuagcaucuccuucugcggcgucgauagcgacaccgccaacuggucuuggccugauggggcugagcugcccuuuaccauugacaaauga

SEQ ID NO: 208286 - RNA, 1410 nt, Artificial Sequence; identical to SEQ ID NO: 208129
  derived and/or modified CDS sequence (opt5) from neuraminidase__InfluenzaA__ABW71352

SEQ ID NO: 208287 - RNA, 1413 nt, Artificial Sequence; identical to SEQ ID NO: 208143
  derived and/or modified CDS sequence (opt5) from neuraminidase__InfluenzaA__ABW71363

SEQ ID NO: 208288 - RNA, 1413 nt, Artificial Sequence; identical to SEQ ID NO: 208128
  derived and/or modified CDS sequence (opt5) from neuraminidase__InfluenzaA__ABW71374

SEQ ID NO: 208289 - RNA, 1413 nt, Artificial Sequence; identical to SEQ ID NO: 208102
  derived and/or modified CDS sequence (opt5) from neuraminidase__InfluenzaA__ABW71385

SEQ ID NO: 208290 - RNA, 1413 nt, Artificial Sequence
  derived and/or modified CDS sequence (opt5) from neuraminidase__InfluenzaA__ABW71396
augaaccccaaucagaagaucauuaccaucggcagcauuuccaucgccauugggaucaucucucugaugcuccaaauuggaaacaucauuagcaucugggcuucccacucugugcagacaggcagccagaaucauacggggauuugcaaccagagaaucauuaccuacgaaaauuccacaugggucaaccacaccuauguuaauaucaacaauacaaacgugguggccggaaaagacaagaccucugucacacuggcgggcaauagcucccuuuguagcaucucugggugggcuauuuacaccaaagauaacuccauccggauuggaagcaagggcgacguguucguuauccgcgagccuuuuauuucuugcucccaucuggaguguagaacguucuuucucacccaaggcgcccugcuuaaugauaaacacagcaacgggacagugaaggaccggucuccguaucgcgcccugauguccugcccccucggagaagcuccuagccccuacaauuccaaguucgagucugucgccuggagcgcuuccgccugucaugauggcaugggguggcugaccaucggaaucagcggcccugacaacggggcgguggccguucugaaauauaacggaauuaucacagaaaccauuaagucuuggaaaaagagaauccuccggacgcaggaguccgagugcgugugugucaauggcagcugcuuuacaauuaugaccgauggccccucuaacggggcugccagcuacaaaaucuucaagaucgaaaagggaaaagugacaaaguccauugagcugaaugcuccuaacuuucacuaugaagaguguucuugcuacccggacaccggcaccgugaugugugucugccgcgauaauuggcacgggagcaacagacccuggguuuccuucaaucagaaccuugacuaccaggugggauauaucugcagcggcguguuuggggauaauccucggcccaaagacggaaagggcucuuguaacccuaugacagucgauggcgccgacggggugaaaggauucuccuacaaguauggcaaugggguuuggauuggacgcacgaaaagcaacaagcugagaaagggcuuugagaugaucugggaccccaauggguggaccgauacagacucugauuucuccgugaaacaagacgucguggcgauuaccgauuggagcggcuacuccggaucuuuuguucagcauccggaacucacaggccuggacugcauccggccuuguuucuggguggagcuuguccgcgggcugcccagagaaaacgccaccauuuggacgagcggauccucuaucagcuucugcggcguggauuccgacacagcuaauuggagcuggccugauggggccgagcuccccuuuaccaucgacaaguga

SEQ ID NO: 208291 - RNA, 1413 nt, Artificial Sequence
  derived and/or modified CDS sequence (opt5) from neuraminidase__InfluenzaA__ABW71407
augaaccccaaucagaagaucauuaccaucggcagcauuuccaucgccauugggaucaucucucugaugcuccaaauuggaaacaucauuagcaucugggcuucccacucuauucagacaggcagccagaaucauacggggaucugcaaccagagaauuaucaccuacgaaaauuccacaugggugaaccacaccuaugucaauaucaacaauacaaacguuguggccggaaaagacaagaccucugugacacuggcgggcaauagcucccuuuguagcauuucugggugggcuaucuacaccaaagauaacuccauucggaucggaagcaagggcgacgucuucgugauucgcgagccuuuuaucucuugcucccaucuggaguguagaacguucuuucucacccaaggcgcccugcuuaaugauaaacacagcaacgggacaguuaaggaccggucuccguaucgcgcccugauguccugcccccucggagaagcuccuagccccuacaauuccaaguucgagucuguggccuggagcgcuuccgccugucaugauggcaugggguggcugaccaucggaauuagcggcccugacaacggggcggucgccgugcugaaauauaacggaaucauuacagaaaccaucaagucuuggaaaaagcggauucucagaacgcaggaguccgagugcguuugugugaauggcagcugcuuuacaaucaugaccgauggccccucuaacggggcugccagcuacaaaaucuucaagauugaaaagggaaaagucacaaaguccaucgagcugaaugcuccuaacuuucacuaugaagaguguucuugcuacccggacaccggcaccgugaugugugugugccgcgauaauuggcacgggagcaacagacccugggucuccuucaaucagaaccuugacuaccagguuggauauauuugcagcggcguguuuggggauaauccucggcccaaagacggaaagggcucuuguaacccuaugacaguggauggcgccgacggggucaaaggauucuccuacaaguauggcaaugggguguggaucggacgcacgaaaagcaacaagauuagaaagggcuuugagaugaucugggaccccaauggguggaccgauacagacucugauuucuccguuaaacaagacguggucgcgauuaccgauuggagcggcuacuccggaucuuuugugcagcauccggaacugacaggccucgacugcauccggccuuguuucuggguugagcuggugcgcgggcuucccagagaaaacaccacgaucuggacaagcggauccucuauuagcuucugcggcgucgauuccgacaccgccaauuggagcuggccugauggggcugagcugcccuuuaccaucgacaaguga

SEQ ID NO: 208292 - RNA, 1413 nt, Artificial Sequence; identical to SEQ ID NO: 208128
  derived and/or modified CDS sequence (opt5) from neuraminidase__InfluenzaA__ABW71418

SEQ ID NO: 208293 - RNA, 1413 nt, Artificial Sequence; identical to SEQ ID NO: 208102
  derived and/or modified CDS sequence (opt5) from neuraminidase__InfluenzaA__ABW71440

SEQ ID NO: 208294 - RNA, 1413 nt, Artificial Sequence; identical to SEQ ID NO: 208102
  derived and/or modified CDS sequence (opt5) from neuraminidase__InfluenzaA__ABW71451

SEQ ID NO: 208295 - RNA, 1413 nt, Artificial Sequence; identical to SEQ ID NO: 208137
  derived and/or modified CDS sequence (opt5) from neuraminidase__InfluenzaA__ABW71462

SEQ ID NO: 208296 - RNA, 1410 nt, Artificial Sequence; identical to SEQ ID NO: 206399
  derived and/or modified CDS sequence (opt5) from neuraminidase__InfluenzaA__ABW80980

SEQ ID NO: 208297 - RNA, 1410 nt, Artificial Sequence; identical to SEQ ID NO: 206243
  derived and/or modified CDS sequence (opt5) from neuraminidase__InfluenzaA__ABW80981

SEQ ID NO: 208298 - RNA, 1413 nt, Artificial Sequence
  derived and/or modified CDS sequence (opt5) from neuraminidase__InfluenzaA__ABW81474
augaaccccaaucagaagaucauuaccaucggcagcauuuccguggccaucgggauuaucucucugauccuccaaauuggaaacaucauuagcaucugggcuucccacucuauucagacaggcagccagaauuacacggggaucugcaaccagaaaauuaucaccuaugagaauagaacaugggucaaccaaaccuacguuaauuucaacaauacaaacgugguggccggaaaggacaaaccuuccaugacccuggcgggcaauucuagccuuuguccgauccgggggugggcuauuuauacaaaggauaacuccauccgcauuggaagcaaaggcgacgucuuugugaucagagaacccuucauuucuugcucccaucuggagugucggaccuuuuuccucacgcagggcgcccugcuuaaugauaagcacagcaacgggaccaucaaggaccgcucuccuuuuagagcccugauguccugcccccucggagaagcuccuagccccuacaauucucgguucgaguccguugccuggagcgcuuccgccugucaugauggccugggguggcugacaaucggaauuucuggcccugacaacggggcgguggccguccucaaauauaacggaaucauuaccgaaacaaucaagagcuggaaaaagcagauucugcgcacccaggaguccgagugcguguguguuaauggcagcugcuuuacgaucaugacagauggcccgucuaacagagcugccuccuaccggaucuucaaaauugaaaaggggcgcgugaccaagagcaucgagcuugacgcucccaauuaucacuacgaagaguguucuugcuacccugauacaggaaccgucaugugugugugcagagacaacuggcauggcagcaaucggcccuggguguccuuuaaccaaaaucuggauuaucagauuggguacaucugcucuggagucuucggcgacaacccucgccccaaagauggggagggaagcuguaauccgguuaccguggacggcgccgacggcgugaagggguuuuccuauagauacggaaacggcgucuggauugggcggacaaaaagcaaucgccucagaaagggauucgaaaugaucugggauccuaacggcuggacggacaccgauucugacuuuuccaugaaacaggaugugguugcgaugacagacuggagcggguauucuggcuccuucgugcagcaccccgagcugaccggacuugauugcaugcggccuuguuucugggucgaacuggugagaggccucccccgcgagaauacaaccauuuggacgagcggguccucuaucagcuuuugcggaguuaacuccgaaacagccaauuggucuuggcccgacggcgcugagcugccuuucaccaucgauaaguga

SEQ ID NO: 208299 - RNA, 1413 nt, Artificial Sequence
  derived and/or modified CDS sequence (opt5) from neuraminidase__InfluenzaA__ABW81475
augaaccccaaucagaagaucauuaccaucggcagcauuuccaucgccauugggaucaucucucugaugcuccaaauuggaaacaucauuagcaucugggcuucccacucuauucagacaggcagccagaaucauacggggaucugcaaccagagaauuaucaccuacgagaauagcacaugggugaaccacaccuaugucaauaucaacaauacaaacguuguggccggaaaagacaagucuagcgugacccuggcgggcaauuccagccuuuguucuauuuccgggugggcuaucuacacaaaagauaacagcauucggaucggaucuaagggcgacgucuucgugauucgcgaaccuuuuaucuccugcagccaucuggaguguagaaccuucuuucucacgcaaggcgcccugcuuaaugauaaacacucuaacgggaccguuaaggaccgguccccguaucgcgcccugaugagcugcccccucggagaagcuccuucccccuacaauucuaaguucgagagcguggccugguccgcuagcgccugucaugauggcaugggguggcugacaaucggaauuucuggcccugacaacggggcggucgccgugcugaaauauaacggaaucauuaccgaaacaaucaaguccuggaaaaagcggauucucagaacccaggagagcgagugcguuugugugaauggcucuugcuuuacgaucaugacagauggccccagcaacggggcugccuccuacaaaaucuucaagauugaaaagggaaaagucaccaagucuaucgagcugaaugcuccuaacuuucacuaugaagaguguagcugcuacccggacacaggcaccgugaugugugugugccgcgauaauuggcacggguccaacagacccugggucagcuucaaucagaaccuugacuaccagauuggauauaucugcucuggcguuuuuggggauaauccucggcccaaagacggagagggcuccuguaacccugugaccguggauggcgccgacggggucaagggauucagcuacaaauauggcaaugggguguggauuggacgcacaaagucuaacagacugcggaaaggcuuugaaaugaucugggaccccaauggguggacggauaccgacuccgauuucagccucaagcaagacguuguggcgauuacagauugguccggcuacucuggauccuuuguccagcauccggagcugaccggccuugacugcauccgcccuuguuucuggguggaacugguuagagggcucccccgggagaacacaaccaucuggacguccggaucuagcauuuccuucugcggcgugaauagcgauacagccaacuggucuuggccugacggggcugaacugcccuuuaccaucgauaaguga

SEQ ID NO: 208300 - RNA, 1413 nt, Artificial Sequence
  derived and/or modified CDS sequence (opt5) from neuraminidase__InfluenzaA__ABW81477
augaaccccaaucagaagaucauuaccaucggcagcauuuccaucgccauugggaucaucucucugaugcuccaaauuggaaacaucauuagcaucugggcuucccacucuauucagacaggcagccagaaucauacgggggugugcaaccagagaaucauuaccuacgagaauagcacaugggucaaccacaccuauguuaauaucaacaauacaaacgugaucgccggaaaagacaagaccucugugacacuggcgggcaauagcucccuuuguagcauuucugggugggcuaucuacaccaaagauaacuccauucggaucggaagcaagggcgacgucuucgugauucgcgaaccuuuuaucucuugcucccaucuggaguguagaacguucuuucucacccaaggcgcccugcuuaaugauaaacacagcaacgggacaguuaaggaccggucuccguaucgcgcccugauguccugcccccucggagaagcuccuagccccuacaauuccaaguucgagucuguggccuggagcgcuuccgccugucaugauggcaugggguggcugaccaucggaauuagcggcccugacaacggggcggucgccgugcugaaauauaacggaaucauuacagaaaccaucaagucuuggaaaaagcagauucucagaacgcaggaguccgagugcguuugugugaauggcagcugcuuuacaaucaugaccgauggccccucuaacggggcugccagcuacaaaaucuucaagauugaaaagggaaaagucacaaaguccaucgagcugucugcuccuaauuuucacuaugaagaguguagcugcuacccggacaccggcaccgugaugugugugugccgggauaacuggcacggguccaaucgccccugggucagcuucaaccagaaucuugacuaccaaauuggauauaucugcucuggcguuuuuggggauaacccuagacccaaagacggagagggcuccuguaauccugugacaguggauggcgccaacggggucaagggauucagcuacaaauauggcaaugggguguggauuggacggacgaagucuaaccgccugagaaaaggcuuugaaaugaucugggaccccaauggguggccggacaccgauuccgacuucagcguuaagcaggauguggucgcgauuacagacugguccggcuacucuggauccuuugugcagcauccugagcucaccggccuggauugcauccggcccuguuucuggguugaacuugugcgcgggcugccuaaggagaacacaaccaucuggacguccggaucuagcauuuccuucugcggcgucaauagcgacacagccaacuggucuuggcccgauggggcugaacuccccuuuaccaucgacaaauga

SEQ ID NO: 208301 - RNA, 1413 nt, Artificial Sequence
  derived and/or modified CDS sequence (opt5) from neuraminidase__InfluenzaA__ABW81478
augaaccccaaucagaagaucauuaccaucggcagcauuuccaucgccauugggaucaucucucugaugcuccaaauuggaaacaucauuagcaucugggcuucccacucuauucagacaggcagccagaaucauacggggaucugcaaccagagaauuaucaccuacgaaaauuccacaugggugaaccacaccuaugucaauaucaacaauacaaacguuguggccggaaaagacaagaccucugugacacuggcgggcaauagcucccuuuguagcauuucugggugggcuaucuacaccaaagauaacuccauucggaucggaagcaagggcgacgucuucgugauucgcgagccuuuuaucucuugcucccaucuggaguguagaacguucuuucucacccaaggcgcccugcuuaaugauaaacacagcaacgggacaguuaaggaccggucuccguaucgcgcccugauguccugcccccucggagaagcuccuagccccuacaauuccaaguucgagucuguggccuggagcgcuuccgccugucaugauggcaugggguggcugaccaucggaauuagcggcccugacaacggggcggucgccgugcugaaauauaacggaaucauuacagaaaccaucaagucuuggaaaaagcggauucucagaacgcaggaguccgagugcguuugugugaauggcagcugcuuuacaaucaugaccgauggccccucuaacggggcugccagcuacaaaaucuucaagauugaaaagggaaaagucacaaaguccaucgagcugaaugcuccuaacuuucacuaugaagaguguucuugcuacccggacaccggcaccgugaugugugugugccgcgauaauuggcacgggagcaacagacccugggucuccuucaaucagaaccuugacuaccagauuggauauaucugcagcggcguuuuuggggauaauccucggcccaaagacggagagggcucuuguaacccugugacaguggauggcgccgacggggucaagggauucuccuacaaauauggcaaugggguguggauuggacgcacgaagaacaauagacugcggaaaggcuuugaaaugaucugggaccccaacggguggaccgauacagacagcgauuucucuguuaagcaagacguggucgcgauuaccgauugguccggcuacagcggauccuuugugcagcauccggagcucacaggccuggacugcauccgcccuuguuucuggguugaacuugugagagggcugccccgggagaauaccacgaucuggacaucuggaagcuccauuucuuucugcggcgucaacagcgauaccgccaacugguccuggccugacggggcugaacuccccuuuaccaucgauaaguga

SEQ ID NO: 208302 - RNA, 1413 nt, Artificial Sequence
  derived and/or modified CDS sequence (opt5) from neuraminidase__InfluenzaA__ABW81479
augaaccccaaucagaagaucauuaccaucggcagcauuuccguggccaucgggauuaucucucugauccuccaaauuggaaacaucauuagcaucugggcuucccacucuauucagacaggcagccagaauuacacggggaucugcaaccagaaaauuaucaccuaugagaauagaacaugggucaaccaaaccuacguuaauaucaacaauacaaacgugguggccggaaaggacaaaccuuccaugacccuggcgggcaauucuagccuuuguccgauucgggggugggcuaucuauacaaaggauaacuccauucgcaucggaagcaaaggcgacgucuucgugauuagagaacccuuuaucucuugcucccaucuggagugucggaccuucuuucucacgcagggcgcccugcuuaaugauaagcacagcaacgggaccaucaaggaccgcucuccuuucagagcccugauguccugcccccucggagaagcuccuagccccuacaauucucgguuugaguccguugccuggagcgcuuccgccugucaugauggccugggguggcugacaauuggaaucucuggcccugacaacggggcgguggccguccucaaauauaacggaauuaucaccgaaacaauuaagagcuggaaaaagcagauccugcgcacccaggaguccgagugcguguguguuaauggcagcugcuucacgaucaugacagauggcccgucuaacagagcugccuccuaccggauuuuuaaaaucgaaaaggggcgcgugaccaagagcauugagcuugacgcucccaauuaucacuacgaagaguguucuugcuacccugauacaggaaccgucaugugugugugcagagacaacuggcauggcagcaaucggcccuggguguccuucaaccaaaaucuggauuaucagaucggguacauuugcucuggagucuuuggcgacaacccucgccccaaagauggggagggaagcuguaauccgguuaccguggacggcgccgacggcaucaagggguucuccuauagauacggaaacggcguguggauugggcggacaaaaagcaaucgccucagaaagggauuugaaaugaucugggauccuaacggcuggacggacaccgauucugacuucuccaugaaacaggaugucguggcgaugacagacuggagcggguauucuggcuccuuuguucagcaccccgagcugaccggacuugauugcaugcggccuuguuucuggguggaacuggucagaggccucccccgcgagaauacaaccaucuggacgagcggguccucuauuagcuucugcggagugaacuccgaaacagccaauuggucuuggcccgacggcgcugagcugccuuuuaccaucgauaaguga

SEQ ID NO: 208303 - RNA, 1413 nt, Artificial Sequence; identical to SEQ ID NO: 206468
  derived and/or modified CDS sequence (opt5) from neuraminidase__InfluenzaA__ABW81480

SEQ ID NO: 208304 - RNA, 1413 nt, Artificial Sequence
  derived and/or modified CDS sequence (opt5) from neuraminidase__InfluenzaA__ABW81481
augaaccccaaucagaagaucauuaccaucggcagcauuuccguggccaucgggauuaucucucugauccuccaaauuggaaacaucauuagcaucugggcuucccacucuauucagacaggcagccagaauuacacggggaucugcaaccagaaaauuaucaccuaugagaauagaacaugggucaaccaaaccuacguuaauaucaacaauacaaacgugguggccggaaaggacaaaccuuccaugacccuggcgggcaauucuagccuuuguccgauucgggggugggcuaucuauacaaaggauaacuccauucgcaucggaagcaaaggcgacgucuucgugauuagagaacccuuuaucucuugcucccaucuggagugucggaccuucuuucucacgcagggcgcccugcuuaaugauaagcacagcaacgggaccaucaaggaccgcucuccuuucagagcccugauguccugcccccucggagaagcuccuagccccuacaauucucgguuugaguccguugccuggagcgcuuccgccugucaugauggccugggguggcugacaauuggaaucucuggcccugacaacggggcgguggccguccucaaauauaacggaauuaucaccgaaacaauuaagagcuggaaaaagcagauccugcgcacccaggaguccgagugcguguguguuaauggcagcugcuucacgaucaugacagauggcccgucuaacagagcugccuccuaccggauuuuuaaaaucgaaaaggggcgcgugaccaagagcauugagcuugacgcucccaauuaucacuacgaagaguguucuugcuacccugauacaggaaccgucaugugugugugcagagacaacuggcauggcagcaaucggcccuggguguccuucaaccaaaaucuggauuaucagaucggguacauuugcucuggagucuuuggcgacaacccucgccccaaagauggggagggaagcuguaauccgguuaccguggacggcgccgacggcgugaagggguucuccuauagauacggaaacggcgucuggaucgggcggacaaaaagcaaucgccucagaaagggauuugaaaugauuugggauccuaacggcuggacggacaccgauucugacuucuccaugaaacaggaugugguugcgaugacagacuggagcggguauucuggcuccuuugugcagcaccccgagcugaccggacuugauugcaugcggccuuguuucugggucgaacuggugagaggccucccccgcgagaauacaaccaucuggacgagcggguccucuaucagcuucugcggaguuaacuccgaaacagccaauuggucuuggcccgacggcgcugagcugccuuuuaccauugauaaguga

SEQ ID NO: 208305 - RNA, 1413 nt, Artificial Sequence
  derived and/or modified CDS sequence (opt5) from neuraminidase__InfluenzaA__ABW81482
augaaccccaaucagaagaucauuaccaucggcagcauuuccguggccaucgggauuaucucucugauccuccaaauuggaaacaucauuagcaucugggcuucccacucuauucagacaggcagccagaauuacacggggaucugcaaccagaaaauuaucaccuaugagaauagaacaugggucaaccaaaccuacguuaauaucaacaauacaaacgugguggccggaaaggacaaaccuuccaugacccuggcgggcaauucuagccuuuguccgauucgggggugggcuaucuauacaaaggauaacuccauucgcaucggaagcaaaggcgacgucuucgugauuagagaacccuuuaucucuugcucccaucuggagugucggaccuucuuucucacgcagggcgcccugcuuaaugauaagcacagcaacgggaccaucaaggaccgcucuccuuucagagcccugauguccugcccccucggagaagcuccuagccccuacaauucucgguuugaguccguugccuggagcgcuuccgccugucaugauggccugggguggcugacaauuggaaucucuggcccugacaacggggcgguggccguccucaaauauaacggaauuaucaccgaaacaauuaagagcuggaaaaagcagauccugcgcacccaggaguccgagugcguguguguuaauggcagcugcuucacgaucaugacagauggcccgucuaacagagcugccuccuaccggauuuuuaaaaucgaaaaggggcgcgugaccaagagcauugagcuugacgcucccaauuaucacuacgaagaguguucuugcuacccugauacaggaaccgucaugugugugugcagagacaacuggcauggcagcaaucggcccuggguguccuucaaccaaaaucuggauuaucagaucggguacauuugcucuggagucuuuggcgacaacccucgccccaaagauggggagggaagcuguaauccgguuaccguggacggcgccgacggcgugaagggguucuccuauagauacggaaacggcgucuggaucgggcggacaaaaagcaaucgccucagaaagggauuugaaaugauuugggauccuaacggcuggacggacaccgauucugacuucuccaugaaacaggaugugguugcgaugacagacuggagcggguauucuggcuccuuugugcagcaccccgagcugaccggacuugccugcaugcggccuuguuucugggucgaacuggugagaggccucccccgcgagaauacaaccaucuggacgagcggguccucuaucagcuucugcggaguuaacuccgaaacagcuaauuggucuuggcccgauggcgccgagcugccuuuuaccauugacaaguga

SEQ ID NO: 208306 - RNA, 1413 nt, Artificial Sequence; identical to SEQ ID NO: 206458
  derived and/or modified CDS sequence (opt5) from neuraminidase__InfluenzaA__ABW81483

SEQ ID NO: 208307 - RNA, 1413 nt, Artificial Sequence
  derived and/or modified CDS sequence (opt5) from neuraminidase__InfluenzaA__ABW81484
augaaccccaaucagaagaucauuaccaucggcagcauuuccaucgccauugggaucaucucucugaugcuccaaauuggaaacaucauuagcaucugggcuucccacucuauucagacaggcaaucagaaccauacggggaucugcaaucagagaauuaucaccuacgagaacagcacaugggugaaucacaccuaugucaacaucaauaacacaaauguuguggccggaaaaggcaagaccuccgugacacuggcggggaacucuagccuuuguuccauuagcggaugggcuaucuacaccaaagacaauucuauucggaucggcuccaagggcgaugucuucgugauucgcgaaccuuuuaucagcugcucucaucuggaguguagaacguucuuucucacccaaggggcccugcuuaacgacaaacacuccaauggaacaguuaaggaucggagcccguaucgcgcccugaugucuugcccccucggcgaagcuccuucccccuacaacagcaaguucgaguccguggccuggucugcuagcgccugucaugacgggaugggauggcugaccaucggcauuuccgggccugauaacggagcggucgccgugcugaaauauaauggcaucauuacagaaaccaucaagagcuggaaaaagcggauucucagaacgcaggagucugagugcguuugugugaacggcuccugcuuuacaaucaugaccgacgggcccagcaauggagcugccucuuacaaaaucuucaagauugaaaagggcaaagucacaaagagcaucgagcugaacgcuccuaauuuucacuaugaagaguguuccugcuacccggauaccgggaccgugaugugugugugccgcgacaacuggcacggaucuaauagacccugggucagcuucaaccagaaucuugauuaccagauuggcuauaucugcuccgggguuuuuggagacaacccucggcccaaagauggcaagggcagcuguaauccugugacaguggacggggccgauggagucaaaggcuucucuuacaaguaugggaacggaguguggauuggccgcacgaaauccaauagacugcggaagggguuugagaugaucugggaccccaacggcuggaccgacacagauagcgacuucucuguuaagcaagauguggucgcgauuaccgacugguccggauacagcggcuccuuugugcagcauccggaacucacagggcuggauugcauccgcccuuguuucuggguugagcuugugagaggacugccccgggaaaauaccacgaucuggacaucuggcagcuccauuucuuucugcggggucgacagcgauaccgccaacugguccuggccugacggagcugagcuccccuuuaccaucgauaaauga

SEQ ID NO: 208308 - RNA, 1413 nt, Artificial Sequence
  derived and/or modified CDS sequence (opt5) from neuraminidase__InfluenzaA__ABW81487
augaaccccaaucagaagaucauuaccaucggcagcauuuccaucgccauugggaucaucucucugaugcuccaaauuggaaacaucauuagcaucugggcuucccacucuauucagacaggcagccagaaucauacggggaucugcaaccagagaauuaucaccuacgaaaauuccacaugggugaaccacaccuaugucaauaucaacaauacaaacguuguggccggaaaagacaagaccucugugacacuggcgggcaauagcucccuuuguagcauuucugggugggcuaucuacaccaaagauaacuccauucggaucggaagcaagggcgacgucuucgugauucgcgagccuuuuaucucuugcucccaucuggaguguagaacguucuuucucacccaaggcgcccugcuuaaugauaaacacagcaacgggacaguuaaggaccggucuccguaucgcgcccugauguccugcccccucggagaagcuccuagccccuacaauuccaaguucgagucuguggccuggagcgcuuccgccugucaugauggcaugggguggcugaccaucggaauuagcggcccugacaacggggcggucgccgugcugaaauauaacggaaucauuacagaaaccaucaagucuuggaaaaagcggauucucagaacgcaggaguccgagugcguuugugugaauggcagcugcuuuacaaucaugaccgauggccccucuaacggggcugccagcuacaaaaucuucaagauugaaaagggaaaagucacaaaguccaucgagcugaaugcuccuaacuuucacuaugaagaguguucuugcuacccggacaccggcaccgugaugugugugugccgcgauaauuggcacgggagcaacagacccugggucuccuucaaucagaaccuugacuaccagauuggauauaucugcagcggcguuuuuggggauaauccucggcccaaagacggaaagggcucuuguaacccugugacaguggauggcgccgacggggucaaaggauucuccuacaaguauggcaaugggguguggauuggacgcacgaaaagcaacagacugcggaagggcuuugagaugaucugggaccccaauggguggaccgauacagacucugauuucuccguuaagcaagacguggucgcgauuaccgauuggagcggcuacuccggaucuuuuauccagcauccggaacucacaggccuggacugcauccgcccuuguuucuggguggagcuuguuagagggcugccccgggaaaacaccacgauuuggacaagcggauccucuaucagcuucugcggcguggauuccgacaccgccaauuggagcuggccugauggggcugagcuccccuuuaccauugacaaauga

SEQ ID NO: 208309 - RNA, 1413 nt, Artificial Sequence; identical to SEQ ID NO: 206458
  derived and/or modified CDS sequence (opt5) from neuraminidase__InfluenzaA__ABW81488

SEQ ID NO: 208310 - RNA, 1413 nt, Artificial Sequence; identical to SEQ ID NO: 206458
  derived and/or modified CDS sequence (opt5) from neuraminidase__InfluenzaA__ABW81489

SEQ ID NO: 208311 - RNA, 1413 nt, Artificial Sequence
  derived and/or modified CDS sequence (opt5) from neuraminidase__InfluenzaA__ABW81490
augaaccccaaucagaagaucauuaccaucggcagcauuuccaucgccauugggaucaucucucugaugcuccaaauuggaaacaucauuagcaucugggcuucccacucuauucagacaggcagccagaaucauacggggaucugcaaccagagaauuaucaccuacgagaauagcacaugggugaaccacaccuaugucaauaucaacaauacaaacguuguggccggaaaagacaagaccucugugacacuggcgggcaauagcucccuuuguagcauuucugggugggcuaucuacaccaaagauaacuccauucggaucggaagcaagggcgacgucuucgugauucgcgaaccuuuuaucucuugcucccaucuggaguguaaaacguucuuucucacccaaggcgcccugcuuaaugauaagcacagcaacgggacaguuaaggacagaucuccguaucgggcccugauguccugcccccucggagaagcuccuagccccuacaauuccaaauucgagucuguggccuggagcgcuuccgccugucaugauggcaugggguggcugaccaucggaauuagcggcccugacaacggggcggucgccgugcugaaguauaacggaaucauuacagaaaccaucaaaucuuggaagaaacgcauucucagaacgcaggaguccgagugcguuugugugaauggcagcugcuuuacaaucaugaccgauggccccucuaacggggcugccagcuacaagaucuucaagauugaaaaaggaaaggucacaaaauccaucgagcugaaugcuccuaacuuucacuaugaagaguguucuugcuacccggacaccggcaccgugaugugugugugccgggauaauuggcacgggagcaaccgccccugggucuccuucaaucagaaccuugacuaccagauuggauauaucugcagcggcguuuuuggggauaauccuagacccaaggacggaaaaggcucuuguaacccugugacaguggauggcgccgacggggucaagggauucuccuacaaauauggcaaugggguguggauuggacggacgaaguccaaccgccugagaaagggcuuugagaugaucugggaccccaauggguggaccgauacagacucugauuucuccguuaaacaagacguggucgcgauuaccgauuggagcggcuacuccggaucuuuugugcagcauccggaacucacaggccuggacugcauccggccuuguuucuggguugagcuugugcgcgggcugcccagagaaaacaccacgaucuggacaagcggauccucuauuagcuucugcggcgucgauuccgacaccgccaauuggagcuggccugauggggcugagcuccccuuuaccaucgacaaguga

SEQ ID NO: 208312 - RNA, 1413 nt, Artificial Sequence
  derived and/or modified CDS sequence (opt5) from neuraminidase__InfluenzaA__ABW81491
augaaccccaaucagaagaucauuaccaucggcagcauuuccaucgccauugggaucaucucucugaugcuccaaauuggaaacaucauuagcaucugggcuucccacucuauucagacaggcagccagaaucauacggggaucugcaaccagagaauuaucaccuacgagaauagcacaugggugaaccacaccuaugucaauaucaacaauacaaacguuguggccggaaaagacaagaccucugugacacuggcgggcaauagcucccuuuguagcauuucugggugggcuaucuacaccaaagauaacuccauucggaucggaagcaagggcgacgucuucgugauucgcgaaccuuuuaucucuugcucccaucuggaguguagaacguucuuucucacccaaggcgcccugcuuaaugauaaacacagcaacgggacaguuaaggaccggucuccguaucgcgcccugauguccugcccccucggagaagcuccuagccccuacaauuccaaguucgagucuguggccuggagcgcuuccgccugucaugauggcaugggguggcugaccaucggaauuagcggcccugacaacggggcggucgccgugcugaaauauaacggaaucauuacagaaaccaucaagucuugggagaaacggauucucagaacgcaggaguccgaaugcguuugugugaauggcagcugcuuuacaaucaugaccgauggccccucuaacggggcugccagcuacaagaucuucaaaauugagaagggaaaggucacaaaauccaucgaacugaaugcuccuaacuuucacuaugaggaguguucuugcuacccggacaccggcaccgugaugugugugugccgcgauaauuggcacgggagcaacagacccugggucuccuucaaucagaaccuugacuaccagauuggauauaucugcagcggcguuuuuggggauaauccucggcccaaggacggaaaaggcucuuguaacccugugacaguggauggcgccgacggggucaagggauucuccuacaaauauggcaaugggguguggauuggacgcacgaaguccaacagacugcggaaaggcuuugaaaugaucugggaccccaauggguggaccgauacagacucugauuucuccguuaagcaagacguggucgcgauuaccgauuggagcggcuacuccggaucuuuugugcagcauccggagcucacaggccuggacugcauccgcccuuguuucuggguugaacuugugagagggcugccccgggagaacaccacgaucuggacaagcggauccucuauuagcuucugcggcgucgauuccgacaccgccaauuggagcuggccugauggggcugaacuccccuuuaccaucgacaaguga

SEQ ID NO: 208313 - RNA, 1413 nt, Artificial Sequence
  derived and/or modified CDS sequence (opt5) from neuraminidase__InfluenzaA__ABW81492
augaaccccaaucagaagaucauuaccaucggcagcauuuccaucgccauugggaucaucucucugaugcuccaaauuggaaacaucauuagcaucugggcuucccacucuauucagacaggcagccagaaucauacggggaucugcaaccagagaauuaucaccuacgaaaauuccacaugggugaaccacaccuaugucaauaucaacaauacaaacguuguggccggaaaagacaagaccucugugacacuggcgggcaauagcucccuuuguagcauuucugggugggcuaucuacaccaaagauaacuccauucggaucggaagcaagggcgacgucuucgugauucgcgagccuuuuaucucuugcucccaucuggaguguagaacguucuuucucacccaaggcgcccugcuuaaugauaaacacagcaacgggacaguuaaggaccggucuccguaucgcgcccugauguccugcccccucggagaagcuccuagccccuacaauuccaaguucgagucuguggccuggagcgcuuccgccugucaugauggcaugggguggcugaccaucggaauuagcggcccugacaacggggcggucgccgugcugaaauauaacggaaucauuacagaaaccaucaagucuuggaaaaagcggauucucagaacgcaggaguccgagugcguuugugugaauggcagcugcuuuacaaucaugaccgauggccccucuaacggggcugccagcuacaaaaucuucaagauugaaaagggaaaagucacaaaguccaucgagcugaaugcuccuaacuuucacuaugaagaguguucuugcuacccggacaccggcaccgugaugugugugugccgcgauaauuggcacgggagcaacagacccugggucuccuucaaucagaaccuugacuaccagauuggauauaucugcagcggcguuuuuggggauaauccucggcccaaagacggaaagggcucuuguaacccugugacaguggauggcgccgacggggucaaaggauucuccuacaaguauggcaaugggguguggauuggacgcacgaaaagcaacagacugcggaagggcuuugagaugaucugggaccccaauggguggaccgauacagacucugauuucuccguuaagcaagacguggucgcgauuaccgauuggagcggcuacuccggaucuuuugugcagcauccggaacucacaggccuggacugcauccgcccuuguuucuggguugagcuugugagagggcugccccgggaaaacaccacgaucugggccagcggauccucuauuagcuucugcggcgucgauuccgacacagcuaauuggagcuggccugauggggccgagcuccccuuuaccaucgacaaauga

SEQ ID NO: 208314 - RNA, 1413 nt, Artificial Sequence; identical to SEQ ID NO: 206458
  derived and/or modified CDS sequence (opt5) from neuraminidase__InfluenzaA__ABW81493

SEQ ID NO: 208315 - RNA, 1413 nt, Artificial Sequence; identical to SEQ ID NO: 206458
  derived and/or modified CDS sequence (opt5) from neuraminidase__InfluenzaA__ABW81494

SEQ ID NO: 208316 - RNA, 1413 nt, Artificial Sequence; identical to SEQ ID NO: 206458
  derived and/or modified CDS sequence (opt5) from neuraminidase__InfluenzaA__ABW81495

SEQ ID NO: 208317 - RNA, 1413 nt, Artificial Sequence; identical to SEQ ID NO: 208312
  derived and/or modified CDS sequence (opt5) from neuraminidase__InfluenzaA__ABW81497

SEQ ID NO: 208318 - RNA, 1413 nt, Artificial Sequence
  derived and/or modified CDS sequence (opt5) from neuraminidase__InfluenzaA__ABW81498
augaaccccaaucagaagaucauuaccaucggcagcauuuccaucgccauugggaucaucucucugaugcuccaaauuggaaacaucauuagcaucugggcuucccacucuauucagacaggcagccagaaucauacggggaucugcaaccagagaauuaucaccuacgagaauagcacaugggugaaccacaccuaugucaauaucaacaauacaaacguuguggccggaaaagacaagaccucugugacacuggcgggcaauagcucccuuuguagcauuucugggugggcuaucuacaccaaagauaacuccauucggaucggaagcaagggcgacgucuucgugauucgcgaaccuuuuaucucuugcucccaucuggaguguagaacguucuuucucacccaaggcgcccugcuuaaugauaaacacagcaacgggacaguuaaggaccggucuccguaucgcgcccugauguccugcccccucggagaagcuccuagccccuacaauuccaaguucgagucuguggccuggagcgcuuccgccugucaugauggcaugggguggcugaccaucggaauuagcggcccugacaacggggcggucgccgugcugaaauauaacggaaucauuacagaaaccaucaagucuugggagaaacggauucucagaacgcaggaguccgaaugcguuugugugaauggcagcugcuuuacaaucaugaccgauggccccucuaacggggcugccagcuacaagaucuucaaaauugagaagggaaaggucacaaaauccaucgaacugaaugcuccuaacuuucacuaugaggaguguucuugcuacccggacaccggcaccgugaugugugugugccgcgauaauuggcacgggagcaacagacccugggucuccuucaaucagaaccuugacuaccagguuggauauauuugcagcggcguguuuggggauaauccucggcccaaggacggaaaaggcucuuguaacccugugacagucgauggcgccgacggggugaagggauucuccuacaaauauggcaaugggguuuggaucggacgcacgaaguccaacagacugcggaaaggcuuugaaaugauuugggaccccaauggguggaccgauacagacucugauuucuccgugaagcaagacgucguggcgaucaccgauuggagcggcuacuccggaucuuuuguucagcauccggagcucacaggccuggacugcauucgcccuuguuucuggguggaacuugucagagggcugccccgggagaacaccacgaucuggacaagcggauccucuaucagcuucugcggcguggauuccgacaccgccaauuggagcuggccugauggggcugaacuccccuuuaccauugacaaguga

SEQ ID NO: 208319 - RNA, 1413 nt, Artificial Sequence
  derived and/or modified CDS sequence (opt5) from neuraminidase__InfluenzaA__ABW81499
augaaccccaaucagaagaucauuaccaucggcagcauuuccaucgccauugggaucaucucucugaugcuccaaauuggaaacaucauuagcaucugggcuucccacucuauucagacaggcagccagaaucauacggggaucugcaaccagagaauuaucaccuacgagaauagcacaugggugaaccacaccuaugucaauaucaacaauacaaacguuguggccggacgggacaaaaccucugugacacuggcgggcaauagcucccuuuguagcauuucugggugggcuaucuacaccaaggauaacuccauucgcaucggaagcaaaggcgacgucuucgugauuagagaaccuuuuaucucuugcucccaucuggagugucggacguucuuucucacccaaggcgcccugcuuaaugauaagcacagcaacgggacaguuaaagaccgcucuccguauagagcccugauguccugcccccucggagaagcuccuagccccuacaauuccaaguucgagucuguggccuggagcgcuuccgccugucaugauggcaugggguggcugaccaucggaauuagcggcccugacaacggggcggucgccgugcugaaguauaacggaaucauuacagaaaccaucaaaucuuggaagaaacggauucuccgcacgcaggaguccgagugcguuugugugaauggcagcugcuuuacaaucaugaccgauggccccucuaacggggcugccagcuacaagaucuucaaaauugaaaagggaaaggucacaaaauccaucgagcugaaugcuccuaacuuucacuaugaagaguguucuugcuacccggacaccggcaccgugaugugugugugcagagauaauuggcacgggagcaaccggcccugggucuccuucaaucagaaccuugacuaccagauuggauauaucugcagcggcguuuuuggggauaauccucgccccaaggacggaaaaggcucuuguaacccugugacaguggauggcgccgacggggucaagggauucuccuacaaauauggcaaugggguguggauuggaagaacgaaguccaaccggcugcgcaaaggcuuugagaugaucugggaccccaauggguggaccgauacagacucugauuucuccguuaagcaagacguggucgcgauuaccgauuggagcggcuacuccggaucuuuugugcagcauccggaacucacaggccuggacugcaucagaccuuguuucuggguugagcuugugcgggggcugccccgcgaaaacaccacgaucuggacaagcggauccucuauuagcuucugcggcgucgauuccgacaccgccaauuggagcuggccugauggggcugagcuccccuuuaccaucgacaaguga

SEQ ID NO: 208320 - RNA, 1413 nt, Artificial Sequence
  derived and/or modified CDS sequence (opt5) from neuraminidase__InfluenzaA__ABW81500
augaaccccaaucagaagaucauuaccaucggcagcauuuccaucgccauugggaucaucucucugaugcuccaaauuggaaacaucauuagcaucugggcuucccacucuauucagacaggcagccagaaucauacggggaucugcaaccagagaauuaucaccuacgaaaauuccacaugggugaaccacaccuaugucaauaucaacaauacaaacguuguggccggaaaagacaagaccucugugacacuggcgggcaauagcucccuuuguagcauuucugggugggcuaucuacaccaaagauaacuccauucggaucggaagcaagggcgacgucuucgugauucgcgagccuuuuaucucuugcucccaucuggaguguagaacguucuuucucacccaaggcgcccugcuuaaugauaaacacagcaacgggacaguuaaggaccggucuccguaucgcgcccugauguccugcccccucggagaagcuccuagccccuacaauuccaaguucgagucuguggccuggagcgcuuccgccugucaugauggcaugggguggcugaccaucggaauuagcggcccugacaacggggcggucgccgugcugaaauauaacggaaucauuacagaaaccaucaagucuuggaaaaagcggauucucagaacgcaggaguccgagugcguuugugugaauggcagcugcuuuacaaucaugaccgauggccccucuaacggggcugccagcuacaaaaucuucaagauugaaaagggaaaagucacaaaguccaucgagcugaaugcuccuaacuuucacuaugaagaguguucuugcuacccggacaccggcaccgugaugugugugugccgcgauaauuggcacgggagcaacagacccugggucuccuucaaucagaaccuugacuaccagauuggauauaucugcagcggcguuuuuggggauaauccucggcccaaagacggaaagggcucuuguaacccugugacagccgauggcgcggacggggugaaaggauucuccuacaaguauggcaauggggucuggauuggacgcacgaaaagcaacagacugcggaagggcuuugagaugaucugggaccccaauggguggaccgauacagacucugauuucuccgugaagcaagacguuguggccauuaccgauuggagcggcuacuccggaucuuuuguccagcauccggaacucacaggccuggacugcauccgcccuuguuucuggguggagcuuguuagagggcugccccgggaaaacaccacgaucuggacaagcggauccucuauuagcuucugcggcguggauuccgacaccgcuaauuggagcuggccugauggggccgagcuccccuuuaccaucgacaaauga

SEQ ID NO: 208321 - RNA, 1413 nt, Artificial Sequence
  derived and/or modified CDS sequence (opt5) from neuraminidase__InfluenzaA__ABW81501
augaaccccaaucagaagaucauuaccaucggcagcauuuccaucgccauugggaucaucucucugaugcuccaaauuggaaacaucauuagcaucugggcuucccacucuauucagacaggcagccagaaucauacggggaucugcaaccagaaaauuaucaccuacgagaauagcacaugggugaaccacaccuaugucaauaucaacaauacaaacguuguggccggaaaggacaaaaccucugugacacuggcgggcaauagcucccuuuguagcgucucugggugggcuauuuacaccaaggauaacuccaucagaauuggaagcaaaggcgacguguucguuauccgggaaccuuuuauuucuugcucccaucuggagugucgcacguucuuucucacccaaggcgcccugcuuaaugauaagcacagcaacgggacagugaaggacagaucuccguaucgggcccugauguccugcccccucggagaagcuccuagccccuacaauuccaaauucgagucugucgccuggagcgcuuccgccugucaugauggcaugggguggcugaccaucggaaucagcggcccugacaacggggcgguggccguucugaaguauaacggaauuaucacagaaaccauuaaaucuuggaagaaacgcauccucagaacgcaggaguccgagugcgugugugucaauggcagcugcuuuacaauuaugaccgauggccccucuaacggggcugccagcuacaagaucuucaagaucgaaaaaggaaaggugacaaaauccauugagcugaaugcuccuaacuuucacuaugaagaguguucuugcuacccggacaccggcaccgugaugugugucugccgggauaauuggcacgggagcaaccgccccuggguuuccuucaaucagaaccuugacuaccagaucggauauauuugcagcggcguguuuggggauaauccuagacccaaggacggaaaaggcucuuguaacccugugacagucgauggcgccgacggggugaagggauucuccuacaaauauggcaaugggguuuggaucggacggacgaaguccaaccgccugagaaagggcuuugagaugauuugggaccccaauggguggaccgauacagacucugauuucuccgugaaacaagacgucguggcgaucaccgauuggagcggcuacuccggaucuuuuguucagcauccggaacucacaggccuggacugcauucggccuuguuucuggguggagcuuguccgcgggcugcccagagaaaacaccacgaucuggacaagcggauccucuaucagcuucugcggcguggauuccgacaccgccaauuggagcuggccugauggggcugagcuccccuuuaccauugacaaguga

SEQ ID NO: 208322 - RNA, 1413 nt, Artificial Sequence; identical to SEQ ID NO: 208143
  derived and/or modified CDS sequence (opt5) from neuraminidase__InfluenzaA__ABW86324

SEQ ID NO: 208323 - RNA, 1413 nt, Artificial Sequence; identical to SEQ ID NO: 208115
  derived and/or modified CDS sequence (opt5) from neuraminidase__InfluenzaA__ABW86335

SEQ ID NO: 208324 - RNA, 1413 nt, Artificial Sequence; identical to SEQ ID NO: 208102
  derived and/or modified CDS sequence (opt5) from neuraminidase__InfluenzaA__ABW86346

SEQ ID NO: 208325 - RNA, 1413 nt, Artificial Sequence; identical to SEQ ID NO: 208102
  derived and/or modified CDS sequence (opt5) from neuraminidase__InfluenzaA__ABW86357

SEQ ID NO: 208326 - RNA, 1413 nt, Artificial Sequence; identical to SEQ ID NO: 208102
  derived and/or modified CDS sequence (opt5) from neuraminidase__InfluenzaA__ABW86368

SEQ ID NO: 208327 - RNA, 1413 nt, Artificial Sequence; identical to SEQ ID NO: 208128
  derived and/or modified CDS sequence (opt5) from neuraminidase__InfluenzaA__ABW86379

SEQ ID NO: 208328 - RNA, 1413 nt, Artificial Sequence; identical to SEQ ID NO: 208102
  derived and/or modified CDS sequence (opt5) from neuraminidase__InfluenzaA__ABW86390

SEQ ID NO: 208329 - RNA, 1413 nt, Artificial Sequence; identical to SEQ ID NO: 208143
  derived and/or modified CDS sequence (opt5) from neuraminidase__InfluenzaA__ABW86401

SEQ ID NO: 208330 - RNA, 1413 nt, Artificial Sequence; identical to SEQ ID NO: 208102
  derived and/or modified CDS sequence (opt5) from neuraminidase__InfluenzaA__ABW86412

SEQ ID NO: 208331 - RNA, 1413 nt, Artificial Sequence
  derived and/or modified CDS sequence (opt5) from neuraminidase__InfluenzaA__ABW86423
augaaccccaaucagaagaucauuaccaucggcagcauuuccaucgccauugggaucaucucucugaugcuccaaauuggaaacaucauuagcaucugggcuucccacucuauucagacaggcagccagaaucauacggggaucugcaaccagagaauuaucaccuacgaaaauuccacaugggugaaccacaccuaugucaauaucaacaauacaaacguuguggccggaaaagacaagaccucugugacacuggcgggcaauagcucccuuuguagcauuucugggugggcuaucuacaccaaagauaacuccauucggaucggaagcaagggcgacgucuucgugauucgcgagccuuuuaucucuugcucccaucuggaguguagaacguucuuucucacccaaggcgcccugcuuaaugauaaacacagcaacgggacaguuaaggaccggucuccguaucgcgcccugauguccugcccccucggagaagcuccuagccccuacaauuccaaguucgagucuguggccuggagcgcuuccgccugucaugauggcaugggguggcugaccaucggaauuagcggcccugacaacggggcggucgccgugcugaaauauaacggaaucauuacagaaaccaucaagucuuggaaaaagcggauucucagaacgcaggaguccgagugcguuugugugaauggcagcugcuuugcuaucaugacagauggccccucuaacggggccgcuagcuacaaaaucuucaagauugaaaagggaaaagucaccaaguccaucgagcugaaugccccuaacuuucacuaugaagaguguucuugcuacccggacacaggcaccgugaugugugugugccgcgauaauuggcacgggagcaacagacccugggucuccuucaaucagaaccuugacuaccagguuggauauauuugcagcggcguguuuggggauaauccucggcccaaagacggaaagggcucuuguaacccuaugaccguggauggcgcggacggggucaaaggauucuccuacaaguauggcaaugggguguggaucggacgcacaaaaagcaacaagcugagaaagggcuuugagaugauuugggaccccaauggguggacggauaccgacucugauuucuccguuaaacaagacguggucgccaucacagauuggagcggcuacuccggaucuuuugugcagcauccggaacucaccggccuggacugcauucggccuuguuucuggguugagcuugugcgcgggcugcccagagaaaacacaaccaucuggacgagcggauccucuaucagcuucugcggcgucgauuccgacacagcuaauuggagcuggccugauggggccgagcuccccuuuaccauugacaaguga

SEQ ID NO: 208332 - RNA, 1413 nt, Artificial Sequence; identical to SEQ ID NO: 208102
  derived and/or modified CDS sequence (opt5) from neuraminidase__InfluenzaA__ABW86434

SEQ ID NO: 208333 - RNA, 1413 nt, Artificial Sequence; identical to SEQ ID NO: 208102
  derived and/or modified CDS sequence (opt5) from neuraminidase__InfluenzaA__ABW86445

SEQ ID NO: 208334 - RNA, 1413 nt, Artificial Sequence; identical to SEQ ID NO: 208137
  derived and/or modified CDS sequence (opt5) from neuraminidase__InfluenzaA__ABW86456

SEQ ID NO: 208335 - RNA, 1413 nt, Artificial Sequence
  derived and/or modified CDS sequence (opt5) from neuraminidase__InfluenzaA__ABW86467
augaacaccaaucagaagaucauuacaaucggcagcauuuccaucgccauugggaucaucucucugaugcuccaaauuggaaacaucauuagcaucugggcuucccacucuauucagacgggcagccagaaucauaccgggaucugcaaccagagaauuaucacauacgagaauagcaccugggugaaccacacauaugucucuaucaauaacaccaauguuguggccggaaaagacaagacaagcgugacccuggcgggcaacuccagccuuuguucuauuuccgggugggcuaucuacacgaaagauaauagcauucggaucggaucuaagggcgacgucuucgugauucgcgaacccuuuaucuccugcagccaucuggaguguagaaccuucuuucucacacaaggcgcccugcuuaacgauaaacacucuaaugggaccguuaaggaccgguccccuuaucgcgcccugaugagcugcccgcucggagaagcucccuccccuuacaacucuaaguucgagagcguggccugguccgcuagcgccugucaugauggcaugggguggcugacaaucggaauuucuggccccgacaauggggcggucgccgugcugaaauauaacggaaucauuaccgaaacgaucaaguccuggaaaaagcggauucucagaacacaggagagcgagugcguuugugugaacggcucuugcuuuaccaucaugacagauggcccuagcaauggggcugccuccuacaaaaucuucaagauugaaaagggaaaagucaccaagucuaucgagcugaacgcucccaauuuucacuaugaagaguguagcugcuacccugacaccggcacagugaugugugugugccgcgauaacuggcacggguccaauagaccgugggucagcuucaaccagaaucuugacuaccagauuggauauaucugcucuggcguuuuuggggauaacccccggccuaaagacggaaagggcuccuguaaucccgugacgguggauggcgccgacggggucaaaggauucagcuacaaguauggcaacgggguguggauuggacgcaccaaaucuaauagacugcggaagggcuuugagaugaucugggacccuaacggguggacagauaccgacuccgauuucagcauuaagcaagacguuguggcgaucacagauugguccggcuacucuggauccuuuguccagcaucccgaacucaccggccuggacugcauccgcccguguuucuggguggagcuuguuagagggcugccucgggaaaauacgacaauuuggaccuccggaucuagcaucuccuucugcggcguggauagcgacaccgccaacuggucuuggcccgauggggcugagcucccuuuuacaauugacaaauga

SEQ ID NO: 208336 - RNA, 1413 nt, Artificial Sequence; identical to SEQ ID NO: 208137
  derived and/or modified CDS sequence (opt5) from neuraminidase__InfluenzaA__ABW86478

SEQ ID NO: 208337 - RNA, 1413 nt, Artificial Sequence
  derived and/or modified CDS sequence (opt5) from neuraminidase__InfluenzaA__ABW86489
augaaccccaaucagaagaucauuaccaucggcagcauuuccaucgccauugggaucaucucucugaugcuccaaauuggaaacaucauuagcaucugggcuucccacucuauucagacaggcagccagaaucauacggggaucugcaaccagagaauuaucaccuacgaaaauuccacaugggugaaccacaccuaugucucuaucaauaacacaaauguuguggccggaaaagacaagaccagcgugacacuggcgggcaacuccagccuuuguucuauuuccgggugggcuaucuacaccaaagauaauagcauucggaucggaucuaagggcgacgucuucgugauucgcgagccuuuuaucuccugcagccaucuggaguguagaacguucuuucucacccaaggcgcccugcuuaacgauaaacacucuaaugggacaguuaaggaccgguccccguaucgcgcccugaugagcugcccccucggagaagcuccuucccccuacaacucuaaguucgagagcguggccugguccgcuagcgccugucaugauggcaugggguggcugaccaucggaauuucuggcccugacaauggggcggucgccgugcugaaauauaacggaaucauuacagaaaccaucaaguccuggaaaaagcggauucucagaacgcaggagagcgagugcguuugugugaacggcucuugcuuuacaaucaugaccgauggccccagcaauggggcugccuccuacaaaaucuucaagauugaaaagggaaaagucacaaagucuaucgagcugaacgcuccuaauuuucacuaugaagaguguagcugcuacccggacaccggcaccgugaugugugugugccgcgauaacuggcacggguccaauagacccugggucagcuucaaccagaaucuugacuaccagauuggauauaucugcucuggcguuuuuggggauaacccucggcccaaagacggaaagggcuccuguaauccugugacaguggauggcgccgacggggucaaaggauucagcuacaaguauggcaacgggguguggauuggacgcacgaaaucuaauagacugcggaagggcuuugagaugaucugggaccccaacggguggaccgauacagacuccgauuucagcguuaagcaagacguggucggcauuaccgauugguccggauacucuggcagcuuugugcagcauccggaacucacagggcuggacugcauccgcccuuguuucuggguugagcuugugagaggacugccccgggaaaauaccacgaucuggacauccggcucuagcauuuccuucugcggggucgauagcgacaccgcgaacuggucuuggccugauggagccgagcuccccuuuaccaucgacaaauga

SEQ ID NO: 208338 - RNA, 1413 nt, Artificial Sequence
  derived and/or modified CDS sequence (opt5) from neuraminidase__InfluenzaA__ABW86500
augaaccccaaucagaagaucaugaccauuggcagcaucuccauugccaucgggauuaucucucugaugcuccaaaucggaaacauuaucagcauuugggcuucccacucuauccagacaggcagccagaaucauacggggauuugcaaccagagaaucauuaccuacgaaaauuccacaugggugaaccacaccuaugucaauaucaacaauacaaacguuguggccggaaaagacaagaccucugugacacuggcgggcaauagcucccuuuguagcaucucugggugggcuauuuacaccaaagauaacuccauccggauuggaagcaagggcgacgucuucgugauccgcgagccuuuuauuucuugcucccaucuggaguguagaacguucuuucucacccaaggcgcccugcuuaaugauaaacacagcaacgggacaguuaaggaccggucuccguaucgcgcccugauguccugcccccucggagaagcuccuagccccuacaauuccaaguucgagucuguggccuggagcgcuuccgccugucaugauggcaugggguggcugaccaucggaaucagcggcccugacaacggggcggucgccgugcugaaauauaacggaauuaucacagaaaccauuaagucuuggaaaaagagaauccuccggacgcaggaguccgagugcguuugugugaauggcagcugcuuuacaauuaugaccgauggccccucuaacggggcugccagcuacaaaaucuucaagaucgaaaagggaaaagucacaaaguccauugagcugaaugcuccuaacuuucacuaugaagaguguucuugcuacccggacaccggcaccgugaugugugugugccgcgauaauuggcacgggagcaacagacccugggucuccuucaaucagaaccuugacuaccagaucggauauauuugcagcggcguuuuuggggauaauccucggcccaaagacggaaagggcucuuguaacccugugacaguggauggcgccgacggggucaaaggauucuccuacaaguauggcaaugggguguggaucggacgcacgaaaagcaacagacugcggaagggcuuugagaugauuugggaccccaauggguggaccaacacagauucugacuucuccaugaagcaagauguuguggcgaucaccgacuggagcggcuacuccggaucuuuuguccagcauccggaacucacaggccuggauugcauucgcccuuguuucuggguggagcuuguuagagggcugccccgggaaaauaccacgaucuggacaagcggauccucuaucagcuucugcggcguggacuccgauaccgccaacuggagcuggccugacggggcugagcuccccuuuaccauugauaaauga

SEQ ID NO: 208339 - RNA, 1413 nt, Artificial Sequence; identical to SEQ ID NO: 208102
  derived and/or modified CDS sequence (opt5) from neuraminidase__InfluenzaA__ABW86511

SEQ ID NO: 208340 - RNA, 1413 nt, Artificial Sequence
  derived and/or modified CDS sequence (opt5) from neuraminidase__InfluenzaA__ABW86522
augaaccccaaucagaagaucauuaccaucggcagcauuuccaucgccauugggaucaucucucugaugcuccaaauuggaaacaucauuagcaucugggcuucccacucuauucagacaggcagccagaaucauacggggaucugcaaccagagaauuaucaccuacgaaaauuccacaugggugaaccacaccuaugucaauaucaacaauacaaacguuguggccggaaaagacaagaccucugugacacuggcgggcaauagcucccuuuguagcauuucugggugggcuaucuacaccaaagauaacuccauucggaucggaagcaagggcgacgucuucgugauucgcgagccuuuuaucucuugcucccaucuggaguguagaacguucuuucucacccaaggcgcccugcuuaaugauaaacacagcaacgggacaguuaaggaccggucuccguaucgcgcccugauguccugcccccucggagaagcuccuagccccuacaauuccaaguucgagucuguggccuggagcgcuuccgccugucaugauggcaugggguggcugaccaucggaauuagcggcccugacaacggggcggucgccgugcugaaauauaacggaaucauuacagaaaccaucaagucuuggaaaaagcggauucucagaacgcaggaguccgagugcguuugugugaauggcagcugcuuuacaaucaugaccgauggccccucuaacggggcugccagcuacaaaaucuucaagauugaaaagggaaaagucacaaaguccaucgagcugaaugcuccuaacuuucacuaugaagaguguucuugcuacccggacaccggcaccgugaugugugugugccgcgauaauuggcacgggagcaacagacccugggucuccuucaaucagaaccuugacuaccagguuggauauauuugcagcggcguguuuggggauaauccucggcccaaagacggaaagggcucuuguaacccuaugacaguggauggcgccgacggggucaaaggauucuccuacaaguauggcaaugggguguggaucggacgcacgaaaagcaacaagcugagaaagggcuuugagaugauuugggaccccaauggguggaccgauacagacucugauuucuccguuaaacaagacguggucgcggugaccgauuggagcggcuacuccggaucuuuuguucagcauccggaacucacaggccuggacugcauccggccuuguuucuggguggagcuuguccgcgggcugcccagagaaaacgccaccauuuggacgagcggauccucuaucagcuucugcggcguggauuccgacacagcuaauuggagcuggccugauggggccgagcuccccuuuaccaucgacaaguga

SEQ ID NO: 208341 - RNA, 1413 nt, Artificial Sequence; identical to SEQ ID NO: 208102
  derived and/or modified CDS sequence (opt5) from neuraminidase__InfluenzaA__ABW86533

SEQ ID NO: 208342 - RNA, 1413 nt, Artificial Sequence; identical to SEQ ID NO: 208137
  derived and/or modified CDS sequence (opt5) from neuraminidase__InfluenzaA__ABW86544

SEQ ID NO: 208343 - RNA, 1413 nt, Artificial Sequence; identical to SEQ ID NO: 208102
  derived and/or modified CDS sequence (opt5) from neuraminidase__InfluenzaA__ABW86555

SEQ ID NO: 208344 - RNA, 1410 nt, Artificial Sequence
  derived and/or modified CDS sequence (opt5) from neuraminidase__InfluenzaA__ABW86566
augaaccccaaucagaagaucauuaccaucggcagcgugucccugacaauuucuacgaucugcuucuuuaugcaaaccgccauucucaucacaaccgucacacugcacuucaaacaguacgaguuuaacagcccuccgaauaaccagguuaugcuuugugaacccaccgugaucgagagaaauauuacagaaaucguguaucugaccaacacgaccauugagaaggaaaucugcccuaaacucgcugaguaccggaauugguccaagccccagugugacauuacaggguucgccccuuuuucuaaagauaacagcauccgccuguccgcgggaggcgacauuugggucaccagagagcccuaugugucuugcgauccugacaaguguuaccaauucgcucuugggcagggaacaacccugaauaacguucauagcaaugauacggugcgggaccgcacaccguauagaacccuccugaugaacgaacugggcguccccuuucaccucgggacaaaacaggugugcaucgccugguccucuagcuccugucaugauggaaaggccuggcugcacguuugcaucaccggcgacgauaagaaugcuaccgccagcuucauuuacaacggccggcuuguggacucuaucgucuccuggagcaaagagauucugcgcacacaggaaucugagugugugugcaucaaugggacguguaccguggucaugacagauggauccgcuagcggcaaggccgacaccaaaauucucuuuaucgaggaagggaagaucguucauacauccacccugucuggaagcgcgcaacacguggaggaaugcuccugcuauccuagauaccccggcgugcggugugucugccgcgauaacuggaaggggagcaacagaccuauuguggacaucaauauuaaagaccacucuaucguuuccagcuacguguguucuggacuugucggcgauacgccccggaagaacgacagcuccucuagcucccauugccuggauccgaauaacgaggaaggcgggcacggagugaaaggcugggccuucgacgaugggaaugacguuuggaugggacgcacaauuagcgagaagucuagacucggcuaugagaccuuuaaagugaucgaagggugguccaacccuaagagcaaacugcagaucaaucggcaggucauuguggaucgcggaaacagaucuggcuacuccggcaucuucagcgucgaggggaaguccuguauuaaucggugcuuuuauguggaacugaucagaggacgcaaggaggaaaccgagguucucuggacaucuaacagcauuguggucuucuguggcaccuccgggacauacggaacgggcucuuggcccgacggggcugauaucaaucugaugccuauuuga

SEQ ID NO: 208345 - RNA, 1413 nt, Artificial Sequence; identical to SEQ ID NO: 208128
  derived and/or modified CDS sequence (opt5) from neuraminidase__InfluenzaA__ABW86609

SEQ ID NO: 208346 - RNA, 1413 nt, Artificial Sequence; identical to SEQ ID NO: 207131
  derived and/or modified CDS sequence (opt5) from neuraminidase__InfluenzaA__ABW91188

SEQ ID NO: 208347 - RNA, 1410 nt, Artificial Sequence
  derived and/or modified CDS sequence (opt5) from neuraminidase__InfluenzaA__ABW91210
augaaccccaaucagaagaucauuaccaucggcagcgugucccugacaauuucuacgaucugcuucuuuaugcaaauugccauccucaucaccacagucacccugcacuucaaacaguacgaguuuaacagcccuccgaauaaccagguuauucuuugugaacccacaaucauugagagaaauaucaccgaaauuguguaucugacaaacaccacgaucgagaaggaaauuugcccuaaacucgcugaguaccggaauugguccaagccccagugugacaucaccggguucgccccuuuuucuaaagauaacagcauccgccuguccgcgggaggcgacauuugggugacaagagagcccuaugucucuugcgauccugacaaguguuaccaauucgcucuugggcagggaaccacacugaauaacgugcauagcaaugauaccguucgggaccgcacgccguauagaacacuccugaugaacgaacugggcgugcccuuucaccucgggaccaagcaggucugcaucgccugguccucuagcuccugucaugauggaaaagccuggcugcacgugugcauuacaggcgacgauaagaaugcuaccgccagcuucaucuacaacggccggcuuguugacucuauuguguccuggagcaaagagauccugcgcacccaggaaucugagugugucugcaucaaugggacauguacgguggugaugaccgauggauccgcuagcggcaaggccgacacaaaaauucucuuuaucgaggaagggaagauuguccauaccuccacacugucuggaagcgcgcaacacguugaggaaugcuccugcuauccuagauaccccggcgugcggugugugugccgcgauaacuggaaggggagcaacagaccuaucgucgacauuaauaucaaagaccacucuaucguguccagcuacguuuguucuggacuugugggcgauacgccccggaagaacgacagcuccucuagcucccauugccuggauccgaauaacgaggaaggcgggcacggagucaaaggcugggccuucgacgaugggaaugacguguggaugggacgcaccauuagcgagaagucuagacucggcuaugagacauuuaaaguuaucgaagggugguccaacccuaagagcaaacugcagauuaaucgccaggugaucgucgaucggggaaacagaucuggcuacuccggcauuuucagcguggaggggaaguccuguaucaaucggugcuuuuaugucgaacugauuagaggacgcaaggaggaaaccgaggugcucuggaccucuaacagcaucguuguguucuguggcacauccgggaccuacggaacaggcucuuggcccgacggggcugauaucaaucugaugccuauuuga

SEQ ID NO: 208348 - RNA, 1413 nt, Artificial Sequence; identical to SEQ ID NO: 208102
  derived and/or modified CDS sequence (opt5) from neuraminidase__InfluenzaA__ABW91221

SEQ ID NO: 208349 - RNA, 1410 nt, Artificial Sequence
  derived and/or modified CDS sequence (opt5) from neuraminidase__InfluenzaA__ABW91232
augaaccccaaucagaagaucauuaccaucggcagcgugucccugacaauuucuacgaucugcuucuuuaugcaaauugccauccucaucaccacagucacccugcacuucaaacaguacgaguuuaacagcccuccgaauaaccagguuaugcuuugugaauccacaauuaucgagagaaauauuaccgaaaucguguaucugacaaacaccacgauugagaaggaaaucugccccaaacucgcugaguaccggaauuggucuaagccucagugugacauuaccggguucgcccccuuuagcaaagauaacuccauccgccugucugcgggaggcgacaucugggugacaagagagccuuaugucagcugcgaucccgacaaguguuaccaauucgcucuugggcagggaaccacacugaauaacgugcauuccaaugauaccguucgggaccgcacgccuuauagaacacuccugaugaacgaacugggcgugccguuucaccucgggaccaagcaggucugcauugccuggagcagcuccagcugucaugauggaaaagccuggcugcacgugugcaucacaggcgacgauaagaaugcuaccgccucuuucauuuacaacggccggcuuguugacuccaucgugagcuggucuaaagagauucugcgcacccaggaauccgagugugucugcaucaaugggacauguacgguggugaugaccgauggaagcgcuuccggcaaggccgacacaaaaauccucuuuauugaggaagggaagaucguccauaccucuacacugagcggauccgcgcaacacguugaggaaugcagcugcuaucccagauacccuggcgugcggugugugugccgcgauaacuggaaggggucuaacagacccauugucgacaucaauauuaaagaccacuccaucgugagcucuuacguuuguagcggacuugugggcgauaccccucggaagaacgacuccucuagcuccggccauugccuggaucccaauaacgaggaagggggacacggcgucaaagggugggccuucgacgauggaaaugacguguggaugggccgcacgaucagcgagaagucuagacucggguaugagacauuuaaaguuauugaaggaugguccaacccgaagucuaaacugcagaucaaucgccaggugauugucgaucggggcaacagaucuggcuacuccgggaucuucagcguggagggaaaguccuguauuaaucggugcuuuuaugucgaacugaucagaggccgcaaggaggaaaccgaggugcucuggaccucuaacagcauuguuguguucugugggacauccggaaccuacggcacagggucuuggccugacggcgcugauaucaaucugaugcccaucuga

SEQ ID NO: 208350 - RNA, 1410 nt, Artificial Sequence; identical to SEQ ID NO: 208138
  derived and/or modified CDS sequence (opt5) from neuraminidase__InfluenzaA__ABW91243

SEQ ID NO: 208351 - RNA, 1410 nt, Artificial Sequence; identical to SEQ ID NO: 207956
  derived and/or modified CDS sequence (opt5) from neuraminidase__InfluenzaA__ABW91254

SEQ ID NO: 208352 - RNA, 1410 nt, Artificial Sequence; identical to SEQ ID NO: 207956
  derived and/or modified CDS sequence (opt5) from neuraminidase__InfluenzaA__ABW91265

SEQ ID NO: 208353 - RNA, 1413 nt, Artificial Sequence; identical to SEQ ID NO: 208102
  derived and/or modified CDS sequence (opt5) from neuraminidase__InfluenzaA__ABW91276

SEQ ID NO: 208354 - RNA, 1413 nt, Artificial Sequence
  derived and/or modified CDS sequence (opt5) from neuraminidase__InfluenzaA__ABW91287
augaaccccaaucagaagaucauuaccaucggcagcauuuccaucgccauugggaucaucucucugauucuccaaaucggaaacauuaucagcauuugggcuucccacucuauccagacaggcagccagaaucauacggggauuugcaaccagagaaucaucaccuacgaaaauuccacaugggugaacaauaccuaugucaacauuaauaacacaaauguuguggccgagaaagacaagaccucugugacacuggcgggaaacagcucccuuuguagcaucucuggcugggcuauuuacaccaaagauaauuccauccggauugggagcaagggagacaucuucgucauccgcgagccuuuuauuucuugcucccaccuggaauguagaacguucuuucucacccaaggcgcccugcuuaacgauaaacauagcaauggcacagugaaggaccggucuccguaucgcgcccugauguccugcccccucggggaggcuccuagccccuacaacuccagauucgaaucuguugccuggagcgcuuccgccugucacgauggaaugggcuggcugaccaucgggauuagcggaccugacaacggcgcgguggccguccugaaguauaaugggaucauuacagagaccaucaaaucuuggaagaaacggauccuccgcacgcaggaguccgaaugcguguguaugaacggaagcugcuuuacaauuaugaccgauggccccucuaauggcgcugccagcuacaagaucuucaaaauugagaaggggaagguuacaaaaaccaucgaacugaacgcuccuaauuuucauuaugaggaguguuccugcuacccggacaccggaacagugaugugugucugcagagauaacuggcacggcucuaaucggcccugggugagcuucaaccagaaucuugacuaccagauuggguauaucugcuccggaguguuuggcgauaacccucgccccaaggacggggaaggaagcuguaauccugucacgguugauggcgccgacggcgugaaaggguucucuuacaaguauggaaacggcguguggauugggagaaccaaauccaaucggcugcgcaagggauuugagaugaucugggaccccaacggcuggacaaauaccgauagcgacuucucugucaaacaagauaucguggcgauuacagacugguccggguacagcggcuccuuuguucagcacccggaacucaccggacuggauugcaucagaccuuguuucuggguggagcuuguccggggccugccccgcgaaaacacgacaauuuggaccucugggagcuccaucucuuucugcggagugaacagcggcaccgccaauugguccuggccugacggggcugagcuccccuuuacaauugauaaguga

SEQ ID NO: 208355 - RNA, 1413 nt, Artificial Sequence; identical to SEQ ID NO: 208102
  derived and/or modified CDS sequence (opt5) from neuraminidase__InfluenzaA__ABW91298

SEQ ID NO: 208356 - RNA, 1413 nt, Artificial Sequence
  derived and/or modified CDS sequence (opt5) from neuraminidase__InfluenzaA__ABW91309
augaaccccaaucagaagaucauuaccaucggcagcauuuccaucgccauugggaucaucucucugaugcuccaaauuggaaacaucauuagcaucugggcuucccacucuauucagacaggcagccagaaucauacggggaucugcaaccagagaauuaucaccuacgagaauagcacaugggugaaccacaccuaugucucuaucaauaacacaaauguuguggccggaaaagacaagaccagcgugacacuggcgggcaacuccagccuuuguucuauuuccgggugggcuaucuacaccaaagauaauagcauucggaucggaucuaagggcgacgucuucgugauucgcgaaccuuuuaucuccugcagccaucuggaguguagaacguucuuucucacccaaggcgcccugcuuaacgauaaacacucuaaugggacaguuaaggaccgguccccguaucgcgcccugaugagcugcccccucggagaagcuccuucccccuacaacucuaaguucgagagcguggccugguccgcuagcgccugucaugauggcaugggguggcugaccaucggaauuucuggcccugacaauggggcggucgccgugcugaaauauaacggaaucauuacagaaaccaucaaguccuggaaaaagcggauucucagaacgcaggagagcgagugcguuugugugaacggcucuugcuuuacaaucaugaccgauggccccagcgacggggcugccuccuacaaaaucuucaagauugaaaagggaaaagucacaaagucuaucgagcugaaugcuccuaacuuucacuaugaagaguguagcugcuacccggauaccggcaccgugaugugugugugccgcgacaauuggcacggguccaacagacccugggucagcuucaaucagaaccuugauuaccagauuggauauaucugcucuggcguuuuuggggacaauccucggcccaaagauggaaagggcuccuguaacccugugacagccgacggcgcggacggggugaaaggauucagcuacaaguauggcaauggggucuggauuggacgcacgaaaucuaacagacugcggaagggcuuugagaugaucugggaucccaauggguggaccgacacagauuccgacuucagcgugaagcaagauguuguggccauuaccgacugguccggcuacucuggauccuuuguccagcauccggaacucacaggccuggauugcauccgcccuuguuucuggguggagcuuguuagagggcugccccgggaaaacaccacgaucuggacauccggaucuagcauuuccuucugcggcguggacagcgauaccgcuaauuggucuuggccugacggggccgagcuccccuuuaccaucgauaaauga

SEQ ID NO: 208357 - RNA, 1413 nt, Artificial Sequence; identical to SEQ ID NO: 208102
  derived and/or modified CDS sequence (opt5) from neuraminidase__InfluenzaA__ABW91320

SEQ ID NO: 208358 - RNA, 1413 nt, Artificial Sequence; identical to SEQ ID NO: 208102
  derived and/or modified CDS sequence (opt5) from neuraminidase__InfluenzaA__ABW91331

SEQ ID NO: 208359 - RNA, 1413 nt, Artificial Sequence; identical to SEQ ID NO: 208102
  derived and/or modified CDS sequence (opt5) from neuraminidase__InfluenzaA__ABW91342

SEQ ID NO: 208360 - RNA, 1413 nt, Artificial Sequence; identical to SEQ ID NO: 208102
  derived and/or modified CDS sequence (opt5) from neuraminidase__InfluenzaA__ABW91353

SEQ ID NO: 208361 - RNA, 1413 nt, Artificial Sequence
  derived and/or modified CDS sequence (opt5) from neuraminidase__InfluenzaA__ABW91364
augaacaccaaucagaagaucauuacaaucggcagcauuuccaucgccauugggaucaucucucugaugcuccaaauuggaaacaucauuagcaucugggcuucccacucuauucagacgggcagccagaaucauaccgggaucugcaaccagagaauuaucacauacgaaaauuccaccugggugaaccacacauaugucaauaucaacaauaccaacguugugacaggaaaagacaagaccucugugacgcuggccggcaauagcucccuuuguagcauuucugggugggcgaucuacaccaaagauaacuccauucggaucggaagcaagggcgacgucuucgugauucgcgagcccuuuaucucuugcucccaucuggaguguagaacauucuuucucacccaaggcgcucugcuuaaugauaaacacagcaacgggacaguuaaggaccggucuccuuaucgcgcccugauguccugcccgcucggagaagcccccagcccuuacaauuccaaguucgagucuguggcuuggagcgccuccgcuugucaugauggcaugggguggcugaccaucggaauuagcggccccgacaacggggccgucgcggugcugaaauauaacggaaucauuacggaaacaaucaagucuuggaaaaagcggauucucagaacccaggaguccgagugcguuugugugaauggcagcugcuuuacaaucaugaccgauggcccuucugacggggccgcuagcuacaaaaucuucaagauugaaaagggaaaagucaccaaguccaucgagcugaacgcccccaauuuucacuaugaagaguguucuugcuacccugauacaggcacggugaugugugugugccgcgacaacuggcacgggagcaauagaccgugggucuccuucaaccagaaucuugauuaccagauuggauauaucugcagcggcguuuuuggggacaacccccggccuaaagauggaaagggcucuuguaaucccgugaccguggacggcgcugacggggucaaaggauucuccuacaaguauggcaacgggguguggauuggacgcacaaaaagcaauaagcugagaaagggcuuugagaugaucugggauccuaacggguggaccgacacagauaaugacuucucuguuaaacaagauguggucgccauuaccgacugguccggcuacagcggauccuuugugcagcaucccgaacucacgggccuggauugcauccggccguguuucuggguugagcuugugcgcgggcugccuagagaaaacacaaccaucuggaccucuggaagcuccauuucuuucugcggcgucgacagcgauacagcgaauugguccuggcccgacggggccgagcucccuuuuaccaucgauaaguga

SEQ ID NO: 208362 - RNA, 1413 nt, Artificial Sequence; identical to SEQ ID NO: 208102
  derived and/or modified CDS sequence (opt5) from neuraminidase__InfluenzaA__ABW91375

SEQ ID NO: 208363 - RNA, 1413 nt, Artificial Sequence; identical to SEQ ID NO: 208128
  derived and/or modified CDS sequence (opt5) from neuraminidase__InfluenzaA__ABW91386

SEQ ID NO: 208364 - RNA, 1410 nt, Artificial Sequence
  derived and/or modified CDS sequence (opt5) from neuraminidase__InfluenzaA__ABW91397
augaaccccaaucagaagaucauuaccaucggcagcgugucccugacaauuucuacgaucugcuucuuuaugcaaauugccauccucaucaccacagucacccugcacuucaaacaguacgaguuuaacagcccuccgaauaaccagguuaugcuuugugaacccacaauuaucgagagaaauauuaccgaaaucguguaucugacaaacaccacgauugagaaggaaaucugcccuaaacucgcugaguaccggaauugguccaagccccagugugacauuaccggguucgccccuuuuucuaaagauaacagcauccgccuguccgcgggaggcgacaucugggugacaagagagcccuaugucucuugcgauccugacaaguguuaccaauucgcucuugggcagggaaccacacugaauaacgugcauagcaaugauaccguucgggaccgcacgccguauagaacacuccugaugaacgaacugggcgugcccuuucaccucgggaccaagcaggucugcauugccugguccucuagcuccugucaugauggaaaagccuggcugcacgugugcaucacaggcgacgauaagaaugcuaccgccagcuucauuuacaacggccggcuuguugacucuaucguguccuggagcaaagagauucugcgcacccaggaaucugaguguaucugcaucaaugggacauguacggucgugaugaccgauggauccgcuagcggcaaggccgacacaaaaauucucuuuaucgaggaagggaagauugugcauaccuccacacugucuggaagcgcgcaacacgucgaggaaugcuccugcuauccuagauaccccggcguucggugugugugccgcgauaacuggaaggggagcaacagaccuaucguggacauuaauaucaaagaccacucuaucgucuccagcuacguguguucuggacuuguuggcgauacgccccggaagaacgacagcuccucuagcucccauugccuggauccgaauaacgaggaaggcgggcacggagugaaaggcugggccuucgacgaugggaaugacgucuggaugggacgcaccauuagcgagaagucuagacucggcuaugagacauuuaaagugaucgaagggugguccaacccuaagagcaaacugcagauuaaucggcagguuaucguggaucgcggaaacagaucuggcuacuccggcauuuucagcgucgaggggaaguccuguaucaaucggugcuuuuauguggaacugauuagaggacgcaaggaggaaaccgagguccucuggaccucuaacagcaucgugguuuucuguggcacauccgggaccuacggaacaggcucuuggcccgacggggcugauaucaaucugaugccuauuuga

SEQ ID NO: 208365 - RNA, 1413 nt, Artificial Sequence; identical to SEQ ID NO: 208273
  derived and/or modified CDS sequence (opt5) from neuraminidase__InfluenzaA__ABW91408

SEQ ID NO: 208366 - RNA, 1413 nt, Artificial Sequence
  derived and/or modified CDS sequence (opt5) from neuraminidase__InfluenzaA__ABW91419
augaaccccaaucagaagaucauuaccaucggcagcauuuccaucgccauugggaucaucucucugaugcuccaaauuggaaacaucauuagcaucugggcuucccacucuauucagacaggcagccagaaucauacggggaucugcaaccagagaauuaucaccuacgaaaauuccacaugggugaaccacaccuaugucaauaucaacaauacaaacguuguggccgagaaagacaagaccucugugacacuggcgggaaauagcucccuuuguagcauuucuggcugggcuaucuacaccaaagauaacuccauucggaucgggagcaagggagacgucuucgugauucgcgagccuuuuaucucuugcucccaucuggaauguagaacguucuuucucacccaaggcgcccugcuuaaugauaaacacagcaacggcacaguuaaggaccggucuccguaucgcgcccugauguccugcccccucggggaggcuccuagccccuacaauuccaaguucgaaucuguggccuggagcgcuuccgccugucaugauggaaugggcuggcugaccaucgggauuagcggaccugacaacggcgcggucgccgugcugaaauauaacgggaucauuacagagaccaucaagucuuggaaaaagcggauucucagaacgcaggaguccgaaugcguuugugugaauggaagcugcuuuacaaucaugaccgauggccccucuaacggcgcugccagcuacaaaaucuucaagauugagaaggggaaagucacaaaguccaucgaacugaaugcuccuaacuuucacuaugaggaguguucuugcuacccggacaccggaaccgugaugugugugugccgcgauaauuggcacggcagcaacagacccugggucuccuucaaucagaaccuugacuaccagguuggguauauuugcagcggaguguuuggcgauaauccucggcccaaagacgggaagggaucuuguaacccuaugacaguggauggcgccgacggcgucaaaggguucuccuacaaguauggaaauggcguguggaucgggcgcacgaaaagcaacaagcugagaaagggauuugaaaugauuugggaccccaauggcuggaccgauacagacucugauuucuccguuaaacaagacguggucgcgaucaccgauuggagcggguacuccggcucuuuugugcagcauccggagcucacaggacuggacugcauucggccuuguuucuggguugaacuugugcgcggccugcccagagagaacaccacgaucuggacaagcggguccucuaucagcuucugcggagucgauuccgacaccgccaauuggagcuggccugauggcgcugaacuccccuuuaccauugacaaguga

SEQ ID NO: 208367 - RNA, 1413 nt, Artificial Sequence
  derived and/or modified CDS sequence (opt5) from neuraminidase__InfluenzaA__ABW91430
augaaccccaaucagaagaucauuaccaucggcagcauuuccaucgccauugggaucaucucucugaugcuccaaauuggaaacaucauuagcaucugggcuucccacucuauucagacaggcagccagaaucauacggggaucugcaaccagagaauuaucaccuacgagaauagcacaugggugaaccacaccuaugucaauaucaacaauacaaacguuguggccggaaaagacaagaccucugugacacuggcgggcaauagcucccuuuguagcauuucugggugggcuaucuacaccaaagauaacuccauucggaucggaagcaagggcgacgucuucgugauucgcgaaccuuuuaucucuugcucccaucuggaguguagaacguucuuucucacccaaggcgcccugcuuaaugauaaacacagcaacgggacaguuaaggaccggucuccguaucgcgcccugauguccugcccccucggagaagcuccuagccccuacaauuccaaguucgagucuguggccuggagcgcuuccgccugucaugauggcaugggguggcugaccaucggaauuagcggcccugacaacgggucugucgcggugcugaaauauaacggaaucauuacagaaaccaucaaguccuggaaaaagcggauucucagaacgcaggagagcgagugcguuugugugaauggcucuugcuuuacaaucaugaccgauggccccagcaacggggccgcuuccuacaaaaucuucaagauugaaaagggaaaagucacaaagucuaucgagcugaaugccccuaacuuucacuaugaagaguguagcugcuacccggacaccggcaccgugaugugugugugccgcgauaauuggcacggguccaacagacccugggucagcuucaaucagaaccuugacuaccagguuggauauauuugcucuggcguguuuggggauaauccucggcccaaagacggaaagggcuccuguaacccuaugacaguggauggcgcugacggggucaaaggauucagcuacaaguauggcaaugggguguggaucggacgcacgaaaucuaacaagcugagaaagggcuuugagaugauuugggaccccaauggguggaccgauacagacuccgauuucagcguuaaacaagacguggucgccaucaccgauugguccggcuacucuggauccuuugugcagcauccggaacucacaggccuggacugcauucggccuuguuucuggguugagcuugugcgcgggcugcccagagaaaacaccacgaucuggacauccggaucuagcaucuccuucugcggcgucgauagcgacaccgcgaauuggucuuggccugauggggccgagcuccccuuuaccauugacaaguga

SEQ ID NO: 208368 - RNA, 1410 nt, Artificial Sequence; identical to SEQ ID NO: 207956
  derived and/or modified CDS sequence (opt5) from neuraminidase__InfluenzaA__ABW91441

SEQ ID NO: 208369 - RNA, 1413 nt, Artificial Sequence; identical to SEQ ID NO: 208143
  derived and/or modified CDS sequence (opt5) from neuraminidase__InfluenzaA__ABW91452

SEQ ID NO: 208370 - RNA, 1413 nt, Artificial Sequence; identical to SEQ ID NO: 208143
  derived and/or modified CDS sequence (opt5) from neuraminidase__InfluenzaA__ABW91463

SEQ ID NO: 208371 - RNA, 1413 nt, Artificial Sequence; identical to SEQ ID NO: 208102
  derived and/or modified CDS sequence (opt5) from neuraminidase__InfluenzaA__ABW91474

SEQ ID NO: 208372 - RNA, 1413 nt, Artificial Sequence; identical to SEQ ID NO: 208143
  derived and/or modified CDS sequence (opt5) from neuraminidase__InfluenzaA__ABW91485

SEQ ID NO: 208373 - RNA, 1413 nt, Artificial Sequence; identical to SEQ ID NO: 208102
  derived and/or modified CDS sequence (opt5) from neuraminidase__InfluenzaA__ABW91496

SEQ ID NO: 208374 - RNA, 1413 nt, Artificial Sequence; identical to SEQ ID NO: 208128
  derived and/or modified CDS sequence (opt5) from neuraminidase__InfluenzaA__ABW91507

SEQ ID NO: 208375 - RNA, 1413 nt, Artificial Sequence; identical to SEQ ID NO: 208143
  derived and/or modified CDS sequence (opt5) from neuraminidase__InfluenzaA__ABW91518

SEQ ID NO: 208376 - RNA, 1413 nt, Artificial Sequence
  derived and/or modified CDS sequence (opt5) from neuraminidase__InfluenzaA__ABW91529
augaaccccaaucagaagaucauuaccaucggcagcauuuccaucgccauugggacaaucucucugaugcuccaaaucggaaacauuaucagcauuugggcuucccacucuauccagacgggcagccagaaucauaccgggauuugcaaccagagaaucauuacauacgagaauagcaccugggugaaccacacauaugucucuaucaauaacaccaauguuguggccggaaaagacaagacaagcgugacccuggcgggcaacuccagccuuuguucuaucuccgggugggcuauuuacacgaaagauaauagcauccggauuggaucuaagggcgacgucuucgugauccgcgaaccuuuuauuuccugcagccaucuggaguguagaaccuucuuucucacacaaggcgcccugcuuaacgauaaacacucuaaugggaccaucaaggaccgguccccguaucgcgcccugaugagcugcccccucggagaagcuccuucccccuacaacucuaaguucgagagcguugccugguccgcuagcgccugucaugauggcaugggguggcugacaaucggaauuucuggcccugacaauggggcgguggccguccugaaauauaacggaaucauuaccgaaacgaucaaguccuggaaaaagcggauucucagaacacaggagagcgagugcguguguguuaacggcucuugcuuuaccaucaugacagauggccccagcaauggggcugccuccuacaaaaucuucaagauugaaaagggaaaagugaccaagucuaucgagcugaacgcuccuaauuuucacuaugaagaguguagcugcuacccggacaccggcacagucaugugugugugccgcgauaacuggcacggguccaauagacccugggugagcuucaaccagaaucuugacuaccagauuggauauaucugcucuggcgucuuuggggauaacccucggcccaaagacggaaagggcuccuguaauccuguuacgguggauggcgccgacggggugaaaggauucagcuacaaguauggcaacggggucuggauuggacgcaccaaaucuaauagacugcggaagggcuuugagaugaucugggaccccaacggguggacagauaccgacuccgauuucagcgugaagcaagacguuguggcgauuacagauugguccggcuacucuggauccuuuguccagcauccggaacucaccggccuggacugcauccgcccuuguuucuggguggagcuuguuagagggcugccccgggaaaauacgacaaucuggaccuccggaucuagcauuuccuucugcggcguggauagcgacaccgccaacuggucuuggccugauggggcugagcuccccuuuacaaucgacaaauga

SEQ ID NO: 208377 - RNA, 1413 nt, Artificial Sequence
  derived and/or modified CDS sequence (opt5) from neuraminidase__InfluenzaA__ABW91540
augaaccccaaucagaagaucauuaccaucggcagcauuuccaucgccauugggaucaucucucugaugcuccaaauuggaaacaucauuagcaucugggcuucccacucuauucagacaggcagccagaaucauacggggaucugcaaccagagaauuaucaccuacgagaauagcacauggaugaaccacaccuaugugucuaucaauaacacaaaugucguugccggaaaagacaagaccagcgugacacuggcgggcaacuccagccuuuguucuauuuccgggugggcuaucuacaccaaagauaauagcauucggaucggaucuaagggcgacguguucgucauucgcgaaccuuuuaucuccugcagccaucuggaguguagaacguucuuucucacccaaggcgcccugcuuaacgauaaacacucuaaugggacagugaaggaccgguccccguaucgcgcccugaugagcugcccccucggagaagcuccuucccccuacaacucuaaguucgagagcguugccugguccgcuagcgccugucaugauggcaugggguggcugaccaucggaauuucuggcccugacaauggggcgguggccguccugaaauauaacggaaucauuacagaaaccaucaaguccuggaaaaagcggauucucagaacgcaggagagcgagugcguguguguuaacggcucuugcuuuacaaucaugaccgauggccccagcaauggggcugccuccuacaaaaucuucaagauugaaaagggaaaagugacaaagucugucgagcugaacgcuccuaauuuucacuaugaagaguguagcugcuacccggacaccggcaccgugaugugugugugccgcgauaacuggcacggguccaauagacccugggucagcuucaaccagaaucuugacuaccagaucggauauauuugcucuggcguuuuuggggauaacccucggcccaaagacggaaagggcuccuguaauccugugacaguggauggcgccgacggggucaaaggauucagcuacaaguauggcaacgggguguggaucggacgcacgaaaucuaauagacugcggaagggcuuugagaugauuugggaccccaacggguggaccgauacagacuccgauuucagcguuaagcaagacguggucgcgaucaccgauugguccggcuacucuggauccuuugugcagcauccggaacucacaggccuggacugcauucgcccuuguuucuggguugagcuugugagagggcugccccgggaaaauaccacgaucuggacauccggaucuagcaucuccuucugcggcgucgauagcgacaccgccaacuggucuuggccugauggggcugagcuccccuuuaccauugacaaauga

SEQ ID NO: 208378 - RNA, 1410 nt, Artificial Sequence
  derived and/or modified CDS sequence (opt5) from neuraminidase__InfluenzaA__ABW91551
augaaccccaaucagaagaucauuaccaucggcagcgugucccugacaauuucuacgaucugcuucuuuaugcaaauugccauccucaucaccacagucacccugcacuucaaacaguacgaguuuaacuucccuccgaauaaccagguuaugcuuugugaacccacaauuaucgagagaaauauuaccgaaaucguguaucugacaaacaccacgauugagaaggaaaucugcccuaaacucgcugaguaccggaauuggagcaagccccagugugacauuaccggguuugccccuuucuccaaagauaacucuauccgccugagcgcgggaggcgacaucugggugacaagagagcccuaugucuccugcgauccugacaaguguuaccaauuugcucuugggcagggaaccacacugaauaacgugcauucuaaugauaccguucgggaccgcacgccguauagaacacuccugaugaacgaacugggcgugcccuuccaccucgggaccaagcaggucugcauugccuggagcuccagcucuugucaugauggaaaagccuggcugcacgugugcaucacaggcgacgauaagaaugcuaccgccuccuuuauuuacaacggccggcuuguugacagcaucgugucuugguccaaagagauucugcgcacccaggaaagcgagugugucugcaucaaugggacauguacgguggugaugaccgauggaucugcuuccggcaaggccgacacaaaaauccucuucauugaggaagggaagaucguccauaccagcacacuguccggaucugcgcaacacguugaggaaugcagcugcuauccuagauaccccggcgugcggugugugugccgcgauaacuggaagggguccaacagaccuauugucgacaucaauauuaaagaccacagcaucgugucuuccuacguuuguagcggacuugugggcgauacgccccggaagaacgacucuagcuccucuagccauugccuggauccgaauaacgaggaaggcgggcacggagucaaaggcugggccuuugacgaugggaaugacguguggaugggacgcaccaucuccgaaaagagcagacucggcuaugagacauucaaaguuauugagggguggucuaacccuaaguccaaacugcagaucaaucgccaggugauugucgaucggggaaacagaagcggcuacucuggcaucuuuuccguggagggaaagagcuguauuaaucggugcuucuaugucgaacugaucagagggcgcaaggaggaaaccgaggugcucuggaccuccaacucuauuguuguguucuguggcacaagcgggaccuacggaacaggcuccuggcccgacggggcugauaucaaucugaugccuaucuga

SEQ ID NO: 208379 - RNA, 1413 nt, Artificial Sequence; identical to SEQ ID NO: 208102
  derived and/or modified CDS sequence (opt5) from neuraminidase__InfluenzaA__ABW91562

SEQ ID NO: 208380 - RNA, 1413 nt, Artificial Sequence; identical to SEQ ID NO: 208137
  derived and/or modified CDS sequence (opt5) from neuraminidase__InfluenzaA__ABW91584

SEQ ID NO: 208381 - RNA, 1413 nt, Artificial Sequence; identical to SEQ ID NO: 208102
  derived and/or modified CDS sequence (opt5) from neuraminidase__InfluenzaA__ABW91595

SEQ ID NO: 208382 - RNA, 1413 nt, Artificial Sequence; identical to SEQ ID NO: 208143
  derived and/or modified CDS sequence (opt5) from neuraminidase__InfluenzaA__ABW91606

SEQ ID NO: 208383 - RNA, 1413 nt, Artificial Sequence; identical to SEQ ID NO: 208137
  derived and/or modified CDS sequence (opt5) from neuraminidase__InfluenzaA__ABW91617

SEQ ID NO: 208384 - RNA, 1413 nt, Artificial Sequence; identical to SEQ ID NO: 208102
  derived and/or modified CDS sequence (opt5) from neuraminidase__InfluenzaA__ABW91628

SEQ ID NO: 208385 - RNA, 1413 nt, Artificial Sequence; identical to SEQ ID NO: 208102
  derived and/or modified CDS sequence (opt5) from neuraminidase__InfluenzaA__ABW91639

SEQ ID NO: 208386 - RNA, 1410 nt, Artificial Sequence; identical to SEQ ID NO: 207956
  derived and/or modified CDS sequence (opt5) from neuraminidase__InfluenzaA__ABW91650

SEQ ID NO: 208387 - RNA, 1350 nt, Artificial Sequence
  derived and/or modified CDS sequence (opt5) from neuraminidase__InfluenzaA__ABX10517
augaaccccaauaagaaaaucauuaccaucggcagcauuugcauggugacagggauggucucccugaugcuccagaucggaaaccugauuucuaucuggguuagccacuccauccauacgggcaaucaacacaaggccgagccuauuucuaacaccaauuuccuuacagaaaaagcuguggccagcgugaagcuggcggggaacuccucucucuguccgaucaauggaugggcuguccauagcaaagacaacuccauuagaaucggcagcaagggggauguguuuguuauucgggagcccuucaucucuugcucccaccuggaaugucgcaccuuuuuccuuacacagggagcccugcucaaugacaagcauagcaacggcaccgugaaagauagaucuccucaccggacacugauguccugccccgucggcgaggccccuagccccuacaauucucgcuuugaauccguggcuuggagcgccuccgcuugucacgacgggaccucuuggcugacgauuggaaucagcggcccugauaacggggccguugcggugcucaaguauaauggaaucauuaccgacacaaucaaauccuggagaaacaauauucugcggacccaggagagcgagugcgccugugucaacggcucuugcuucacagugaugaccgaugggccguccaacggacaggcuagccauaagaucuuuaaaauggaaaagggcaagguggucaaaucuguugagcuugacgcccccaauuaccacuaugaagaguguagcugcuacccugaugcuggcgagauuacgugugugugccgcgacaacuggcauggguccaauagacccugggugucuuucaaccaaaaucuggaauaucagaucggauacaucugcagcggcgucuuuggggauaacccucggcccaaugacggaacaggcuccugugggccggugagcucuaacggagccuauggcguuaagggcuucuccuuuaaauacgggaauggaguguggauuggccgcaccaagagcacaaacucuagauccggguucgagaugaucugggauccuaauggauggaccgaaaccgacagcuccuuuucugucaaacaggacauuguggcgaucacagauuggagcggcuacuccgggucuuucguucagcaccccgagcucacgggccuggacugcauucggccuuguuucuggguggaacuuauccgcggaagacccaaggagagcaccaucugggccuccggcagcucuauuuccuuuugcggggucaacagcgauacagugggauggucuuggcccgacggcgcugagcugccuuucaccaucgauaaauga

SEQ ID NO: 208388 - RNA, 1410 nt, Artificial Sequence; identical to SEQ ID NO: 208001
  derived and/or modified CDS sequence (opt5) from neuraminidase__InfluenzaA__ABX10527

SEQ ID NO: 208389 - RNA, 1413 nt, Artificial Sequence
  derived and/or modified CDS sequence (opt5) from neuraminidase__InfluenzaA__ABX58242
augaaccccaaucagaagaucauuaccaucggcagcauuuccaucgccauugggaucaucucucugaugcuccaaauuggaaacaucauuagcaucuggacaucccacucuauucagacgggcagccagaaucauaccgggaucugcaaccagagaauuaucacauacgagaauagcaccugggugaaccacacauaugucucuaucaauaacaccaauguuguggcuggaaaagacaagacaagcgugacccuggccggcaacuccagccuuuguucuauuuccgggugggcgaucuacacgaaagauaauagcauucggaucggaucuaagggcgacgucuucgugauucgcgaaccuuuuaucuccugcagccaucuggaguguagaaccuucuuucucacacaaggcgcucugcuuaacgauaaacacucuaaugggaccguuaaggaccgguccccguaucgcgcccugaugagcugcccccucggagaagccccuucccccuacaacucuaaguucgagagcguggcuugguccgccagcgcuugucaugauggcaugggguggcugacaaucggaauuucuggcccugacaauggggccgucgcggugcugaaauauaacggaaucauuaccgaaacgaucaaguccuggaaaaagcggauucucagaacacaggagagcgagugcguuugugugaacggcucuugcuuuaccaucaugacagauggccccagcaauggggccgcuuccuacaaaaucuucaagauugaaaagggaaaagucaccaagucuaucgagcugaacgccccuaauuuucacuaugaagaguguagcugcuacccggacaccggcacagugaugugugugugccgcgauaacuggcacggguccaauagacccugggucagcuucaaccagaaucuugacuaccagauuggauauaucugcucuggcguuuuuggggauaacccucggcccaaagacggaaagggcuccuguaauccugugacgguggauggcgcugacggggucaaaggauucagcuacaaguauggcaacgggguguggauuggacgcaccaaaucuaauagacugcggaagggcuuugagaugaucugggaccccaacggguggacagauaccgacuccgauuucagcguuaagcaagacguggucgccauuacagauugguccggcuacucuggauccuuugugcagcauccggaacucaccggccuggacugcauccgcccuuguuucuggguugagcuugugagagggcugccccgggaaaauacgacaaucuggaccuccggaucuagcauuuccuucugcggcgucgauagcgacaccgcgaacuggucuuggccugauggggccgagcuccccuuuacaaucgacaaauga

SEQ ID NO: 208390 - RNA, 1413 nt, Artificial Sequence; identical to SEQ ID NO: 208201
  derived and/or modified CDS sequence (opt5) from neuraminidase__InfluenzaA__ABX58253

SEQ ID NO: 208391 - RNA, 1413 nt, Artificial Sequence; identical to SEQ ID NO: 208102
  derived and/or modified CDS sequence (opt5) from neuraminidase__InfluenzaA__ABX58264

SEQ ID NO: 208392 - RNA, 1413 nt, Artificial Sequence; identical to SEQ ID NO: 208102
  derived and/or modified CDS sequence (opt5) from neuraminidase__InfluenzaA__ABX58275

SEQ ID NO: 208393 - RNA, 1413 nt, Artificial Sequence; identical to SEQ ID NO: 208102
  derived and/or modified CDS sequence (opt5) from neuraminidase__InfluenzaA__ABX58286

SEQ ID NO: 208394 - RNA, 1413 nt, Artificial Sequence
  derived and/or modified CDS sequence (opt5) from neuraminidase__InfluenzaA__ABX58297
augaaccccaaucagaagaucauuaccaucggcagcauuuccaucgccauugggaucaucucucugaugcuccaaauuggaaacaucauuagcaucugggcuucccacucuauucagacaggcagccagaaucauacggggaucugcaaccagaaaauuaucaccuacgagaauagcacaugggugaaccacaccuaugucucuaucaauaacacaaauguuguggccggaaaggacaaaaccagcgugacacuggcgggcaacuccagccuuuguucuauuuccgggugggcuaucuacaccaaggauaauagcauuagaaucggaucuaaaggcgacgucuucgugauucgggaaccuuuuaucuccugcagccaucuggagugucgcacguucuuucucacccaaggcgcccugcuuaacgauaagcacucuaaugggacaguuaaggacagauccccguaucgggcccugaugagcugcccccucggagaagcuccuucccccuacaacucuaaauucgagagcguggccugguccgcuagcgccugucaugauggcaugggguggcugaccaucggaauuucuggcccugacaauggggcggucgccgugcugaaguauaacggaaucauuacagaaaccaucaaauccuggaagaaacgcauucucagaacgcaggagagcgagugcguuugugugaacggcucuugcuuuacaaucaugaccgauggccccagcaauggggcugccuccuacaagaucuucaagauugaaaaaggaaaggucacaaaaucuaucgagcugaacgcuccuaauuuucacuaugaagaguguagcugcuacccggacaccggcaccgugaugugugugugccgggauaacuggcacggguccaaucgccccugggucagcuucaaccagaaucuugacuaccagauuggauauaucugcucuggcguuuuuggggauaacccuagacccaaggacggaaaaggcuccuguaauccugugacaguggauggcgccgacggggucaagggauucagcuacaaauauggcaacgggguguggauuggacggacgaagucuaaucgccugagaaagggcuuugagaugaucugggaccccaacggguggaccgauacagacuccgauuucagcguuaaacaagacguggucgcgauuaccgauugguccggcuacucuggauccuuugugcagcauccggaacucacaggccuggacugcauccggccuuguuucuggguugagcuugugcgcgggcugcccagagaaaauaccacgaucuggacauccggaucuagcauuuccuucugcggcgucgauagcgacaccgccaacuggucuuggccugauggggcugagcuccccuuuaccaucgacaaguga

SEQ ID NO: 208395 - RNA, 1413 nt, Artificial Sequence; identical to SEQ ID NO: 208273
  derived and/or modified CDS sequence (opt5) from neuraminidase__InfluenzaA__ABX58308

SEQ ID NO: 208396 - RNA, 1413 nt, Artificial Sequence
  derived and/or modified CDS sequence (opt5) from neuraminidase__InfluenzaA__ABX58319
augaaccccaaucagaagaucauuaccaucggcagcauuuccaucgccauugggaucaucucucugaugcuccaaauuggaaacaucauuagcaucugggcuucccacucuauucagacaggcagccagaaucauacggggaucugcaaccagagaauuaucaccuacgagaauagcacaugggugaaccacaccuaugucucuaucaauaacacaaauguuguggccggaaaagacaagaccagcgugacacuggcgggcaacuccagccuuuguucuauuuccgggugggcuaucuacaccaaagauaauagcauucggaucggaucuaagggcgacgucuucgugauucgcgaaccuuuuaucuccugcagccaucuggaguguagaacguucuuucucacccaaggcgcccugcuuaacgauaaacacucuaaugggacaaucaaggaccgguccccguaucgcgcccugaugagcugcccccucggagaagcuccuucccccuacaacucuaaguucgagagcguugccugguccgcuagcgccugucaugauggcaugggguggcugaccauuggaaucucuggcccugacaauggggcgguggccguccugaaauauaacggaauuaucacagaaaccauuaaguccuggaaaaagagaauccuccggacgcaggagagcgagugcguguguguuaacggcucuugcuuuacaaucaugaccgauggccccagcaauggggcugccuccuacaaaauuuucaagaucgaaaagggaaaagugacaaagucuauugagcugaacgcuccuaauuuucacuaugaagaguguagcugcuacccggacaccggcaccgucaugugugugugccgcgauaacuggcacggguccaauagacccugggugagcuucaaccagaaucuugacuaccagaucggauauauuugcucuggcgucuuuggggauaacccucggcccaaagacggaaagggcuccuguaauccuguuacaguggauggcgccgacggggugaaaggauucagcuacaaguauggcaacggggucuggaucggacgcacgaaaucuaauagacugcggaagggcuuugagaugauuugggaccccaacggguggaccgauacagacuccgauuucagcgugaagcaagacguuguggcgaucaccgauugguccggcuacucuggauccuuuguccagcauccggaacucacaggccuggacugcauccgcccuuguuucuggguggagcuuguuagagggcugccccgggaaaauaccacgauuuggacauccggaucuagcaucuccuucugcggcguggauagcgacaccgccaacuggucuuggccugauggggcugagcuccccuuuaccauugacaaauga

SEQ ID NO: 208397 - RNA, 1413 nt, Artificial Sequence; identical to SEQ ID NO: 208273
  derived and/or modified CDS sequence (opt5) from neuraminidase__InfluenzaA__ABX58352

SEQ ID NO: 208398 - RNA, 1413 nt, Artificial Sequence; identical to SEQ ID NO: 208102
  derived and/or modified CDS sequence (opt5) from neuraminidase__InfluenzaA__ABX58363

SEQ ID NO: 208399 - RNA, 1413 nt, Artificial Sequence; identical to SEQ ID NO: 208102
  derived and/or modified CDS sequence (opt5) from neuraminidase__InfluenzaA__ABX58385

SEQ ID NO: 208400 - RNA, 1413 nt, Artificial Sequence; identical to SEQ ID NO: 208102
  derived and/or modified CDS sequence (opt5) from neuraminidase__InfluenzaA__ABX58396

SEQ ID NO: 208401 - RNA, 1413 nt, Artificial Sequence
  derived and/or modified CDS sequence (opt5) from neuraminidase__InfluenzaA__ABX58407
augaaccccaaucagaagaucauuaccaucggcagcauuuccaucgccauugggaucaucucucugaugcuccaaauuggaaacaucauuagcaucugggcuucccacucuauucagacaggcagccagaaucauacggggaucugcaaccagagaauuaucaccuacgaaaauuccacaugggugaaccacaccuaugucucuaucaauaacacaaauguuguggccggaaaagacaagaccagcgugacacuggcgggcaacuccagccuuuguccuauuucugggugggcuaucuacaccaaagauaauuccauucggaucggaagcaagggcgacgucuucgugauucgcgagccguuuaucucuugcucccaucuggaguguagaacguucuuucucacccaaggcgcccugcuuaacgauaaacacagcaaugggacaguuaaggaccggucucccuaucgcgcccugauguccugcccucucggagaagcucccagcccuuacaacuccaaguucgagucuguggccuggagcgcuuccgccugucaugauggcaugggguggcugaccaucggaauuagcggccccgacaauggggcggucgccgugcugaaauauaacggaaucauuacagaaaccaucaagucuuggaaaaagcggauucucagaacgcaggaguccgagugcguuugugugaacggcagcugcuuuacaaucaugaccgauggcccuucuaauggggcugccagcuacaaaaucuucaagauugaaaagggaaaagucacaaaguccaucgagcugaacgcuccgaauuuucacuaugaagaguguucuugcuaccccgacaccggcaccgugaugugugugugccgcgauaacuggcacgggagcaauagaccuugggucuccuucaaccagaaucuugacuaccagauuggauauaucugcagcggcguuuuuggggauaacccccggccuaaagacggaaagggcucuuguaaucccgugacaguggauggcgccgacggggucaaaggauucuccuacaaguauggcaacgggguguggauuggacgcacgaaaagcaauagacugcggaagggcuuugagaugaucugggacccgaacggguggaccgauacagacucugauuucuccguuaagcaagacguggucgcgauuaccgauuggagcggcuacuccggaucuuuugugcagcauccugaacucacaggccuggacugcauccgccccuguuucuggguugagcuugugagagggcugccucgggaaaauaccacgaucuggacaagcggauccucuauuagcuucugcggcgucgauuccgacaccgccaacuggagcuggcccgauggggcugagcuccccuuuaccaucgacaaauga

SEQ ID NO: 208402 - RNA, 1413 nt, Artificial Sequence; identical to SEQ ID NO: 208143
  derived and/or modified CDS sequence (opt5) from neuraminidase__InfluenzaA__ABX58418

SEQ ID NO: 208403 - RNA, 1413 nt, Artificial Sequence; identical to SEQ ID NO: 208102
  derived and/or modified CDS sequence (opt5) from neuraminidase__InfluenzaA__ABX58429

SEQ ID NO: 208404 - RNA, 1413 nt, Artificial Sequence; identical to SEQ ID NO: 208102
  derived and/or modified CDS sequence (opt5) from neuraminidase__InfluenzaA__ABX58440

SEQ ID NO: 208405 - RNA, 1413 nt, Artificial Sequence
  derived and/or modified CDS sequence (opt5) from neuraminidase__InfluenzaA__ABX58451
augaaccccaaucagaagaucauuaccaucggcagcauuuccaucgccauugggacaaucucucugaugcuccaaaucggaaacauuaucagcauuugggcuucccacucuauccagacgggcagccagaaucauaccgggauuugcaaccagagaaucauuacauacgagaauagcaccugggugaaccacacauaugucucuaucaauaacaccaauguuguggccggaaaagacaagacaagcgugacccuggcgggcaacuccagccuuuguucuaucuccgggugggcuauuuacacgaaagauaauagcauccggauuggaucuaagggcgacgucuucgugauccgcgaaccuuuuauuuccugcagccaucuggaguguagaaccuucuuucucacacaaggcgcccugcuuaacgauaaacacucuaaugggaccguuaaggaccgguccccguaucgcgcccugaugagcugcccccucggagaagcuccuucccccuacaacucuaaguucgagagcguggccugguccgcuagcgccugucaugauggcaugggguggcugacaaucggaaucucuggcccugacaauggggcggucgccgugcugaaauauaacggaauuaucaccgaaacgauuaaguccuggaaaaagagaauccuccggacacaggagagcgagugcguuugugugaacggcucuugcuuuaccauuaugacagauggccccagcaauggggcugccuccuacaaaaucuucaagaucgaaaagggaaaagucaccaagucuauugagcugaacgcuccuaauuuucacuaugaagaguguagcugcuacccggacaccggcacagugaugugugugugccgcgauaacuggcacggguccaauagacccugggucagcuucaaccagaaucuugacuaccagaucggauauauuugcucuggcguuuuuggggauaacccucggcccaaagacggaaagggcuccuguaauccugugacgguggauggcgccgacggggucaaaggauucagcuacaaguauggcaacgggguguggaucggacgcaccaaaucuaauagacugcggaagggcuuugagaugauuugggaccccaacggguggacagauaccgacuccgauuucagcguuaagcaagacguggucgcgaucacagauugguccggcuacucuggauccuuugugcagcauccggaacucaccggccuggacugcauucgcccuuguuucuggguugagcuugugagagggcugccccgggaaaauacgacaaucuggaccuccggaucuagcaucuccuucugcggcgucgauagcgacaccgccaacuggucuuggccugauggggcugagcuccccuuuacaauugacaaauga

SEQ ID NO: 208406 - RNA, 1413 nt, Artificial Sequence; identical to SEQ ID NO: 208143
  derived and/or modified CDS sequence (opt5) from neuraminidase__InfluenzaA__ABX58462

SEQ ID NO: 208407 - RNA, 1413 nt, Artificial Sequence; identical to SEQ ID NO: 208102
  derived and/or modified CDS sequence (opt5) from neuraminidase__InfluenzaA__ABX58473

SEQ ID NO: 208408 - RNA, 1413 nt, Artificial Sequence; identical to SEQ ID NO: 208143
  derived and/or modified CDS sequence (opt5) from neuraminidase__InfluenzaA__ABX58484

SEQ ID NO: 208409 - RNA, 1413 nt, Artificial Sequence
  derived and/or modified CDS sequence (opt5) from neuraminidase__InfluenzaA__ABX58495
augaaccccaaucagaagaucauuaccaucggcagcauuuccaucgccauugggaucaucucucugaugcuccaaauuggaaacaucauuagcaucugggcuucccacucuauucagacaggcagccagaaucauacggggaucugcaaccagagaauuaucaccuacgaaaauuccacaugggugaaccacaccuaugucucuaucaauaacacaaauguuguggccggaaaagacaagaccagcgugacacuggcgggcaacuccagccuuuguucuauuuccgggugggcuaucuacaccaaagauaauagcauucggaucggaucuaagggcgacgucuucgugauucgcgagccuuuuaucuccugcagccaucuggaguguagaacguucuuucucacccaaggcgcccugcuuaacgauaaacacucuaaucggacaguuaaggaccgcuccccguauagagcccugaugagcugcccccucggggaagcuccuucccccuacaacucuaaguucgagagcguggccugguccgcuagcgccugucaugauggaaugggcuggcugaccaucgggauuucuggaccugacaauggcgcggucgccgugcugaaauauaacgggaucauuacagaaaccaucaaguccuggaaaaagcggauucuccgcacgcaggagagcgagugcguuugugugaacggaucuugcuuuacaaucaugaccgauggccccagcaauggcgcugccuccuacaaaaucuucaagauugaaaaggggaaagucacaaagucuaucgagcugaacgcuccuaauuuucacuaugaagaguguagcugcuacccggacaccggaaccgugaugugugugugcagagauaacuggcacggcuccaaucggcccugggucagcuucaaccagaaucuugacuaccagauuggguauaucugcucuggaguuuuuggcgauaacccucgccccaaagacgggaagggauccuguaauccugugacaguggauggcgccgacggcgucaaaggguucagcuacaaguauggaaacggcguguggauugggagaacgaaaucuaaucggcugcgcaagggauuugagaugaucugggaccccaacggcuggaccgauacagacuccgauuucagcguuaagcaagacguggucgcgauuaccgauugguccggguacucuggcagcuuugugcagcauccggaacucacaggacuggacugcaucagaccuuguuucuggguugagcuugugcggggccugccccgcgaaaauaccacgaucuggacauccgggucuagcauuuccuucugcggagucgauagcgacaccgccaacuggucuuggccugauggcgcugagcuccccuuuaccaucgacaaauga

SEQ ID NO: 208410 - RNA, 1413 nt, Artificial Sequence; identical to SEQ ID NO: 208137
  derived and/or modified CDS sequence (opt5) from neuraminidase__InfluenzaA__ABX58506

SEQ ID NO: 208411 - RNA, 1413 nt, Artificial Sequence; identical to SEQ ID NO: 208143
  derived and/or modified CDS sequence (opt5) from neuraminidase__InfluenzaA__ABX58528

SEQ ID NO: 208412 - RNA, 1413 nt, Artificial Sequence; identical to SEQ ID NO: 208143
  derived and/or modified CDS sequence (opt5) from neuraminidase__InfluenzaA__ABX58539

SEQ ID NO: 208413 - RNA, 1413 nt, Artificial Sequence
  derived and/or modified CDS sequence (opt5) from neuraminidase__InfluenzaA__ABX58550
augaaccccaaucagaagaucauuaccaucggcagcauuuccaucgccauugggaucaucucucugaugcuccaaauuggaaacaucauuagcaucugggcuucccacucuauucagacaggcagccagaaucauacggggaucugcaaccagagaauuaucaccuacgagaauagcacaugggugaaccacaccuaugucucuaucaauaacacaaauguuguggccggaaaagacaagaccagcgugacacuggcgggcaacuccagccuuuguucuauuuccgggugggcuaucuacaccaaagauaauagcauucggaucggaucuaagggcgacgucuucgugauucgcgaaccuuuuaucuccugcagccaucuggaguguagaacguucuuucucacccaaggcgcccugcuuaacgauaaacacucuaaugggacaguuaaggaccgguccccguaucgcgcccugaugagcugcccccucggagaagcuccuucccccuacaacucuaaguucgagagcguggccugguccgcuagcgccugucaugauggcaugggguggcugaccaucggaauuucuggcccugacaauggggcggucgccgugcugaaauauaacggaaucauuacagaaaccaucaaguccuggaaaaagcggauucucagaacgcaggagagcgagugcguuugugugaacggcucuugcuuuacaaucaugaccgauggccccagcaauggggcugccuccuacaaaaucuucaagauugaaaagggaaaagucacaaagucuaucgagcugaacgcuccuaauuuucacuaugaagaguguagcugcuacccggacaccggcaccgugaugugugugugccgcgauaacuggcacggguccaauagacccugggucagcuucaaccagaaucuugacuaccagauuggauauaucugcucuggcguuuuuggggauaacccucggcccaaagacggaaagggcuccuguaauccugugacaguggauggcgccgacggggucaaaggauucagcuacaaguauggcaacgggguguggauuggacgcacgaaaucuaauagacugcggaagggcuuugagaugaucugggaccccaacggguggaccgauacagacuccgauuucagcguuaagcaagacguggucgcgauuaccgauugguccggcuacucuggauccuuugugcagcauccggaacucacaggccuggacugcauccgcccuuguuucuggguugagcuugugagagggcugccccgggaaaauaccacgaucuggacauccggaucuagcauuuccuucugcggcgucgauagcgacaccgccaacuggucuuggccugauggggcugagcuccccuuuaccguggacaaauga

SEQ ID NO: 208414 - RNA, 1413 nt, Artificial Sequence; identical to SEQ ID NO: 208102
  derived and/or modified CDS sequence (opt5) from neuraminidase__InfluenzaA__ABX58561

SEQ ID NO: 208415 - RNA, 1413 nt, Artificial Sequence
  derived and/or modified CDS sequence (opt5) from neuraminidase__InfluenzaA__ABX58572
augaaccccaaucagaagaucauuaccaucggcagcauuuccaucgccauugggaucaucucucugaugcuccaaauuggaaacaucauuagcaucugggcuucccacucuauucagacaggcagccagaaucauacggggaucugcaaccagagaauuaucaccuacgagaauagcacaugggugaaccacaccuaugucucuaucaauaacacaaauguuguggccggaaaagacaagaccagcgugacacuggcgggcaacuccagccuuuguucuauuuccgggugggcuaucuacaccaaagauaauagcauucggaucggaucuaagggcgacgucuucgugauucgcgaaccuuuuaucuccugcagccaucuggaguguagaacguucuuucucacccaaggcgcccugcuuaacgauaaacacucuaaugggacaguuaaggaccgguccccguaucgcgcccugaugagcugcccccucggagaagcuccuucccccuacaacucuaaguucgagagcguggccugguccgcuagcgccugucaugauggcaugggguggcugaccaucggaauuucuggcccugacaauggggcggucgccgugcugaaauauaacggaaucauuacagaaaccaucaaguccuggaaaaagcggauucucagaacgcaggagagcgagugcguuugugugaacggcucuugcuuuacaaucaugaccgauggccccagcaauggggcugccuccuacaaaaucuucaagauugaaaagggaaaagucacaaagucuaucgagcugaacgcuccuaauuuucacuaugaagaguguagcugcuacccggacaccggcaccgugaugugugugugccgcgauaacuggcacggguccaauagacccugggucagcuucaaccagaaucuugacuaccagauuggauauaucugcucuggcguuuuuggggauaacccucggcccaaagacggaaagggcuccuguaauccuaugacaguggauggcgccgacggggugaaaggauucagcuacaaguauggcaacggggucuggauuggacgcacgaaaucuaauagacugcggaagggcuuugagaugaucugggaccccaacggguggaccgauacagacuccgauuucagcgugaagcaagacguuguggcgauuaccgauugguccggcuacucuggauccuuuguccagcauccggaacucacaggccuggacugcauccgcccuuguuucuggguggagcuuguuagagggcugccccgggaaaauaccacgaucuggacauccggaucuagcauuuccuucugcggcguggauagcgacaccgccaacuggucuuggccugauggggcugagcuccccuuuaccaucgacaaauga

SEQ ID NO: 208416 - RNA, 1413 nt, Artificial Sequence; identical to SEQ ID NO: 208102
  derived and/or modified CDS sequence (opt5) from neuraminidase__InfluenzaA__ABX58583

SEQ ID NO: 208417 - RNA, 1413 nt, Artificial Sequence; identical to SEQ ID NO: 208102
  derived and/or modified CDS sequence (opt5) from neuraminidase__InfluenzaA__ABX58594

SEQ ID NO: 208418 - RNA, 1413 nt, Artificial Sequence; identical to SEQ ID NO: 208128
  derived and/or modified CDS sequence (opt5) from neuraminidase__InfluenzaA__ABX58605

SEQ ID NO: 208419 - RNA, 1413 nt, Artificial Sequence; identical to SEQ ID NO: 208128
  derived and/or modified CDS sequence (opt5) from neuraminidase__InfluenzaA__ABX58616

SEQ ID NO: 208420 - RNA, 1413 nt, Artificial Sequence; identical to SEQ ID NO: 208102
  derived and/or modified CDS sequence (opt5) from neuraminidase__InfluenzaA__ABX58627

SEQ ID NO: 208421 - RNA, 1413 nt, Artificial Sequence; identical to SEQ ID NO: 208102
  derived and/or modified CDS sequence (opt5) from neuraminidase__InfluenzaA__ABX58638

SEQ ID NO: 208422 - RNA, 1413 nt, Artificial Sequence
  derived and/or modified CDS sequence (opt5) from neuraminidase__InfluenzaA__ABX58682
augaaccccaaucagaagaucauuaccaucggcagcauuuccaucgccauugggaucaucucucugaugcuccaaauuggaaacaucauuagcaucugggcuucccacucuauucagacaggcagccagaaucauacggggaucugcaaccagagaauuaucaccuacgagaauagcacaugggugaaccacaccuaugucucuaucaauaacacaaauguuguggccggaaaagacaagaccagcgugacacuggcgggcaacuccagccuuuguucuauuuccgggugggcuaucuacaccaaagauaauagcauucggaucggaucuaagggcgacgucuucgugauucgcgaaccuuuuaucuccugcagccaucuggaguguagaacguucuuucucacccaaggcgcccugcuuaacgauaaacacucuaaugggacaguuaaggaccgguccccguaucgcgcccugaugagcugcccccucggagaagcuccuucccccuacaacucuaaguucgagagcguggccugguccgcuagcgccugucaugauggcaugggguggcugaccaucggaauuucuggcccugacaauggggcggucgccgugcugaaauauaacggaaucauuacagaaaccaucaaguccuggaaaaagcggauucucagaacgcaggagagcgagugcguuugugugaacggcucuugcuuuacaaucaugaccgauggccccagcaauggggcugccuccuacaaaaucuucaagauugaaaagggaaaagucacaaagucuaucgagcugaacgcuccuaauuuucacuaugaagaguguagcugcuacccggacaccggcaccaugaugugugugugccgcgauaacuggcacggguccaauagacccugggugagcuucaaccagaaucuugacuaccagauuggauauaucugcucuggcgucuuuggggauaacccucggcccaaagacggaaagggcuccuguaauccuguuacaguggauggcgccgacggggugaaaggauucagcuacaaguauggcaacggggucuggauuggacgcacgaaaucuaauagacugcggaagggcuuugagaugaucugggaccccaacggguggaccgauacagacuccgauuucagcgugaagcaagacguuguggcgauuaccgauugguccggcuacucuggauccuuuguccagcauccggaacucacaggccuggacugcauccgcccuuguuucuggguggagcuuguuagagggcugccccgggaaaauaccacgaucuggacauccggaucuagcauuuccuucugcggcguggauagcgacaccgccaacuggucuuggccugauggggcugagcuccccuuuaccaucgacaaauga

SEQ ID NO: 208423 - RNA, 1413 nt, Artificial Sequence
  derived and/or modified CDS sequence (opt5) from neuraminidase__InfluenzaA__ABX58693
augaaccccaaucagaagaucauuaccaucggcagcauuuccaucgccauugggaucaucucucugaugcuccaaauuggaaacaucauuagcaucugggcuucccacucuauucagacaggcagccagaauaacacggggaucugcaaucagagaauuaucaccuacgagaacuccacaugggugaaucauaccuaugucaacaucaauaacacaaauguuguggccggaaaagacaagaccucugugacacuggcgggcaacagcucccuuuguagcauuucugggugggcuaucuacaccaaagauaauuccauucggaucggaagcaagggcgacgucuucgugauucgcgaaccuuuuaucucuugcucccaccuggaguguagaacguucuuucucacccaaggcgcccugcuuaacgauaaacauagcaaugggacaguuaaggaccggucuccguaucgcgcccugauguccugcccccucggagaagcuccuagccccuacaacuccaaguucgagucuguggccuggagcgcuuccgccugucacgauggcaugggguggcugaccaucggaauuagcggcccugacaacggggcggucgccgugcugaaauauaauggaaucauuacaggcaccaucaagucuuggaaaaagcagauucucagaacgcaggaauccgagugcguuuguaugaacggcagcugcuuuacaaucaugaccgaugggcccucuaaucgggcugccagcuacaaaaucuucaagauugagaagggaaaagugacaaaguccaucgaacugaacgcuccuaauuuucauuaugaggaauguucuugcuacccggacaccggcauugucaugugugugugccgcgauaacuggcacgggagcaauagacccuggguguccuucaaccagaaucuugacuaccaaaucggauauauuugcagcggcguccugggggauaacccucggcccgaggacggagagggcucuuguaauccuguuaccguggauggcgccgacggggugaaaggauuuuccuacaaguaugacaacggcgucuggaucgggcgcacaaaaagcaauagacuccggaagggauucgaaaugauuugggaucccaacggcuggacgaauaccgacucugauuuuuccgugaaacaggacguuguggcgaucacagauuggagcggguacuccggcucuuucguccagcacccggagcugaccggacuugacugcauccgcccuuguuuuuggguggaacugguuagaggccucccccgggagaacacaaccauuuggacgagcggguccucuaucagcuucugcggagugaacuccgauacagccaauuggagcuggccugacggcgcugaacugcccuucaccauugauaaguga

SEQ ID NO: 208424 - RNA, 1413 nt, Artificial Sequence; identical to SEQ ID NO: 208273
  derived and/or modified CDS sequence (opt5) from neuraminidase__InfluenzaA__ABX58704

SEQ ID NO: 208425 - RNA, 1413 nt, Artificial Sequence; identical to SEQ ID NO: 208201
  derived and/or modified CDS sequence (opt5) from neuraminidase__InfluenzaA__ABX58715

SEQ ID NO: 208426 - RNA, 1350 nt, Artificial Sequence
  derived and/or modified CDS sequence (opt5) from neuraminidase__InfluenzaA__ABY19420
augaaccccaaucagaaggugaucaccauuggcagcaucugcauggucauugggaucguuucccugaugcuccaaauuggaaacaugaucucuaucugggugagccacuccauucagacaggcaaucagaaccagguggagccuaucauuaauacgaacuuccugaccgggaaagccgucgcuucuaucacacuugccggaaauagcucccuguguccgauuagaggcugggcgauccauucuaaggacaacagcauucggaucggguccaaaggagauguguuuguuauccgcgaacccuucauuagcugcucucaccucgaguguagaaccuuuuuccugacacaaggcgcccuucugaaugacaagcauuccaacggcaccgugaaagaucggagcccucaccgcacacucaugucuugccccgucggggaagcuccuucccccuacaauagcagauuugagucuguggccugguccgcuagcgccugucaugacggaaccuccuggcugacgaucggcauuucugggccugauaacggagcuguugccgugcugaaguauaauggcaucauuaccgacacaaucaagagcuggcggaacaauauccuccgcacccaggaauccgagugcgcgugugucaacgggagcugcuucacagugaugaccgauggaccgucuaacggccaggccuccuacaaaauuuuuaagauggagaaaggcaaggugaucaaaagcgucgaacuggacgcucccaauuaucacuacgaggaauguucuugcuauccugaugccggggagauuacguguguuugcagagacaacuggcacggaagcaaucggcccuggguguccuucaaccagaaucuugaguaccaaaucggcuauauuugcucugggguguuuggagauaacccucgccccaaugacggcacagggagcuguggaccggucucccauaacggcgcuuacggcgugaagggguucagcuuuaaguacggaaauggcguuuggaucgggagaaccaaaucuccuaacucccggagcggauucgaaaugaucugggaucccaauggcuggucugagacagacuccagcuuuuccgugaagcaggacauugucgccaucaccgauuggucuggguauagcggcuccuucgugcagcacccugaacugaccggacucgacugcauucgccccuguuucuggguugagcugaucagaggccggcccaaagaaucuacaguguggacgagcggguccagcauuucuuuuugcggagucaacuccgauaccgugagcuggucuuggccugacggcgcggagcuuccguucuccaucgauaaguga

SEQ ID NO: 208427 - RNA, 1350 nt, Artificial Sequence
  derived and/or modified CDS sequence (opt5) from neuraminidase__InfluenzaA__ABY19421
augaaccccaaucagaagaucauuaccaucggcagcauuugcauggugaucgggauugucucccugaugcuccaaaucggaaacaugaucucuauuuggguuagccacuccauccagacaggcaaucagaaccagguggagccuauuaucaauacgaacuuccugaccgggaaagccguggcuucuauuacacuugccggaaauagcucccuguguccgaucagaggcugggcgauucauucuaaggacaacagcauccggaucggguccaaaggagaugucuuugugauucgcgaacccuucaucagcugcucucaccucgaguguagaaccuuuuuccugacacaaggcgcccuucugaaugacaagcauuccaacggcaccguuaaagaucggagcccucaccgcacacucaugucuugccccgugggggaagcuccuucccccuacaauagcagauuugagucugucgccugguccgcuagcgccugucaugacggaaccuccuggcugacgauuggcaucucugggccugauaacggagcuguggccguucugaaguauaauggcauuaucaccgacacaaucaagagcuggcggaacaauauucuccgcacccaggaauccgagugcgcgugugugaacgggagcugcuucacagucaugaccgauggaccgucuaacggccaggccuccuacaaaaucuuuaagauggagaaaggcaaggugauuaaaagcguggaacuggacgcucccaauuaucacuacgaggaauguucuugcuauccugaugccggggagaucacgugugucugcagagacaacuggcacggaagcaaucggcccuggguuuccuucaaccagaaucuugaguaccaaauuggcuauaucugcucugggguguuuggagauaacccucgccccaaugacggcacagggagcuguggaccggugucccauaacggcgcuuacggcgucaagggguucagcuuuaaguacggaaauggcguguggaucgggagaaccaaaucuccuaacucccggagcggauucgaaaugauuugggaucccaauggcuggucugagacagacuccagcuuuuccguuaagcaggacaucguggccauuaccgauuggucuggguauagcggcuccuucguccagcacccugaacugaccggacucgacugcauccgccccuguuucuggguggagcugauuagaggccggcccaaagaaucuacaguuuggacgagcggguccagcaucucuuuuugcggagugaacuccgauaccgucagcuggucuuggccugacggcgcggagcuuccguucuccauugauaaguga

SEQ ID NO: 208428 - RNA, 1413 nt, Artificial Sequence
  derived and/or modified CDS sequence (opt5) from neuraminidase__InfluenzaA__ABY51020
augaaccccaaucagaagaucauuaccaucggcagcauuuccaucgccauugggaucaucucucugaugcuccaaauuggaaacaucauuagcaucugggcuucccacucuauucagacaggcagccagaaucauacggggaucugcaaccagagaauuaucaccuacgagaauagcacaugggugaaccacaccuaugucucuaucaauaacacaaauguuguggccggaaaagacaagaccagcgugacacuggcgggcaacuccagccuuuguucuauuuccgggugggcuaucuacaccaaagauaauagcauucggaucggaucuaagggcgacgucuucgugauucgcgaaccuuuuaucuccugcagccaucuggaguguagaacguucuuucucacccaaggcgcccugcuuaacgauaaacacucuaaugggacaguuaaggaccgguccccguaucgcgcccugaugagcugcccccucggagaagcuccuucccccuacaacucuaaguucgagagcguggccugguccgcuagcgccugucaugauggcaugggguggcugaccaucggaauuucuggcccugacaauggggcggucgccgugcugaaauauaacggaaucauuacagaaaccaucaaguccuggaaaaagcggauucucagaacgcaggagagcgagugcguuugugugaacggcucuugcuuuacaaucaugaccgauggccccagcaauggggcugccuccuacaaaaucuucaagauugaaaagggaaaagucacaaagucuaucgagcugaacgcuccuaauuuucacuaugaagaguguagcugcuacccggacaccggcaccgugaugugugugugccgcgauaacuggcacggguccaauagacccugggucagcuucaaccagaaucuugacuaccagauuggauauaucugcucuggcguuuuuggggauaacccucggcccaaagacggaaagggcuccuguaauccucugacaguggauggcgccgacggggugaaaggauucagcuacaaguauggcaacggggucuggauuggacgcacgaaaucuaauagacuccggaagggcuuugagaugaucugggaccccaacggguggaccgauacagacuccgauuucagcgugaagcaagacguuguggcgauuaccgauugguccggcuacucuggauccuuuguccagcauccggaacugacaggccuugacugcauccgcccuuguuucuggguggagcugguuagagggcucccccgggaaaauaccacgaucuggacauccggaucuagcauuuccuucugcggcguggauagcgacaccgccaacuggucuuggccugauggggcugagcugcccuuuaccaucgacaaauga

SEQ ID NO: 208429 - RNA, 1410 nt, Artificial Sequence; identical to SEQ ID NO: 208138
  derived and/or modified CDS sequence (opt5) from neuraminidase__InfluenzaA__ABY51031

SEQ ID NO: 208430 - RNA, 1413 nt, Artificial Sequence
  derived and/or modified CDS sequence (opt5) from neuraminidase__InfluenzaA__ABY51042
augaaccccaaucagaagaucauuaccaucggcagcauuuccaucgccauugggaucaucucucugaugcuccaaauuggaaacaucauuagcaucugggcuucccacucuauucagacaggcagccagaaucauacggggaucugcaaccagagaauuaucaccuacgaaaauuccacaugggugaaccacaccuaugucaauaucaacaauacaaacguuguggccggaaaagacaagaccucugugacacuggcgggcaauagcucccuuuguagcauuucugggugggcuaucuacaccaaagauaacuccauucggaucggaagcaagggcgacgucuucgugauucgcgagccuuuuaucucuugcucccaucuggaguguagaacguucuuucucacccaaggcgcccugcuuaaugauaaacacagcaacgggacaguuaaggaccggucuccguaucgcgcccugauguccugcccccucggagaagcuccuagccccuacaauuccaaguucgagucuguggccuggagcgcuuccgccugucaugauggcaugggguggcugaccaucggaauuagcggcccugacaacggggcggucgccgugcugaaauauaacggaaucauuacaggcaccaucaagucuuggaaaaagcagauucucagaacgcaggaauccgagugcguuuguaugaauggcagcugcuuuacaaucaugaccgaugggcccucuaaccgggcugccagcuacaaaaucuucaagauugagaagggaaaagugacaaaguccaucgaacugaaugcuccuaacuuucacuaugaggaauguucuugcuacccggacaccggcauugucaugugugugugccgcgauaauuggcacgggagcaacagacccuggguguccuucaaucagaaccuugacuaccaaaucggauauauuugcagcggcgucuuuggggauaauccucggcccaaagacggagagggcucuuguaacccuguuaccguggauggcgccgacggggugaagggauucuccuacaaauaugacaauggcgucuggaucgggcgcacaaagagcaacagacugcggaaaggauuugagaugauuugggaucccaauggcuggacgaacaccgacucugauuucuccgugaagcaggacguuguggcgaucacagauuggagcggguacuccggcucuuuuguccagcauccggaacucaccggacuggacugcauccgcccuuguuucuggguggagcuuguuagaggccugccccgggaaaauacaaccauuuggacgagcggguccucuaucagcuucugcggagugaacuccgauacagccaacuggagcuggccugacggcgcugagcuccccuuuaccauugauaaguga

SEQ ID NO: 208431 - RNA, 1413 nt, Artificial Sequence
  derived and/or modified CDS sequence (opt5) from neuraminidase__InfluenzaA__ABY51053
augaaccccaaucagaagaucauuaccaucggcagcauuuccaucgccauugggaucaucucucugaugcuccaaauuggaaacaucauuagcaucugggcuucccacucuauucagacaggcagccagaauaacacggggaucugcaaucagagaauuaucaccuacgagaacuccacaugggugaaucauaccuaugucaacaucaauaacacaaauguuguggccggaaaagacaagaccucugugacacuggcgggcaacagcucccuuuguagcauuucugggugggcuaucuacaccaaagauaauuccauucggaucggaagcaagggcgacgucuucgugauucgcgaaccuuuuaucucuugcucccaccuggaguguagaacguucuuucucacccaaggcgcccugcuuaacgauaaacauagcaaugggacaguuaaggaccggucuccguaucgcgcccugauguccugcccccucggagaagcuccuagccccuacaacuccaaguucgagucuguggccuggagcgcuuccgccugucacgauggcaugggguggcugaccaucggaauuagcggcccugacaacggggcggucgccgugcugaaauauaauggaaucauuacaggcaccaucaagucuuggaaaaagcagauucucagaacgcaggaauccgagugcguuuguaugaacggcagcugcuuuacaaucaugaccgaugggcccucuaaucgggcugccagcuacaaaaucuucaagauugagaagggaaaagugacaaaguccaucgaacugaacgcuccuaauuuucauuaugaggaauguucuugcuacccggacaccggcauugucaugugugugugccgcgauaacuggcacgggagcaauagacccuggguguccuucaaccagaaucuugacuaccaaaucggauauauuugcagcggcgucuuuggggauaacccucggcccgaggacggagagggcucuuguaauccuguuaccguggauggcacagacggggugaaaggauucuccuacaaguaugacaacggcgucuggaucgggcgcacgaaaagcaauagacugcggaagggauuugaaaugauuugggaucccaacggcuggaccaauacagacucugauuucuccgugaaacaggacguuguggccaucaccgauuggagcggguacuccggcucuuuuguccagcacccggagcucacaggacuggacugcauccgcccuuguuucuggguggaacuuguuagaggccugccccgggagaacaccacgauuuggacaagcggguccucuaucagcuucugcggagugaacuccgauaccgcgaauuggagcuggccugacggcgccgaacuccccuuuaccauugauaaguga

SEQ ID NO: 208432 - RNA, 1413 nt, Artificial Sequence; identical to SEQ ID NO: 208201
  derived and/or modified CDS sequence (opt5) from neuraminidase__InfluenzaA__ABY51064

SEQ ID NO: 208433 - RNA, 1413 nt, Artificial Sequence; identical to SEQ ID NO: 208102
  derived and/or modified CDS sequence (opt5) from neuraminidase__InfluenzaA__ABY51075

SEQ ID NO: 208434 - RNA, 1413 nt, Artificial Sequence
  derived and/or modified CDS sequence (opt5) from neuraminidase__InfluenzaA__ABY51086
augaaccccaaucagaagaucauuaccaucggcagcauuuccaucgccauugggaucaucucuauuaugcugcaaaucggaaacauuaucagcauuugggcuucccacucuauccagacaggcagccagaaucauacggggauuugcaaccagagaaucaucaccuacgaaaauuccacaugggugaaccacaccuaugucaauauuaacaauacaaacguuguggccgagaaagacaagaccucugugacacucgcgggaaauagcucccuguguagcaucucuggcugggcuauuuacaccaaagauaacuccauccggauugggagcaagggagacgucuucgugauccgcgagccuuuuaucucuugcucccaucuugaauguagaacguucuuucugacccaaggcgcccuccugaaugauaaacacagcaacggcacaguuaaggaccggucuccguaucgcgcccuuauguccugcccccugggggaggcuccuagccccuacaauuccaaguucgaaucuguggccuggagcgcuuccgccugucaugauggaaugggcuggcucaccauugggaucagcggaccugacaacggcgcggucgccgugcugaaauauaacgggauuaucacagagaccauuaagucuuggaaaaagagaauccugcggacgcaggaguccgaaugcguuugugugaauggaagcugcuuuacaaucaugaccgauggccccucuaacggcgcugccagcuacaaaauuuucaagaucgagaaggggaaagucacaaaguccauugaacucaaugcuccuaacuuucacuaugaggaguguucuugcuacccggacaccggaaccgugaugugugugugccgcgauaauuggcacggcagcaacagacccugggucuccuucaaucagaaccuggacuaccagaucggguauauuugcagcggaguuuuuggcgauaauccucggcccaaagacgggaagggaucuuguaacccugugacaguggauggcgccgacggcaucaaaggguucuccuacaaguauggaaauggcgucuggauugggcgcacgaaaagcaacagacuucggaagggauuugaaaugaucugggaccccaauggcuggaccaacacagauucugacuucuccgugaagcaagauguuguggcgaucaccgacuggagcggguacuccggcucuuuuguccagcauccggagcugacaggacucgauugcauucgcccuuguuucuggguggaacugguuagaggccuuccccgggagaauaccacgaucuggacaagcggguccucuauuagcuucugcggaguggacggcgauaccgccaacugguccuggccugacggggcugaacugcccuuuaccaucgauaaauga

SEQ ID NO: 208435 - RNA, 1413 nt, Artificial Sequence
  derived and/or modified CDS sequence (opt5) from neuraminidase__InfluenzaA__ABY51097
augaaccccaaucagaagaucauuaccaucggcagcauuuccaucgccauugggaucaucucucugaugcuccaaauuggaaacaucauuagcaucugggcuucccacucuauucagacaggcagccagaaucauacggggaucugcaaccagagaauuaucaccuacgagaauagcacaugggugaaccacaccuaugucucuaucaauaacacaaauguuguggccggaaaagacaagaccagcgugacacuggcgggcaacuccagccuuuguucuauuuccgggugggcuaucuacaccaaagauaauagcauucggaucggaucuaagggcgacgucuucgugauucgcgaaccuuuuaucuccugcagccaucuggaguguagaacguucuuucucacccaaggcgcccugcuuaacgauaaacacucuaaugggacaguuaaggaccgguccccguaucgcgcccugaugagcugcccccucggagaagcuccuucccccuacaacucuaaguucgagagcguggccugguccgcuagcgccugucaugauggcaugggguggcugaccaucggaauuucuggcccugacaauggggcggucgccgugcugaaauauaacggaaucauuacagaaaccaucaaguccuggaaaaagcggauucucagaacgcaggagagcgagugcguuugugugaacggcucuugcuuuacaaucaugaccgauggccccagcaauggggcugccuccuacaaaaucuucaagauugaaaagggaaaagucacaaagucuguggagcugaacgcuccuaauuuucacuaugaagaguguagcugcuacccggacaccggcaccgugaugugugucugccgcgauaacuggcacggguccaauagacccuggguuagcuucaaccagaaucuugacuaccagaucggauauauuugcucuggcguguuuggggauaacccucggcccaaagacggaaagggcuccuguaauccugugacagucgauggcgccgacggggugaaaggauucagcuacaaguauggcaacgggguuuggaucggacgcacgaaaucuaauagacugcggaagggcuuugagaugauuugggaccccaacggguggaccgauacagacuccgauuucagcgugaagcaagacgucguggcgaucaccgauugguccggcuacucuggauccuuuguucagcauccggaacucacaggccuggacugcauucgcccuuguuucuggguggagcuugucagagggcugccccgggaaaauaccacgaucuggacauccggaucuagcaucuccuucugcggcguggauagcgacaccgccaacuggucuuggccugauggggcugagcuccccuuuaccauugacaaauga

SEQ ID NO: 208436 - RNA, 1413 nt, Artificial Sequence
  derived and/or modified CDS sequence (opt5) from neuraminidase__InfluenzaA__ABY51108
augaaccccaaucagaagaucauuaccaucggcagcauuuccaucgccauugggaucaucucucugaugcuccaaauuggaaacaucauuagcaucugggcuucccacucuauucagacaggcagccagaaucauacggggaucugcaaccagagaauuaucaccuacgagaauagcacaugggugaaccacaccuaugucucuaucaauaacacaaauguuguggccggaaaagacaagaccagcgugacacuggcgggcaacuccagccuuuguucuauuuccgggugggcuaucuacaccaaagauaauagcauucggaucggaucuaagggcgacgucuucgugauucgcgaaccuuuuaucuccugcagccaucuggaguguagaacguucuuucucacccaaggcgcccugcuuaacgauaaacacucuaaugggacaguuaaggaccgguccccguaucgcgcccugaugagcugcccccucggagaagcuccuucccccuacaacucuaaguucgagagcguggccugguccgcuagcgccugucaugauggcaugggguggcugaccaucggaauuucuggcccugacaauggggcggucgccgugcugaaauauaacggaaucauuacagaaaccaucaaguccuggaaaaagcggauucucagaacgcaggagagcgagugcguuugugugaacggcucuugcuuuacaaucaugaccgauggccccagcaauggggcugccuccuacaaaaucuucaagauugaaaagggaaaagucacaaagucuaucgagcugaacgcuccuaauuuucacuaugaagaguguagcugcuacccggacaccggcaccgugaugugugugugccgcgauaacuggcacggguccaauagacccugggucagcuucaaccagaaucuugacuaccagauuggauauaucugcucuggcguuuuuggggauaacccucggcccaaagacggaaagggcuccuguaauccugugacaguggauggcgccgacggggucaaaggauucagcuacaaguauggcaacgggguguggauuggacgcacgaaaucuaauagacugcggaagggcuuugagaugaucugggaccccaacggguggaccgauacagacuccgauuucagcguuaagcaagacauuguggcgaucaccgauugguccggcuacucuggauccuuuguccagcauccggaacucacaggccuggacugcauccgcccuuguuucuggguggagcuuguuagagggcugccccgggaaaauaccacgauuuggacauccggaucuagcaucuccuucugcggcguggauagcgacaccgccaacuggucuuggccugauggggcugagcuccccuuuaccauugacaaauga

SEQ ID NO: 208437 - RNA, 1413 nt, Artificial Sequence; identical to SEQ ID NO: 208102
  derived and/or modified CDS sequence (opt5) from neuraminidase__InfluenzaA__ABY51119

SEQ ID NO: 208438 - RNA, 1410 nt, Artificial Sequence; identical to SEQ ID NO: 207956
  derived and/or modified CDS sequence (opt5) from neuraminidase__InfluenzaA__ABY51130

SEQ ID NO: 208439 - RNA, 1413 nt, Artificial Sequence; identical to SEQ ID NO: 208143
  derived and/or modified CDS sequence (opt5) from neuraminidase__InfluenzaA__ABY51141

SEQ ID NO: 208440 - RNA, 1413 nt, Artificial Sequence
  derived and/or modified CDS sequence (opt5) from neuraminidase__InfluenzaA__ABY51152
augaaccccaaucagaagaucauuaccaucggcagcauuuccaucgccauugggaucaucucucugaugcuccaaauuggaaacaucauuagcaucugggcuucccacucuauucagacaggcagccagaaucauacggggaucugcaaccagagaauuaucaccuacgagaauagcacaugggugaaccacaccuaugucucuaucaauaacacaaauguuguggccggaaaagacaagaccagcgugacacuggcgggcaacuccagccuuuguucuauuuccgggugggcuaucuacaccaaagauaauagcauucggaucggaucuaagggcgacgucuucgugauucgcgaaccuuuuaucuccugcagccaucuggaguguagaacguucuuucucacccaaggcgcccugcuuaacgauaaacacucuaaugggacaguuaaggaccgguccccguaucgcgcccugaugagcugcccccucggagaagcuccuucccccuacaacucuaaguucgagagcguggccugguccgcuagcgccugucaugauggcaugggguggcugaccaucggaauuucuggcccugacaauggggcggucgccgugcugaaauauaacggaaucauuacagaaaccaucaaguccuggaaaaagcggauucucagaacgcaggagagcgagugcguuugugugaacggcucuugcuuuacaaucaugaccgauggccccagcaauggggcugccuccuacaaaaucuucaagauugaaaagggaaaagucacaaagucuaucgagcugaacgcuccuaauuuucacuaugaagaguguagcugcuacccggacaccggcaccgugaugugugugugccgcgauaacuggcacggguccaauagacccugggucagcuucaaccagaaucuugacuaccagauuggauauaucugcucuggcguuuuuggggauaacccucggcccaaagacggaaagggcuccuguaauccugugacaguggauggcgccgacggggucaaaggauucagcuacaaguauggcaacgggguguggauuggacgcacgaaaucuaauagacugcggaagggcuuugagaugaucugggaccccaacggguggaccgauacagacuccgauuucagcguuaagcaagacguggucgcgauuaccgauugguccggcuacucuggauccuuugugcagcauccggaacucacaggccuggacugcauccgcccuuguuucuggguugagcuugugagagggcugccccgggaaaauaccacgaucuggacauccggaucuagcauuuccuucugcggcgucaacagcgauaccgccaauuggucuuggccugacggggcugagcuccccuuuaccaucgauaaauga

SEQ ID NO: 208441 - RNA, 1413 nt, Artificial Sequence
  derived and/or modified CDS sequence (opt5) from neuraminidase__InfluenzaA__ABY51163
augaaccccaaucagaagaucauuaccaucggcagcauuuccaucgccauugggaucaucucucugaugcuccaaauuggaaacaucauuagcaucugggcuucccacucuauucagacaggcagccagaaucauacggggaucugcaaccagagaauuaucaccuacgaaaauuccacaugggugaaccacaccuaugucaauaucaacaauacaaacguuguggccggaaaagacaagaccucugugauucuggcgggcaauagcucccuuuguagcaucucugggugggcuauuuacacaaaagauaacuccauccggauuggaagcaagggcgacgucuucgugauccgcgagccuuuuaucucuugcucccaucuggaguguagaaccuucuuucucacgcaaggcgcccugcuuaaugauaaacacagcaacgggaccguuaaggaccggucuccguaucgcgcccugauguccugcccccucggagaagcuccuagccccuacaauuccaaguucgagucuguggccuggagcgcuuccgccugucaugauggcaugggguggcugacaauuggaaucagcggcccugacaacggggcggucgccgugcugaaauauaacggaauuaucaccgaaacaauuaagucuuggaaaaagagaauccuccggacccaggaguccgagugcguuugugugaauggcagcugcuuuacgaucaugacagauggccccucuaacggggcugccagcuacaaaauuuucaagaucgaaaagggaaaagucaccaaguccauugagcugaaugcuccuaacuuucacuaugaagaguguucuugcuacccggacacaggcaccgugaugugugugugccgcgauaauuggcacgggagcaacagacccugggucuccuucaaucagaaccuugacuaccagaucggauauauuugcagcggcguuuuuggggauaauccucggcccaaagacggaaagggcucuuguaacccugugaccguggauggcgccgacggggucaaaggauucuccuacaaguauggcaaugggguguggaucggacgcacaaaaagcaacagacugcggaagggcuuugagaugauuugggaccccaauggguggacggauaccgacucugauuucuccguuaagcaagacguggucgcgaucacagauuggagcggcuacuccggaucuuuugugcagcauccggaacucaccggccuggacugcauccgcccuuguuucuggguugagcuugugagagggcugccccgggaaaacacaaccauuuggacgagcggauccucuaucagcuucugcggcgucgauuccgacacagccaauuggagcuggccugauggggcugagcuccccuuuaccauugacaaauga

SEQ ID NO: 208442 - RNA, 1413 nt, Artificial Sequence
  derived and/or modified CDS sequence (opt5) from neuraminidase__InfluenzaA__ABY51174
augaaccccaaucagaagaugaucaccauuggcagcaucuccauugccaucgggauuaucucucugaugcuccaaaucggaaacauuaucagcauuugggcuucccacucuauccagacaggcagccagaaucauacggggauuugcaaccagagaaucauuaccuacgaaaauuccacaugggugaaccacaccuaugucaauaucaacaauacaaacguuguggccggaaaagacaagaccucugugacacuggcgggcaauagcucccuuuguagcaucucugggugggcuauuuacaccaaagauaacuccauccggauuggaagcaagggcgacgucuucgugauccgcgagccuuuuauuucuugcucccaucuggaguguagaacguucuuucucacccaaggcgcccugcuuaaugauaaacacagcaacgggacaguuaaggaccggucuccguaucgcgcccugauguccugcccccucggagaagcuccuagccccuacaauuccaaguucgagucuguggccuggagcgcuuccgccugucaugauggcaugggguggcugaccaucggaaucagcggcccugacaacggggcggucgccgugcugaaauauaacggaauuaucacagaaaccauuaagucuuggaaaaagagaauccuccggacgcaggaguccgagugcguuugugugaauggcagcugcuuuacaauuaugaccgauggccccucuaacggggcugccagcuacaaaaucuucaagaucgaaaagggaaaagucacaaaguccauugagcugaaugcuccuaacuuucacuaugaagaguguucuugcuacccggacaccggcaccgugaugugugugugccgcgauaauuggcacgggagcaacagacccugggucuccuucaaucagaaccuugacuaccagguuggauauaucugcagcggcguguuuggggauaauccucggcccaaagacggaaagggcucuuguaacccuaugacaguggauggcgccgacggggucaaaggauucuccuacaaguauggcaaugggguguggauuggacgcacgaaaagcaacaagcugagaaagggcuuugagaugaucugggaccccaauggguggaccgauacagacucugauuucuccguuaaacaagacguggucgcgauuaccgauuggagcggcuacuccggaucuuuugugcagcauccggaacucacaggccuggacugcauccggccuuguuucuggguugagcuugugcgcgggcugcccagagaaaacaccacgauuuggacaagcggauccucuaucagcuucugcggcgucgauuccgacaccgccaauuggagcuggccugauggggcugagcuccccuuuaccaucgacaaguga

SEQ ID NO: 208443 - RNA, 1413 nt, Artificial Sequence; identical to SEQ ID NO: 208102
  derived and/or modified CDS sequence (opt5) from neuraminidase__InfluenzaA__ABY51185

SEQ ID NO: 208444 - RNA, 1413 nt, Artificial Sequence; identical to SEQ ID NO: 208137
  derived and/or modified CDS sequence (opt5) from neuraminidase__InfluenzaA__ABY51196

SEQ ID NO: 208445 - RNA, 1410 nt, Artificial Sequence; identical to SEQ ID NO: 208138
  derived and/or modified CDS sequence (opt5) from neuraminidase__InfluenzaA__ABY51229

SEQ ID NO: 208446 - RNA, 1413 nt, Artificial Sequence
  derived and/or modified CDS sequence (opt5) from neuraminidase__InfluenzaA__ABY51240
augaaccccaaucagaagaucauuaccaucggcagcauuuccaucgccauugggaucaucucucugaugcuccaaauuggaaacaucauuagcgugugggcuucccacucuauccagacaggcagccagaaucauacggggauuugcaaccagagaaucauuaccuacgaaaauuccacaugggucaaccacaccuauguuucuaucaauaacacaaaugugguggccggaaaagacaagaccagcgucacacuggcgggcaacuccagccuuuguucuaucuccggguggagcauuuacaccaaagauaauucuauccggauuggauccaagggcgacguguucguuauccgcgagccuuuuauuagcugcucucaucuggaguguagaacguucuuucucacccaaggcgcucugcuuaacgauaaacacuccaaugggacagugaaggaccggagcccguaucgcgcccugauguccugcccccucggagaagccccuucucccuacaacagcaaguucgaguccgucgcuuggagcgccucugcuugucaugauggcaugggguggcugaccaucggaaucuccggcccugacaauggggccguggcgguucugaaauauaacggaauuaucacagaaaccauuaagagcuggaaaaagagaauccuccggacgcaggagucugagugcgugugugucaacggcagcugcuuuacaauuaugaccgauggccccuccaauggggccgcuucuuacaaaaucuucaagaucgaaaagggaaaagugacaaagagcauugagcugaacgccccuaauuuucacuaugaagaguguuccugcuacccggacaccggcaccgugaugugugucugccgcgauaacuggcacgggagcaauagacccuggguuucuuucaaccagaaucuugacuaccagaucggauauauuugcuccggcguguuuggggauaacccucggcccaaagacggaaagggcagcuguaauccugugacagucgauggcgcugacggggugaaaggauucucuuacaaguauggcaacgggguuuggaucggacgcacgaaauccaauagacugcggaagggcuuugagaugauuugggaccccaacggguggaccgauacagacagcgauuucuccgugaagcaagacgucguggccaucaccgauuggucuggcuacagcggauccuuuguucagcauccggaacucacaggccuggacugcauucgcccuuguuucuggguggagcuugucagagggcugccccgggaaaauaccacgaucuggacaucuggaagcuccaucagcuucugcggcguggauucugacaccgcgaacugguccuggccugauggggccgagcuccccuuuaccauugacaaauga

SEQ ID NO: 208447 - RNA, 1413 nt, Artificial Sequence; identical to SEQ ID NO: 208128
  derived and/or modified CDS sequence (opt5) from neuraminidase__InfluenzaA__ABY51251

SEQ ID NO: 208448 - RNA, 1413 nt, Artificial Sequence
  derived and/or modified CDS sequence (opt5) from neuraminidase__InfluenzaA__ABY51262
augaaccccaaucagaagaucauuaccaucggcagcauuuccaucgccauugggaucaucucucugaugcuccaaauuggaaacaucauuagcaucugggcuucccacucuauucagacaggcagccagaaucauacggggaucugcaaccagagaauuaucaccuacgagaauagcacaugggugaaccacaccuaugucucuaucaauaacacaaauguuguggccggaaaagacaagaccagcgugacacuggcgggcaacuccagccuuuguucuauuuccgggugggcuaucuacaccaaagauaauagcauucggaucggaucuaagggcgacgucuucgugauucgcgaaccuuuuaucuccugcagccaucuggaguguagaacguucuuucucacccaaggcgcccugcuuaacgauaaacacucuaaugggacaguuaaggaccgguccccguaucgcgcccugaugagcugcccccucggagaagcuccuucccccuacaacucuaaguucgagagcguggccugguccgcuagcgccugucaugauggcaugggguggcugaccaucggaauuucuggcccugacaauggggcggucgccgugcugaaauauaacggaaucauuacagaaaccaucaaguccuggaaaaagcggauucucagaacgcaggagagcgagugcguuugugugaacggcucuugcuuuacaaucaugaccgauggccccagcaauggggcugccuccuacaaaaucuucaagauugaaaagggaaaagucacaaagucuaucgagcugaacgcuccuaauuuucacuaugaagaguguagcugcuacccggacaccggcaccgugaugugugugugccgcgauaacuggcacggguccaauagacccugggucagcuucaaccagaaucuugacuaccagauuggauauaucugcucuggcguuuuuggggauaacccucggcccaaagacggaaagggcuccuguaauccugugacaguggauggcgccgacggggucaaaggauucagcuacaaguauggcaacgggguguggauuggacgcacgaaaucuaauagacugcggaagggcuuugagaugaucugggaccccaacggguggaccgauacagacuccgauuucagcguuaagcaagacguggucgcgauuaccgauugguccggcuacucuggauccuuugugcagcauccggaacucacaggccuggacugcauccgcccuuguuucuggguugagcuugugagagggcugccccgggaaaaugccaccaucuggacguccggaucuagcauuuccuucugcggcgucgauagcgacacagcuaacuggucuuggccugauggggccgagcuccccuuuaccaucgacaaauga

SEQ ID NO: 208449 - RNA, 1410 nt, Artificial Sequence; identical to SEQ ID NO: 207956
  derived and/or modified CDS sequence (opt5) from neuraminidase__InfluenzaA__ABY51273

SEQ ID NO: 208450 - RNA, 1350 nt, Artificial Sequence
  derived and/or modified CDS sequence (opt5) from neuraminidase__InfluenzaA__ABY76285
augaaccccaaucagaagaucauuaccaucggcagcauuugcauggugaucgggauugucucccugaugcuccaaaucggaaacaugaucucuauuuggguuagccacuccauccagacaggcaaucagagacaggccgagccuauuucuaacacgaaauuccugaccgaaaaggcuguggccagcgugacacuugcgggaaauuccucucuguguccgaucagcgggugggcugucuacuccaaagacaacagcauucggaucggcucuaagggggauguguuuguuauucgcgagcccuucaucuccugcagccaucucgaauguagaaccuuuuuccugacacaaggagcccuucugaaugacaaacacucuaacggcaccgugaaggaucgguccccucaucgcacacucaugagcugccccgucggcgaggccccuucucccuauaauuccagauuugaaagcguggcuugguccgccucugcuugucacgacgggaccagcuggcugacgaucggaauuuccggcccugauaacggggccguugcggugcugaaguacaauggaaucauuaccgacacaaucaaaagcuggcggaacaauauucuccgcacccaggagucugagugcgccugugucaacggcuccugcuucacagugaugaccgaugggccgagcaauggacaggcuucuuauaagaucuuuaaaauggaaaagggcaaaguggucaagagcguugagcuggacgcccccaacuaccauuaugaagaguguuccugcuacccugaugcuggcgagaucacgugugugugcagagacaacuggcacgggucuaaucggcccugggugagcuucaaccagaaucuugaauaucaaauuggauacaucugcuccggcgucuuuggggauaacccucgccccaaugacggaacaggcagcugugggccggugucuccuaacggagccuacggcguuaagggcuucuccuuuaaauaugggaauggaguguggauuggcagaaccaagagcacaaacucucgguccggguucgagaugaucugggaucccaauggauggaccggcaccgacagcuccuuuucugucaaacaggacauuguggcgaucacagauuggagcggguacuccggcucuuucguucagcacccugaacugacgggacucgacugcauccgccccuguuucuggguggagcugauuagaggccggcccaaggaaagcaccaucuggacauccgggagcucuauuuccuuuugcggagucaacagcgauaccgugucuugguccuggccugacggcgccgagcuuccguucacaaucgauaaauga

SEQ ID NO: 208451 - RNA, 1413 nt, Artificial Sequence
  derived and/or modified CDS sequence (opt5) from neuraminidase__InfluenzaA__ABY81352
augaaccccaaucagaagaucauuaccaucggcagcauuugcauggccaucgggauuaucucccugauccuccaaauuggaucuaucauuagcaucugggugucccacucuauucagacaggcagccagaaccauacggggaucuguaaucagagaauuaucaccuacgagaacuccacaugggucaaucaaaccuauguuaacaucucuaauacaaacgugguggcuggaaaagacaccacaagcaugacccuggccggcaauuccagccuuugcccuauucgggggugggcgaucuacucuaaggauaacuccauucgcaucggaagcaaaggcgacgucuucgugauuagagaaccguuuaucucuuguucccaccuggagugccggacguucuuucucacccagggcgcucugcuuaaugauaagcauagcaacgggacaguuaaagaccgcucucccuauagagcccugauguccuguccuaucggagaagcccccagcccuuacaauucccgguucgagucuguggcuuggagcgccuccgcuugccacgauggcaugggguggcucaccauuggaaucagcggccccgacgauggggccgucgcggugcugaaguauaacggaauuaucacagaaaccauuaagucuuggcgcaaacagauccugagaacgcaggaguccgaguguguuugcgugaauggcagcuguuuuacaaucaugaccgacggcccuucugaugggcaagccagcuaccggauuuucaagaucgaaaaaggaaagauuacaaaauccaucgagcucgacgcuccgaacucucauuaugaagagugcagcuguuaccccgauaccggcaccgucaugugcgugugccgcgacaacuggcacggguccaauagaccuugggugagcuuuaaccagaaucuggauuaccagauuggauauaucuguucuggcgucuucggggacaacccccggccuaaggacggaaagggcuccugcgaucccguuaauguggacggcgccgauggggugaaaggauuuagcuaccgcuauggcaacggggucuggauuggaagaacaaagucuaauuccagccggaaaggcuucgagaugaucugggacccgaacggguggacggauaccgacuccaauuuucuugugaagcaggauguuguggcuaugacagacuggucuggcuacagcggauccuucguccaacacccugaacugaccggccucgauuguaugcgccccugcuuuuggguggagcugaucagagggcggccuagagagaaaacaaccauuuggacgucuggaagcuccaucagcuucuguggcguuaacucugacacagugaauugguccuggcccgauggggccgaacuucccuucaccauugacaaguga

SEQ ID NO: 208452 - RNA, 1413 nt, Artificial Sequence
  derived and/or modified CDS sequence (opt5) from neuraminidase__InfluenzaA__ABY81363
augaaccccaaucagaagaucauuaccaucggcagcauuuccaucgccauugggaucaucucucugaugcuccaaauuggaaacaucauuagcaucugggcuucccacucuauucagaucggcagccagaaucauacagggauuugcaaccagagaaucaucacguacgagaauagcaccugggugaaccacacauaugucucuauuaauaacaccaauguuguggccggaaaagacaagacaagcgugacccuggcgggcaacuccagccuuuguucuaucuccgggugggcuauuuacacaaaagauaauagcauccggauuggaucuaagggcgacgucuucgugauccgcgaaccuuuuaucuccugcagccaucuggaguguagaaccuucuuucucacgcaaggcgcccugcuuaacgauaaacacucuaaugggaccguuaaggaccgguccccguaucgcgcccugaugagcugcccccucggagaagcuccuucccccuacaacucuaaguucgagagcguggccugguccgcuagcgccugucaugauggcaugggguggcugacaauuggaaucucuggcccugacaauggggcggucgccgugcugaaauauaacggaauuaucaccgaaacaauuaaguccuggaaaaagagaauccuccggacccaggagagcgagugcguuugugugaacggcucuugcuuuacgaucaugacagauggccccagcaauggggcugccuccuacaaaauuuucaagaucgaaaagggaaaagucaccaagucuauugagcugaacgcuccuaauuuucacuaugaagaguguagcugcuacccggacacaggcaccgugaugugugugugccgcgauaacuggcacggguccaauagacccugggucagcuucaaccagaaucuugacuaccagaucggauauauuugcucuggcguuuuuggggauaacccucggcccaaagacggaaagggcuccuguaauccugugaccguggauggcgccgacggggucaaaggauucagcuacaaguauggcaacgggguguggaucggacgcacaaaaucuaauagacugcggaagggcuuugagaugauuugggaccccaacggguggacggauaccgacuccgauuucagcguuaagcaagacguggucgcgaucacagauugguccggcuacucuggauccuuugugcagcauccggaacucaccggccuggacugcauccgcccuuguuucuggguugagcuugugagagggcugccccgggaaaauacaaccauuuggacguccggaucuagcaucuccuucugcggcgucgauagcgacacagccaacuggucuuggccugauggggcugagcuccccuuuaccauugacaaauga

SEQ ID NO: 208453 - RNA, 1410 nt, Artificial Sequence; identical to SEQ ID NO: 208138
  derived and/or modified CDS sequence (opt5) from neuraminidase__InfluenzaA__ABY81374

SEQ ID NO: 208454 - RNA, 1413 nt, Artificial Sequence; identical to SEQ ID NO: 208102
  derived and/or modified CDS sequence (opt5) from neuraminidase__InfluenzaA__ABY81385

SEQ ID NO: 208455 - RNA, 1413 nt, Artificial Sequence
  derived and/or modified CDS sequence (opt5) from neuraminidase__InfluenzaA__ABY81407
augaaccccaaucagaagaucauuaccaucggcagcauuuccaucgccauugggacaaucucucugaugcuccaaaucggaaacauuaucagcauuugggcuucccacucuauccagacgggcagccagaaucauaccgggauuugcaaccagagaaucauuacauacgaaaauuccaccugggugaaccacacauaugucucuaucaauaacaccaauguuguggccggaaaagacaagacaagcgugacccuggcgggcaacuccagccuuuguucuaucuccgggugggcuauuuacacgaaagauaauagcauccggauuggaucuaagggcgacgucuucgugauccgcgagccuuuuauuuccugcagccaucuggaguguagaaccuucuuucucacacaaggcgcccugcuuaacgauaaacacucuaaugggaccguuaaggaccgguccccguaucgcgcccugaugagcugcccccucggagaagcuccuucccccuacaacucuaaguucgagagcguggccugguccgcuagcgccugucaugauggcaugggguggcugacaaucggaaucucuggcccugacaauggggcggucgccgugcugaaauauaacggaauuaucaccgaaacgauuaaguccuggaaaaagagaauccuccggacacaggagagcgagugcguuugugugaacggcucuugcuuuaccauuaugacagauggccccagcaauggggcugccuccuacaaaaucuucaagaucgaaaagggaaaagucaccaagucuauugagcugaacgcuccuaauuuucacuaugaagaguguagcugcuacccggacaccggcacagugaugugugugugccgcgauaacuggcacggguccaauagacccugggucagcuucaaccagaaucuugacuaccagaucggauauauuugcucuggcguuuuuggggauaacccucggcccaaagacggaaagggcuccuguaauccugugacgguggauggcgccgacggggucaaaggauucagcuacaaguauggcaacgggguguggaucggacgcaccaaaucuaauagacugcggaagggcuuugagaugauuugggaccccaacggguggacagauaccgacuccgauuuccucguuaagcaagacguggucgcgaucacagauuggagcggcuacuccggaucuuuugugcagcauccggaacugaccggccuugacugcauucgcccuuguuucuggguugagcuggugagagggcucccccgggaaaauacgacaaucuggaccagcggauccucuaucagcuucugcggcgucgauuccgacaccgccaacuggagcuggccugauggggcugagcugcccuuuacaauugacaaauga

SEQ ID NO: 208456 - RNA, 1410 nt, Artificial Sequence; identical to SEQ ID NO: 208138
  derived and/or modified CDS sequence (opt5) from neuraminidase__InfluenzaA__ACA24505

SEQ ID NO: 208457 - RNA, 1413 nt, Artificial Sequence; identical to SEQ ID NO: 208102
  derived and/or modified CDS sequence (opt5) from neuraminidase__InfluenzaA__ACA24516

SEQ ID NO: 208458 - RNA, 1413 nt, Artificial Sequence; identical to SEQ ID NO: 208102
  derived and/or modified CDS sequence (opt5) from neuraminidase__InfluenzaA__ACA24527

SEQ ID NO: 208459 - RNA, 1410 nt, Artificial Sequence
  derived and/or modified CDS sequence (opt5) from neuraminidase__InfluenzaA__ACA24692
augaaccccaaucagaagaucauuaccaucggcagcgugucccugacaauuucuacgaucugcuucuuuaugcaaauugccauccucaucaccacagucacccugcacuucaaacaguacgaguuuagcccuccgcccaacaaucagguuaugcuuugugaaccuacaauuaucgagagaaacauuaccgaaaucguguaucugacaaauaccacgauugagaaggaaaucugccccaaacucgcugaguaccggaacugguccaagccucagugugacauuaccggguucgcccccuuuucuaaagauaauagcauccgccuguccgcgggaggcgacaucugggugacaagagagccuuaugucucuugcgauccggacaaguguuaccaauucgcucuugggcagggaaccacacugaacaaugugcauagcaacgauaccguucacgaccggacgcccuaucgcacacuccugaugaaugaacugggcgugccuuuucaucucgggaccaagcaggucugcauugccugguccucuagcuccugucacgauggaaaagccuggcugcaugugugcguuacaggcgacgauaagaacgcuaccgccagcuucaucuacaauggcagacuuguggacucuauugucuccuggagcaaagagauccugcggacccaggaaucugagugugugugcauuaacgggacauguacgguggucaugaccgauggauccgcuagcggcaaggccgacacaaaaauccucuuuaucgaggaagggaagauuguucacaccuccacacugucuggaagcgcgcaacacguggaggaaugcuccugcuauccccgcuacccuggcgugagaugugucugccgggauaauuggaaggggagcaaccgccccaucguggacauuaacaucaaagacuacucuauuguuuccaaguauguguguagcggacuugucggcgauaccccgcggaaaaaugacucuagcuccucuagccauugccuggauccuaacaaugaggaaggcgggcacggagugaagggcugggccuucgacgaugggaacgacguuuggaugggaagaacgaucuccgagaaaagccgcucuggcuacgagacauuuaaggugaucgaagggugguccaaucccaacagcaaacuccagauuaauagacaggucaucguggaucggggaaaccgcucuggcuauuccggcauuuucagcgucgaggggaaguccuguaucaauagaugcuuuuacguggaacugauucggggaagaaacgaggaaaccgagguucuguggaccucuaauagcaucguggucuucuguggcacauccgggaccuauggaacaggcucuuggccugacggggcugauauuaaccucaugcccaucuga

SEQ ID NO: 208460 - RNA, 1410 nt, Artificial Sequence
  derived and/or modified CDS sequence (opt5) from neuraminidase__InfluenzaA__ACA24703
augaaccccaaucagaagaucauuaccaucggcagcgugucccugacaauuucuacgaucugcuucuuuaugcaaauugccauccucaucaccacagucacccugcacuucaaacaguacgaguuuagcuccccuccgaacaaucagguuaugcuuugugaacccacaauuaucgagagaaacauuaccgaaaucguguaucugacaaauauuaccaucgagaaggaaacgugcccuaaacucgcugaguaccggaacuggucuaagccccagugugacauuaccggguucgccccuuuuagcaaagauaauuccauccgccugucugcgggaggcgacaucugggugacaagagagcccuaugucagcugcgauccugacaaguguuaccaauucgcucuugggcagggaaccacacugaacaaugugcauuccaacgauaccguucacgaccggacgccguaucgcacacuccugaugaaugaacugggcgugcccuuucaucucgggaccaagcaggucugcauugccuggucuagcuccagcugucacgauggaaaagccuggcugcaugugugcguuacaggcgacgauaagaacgcuaccgccucuuucaucuacaauggcagacuuguggacuccauugucagcuggucuaaagagauccugcggacccaggaauccgagugugugugcauuaacgggacauguacgguggucaugaccgauggaagcgcuuccggcaaugccgacacaaagauccucuuuaucgaggaagggaaaauuguucacaccucuacacugagcggauccgcgcaacacguggaggaaugcagcugcuauccucgcuaccccggcgugagaugugucugccgggauaacuggaaggggucuaaccgcccuaucguggacauuaauaucaaggacuacuccauuguuagcagauauguguguucuggacuugucggcgauacgccccggaaaaacgacagcuccucuagcucccauugccuggauccgaauaacgaggaaggcgggcacggagugaagggcugggccuucgacgaugggaaugacguuuggaugggacgcaccaucagcgagaaaucuagauccggcuacgagacauuuaaggugaucgaaggguggagcaacccuaauucuaaacuccagauuaaccggcaggucaucguggaucgcggaaauagauccggcuauagcggcauuuucuccgucgaggggaagucuuguaucaaccggugcuuuuacguggaacugauuagaggacgcaaagaggaaaccgagguucuguggaccagcaauuccaucguggucuucuguggcacaucugggaccuauggaacaggcagcuggcccgacggggcugauauuaaccucaugccuaucuga

SEQ ID NO: 208461 - RNA, 1413 nt, Artificial Sequence
  derived and/or modified CDS sequence (opt5) from neuraminidase__InfluenzaA__ACA33539
augaaccccuaccagaagaucauuaccaucggcagcauuuccaucgccauugggaucaucucucugaugcuccaaauuggaaauaucauuagcaucugggcuucccacucuauucagacaggcagccagaaccauacggggaucugcaaucagagaauuaucaccuaugagaacuccacaugggugaaucacaccuacgucucuaucaacaauacaaacguuguggccggaaaagacaagaccagcgugacacuggcgggcaauuccagccuuuguucuauuuccgggugggcuaucuauaccaaagauaacagcauucggaucggaucuaagggcgacgucuucgugauucgcgaaccuuuuaucuccugcagccaucuggaguguagaacguucuuucucacccaaggcgcccugcuuaaugauaaacacucuaacgggacaguuaaggaccgguccccguaccgcgcccugaugagcugcccccucggagaagcuccuucccccuauaauucuaaguucgagagcguggccugguccgcuagcgccugucaugauggcaugggguggcugaccaucggaauuucuggcccugacaacggggcggucgccgugcugaaauacaauggaaucauuacagaaaccaucaaguccuggaaaaagcggauucucagaacgcaggagagcgagugcguuugugugaacggcucuugcuuuacaaucaugaccgauggccccagcaacggggcugccuccuauaaaaucuucaagauugaaaagggaaaagucacaaagucuaucgagcugaaugcuccuaacuuuuacuacgaagaguguagcugcuauccggacaccggcaccgugaugugugugugccgcgauaauuggcacggguccaacagacccugggucagcuucaaucagaaccuugacuaccagauuggauauaucugcucuggcguuuuuggggauaauccucggcccaaagacggaaagggcuccuguaacccugugacaguggauggcgccgacggggucaaaggauucagcuacaaguauggcaaugggguguggauuggacgcacgaaaucuaacagacugcggaagggcuuugagaugaucugggaccccaauggguggaccgauacagacuccgauuucagcguuaagcaagacguggucgcgauuaccgauugguccggcuacucuggcagcuuugugcagcacccggaacucacaggacuggacugcauccgcccuuguuucuggguugagcuugugagagggcugccccgggaaaacaccacgaucuggacauccggaucuagcauuuccuucugcggcgucgauagcgacaccgccaauuggucuuggccugauggggcugagcuccccuuuaccaucgacaaauga

SEQ ID NO: 208462 - RNA, 1413 nt, Artificial Sequence
  derived and/or modified CDS sequence (opt5) from neuraminidase__InfluenzaA__ACA33540
augaaccccaaucagaagaucauuaccaucggcagcauuuccaucgccauugggaucaucucucugaugcuccaaauuggaaacaucauuagcaucugggcuucccacucuauucagacaggcagccagaaucauacggggaucugcaaccagagaauuaucaccuacgagaauagcacaugggugaaccacaccuaugucucuaucaauaacacaaauguuguggccggaaaagacaagaccagcgugacacuggcgggcaacuccagccuuuguucuauuuccgggugggcuaucuacaccaaagauaauagcauucggaucggaucuaagggcgacgucuucgugauucgcgaaccuuuuaucuccugcagccaucuggaguguagaacguucuuucucacccaaggcgcccugcuuaacgauaaacacucuaaugggacaguuaaggaccgguccccguaucgcgcccugaugagcugcccccucggagaagcuccuucccccuacaacucuaaguucgagagcguggccugguccgcuagcgccugucaugauggcaugggguggcugaccaucggaauuucuggcccugacaauggggcggucgccgugcugaaauauaacggaaucauuacagaaaccaucaaguccuggaaaaagcggauucucagaacgcaggagagcgagugcguuugugugaacggcucuugcuuuacaaucaugaccgauggccccagcaauggggcugccuccuacaaaaucuucaagauugaaaagggaaaagucacaaagucuaucgagcugaacgcuccuaauuuuuauuacgaagaguguagcugcuacccggacaccggcaccgugaugugugugugccgcgauaacuggcacggguccaauagacccugggucagcuucaaccagaaucuugacuaucagauuggauacaucugcucuggcguuuuuggggauaacccucggcccaaagacggaaagggcuccuguaauccugugacaguggauggcgccgacggggucaaaggauucagcuauaaguacggcaacgggguguggauuggacgcacgaaaucuaauagacugcggaagggcuuugagaugaucugggaccccaacggguggaccgauacagacuccgauuucagcguuaagcaagacguggucgcgauuaccgauugguccggcuauucuggauccuuugugcagcacccggaacucacaggccuggacugcauccgcccuuguuucuggguugagcuugugagagggcugccccgggaaaauaccacgaucuggacauccggaucuagcauuuccuucugcggcgucgauagcgacaccgccaacuggucuuggccugauggggcugagcuccccuuuaccaucgacaaauga

SEQ ID NO: 208463 - RNA, 1413 nt, Artificial Sequence
  derived and/or modified CDS sequence (opt5) from neuraminidase__InfluenzaA__ACA33582
augaaccccaaucagaagaucauuaccaucggcagcauuuccaucgccauugggaucaucucucugaugcuccaaauuggaaacaucauuagcaucugggcuucccacucuauucagacaggcagccagaaucauacggggaucugcaaccagagaauuaucaccuacgagaauagcacaugggugaaccacaccuaugucucuaucaauaacacaaauguuguggccggaaaagacaagaccagcgugacacuggcgggcaacuccagccuuuguucuauuuccgggugggcuaucuacaccaaagauaauagcauucggaucggaucuaagggcgacgucuucgugauucgcgaaccuuuuaucuccugcagccaucuggaguguagaacguucuuucucacccaaggcgcccugcuuaacgauaaacacucuaaugggacaguuaaggaccgguccccguaucgcgcccugaugagcugcccccucggagaagcuccuucccccuacaacucuaaguucgagagcguggccugguccgcuagcgccugucaugauggcaugggguggcugaccaucggaauuucuggcccugacaauggggcggucgccgugcugaaauauaacggaaucauuacagaaaccaucaaguccuggaaaaagcggauucucagaacgcaggagagcgagugcguuugugugaacggcucuugcuuuacaaucaugaccgauggccccagcaauggggcugccuccuacaaaaucuucaagauugaaaagggaaaagucacaaagucuaucgagcugaacgcuccuaauuuuuauuacgaagaguguagcugcuacccggacaccggcaccgugaugugugugugccgcgauaacuggcacggguccaauagacccugggucagcuucaaccagaaucuugacuaucagauuggauacaucugcucuggcguuuuuggggauaacccucggcccaaagacggaaagggcuccuguaauccuaugacaguggauggcgccgacggggugaaaggauucagcuauaaguacggcaacggggucuggauuggacgcacgaaaucuaauagacugcggaagggcuuugagaugaucugggaccccaacggguggaccgauacagacuccgauuucagcgugaagcaagacguuguggcgauuaccgauugguccggcuauucuggauccuuuguccagcacccggaacucacaggccuggacugcauccgcccuuguuucuggguggagcuuguuagagggcugccccgggaaaauaccacgaucuggacauccggaucuagcauuuccuucugcggcguggauagcgacaccgccaacuggucuuggccugauggggcugagcuccccuuuaccaucgacaaauga

SEQ ID NO: 208464 - RNA, 1413 nt, Artificial Sequence
  derived and/or modified CDS sequence (opt5) from neuraminidase__InfluenzaA__ACA33622
augaaccccaaucagaagaucauuaccaucggcagcauuuccaucgccauugggaucaucucucugaugcuccaaauuggaaacaucauuagcaucugggcuucccacucuauucagacaggcagccagaaucauacggggaucugcaaccagagaauuaucaccuacgaaaauuccacaugggugaaccacaccuaugucaauaucaacaauacaaacguuguggccggaaaagacaagaccucugugacacuggcgggcaauagcucccuuuguagcauuucugggugggcuaucuacaccaaagauaacuccauucggaucggaagcaagggcgacgucuucgugauucgcgagccuuuuaucucuugcucccaucuggaguguagaacguucuuucucacccaaggcgcccugcuuaaugauaaacacagcaacgggacaguuaaggaccggucuccguaucgcgcccugauguccugcccccucggagaagcuccuagccccuacaauuccaaguucgagucuguggccuggagcgcuuccgccugucaugauggcaugggguggcugaccaucggaauuagcggcccugacaacggggcggucgccgugcugaaauauaacggaaucauuacagaaaccaucaagucuuggaaaaagcggauucucagaacgcaggaguccgagugcguuugugugaauggcagcugcuuuacaaucaugaccgauggccccucuaacggggcugccagcuacaaaaucuucaagauugaaaagggaaaagucacaaaguccaucgagcugaaugcuccuaacuuuuauuacgaagaguguucuugcuacccggacaccggcaccgugaugugugugugccgcgauaauuggcacgggagcaacagacccugggucuccuucaaucagaaccuugacuaucagauuggauacaucugcagcggcguuuuuggggauaauccucggcccaaagacggaaagggcucuuguaacccugugacaguggauggcgccgacggggucaaaggauucuccuauaaguacggcaaugggguguggauuggacgcacgaaaagcaacagacugcggaagggcuuugagaugaucugggaccccaauggguggaccaacacagauucugacuucuccguuaagcaagauguggucgcgauuaccgacuggagcggcuauuccggaucuuuugugcagcacccggaacucacaggccuggauugcauccgcccuuguuucuggguugagcuugugagagggcugccccgggaaaauaccacgaucuggacaagcggauccucuauuagcuucugcggcgucgacuccgauaccgccaacuggagcuggccugacggggcugagcuccccuuuaccaucgauaaauga

SEQ ID NO: 208465 - RNA, 1413 nt, Artificial Sequence; identical to SEQ ID NO: 208141
  derived and/or modified CDS sequence (opt5) from neuraminidase__InfluenzaA__ACA96522

SEQ ID NO: 208466 - RNA, 1362 nt, Artificial Sequence
  derived and/or modified CDS sequence (opt5) from neuraminidase__InfluenzaA__ACC55274
augaaccccaaucagaagaucauuaccaucggcagcgugucccugacaauugccacggucugcuuccucaugcaaaucgcuauucuggccaugaccguuacacuucacuuuagacagaacgaguguucuaucagcgcgaauagccagguggugccuugcgaaccgaccacagagaaagaagucuguucuaaggugguugacuaccggagcugguccaaaccccagugccaaaucaccggguucgcuccuuuuucuaaggauaacagcauucgccuguccgccggaggcgacaucuggauuacaagagagcccuaugugagcugugauaccucuaaaugcuaccaguucgcccucgggcagggaacgacccuggacaaugaacauuccaacggcacaauccacgaucggauuccucaucgcacccuucugaugaaugagcucgggguccccuuucaccugggaacaagacagguguguaucgcuugguccucuuccagcugccaugacggcaaggccuggcugcacguuugugugaccggcgaugaccggaacgcuacggccucuuucauuuauaaugggaugcucgucgauuccaucggaagcuggucccaaaacauccugcgcacacaggagucugaaugcguguguauuaauggcagcugcaccguggucaugacagacggguccgcgagcggaaaggccgauaccagaauccuuuuuguuaaagagggcaagauugugcacaucucuccucuguccgggagcgcucagcauauugaagagugcucuuguuacccgcgguaucccaacgugcgcugcgucuguagagacaauuggaaaggaagcaaccggccugugaucgauaucaauaugaccgacuacuccauugacucuagcuauguuugcuccggccucgugggcgauacaccccgcaacgaggacucuagcuccagcucuaacuguagagauccuaaugaggaacgggggaaccccggagucaagggcugggccuucgacuccggggaugacguguggaugggacgcacgaucagcagagauucccggucuggcuacgaaaccuuuagaguuauugggggauggacaaccgcuaauagcaaaucccagacaaaccgccaagugaucgucgacaauaacaauuggucuggcuacagcggcauuuucuccguggagcacaagagcugcaucaaccgguguuuuuaugucgaacugaucagagggcgcccgaaggagacccgggugugguggacgucuaauuccauuguuguguucugcggaacaagcggcaccuacgggaccggaucuuggccugauggcgccaacaucaauuuuaugcccauuuga

SEQ ID NO: 208467 - RNA, 1413 nt, Artificial Sequence; identical to SEQ ID NO: 208401
  derived and/or modified CDS sequence (opt5) from neuraminidase__InfluenzaA__ACC61967

SEQ ID NO: 208468 - RNA, 1413 nt, Artificial Sequence
  derived and/or modified CDS sequence (opt5) from neuraminidase__InfluenzaA__ACD11077
augaaccccaaucagaagaucauuaccaucggcagcauuugcauggccaucgggauuaucucccugauccuccaaauuggaaacaucauuucuaucugggugagccacuccauucagacaggcucucagaaucauacggggaucuguaaccagagaauuaucaccuacgagaauagcacaugggucaaccaaaccuauguuaauaucuccaacacaaaugugguggcuggaaaagucaccacaucuaugacccuggccggcaacagcucccuuugcccuauucgggggugggcgaucuacagcaaggacaauucuauucgcaucggauccaaaggcgauguguucguuauuagagaaccguuuaucagcuguucucaccuggagugccggacguucuuucucacccagggcgcucugcuuaacgacaagcauuccaaugggacagugaaagaucgcagccccuauagagcccugaugucuuguccuaucggagaagcccccuccccuuacaacagccgguucgaguccgucgcuuggucugccagcgcuugccacgacggcaugggguggcucaccauuggaaucuccggccccgaugacggggccguggcgguucugaaguauaauggaauuaucacagaaaccauuaagagcuggcgcaaacagauccugagaacgcaggagucugagugugugugcgucaacggcuccuguuuuacaaucaugaccgauggcccuagcgacgggccggccucuuaccggauuuucaagaucgaaaaaggaaagauuacaaaaagcaucgagcucgaugcucccaacucccauuaugaagagugcucuuguuacccugacaccggcaccgugaugugcgugugccgcgauaauuggcacgggagcaacagacccugggucuccuuuaaucaaaaccuggacuaccagauuggauauaucuguagcggcguuuucggggauaauccucggcccaaggacggaaagggcucuugcgacccggugaacguggauggcgccgacggggucaaaggauuuuccuaccgcuauggcaaugggguguggauuggaagaacaaagagcaacaauucucggaaaggcuucgagaugaucugggauccuaacggguggacggacaccgauuccaauuuucuuguuaagcaggacguggucgcuaugacagauuggagcggcuacuccggaucuuucgugcagcaccccgaacugaccggccucgacuguaugcgcccuugcuuuuggguugagcugaucagagggcggcccagagagaaaacaaccauuuggacgagcggauccucuaucagcuucuguggcgugaacuccgauacagucaauuggagcuggcccgacggggccgaacuuccucugaccauugauaaguga

SEQ ID NO: 208469 - RNA, 1413 nt, Artificial Sequence
  derived and/or modified CDS sequence (opt5) from neuraminidase__InfluenzaA__ACD11078
augaaccccaaucagaagaucauuaccaucggcagcauuugcauggccaucgggauuaucucccugauccuccaaauuggaaacaucauuucuaucugggugagccacuccauucagacaggcucucagaaucauacggggaucuguaaccagagaauuaucaccuacgagaauagcacaugggucaaccaaaccuauguuaauaucuccaacacaaaugugguggcuggaaaagacaccacaucuaugacccuggccggcaacagcucccuuugcccuauucgggggugggcgaucuacagcaaggauaauucuauucgcaucggauccaaaggcgacgucuucgugauuagagaaccguuuaucagcuguucucaccuggagugccggacguucuuucucacccagggcgcucugcuuaacgauaagcauuccaaugggacaguuaaagaccgcagccccuauagagcccugaugucuuguccuaucggagaagcccccuccccuuacaacagccgguucgaguccguggcuuggucugccagcgcuugccacgauggcaugggguggcucaccauuggaaucuccggccccgacgauggggccgucgcggugcugaaguauaauggaauuaucacagaaaccauuaagagcuggcgcaaacagauccugagaacgcaggagucugaguguguuugcgugaacggcuccuguuuuacaaucaugaccgacggcccuagcgaugggccggccucuuaccggauuuucaagaucgaaaaaggaaagauuacaaaaagcaucgagcucgacgcucccaacucccauuaugaagagugcucuuguuacccugauaccggcaccgucaugugcgugugccgcgacaauuggcacgggagcaacagacccuggguguccuuuaaucaaaaccuggauuaccagauuggauauaucuguagcggcgucuucggggacaauccucggcccaaggacggaaagggcucuugcgauccgguuaacguggacggcgccgauggggugaaaggauuuuccuaccgcuauggcaauggggucuggauuggaagaacaaagagcaacucuucccggaaaggcuucgagaugaucugggacccuaauggguggacggauaccgacagcaacuuucuugugaagcaggauguuguggcuaugacagacugguccggcuacucuggcagcuucguccagcaccccgaacugaccggacucgauuguaugcgcccuugcuuuuggguggagcugaucagagggcggcccagagagaaaacaaccauuuggacguccggaucuagcaucuccuucuguggcguuaauagcgacacagugaacuggucuuggcccgauggggccgaacuuccucugaccauugacaaguga

SEQ ID NO: 208470 - RNA, 1413 nt, Artificial Sequence
  derived and/or modified CDS sequence (opt5) from neuraminidase__InfluenzaA__ACD11079
augaaccccaaucagaagaucauuaccaucggcagcauuugcauggccaucgggauuaucucccugauccuccaaauuggaaacaucauuucuaucugggugagccacuccauucagacaggcucucagaaucauacggggaucuguaaccagagaauuaucaccuacgagaauagcacaugggucaaccaaaccuauguuaauaucuccaacacaaaugugguggcuggaaaagacaccacaucuaugacccuggccggcaacagcucccuuugcccuauucgggggugggcgaucuacagcaaggauaauucuauucgcaucggauccaaaggcgacgucuucgugauuagagaaccguuuaucagcuguucucaccuggagugccggacguucuuucucacccagggcgcucugcuuaacgauaagcauuccaaugggacaguuaaagaccgcagccccuauagagcccugaugucuuguccuaucggagaagcccccuccccuuacaacagccgguucgaguccguggcuuggucugccagcgcuugccacgauggcaugggguggcucaccauuggaaucuccggccccgacgauggggccgucgcggugauuaaguauaauggaaucauuacagaaaccaucaagagcuggcgcaaacagauccugagaacgcaggagucugaguguguuugcgugaacggcuccuguuuuacaauuaugaccgacggcccuagcgaugggccggccucuuaccggaucuucaagauugaaaaaggaaagaucacaaaaagcauugagcuggacgcucccaacucccauuaugaagagugcucuuguuacccugauaccggcaccgucaugugcgugugccgcgacaauuggcacgggagcaacagacccuggguguccuuuaaucaaaaccucgauuaccagaucggauauauuuguagcggcgucuucggggacaauccucggcccaaggacggaaagggcucuugcgauccgguuaacguggacggcgccgauggggugaaaggauuuuccuaccgcuauggcaauggggucuggaucggaagaacaaagagcaacucuucccggaaaggcuucgagaugaucugggacccuaauggguggacggauaccgacagcaacuuucuggugaagcaggauguuguggcuaugacagacugguccggcuacucuggcagcuucguccagcaccccgaacuuaccggacuggauuguaugcgcccuugcuuuuggguggagcucauuagagggcggcccagagagaaaacaaccaucuggacguccggaucuagcauuuccuucuguggcguuaauagcgacacagugaacuggucuuggcccgauggggccgaacugccucuuaccaucgacaaguga

SEQ ID NO: 208471 - RNA, 1413 nt, Artificial Sequence; identical to SEQ ID NO: 208102
  derived and/or modified CDS sequence (opt5) from neuraminidase__InfluenzaA__ACD56116

SEQ ID NO: 208472 - RNA, 1413 nt, Artificial Sequence; identical to SEQ ID NO: 208102
  derived and/or modified CDS sequence (opt5) from neuraminidase__InfluenzaA__ACD56127

SEQ ID NO: 208473 - RNA, 1410 nt, Artificial Sequence; identical to SEQ ID NO: 207956
  derived and/or modified CDS sequence (opt5) from neuraminidase__InfluenzaA__ACD56261

SEQ ID NO: 208474 - RNA, 1410 nt, Artificial Sequence
  derived and/or modified CDS sequence (opt5) from neuraminidase__InfluenzaA__ACD56272
augaaccccaaucagaagaucauuaccaucggcagcgugucccugacaauuucuacgaucugcuucuuuaugcaaauugccauccucaucaccacagucacccugcacuucaaacaguacgaguuuagcuccccuccgaacaaucagguuaugcuuugugaacccacaauuaucgagagaaacauuaccgaaaucguguaucugacaaauaccacgauugagaaggaaaucugcccuaaacucgcugaguaccggaacuggucuaagccccagugugacauuaccggguucgccccuuuuagcaaagauaauuccauccgccugucugcgggaggcgacaucugggugacaagagagcccuaugucagcugcgauccugacaaguguuaccaauucgcucuugggcagggaaccacacugaacaaugugcauuccaacgauaccguucacgaccggacgccguaucgcacacuccugaugaaugaacugggcgugcccuuucaucucgggaccaagcaggucugcauugccuggucuagcuccagcugucacgauggaaaagccuggcugcaugugugcguuacaggcgacgauaagaacgcuaccgccucuuucaucuacaauggcagacuuguggacuccauugucagcuggucuaaagagauccugcggacccaggaauccgagugugugugcauuaacgggacauguacgguggucaugaccgauggaagcgcuuccggcaaggccgacacaaaaauccucuuuaucgaggaagggaagauuguucacaccucuacacugagcggauccgcgcaacacguggaggaaugcagcugcuauccucgcuaccccggcgugagaugugucugccgggauaauuggaaggggucuaaccgcccuaucguggacauuaacaucaaagacuacuccauuguuagcagauauguguguucuggacuugucggcgauacgccccggaagaaugacagcuccucuagcucccauugccuggauccgaacaaugaggaaggcgggcacggagugaaaggcugggccuucgacgaugggaacgacguuuggaugggacgcaccaucagcgagaagucuagauccggcuacgagacauuuaaagugaucgaaggguggagcaauccuaacucuaagcuccagauuaaucggcaggucaucguggaucgcggaaacagauccggcuauagcggcauuuucuccgucgaggggaaaucuuguaucaaucggugcuuuuacguggaacugauuagaggacgcaaggaggaaaccgagguucuguggaccagcaacuccaucguggucuucuguggcacaucugggaccuauggaacaggcagcuggcccgacggggcugauauuaaucucaugccuaucuga

SEQ ID NO: 208475 - RNA, 1413 nt, Artificial Sequence
  derived and/or modified CDS sequence (opt5) from neuraminidase__InfluenzaA__ACD56283
augaaccccaaucagaagaucauuaccaucggcagcauuuccauggccaucgggauuaucucucugaugcuccaaaucggaaacauuaucagcauuugggcuucccacucuauccagacaggcagccagaaucauacggggauuugcaaccagagaaucauuaccuacgagaauagcacaugggugaaccacaccuaugucucuaucaauaacacaaauguuguggccggaaaagacaagaccagcgugacacuggcgggcaacuccagccuuuguucuaucuccgggugggcuauuuacaccaaagauaauagcauccggauuggaucuaagggcgacgucuucgugauccgcgaaccuuuuauuuccugcagccaucuggaguguagaacguucuuucucacccaaggcgcccugcuuaacgauaaacacucuaaugggacaguuaaggaccgguccccguaucgcgcccugaugagcugcccccucggagaagcuccuucccccuacaacucuaaguucgagagcguggccugguccgcuagcgccugucaugauggcaugggguggcugaccaucggaaucucuggcccugacaauggggcggucgccgugcugaaauauaacggaauuaucacagaaaccauuaaguccuggaaaaagagaauccuccggacgcaggagagcgagugcguuugugugaacggcucuugcuuuacaauuaugaccgauggccccagcaauggggcugccuccuacaaaaucuucaagaucgaaaagggaaaagucacaaagucuauugagcugaacgcuccuaauuuucacuaugaagaguguagcugcuacccggacaccggcaccgugaugugugugugccgcgauaacuggcacggguccaauagacccugggucagcuucaaccagaaucuugacuaccagaucggauauauuugcucuggcguuuuuggggauaacccucggcccaaagacggaaagggcuccuguaauccugugacaguggauggcgccgacggggucaaaggauucagcuacaaguauggcaacgggguguggaucggacgcacgaaaucuaauagacugcggaagggcuuugagaugauuugggaccccaacggguggaccgauacagacuccgauuucagcguuaagcaagacguggucgcgaucaccgauugguccggcuacucuggauccuuugugcagcauccggaacucacaggccuggacugcauucgcccuuguuucuggguugagcuugugagagggcugccccgggaaaauaccacgaucuggacauccggaucuagcaucuccuucugcggcgucgauagcgacaccgccaacuggucuuggccugauggggcugagcuccccuuuaccauugacaaauga

SEQ ID NO: 208476 - RNA, 1410 nt, Artificial Sequence
  derived and/or modified CDS sequence (opt5) from neuraminidase__InfluenzaA__ACD56305
augaaccccaaucagaagaucauuaccaucggcagcgugucccugacaauugccacggucugcuuccucaugcaaaucgcuauucugguuaccacagugacccuucacuuuaaacagcaugagugugacucuccugccagcaaccaggugaugccgugcgaacccaucaucauugagagaaauaucacagaaauugucuaccugaacaauaccacaaucgagaaggaaauuuguccugaggugguugaguaucggaacugguccaaaccccagugccaaaucaccggguucgcgccuuuuucuaaggauaauagcauucgccucuccgcuggaggcgacaucugggugacgagagaacccuacgucucuugugauccugggaaaugcuaucaguucgcccugggacagggcaccacacuugacaacaagcacagcaaugauaccauccaugaccggauuccgcaccgcacacugcucaugaacgagcugggggugcccuuucaucugggaaccagacagguuuguguggccugguccucuagcuccugccacgauggcaaggcuuggcuccacgucugugugacgggcgacgauaaaaaugccacagcuagcuucaucuacgacgggcggcugguggauucuauuggauccuggagccaaaacauccuucgcacccaggaaucugagugcgucuguauuaauggcacaugcaccguugugaugaccgacggguccgccagcggcagagcggauacacggauccuguuuaucgaggaaggaaagauugugcauaucuccccucucucugggagcgcccagcacgucgaggaaugcuccuguuauccccgcuacccugacgugagaugcauuugucgggacaacuggaaaggaagcaaucgccccguuaucgauauuaacauggaggacuauucuaucgauuccagcuacgugugcucuggccuggucggcgacacgccgagaaacgaugaccggagcuccaauucuaacugucgcgauccuaauaacgaaagagggaaucccggagugaagggcugggcuuucgacaacggggaugacguuuggaugggacggaccaucagcaaagaucuuagauccggcuacgagacauuuaaggugauugggggauggagcaccccuaauucuaagucccagaucaaccgccaagucauuguggacagcaauaacuggucuggcuauuccggcaucuucagcgucgaggggaaauccugcauuaaucgguguuuuuacguggaacugaucagaggacgccagcaggagacacggguuugguggaccucuaacagcauuguggucuucugcggcacguccgggacauauggaaccggcucuuggcccgacggggccaauaucaacuuuaugcccaucuga

SEQ ID NO: 208477 - RNA, 1410 nt, Artificial Sequence
  derived and/or modified CDS sequence (opt5) from neuraminidase__InfluenzaA__ACD56316
augaaccccaaucagaagaucauuaccaucggcagcgugucccugacaauugccacggucugcuuccucaugcaaaucgcuauucugguuaccacagugacccuucacuuuaaacagcaugagugugacucuccugccagcaaccaggugaugccgugcgaacccaucaucauugagagaaauaucacagaaauugucuaccugaacaauaccacaaucgagaaggaaauuuguccugaggugguugaguaucggaacugguccaaaccccagugccaaaucaccggguucgcgccuuuuucuaaggauaauagcauucgccucuccgcuggaggcgacaucugggugacgagagaacccuacgucucuugugauccugggaaaugcuaucaguucgcccugggacagggcaccacacuugacaacaagcacagcaaugauaccauccaugaccggauuccgcaccgcacacugcucaugaacgagcugggggugcccuuucaucugggaaccagacagguuuguguggccugguccucuagcuccugccacgauggcaaggcuuggcuccacgucugugugacgggcgacgauaaaaaugccacagcuagcuucaucuacgacgggcggcugauggauucuauuggauccuggagccaaaacauccuucgcacccaggaaucugagugcguguguauuaauggcacaugcaccgucguuaugaccgacggguccgccagcggcagagcggauacacggauccuguuuaucgaggaaggaaagauugugcauaucuccccucucucugggagcgcccagcacguggaggaaugcuccuguuauccccgcuacccugacgucagaugcauuugucgggacaacuggaaaggaagcaaucgccccgugaucgauauuaacauggaggacuauucuaucgauuccagcuacguuugcucuggccuggugggcgacacgccgagaaacgaugaccggagcuccaauucuaacugucgcaauccuaacaaugaaagagggaaccccggagucaagggcugggcuuucgauaauggggacgauguguggaugggacggaccaucagcaaagaccuuagauccggcuacgagacauuuaagguuauugggggauggagcaccccuaacucuaagucccagaucaaucgccaagugauugucgauagcaacaauuggucuggcuauuccggcaucuucagcguggaggggaaacggugcauuaacagauguuuuuacgucgaacugauccgcggacggcagcaggagacaagagugugguggaccuccaauucuauuguuguguucugcggcacgagcgggacauauggaaccggcuccuggcccgacggggccaacaucaauuuuaugcccaucuga

SEQ ID NO: 208478 - RNA, 1410 nt, Artificial Sequence
  derived and/or modified CDS sequence (opt5) from neuraminidase__InfluenzaA__ACD56327
augaaccccaaucagaagaucauuaccaucggcagcgugucccugacaauugccacggucugcuuccucaugcaaaucgcuauucuggccaccacaguuacccuucacuuuaaacagcaugagugugacucuccugcgagcaaccaggugaugccgugcgaacccaucaucauugagagaaauaucacagaaauuguguaccugaacaauaccacaaucgagaaggaaauuuguccugaggucguggaguaucggaacugguccaaaccccagugccaaaucaccggguucgcuccuuuuucuaaggauaauagcauucgccucuccgccggaggcgacaucuggguuacgagagaacccuacgugucuugugauccuagcaaaugccaccaguucgcccuggggcagggaaccacacuugagaacaagcauuccaauggcaccaagcacgaccggaucccgcaucgcacacugcucaugaacgaacuggggguccccuuucaccugggaaccaaacagguguguguugcuuggucuagcuccagcugccacgauggcaaggccuggcuccaugugugugucacgggcgacgauagaaaugcuacagccucuuucauuuaugggggacggcugguggacuccaucgugagcuggucucaaaacauucuucgcacccaggaguccgagugcgucuguaucaauggcacaugcaccguugugaugaccgaugggagcgcguccggcagagccgacacacggauucuguuuaucaaagaaggaaagaucgugcacauuucuccucucagcggguccgcucagcauaucgaggaaugcagcuguuacccccgcuauccugaugucagaugcauuugucgggacaacuggaaaggaucuaaucgccccgugaucgauauuaacauggaggacuacuccaucgacagcucuuauguuugcagcggccuggugggcgauacgccgagaaacgacgauuccucuagcaauuccaacugucgggacccuaauaacgaacgcgggaaucccggagucaagggcugggccuucgauaacggggacgauguguggaugggaagaaccaucagcaaggacucucgguccggcuacgagacauuuaaaguuauugggggauggagcaccccuaauucuaagucccaggugaacagacaagucaucguggauagcaauaacugguccggcuacucuggcauuuucagcgucgaggggaaauccugcaucaaucgcuguuuuuauguggaacuuauucggggaagaccccaggagacacgcguuugguggaccucuaacagcaucguggucuucugcggcacguccgggacauacggaaccggcagcuggcccgacggggcuaauauuaacuuuaugccuaucuga

SEQ ID NO: 208479 - RNA, 1410 nt, Artificial Sequence
  derived and/or modified CDS sequence (opt5) from neuraminidase__InfluenzaA__ACD85190
augaaccccaaucagaagaucauuaccaucggcagcgugucccugacaauugccacggucugcuuccucaugcaaaucgcuauucugguuaccacagugacccuucacuuuaaacagcaugagugugacucuccugccagcaaccaggugaugccgugcgaacccaucaucauugagagaaauaucacagaaauugucuaccugaacaauaccacaaucgagaaggaaauuuguccuaaagugguugaguaucggaacugguccaagccccagugccaaaucaccggguucgcgccuuuuucuaaagauaauagcauucgccucuccgcuggaggcgacaucugggugacgagagagcccuacgucucuugugauccugggaagugcuaucaguucgcccugggacagggcaccacacuugacaacaagcacagcaaugauaccauccaugaccggauuccgcaccgcacacugcucaugaacgaacugggggugcccuuucaucugggaaccagacagguuuguaucgccugguccucuagcuccugccacgauggcaaggcuuggcuccacgugugugucacgggcgacgauaaaaaugccacagcuagcuucauuuacgacgggcggcugguggauucuaucggauccuggagccaaaacauucuucgcacccaggagucugaaugcguguguaucaauggcacaugcaccgucguuaugaccgacggguccgccagcggcagagcggauacacggauccuguuuauugaggagggaaaaaucgugcauauuuccccucucucugggagcgcccagcacguggaagagugcuccuguuauccccgcuacccugacgucagaugcaucugucgggacaacuggaagggaagcaaucgccccauuaucgauaucaacauggaagacuauucuauugauuccagcuacgugugcucuggccugguuggcgacacgccgagaaacgaugaccggagcuccaauucuaacugucgcaauccuaacaaugagagagggaaccccggagugaaaggcugggcuuucgauaauggggacgaugucuggaugggacggaccaucagcaaggaccuuagauccggcuacgaaacauuuaaggugauugggggauggagcaccccuaacucuaaaucccagaucaaucgccaaguuauuguggauagcaacaauuggucuggcuauuccggcaucuucagcgucgaggggaaguccugcauuaaccgguguuuuuacguggagcugaucagaggacgccagcaggaaacacgggucugguggaccucuaauagcaucgugguuuucugcggcacguccgggacauauggaaccggcucuuggcccgacggggccaacauuaauuuuaugcccaucuga

SEQ ID NO: 208480 - RNA, 1410 nt, Artificial Sequence
  derived and/or modified CDS sequence (opt5) from neuraminidase__InfluenzaA__ACD85201
augaaccccaaucagaagaucauuaccaucggcagcgugucccugacaauugccacggucugcuuccucaugcaaaucgcuauucugguuaccacagugacccuucacuuuaaacagcaugagugugacucuccugccagcaaccaggugaugccgugcgaacccaucaucauugagagaaauaucacagaaauugucuaccugaacaauaccacaaucgagaaggaaauuuguccuaaagugguugaguaucggaacugguccaagccccagugccaaaucaccggguucgcgccuuuuucuaaagauaauagcauucgccucuccgcuggaggcgacaucugggugacgagagagcccuacgucucuugugauccugggaagugcuaucaguucgcccugggacagggcaccacacuugacaacaagcacagcaaugauaccauccaugaccggauuccgcaccgcacacugcucaugaacgaacugggggugcccuuucaucugggaaccagacagguuuguaucgccugguccucuagcuccugccacgauggcaaggcuuggcuccacgugugugucacgggcgacgauaaaaaugccacagcuagcuucauuuacgacgggcggcugguggauucuaucuccagcuggucucaaaacauucuucgcacccaggaguccgaaugcguguguaucaauggaacaugcaccgucguuaugaccgacggcagcgccuccgggagagcggauacacggauccuguuuauugaggagggaaaaaucgugcauauuucuccucucagcggcuccgcccagcacguggaagagugcagcuguuauccccgcuacccugacgucagaugcaucugucgggacaacuggaaggggucuaaucgccccgugauugauaucaacauggaagacuauuccaucgauagcucuuacguuugcagcggacuggugggcgacacgccgagaaacgaugaccgguccucuaauagcaacugucgcaauccuaacaaugagagaggcaaccccggggucaaaggaugggcuuucgauaauggcgacgauguguggauggggcggaccauuuccaaggaccuuagaagcggauacgaaacauuuaagguuaucggcggguggucuaccccuaacuccaaaagccagauuaaucgccaagugaucgucgauucuaacaauugguccggauauagcggcauuuucuccguggagggcaagucuugcaucaaccgguguuuuuacgucgagcugauuagagggcgccagcaggaaacacgggugugguggaccagcaauuccaucguuguguucugcggaacgucuggcacauaugggaccggaagcuggcccgacggcgccaacaucaauuuuaugcccauuuga

SEQ ID NO: 208481 - RNA, 1410 nt, Artificial Sequence
  derived and/or modified CDS sequence (opt5) from neuraminidase__InfluenzaA__ACD85212
augaaccccaaucagaagaucauuaccaucggcagcgugucccugacaauugccacggucugcuuccucaugcaaaucgcuauucuggccaccacaguuacccuucacuuuaaacagcaugagugugacucuccugcgagcaaccaggugaugccgugcgaacccaucaucauugagagaaauaucaaggaaauuguguaccugaacaauacaaccaucgagaaagaaauuuguccugaggucguggaguaucggaacugguccaagccccagugccaaaucacaggguucgcuccuuuuucuaaagauaauagcauucgccucuccgccggaggcgacaucuggguuaccagagaacccuacgugucuugugauccugggaagugcuaucaguucgcccugggacagggcacgacccuugacaacaagcacagcaaugggacaauccaugaucggauuccgcaccgcacccugcucaugaacgagcugggaguccccuuucaucugggcacaaaacagguguguguugcuugguccucuagcuccugccacgacggcaaggccuggcuccacgugugugucaccggggaugacagaaaugcuacggccagcuucaucuacgauggacggcugguggacucuauuggcuccuggagccaaaacauccuucgcacacaggaaucugagugcguguguauuaaugggaccugcacagucguuaugaccgauggauccgcgagcggcagagccgacacccggauccuguuuaucaaagaggggaagauugugcauaucuccccucucucuggaagcgcucagcacauugaagagugcuccuguuauccccgcuacccugaugugagaugcaucugucgggacaacuggaaaggcagcaaucgccccgucauugacaucaacauggaagauuauucuaucgacuccagcuacgugugcucuggccugguuggggauacaccgagaaacgacgauagcuccucuaauagcaacugucgggacccuaauaacgagcgcggaaaucccggcgugaaggggugggccuucgauaacggagacgaugucuggaugggcagaacgauuaauaaggacucccggagcggguacgaaaccuuuaaagugaucggaggcuggucuacaccuaacuccaagagccagguuaauagacaagugauugucgauaacaauaacuggucuggcuauuccgggaucuucagcguggagggaaaauccugcauuaaucgcuguuuuuacgucgagcuuauccggggcagaccccaggaaacccgcgugugguggacaucuaacagcauuguuguguucugcgggaccuccggaacguauggcacagggucuuggcccgacggcgcuaauaucaacuuuaugccuaucuga

SEQ ID NO: 208482 - RNA, 1410 nt, Artificial Sequence
  derived and/or modified CDS sequence (opt5) from neuraminidase__InfluenzaA__ACD85223
augaaccccaaucagaagaucauuaccaucggcagcgugucccugacaauugccacggcuugcuuccucaugcaaaucgccauucuggucaccacaguuacccuucacuuuaaacagcaugagugugacucuccugcgagcaaccaggugaugccgugcgaacccaucaucauugagagaaauaucacagaaauuguguaccugaacaauaccacaaucgagaaggaaauuuguccuaaagucguggaguaucggaacugguccaagccccagugccaaaucaccggguucgcuccuuuuucuaaagauaauagcauucgccucuccgccggaggcgacaucuggguuacgagagagcccuacgugucuugugauccugggaagugcuaucaguucgcccugggacagggcaccacacuugacaacaagcacagcaaugauaccauccaugaccggauuccgcaccgcacacugcucaugaacgaacuggggguccccuuucaucugggaaccagacagguguguaucgcuugguccucuagcuccugccacgauggcaaagccuggcuccacguuugugugacgggcgacgauaagaaugcuacagccagcuucauuuacgacgggcggcuggucgauucuaucggauccuggagccaaaacauucuucgcacccaggagucugaaugcguguguaucaauggcacaugcaccguggucaugaccgacggguccgcgagcggcagagccgauacacggauccuguuuauugaggagggaaaaaucguucauauuuccccucucucugggagcgcucagcacguggaagagugcuccuguuauccccgcuacccugacgugagaugcaucugucgggacaacuggaagggaagcaaucgccccauuaucgauaucaacauggaagacuauucuauugauuccagcuacgucugcucuggccuggugggcgacacgccgagaaacgaugaccggagcuccaauucuaacugucgcaauccuaacaaugagagagggaaccccggaguuaaaggcugggccuucgauaauggggacgauguguggaugggacggaccaucagcaaggaccuuagauccggcuacgaaacauuuaaggucauugggggauggagcaccccuaacucuaaaucccagaucaaucgccaagugauuguugauagcaacaauuggucuggcuauuccggcaucuucagcguggaggggaaguccugcauuaaccgguguuuuuacgucgagcugaucagaggacgccagcaggaaacacgggugugguggaccucuaauagcaucgucguguucugcggcacguccgggacauauggaaccggcucuuggcccgacggggcuaacauuaauuuuaugcccaucuga

SEQ ID NO: 208483 - RNA, 1410 nt, Artificial Sequence
  derived and/or modified CDS sequence (opt5) from neuraminidase__InfluenzaA__ACD85234
augaaccccaaucagaagaucauuaccaucggcagcgugucccugacaauugccacggucugcuuccucaugcaaaucgcuauucuggccaccacaguuacccuucacuuuaaacagcaugagugugacucuccugcgagcaaccaggugaugccgugcgaacccaucaucauugagagaaauaucacagaaauuguguaccugaacaauaccacaaucgagaaggaaauuuguccugaggucguggaguaucggaacugguccaaaccccagugccaaaucaccggguucgcuccuuuuucuaaggauaauagcauucgccucuccgccgacggagauaucuggguuacgagagaacccuacgugucuugugacccuggcaaaugcuaucaguucgcccuggggcagggaaccacacuugauaacaagcacagcaauggcaccauccaugaccggauuccgcaccgcacacugcucaugaacgagcuggggguccccuuucaucugggaaccaaacagguguguguugcuugguccucuagcuccugccacgauggcaaggccuggcuccacgugugugucacgggcgacgauagaaaugcuacagccagcuucaucuacgacgggcggcugguggauucuauuggauccuggagccaaaacauccuucgcacccaggaaucugagugcguguguauuaauggcacaugcaccgucguuaugaccgacggguccgcgagcggcagagccgauacacggauccuguuuaucaaggagggaaaaauugugcauaucuccccucucucugggagcgcucagcacauugaagagugcuccuguuauccccgcuacccugacgugagaugcaucugucgggacaacuggaagggaagcaaucgccccgucauugauaucaacauggaagacuauucuaucgauuccagcuacgugugcucuggccugguuggcgacacgccgagaaacgaugacagcuccucuaauagcaacugucgggauccuaauaacgagcgcgggaaucccggagugaaaggcugggccuucgacaacggggaugacgucuggaugggaagaaccauuuccaaggaucuucggagcggcuacgaaacauuuaaggugaucgggggauggucuaccccuaauuccaaaagccagguuaacagacaagugauugucgacaauaacaauuggucuggcuauuccggcaucuucagcguggaggggaaguccugcauuaaccgcuguuuuuacgucgagcugauccggggaagaccccaggaaacacgcgugugguggaccucuaauagcauuguuguguucugcggcacguccgggacauauggaaccggcucuuggcccgacggggcuaacaucaauuuuaugccuaucuga

SEQ ID NO: 208484 - RNA, 1410 nt, Artificial Sequence
  derived and/or modified CDS sequence (opt5) from neuraminidase__InfluenzaA__ACD85245
augaaccccaaucagaagaucauuaccaucggcagcgugucccugauuaucgccacagucugcuuccucaugcaaauugcuauccugguuacgaccgugacacuucacuuuaaacagcaugagugugacucuccugccagcaaccaggugaugccgugcgaacccaucauuaucgagagaaauauuaccgaaaucgucuaccugaacaauacaaccauugagaaggaaaucuguccucgggugguugaguaucgcaacugguccaaaccccagugccaaauuacaggguucgcgccuuuuucuaaggauaauagcaucagacucuccgcuggaggcgacaucugggugacccgggagcccuacgucucuugugauccugggaaaugcuaucaguucgcccugggacagggcacgacccuugacaacaagcacagcaaugauacaauucaugaccgcaucccgcacagaacccugcucaugaacgaacugggggugcccuuucaucugggaacacggcagguuuguauugccugguccucuagcuccugccacgauggcaaggcuuggcuccacguguguaucaccggcgacgauaaaaaugccacggcuagcuucauuuacgacgggcgccuggucgauucuaucggauccuggagccaaaacauccuuagaacacaggagucugaaugcguguguauuaaugggaccugcacaguggucaugaccgacggcuccgccagcggacgggcggauacccgcauccuguuuauugaggagggcaagaucguucauauuuccccucucucugggagcgcccagcacguggaagagugcuccuguuaucccagauacccuggagugcggugcaucugucgcgacaacuggaaaggcagcaauagacccgucguggacaucaacauggaagauuauucuauugacuccagcuacguuugcucuggccuggugggggauacaccgcggaacgacgaucgcagcuccaauucuaacuguagaaauccuaacaaugagcggggaaaccagggcgucaaggggugggcuuucgacaauggagaugacguguggaugggcagaacgaucagcaaagaucuucgcuccggguacgaaaccuuuaagguuauuggaggcuggagcacacccaacucuaagucccaaaucaauagacaggugauugucgacagcgaugaccggucuggcuauuccgggaucuucagcguggagggaaaauccugcauuaaccgcuguuuuuacgucgagcugauccggggcagaaagcaggaaacccgcgugugguggacaucuaauagcaucguuguguucugcgggaccuccggaacguauggcacagggucuuggccugacggcgccaacauuaauuuuaugcccaucuga

SEQ ID NO: 208485 - RNA, 1410 nt, Artificial Sequence
  derived and/or modified CDS sequence (opt5) from neuraminidase__InfluenzaA__ACD85454
augaaccccaaucagaagaucauuaccaucggcagcgugucccugacaauuucuacgaucggguucuuuaugcaaaccgccauucucaucacaaccgucacacugcacuucaaacaguacgaguuuaacagcccuccgaauaaccagguuaugcuuugcgaacccaccaucauugagagaaauaucacagaaauuguguaucugaccaacacgaccaucgagaaggaaauuuguccuaaacucgcugaguaccggaauugguccaagccccagugcgacaucacaggauucgccccuuuuucuaaagauaacagcauucgccuguccgcgggcggggacaucugggugaccagagagcccuaugucucuugugauccugacaagugcuaccaauucgcucuuggacagggcacaacccugaauaacgugcauagcaaugauacgguucggaaccgcacaccguauagaacccuccugaugaaugaacugggggugcccuuucaccucggaacaaagcaggucuguaucgccugguccucuagcuccugccaugacggcaaagccuggcugcacguguguauuaccggcgaugacaagaacgcuaccgccagcuucaucuacaaugggcggcuuguugauucuauuguguccuggagcaaagagauccugcgcacacaggaaucugagugcgucuguauuaacggaacgugcaccguggugaugacagacggcuccgcuagcgggaaggccgauaccaaaauccucuuuaucgaggaaggaaagauuguccauacauccacccugucuggcagcgcgcaacacguugaggaauguuccugcuauccuagauaccccggggugcggugcgugugucgcgacaacuggaagggaagcaauagaccuaucgucgauauuaacaucaaagaccacucuauuguguccagcuacguuugcucuggccuugugggcgacacgccccggaagaaugauagcuccucuagcucccauugucuggacccgaacaaugaggaagggggacacggcgucaaagggugggccuucgaugacggaaacgauguguggaugggccgcacaaucagcgagaagucuagacucggguaugagaccuuuaaaguuaucgaaggaugguccaauccuaagagcaaacugcagauuaaccgccaggugaucgucgaccggggcaauagaucuggcuacuccgggauuuucagcguggagggaaaguccugcaucaaccgguguuuuuaugucgaacugauuagaggccgcaaggaggaaaccgaggugcucuggacaucuaauagcaucguuguguucugcgggaccuccggaacauacggcacggggucuuggcccgauggcgcugacauuaaccugaugccuaucuga

SEQ ID NO: 208486 - RNA, 1410 nt, Artificial Sequence
  derived and/or modified CDS sequence (opt5) from neuraminidase__InfluenzaA__ACD85465
augaaccccaaucagaagaucauuaccaucggcagcgugucccugacaauuucuacgaucggguucuuuaugcaaaccgccauucucaucacaaccgucacacugcacuucaaacaguacgaguuuaacagcccuccgaauaaccagguuaugcuuugcgaacccaccaucauugagagaaauaucacagaaauuguguaucugaccaacacgaccaucgagaaggaaauuuguccuaaacucgcugaguaccggaauugguccaagccccagugcgacaucacaggauucgccccuuuuucuaaagauaacagcauucgccuguccgcgggcggggacaucugggugaccagagagcccuaugucucuugugauccugacaagugcuaccaauucgcucuuggacagggcacaacccugaauaacgugcauagcaaugauacgguucgggaccgcacaccguauagaacccuccugaugaacgaacugggggugcccuuucaccucggaacaaagcaggucuguaucgccugguccucuagcuccugccaugauggcaaagccuggcugcacguguguauuaccggcgacgauaagaaugcuaccgccagcuucaucuacaacgggcggcuuguugacucuauuguguccuggagcaaagagauccugcgcacacaggaaucugagugcgucuguauuaauggaacgugcaccguggugaugacagauggcuccgcuagcgggaaggccgacaccaaaauccucuuuaucgaggaaggaaagauuguccauacauccacccugucuggcagcgcgcaacacguugaggaauguuccugcuauccuagauaccccggggugcggugcgugugucgcgauaacuggaagggaagcaacagaccuaucgucgacauuaauaucaaagaccacucuauuguguccagcuacguuugcucuggccuugugggcgauacgccccggaagaacgacagcuccucuagcucccauugucuggauccgaauaacgaggaagggggacacggcgucaaagggugggccuucgacgauggaaaugacguguggaugggccgcacaaucagcgagaagucuagacucggguaugagaccuuuaaaguuaucgaaggaugguccaacccuaagagcaaacugcagauuaaucgccaggugaucgucgaucggggcaacagaucuggcuacuccgggauuuucagcguggagggaaaguccugcaucaaucgguguuuuuaugucgaacugauuagaggccgcaaggaggaaaccgaggugcucuggacaucuaacagcaucguuguguucugcgggaccuccggaacauacggcacggggucuuggcccgacggcgcugauauuaaucugaugccuaucuga

SEQ ID NO: 208487 - RNA, 1410 nt, Artificial Sequence
  derived and/or modified CDS sequence (opt5) from neuraminidase__InfluenzaA__ACD85487
augaaccccaaucagaagaucauuaccaucggcagcgugucccugauuaucucuacaauuugcuucuuuaugcaaacggccauccucaucaccacagucacccugcacuucaaacaguacgaguuuaacagcccuccgaauaaccagguuaugcuuugugaacccacaauuaucgagagaaauauuaccgaaaucguguaucugacaaacaccacgauugagaaggaaaucugcccuaaacucgcugaguaccggaauugguccaagccccagugugacauuaccggguucgccccuuuuucuaaagauaacagcauccgccuguccgcgggaggcgacaucugggugacaagagagcccuaugucucuugcgauccugacaaguguuaccaauucgcucuugggcagggaaccacacugaauaacgugcauagcaaugauaccguucggaaccgcacgccguauagaacacuccugaugaaugaacugggcgugcccuuucaccucgggaccaagcaggucugcauugccugguccucuagcuccugucaugacggaaaagccuggcugcacgugugcaucacaggcgaugacaagaacgcuaccgccagcuucauuuacaauggccggcuuguugauucuaucguguccuggagcaaagagauucugcgcacccaggaaucugagugugucugcaucaacgggacauguacgguggugaugaccgacggauccgcuagcggcaaggccgauacaaaaauccucuuuauugaggaagggaagaucguccauaccuccacacugucuggaagcgcgcaacacguugaggaaugcuccugcuauccuagauaccccggcgugcggugugugugccgcgacaacuggaaggggagcaauagaccuauugucgauaucaacauuaaagaccacucuaucguguccagcuacguuuguucuggacuugugggcgacacgccccggaagaaugauagcuccucuagcucccauugccuggacccgaacaaugaggaaggcgggcacggagucaaaggcugggccuucgaugacgggaacgauguguggaugggacgcaccaucagcgagaagucuagacucggcuaugagacauuuaaaguuauugaagggugguccaauccuaacagcaagcugcagaucaaucgccaggugauugucgaccggggaaacagaucuggcuacuccggcaucuucagcguggaggggaaauccuguauuaaucggugcuuuuaugucgaacugaucagaggacgcaaggaggaaaccgaggugcucuggaccucuaacagcauuguuguguucuguggcacauccgggaccuacggaacaggcucuuggcccgauggggcugacaucaaucugaugccuaucuga

SEQ ID NO: 208488 - RNA, 1410 nt, Artificial Sequence
  derived and/or modified CDS sequence (opt5) from neuraminidase__InfluenzaA__ACD85498
augaaccccaaucagaagaucauuaccaucggcagcgugucccugauuaucucuacaauuugcuucuuuaugcaaacggccauccucaucaccacagucacccugcacuucaaacaguacgaguuuaacagcccuccgaauaaccagguuaugcuuugugaacccacaauuaucgagagaaauauuaccgaaaucguguaucugacaaacaccacgauugagaaggaaaucugcccuaaacucgcugaguaccggaauugguccaagccccagugugacauuaccggguucgccccuuuuucuaaagauaacagcauccgccuguccgcgggaggcgacaucugggugacaagagagcccuaugucucuugcgauccugacaaguguuaccaauucgcucuugggcagggaaccacacugaauaacgugcauagcaaugauaccguucgggaccgcacgccguauagaacacuccugaugaacgaacugggcgugcccuuucaccucgggaccaagcaggucugcauugccugguccucuagcuccugucaugauggaaaagccuggcugcacgugugcaucacaggcgacgauaagaaugcuaccgccagcuucauuuacaacggccggcuuguugacucuaucguguccuggagcaaagagauucugcgcacccaggaaucugagugugucugcaucaaugggacauguacgguggugaugaccgauggauccgcuagcggcaaggccgacacaaaaauccucuuuauugaggaagggaagaucguccauaccuccacacugucuggaagcgcgcaacacguugaggaaugcuccugcuauccuagauaccccggcgugcggugugugugccgcgauaacuggaaggggagcaacagaccuauugucgacaucaauauuaaagaccacucuaucguguccagcuacguuuguucuggacuugugggcgauacgccccggaagaacgacagcuccucuagcucccauugccuggauccgaauaacgaggaaggcgggcacggagucaaaggcugggccuucgacgaugggaaugacguguggaugggacgcaccaucagcgagaagucuagacucggcuaugagacauuuaaaguuauugaagggugguccaacccuaagagcaaacugcagaucaaucgccaggugauugucgaucggggaaacagaucuggcuacuccggcaucuucagcguggaggggaaguccuguauuaaucggugcuuuuaugucgaacugaucagaggacgcaaggaggaaaccgaggugcucuggaccucuaacagcauuguuguguucuguggcacauccgggaccuacggaacaggcucuuggcccgacggggcugauaucaaucugaugccuaucuga

SEQ ID NO: 208489 - RNA, 1410 nt, Artificial Sequence
  derived and/or modified CDS sequence (opt5) from neuraminidase__InfluenzaA__ACD85509
augaaccccaaucagaagaucauuaccaucggcagcgugucccugacaauuucuacgaucugcuucuuuaugcaaaccgccauucucaucacaaccgucacacugcacuucaaacaguacgaguuuaacagcccuccgaauaaccagguuaugcuuugugaacccaccaucauugagagaaauaucacagaaauuguguaucugaccaacacgaccaucgagaaggaaauuugcccuaaacucgcugaguaccggaauugguccaagccccagugugacaucacaggguucgccccuuuuucuaaagauaacagcauucgccuguccgcgggaggcgacaucugggugaccagagagcccuaugucucuugcgauccugacaaguguuaccaauucgcucuugggcagggaacaacccugaauaacgugcauagcaaugauacgguucggaaccgcacaccguauagaacccuccugaugaaugaacugggcgugcccuuucaccucgggacaaagcaggucugcaucgccugguccucuagcuccugucaugacggaaaagccuggcugcacgugugcauuaccggcgaugacaagaacgcuaccgccagcuucaucuacaauggccggcuuguugauucuauuguguccuggagcaaagagauccugcgcacacaggaaucugagugugucugcauuaacgggacguguaccguggugaugacagacggauccgcuagcggcaaggccgauaccaaaauccucuuuaucgaggaagggaagauuguccauacauccacccugucuggaagcgcgcaacacguugaggaaugcuccugcuauccuagauaccccggcgugcggugugugugccgcgacaacuggaaggggagcaauagaccuaucgucgauauuaacaucaaagaccacucuauuguguccagcuacguuuguucuggacuugugggcgacacgccccggaagaaugauagcuccucuagcucccauugccuggacccgaacaaugaggaaggcagccgcggggucaaaggaugggccuucgaugacggcaacgauguguggauggggagaacaaucucugagaagucccggcucggauaugagaccuuuaaaguuaucgaaggcuggagcaauccuaagucuaaacugcagauuaaccgccaggugaucgucgacagagggaaucgguccggauacagcggcauuuucuccguggagggcaagucuuguaucaacagaugcuuuuaugucgaacugauucgcgggcggaaggaggaaaccgaggugcucuggacaagcaauuccaucguuguguucuguggaaccucuggcacauacgggacgggaagcuggcccgauggcgcugacauuaaccugaugccuaucuga

SEQ ID NO: 208490 - RNA, 1410 nt, Artificial Sequence
  derived and/or modified CDS sequence (opt5) from neuraminidase__InfluenzaA__ACD85520
augaaccccaaucagaagaucauuaccaucggcagcgugucccugauuaucucuacaauuggguucuuuaugcaaacggccauccucaucaccacagucacccugcacuucaaacaguacgaguuuaacagcccuccgaauaaccagguuaugcuuugcgaacccacaauuaucgagagaaauauuaccgaaaucguguaucugacaaacaccacgauugagaaggaaaucuguccuaaacucgcugaguaccggaauugguccaagccccagugcgacauuaccggauucgccccuuuuucuaaagauaacagcauccgccuguccgcgggcggggacaucugggugacaagagagcccuaugucucuugugauccugacaagugcuaccaauucgcucuuggacagggcaccacacugaauaacgugcauagcaaugauaccguucgggaccgcacgccguauagaacacuccugaugaacgaacugggggugcccuuucaccucggaaccaagcaggucuguauugccugguccucuagcuccugccaugauggcaaagccuggcugcacguguguaucacaggcgacgauaagaaugcuaccgccagcuucauuuacaacgggcggcuuguugacucuaucguguccuggagcaaagagauucugcgcacccaggaaucugagugcgucuguaucaauggaacaugcacgguggugaugaccgauggcuccgcuagcgggaaggccgacacaaaaauccucuuuauugaggaaggaaagaucguccauaccuccacacugucuggcagcgcgcaacacguugaggaauguuccugcuauccuagauaccccggggugcggugcgugugucgcgauaacuggaagggaagcaacagaccuauugucgacaucaauauuaaagaccacucuaucguguccagcuacguuugcucuggccuugugggcgauacgccccggaagaacgacagcuccucuagcucccauugucuggauccgaauaacgaggaagggggacacggcgucaaagggugggccuucgacgauggaaaugacguguggaugggccgcaccaucagcgagaagucuagacucggguaugagacauuuaaaguuauugaaggaugguccaacccuaagagcaaacugcagaucaaucgccaggugauugucgaucggggcaacagaucuggcuacuccgggaucuucagcguggagggaaaguccugcauuaaucgguguuuuuaugucgaacugaucagaggccgcaaggaggaaaccgaggugcucuggaccucuaacagcauuguuguguucugcgggacauccggaaccuacggcacagggucuuggcccgacggcgcugauaucaaucugaugccuaucuga

SEQ ID NO: 208491 - RNA, 1410 nt, Artificial Sequence; identical to SEQ ID NO: 208486
  derived and/or modified CDS sequence (opt5) from neuraminidase__InfluenzaA__ACD85553

SEQ ID NO: 208492 - RNA, 1410 nt, Artificial Sequence
  derived and/or modified CDS sequence (opt5) from neuraminidase__InfluenzaA__ACD85564
augaaccccaaucagaagaucauuaccaucggcagcgugucccugauuaucucuacaauuugcuucuuuaugcaaacggccauccucaucaccacagucacccugcacuucaaacaguacgaguuuaacagcccuccgaauaaccagguuaugcuuugugaacccacaauuaucgagagaaauauuaccgaaacagcucaucugaccaacacgaccaucgagaaggaaauuugcccuaaacucgccgaguaucggaauugguccaagccccagugugacaucacaggguucgcgccuuuuucuaaagauaacagcauucgccuguccgcuggaggcgacaucugggugaccagagagcccuacgugucuugcgauccugacaaguguuaucaauucgcccuugggcagggaacaacccugaauaacguccacagcaaugauacggugcgggaccgcacaccguacagaacccuccugaugaacgaacugggcguucccuuucaucucgggacaaaacaggugugcaucgccugguccucuagcuccugucacgauggaaaggcuuggcugcaugucugcauuaccggcgacgauaagaaugccaccgcuagcuucaucuauaacggccggcuuguggacucuauuguuuccuggagcaaagagauccugcgcacacaggaaucugagugugugugcauuaaugggacguguaccgucgugaugacagauggauccgccagcggcaaggcggacaccaaaauccucuuuaucgaggaagggaagauugugcacacauccacccugucuggaagcgcccaacacgucgaggaaugcuccugcuacccuagauaucccggcguucggugugugugccgcgauaacuggaaggggagcaacagaccuaucguggacauuaauaucaaagaccauucuauugucuccagcuacguguguucuggacuuguuggcgauacgccccggaagaacgacagcuccucuagcucccacugccuggauccgaauaacgaggaaggcgggcauggagugaaaggcugggcuuucgacgaugggaaugacgucuggaugggacgcacaaucagcgagaagucuagacucggcuacgagaccuuuaaagugaucgaagggugguccaacccuaagagcaaacugcagauuaaucggcagguuaucguggaucgcggaaacagaucuggcuauuccggcauuuucagcgucgaggggaaguccuguaucaaucggugcuuuuacguggaacugauuagaggacgcaaggaggaaaccgagguccucuggacaucuaacagcaucgugguuuucuguggcaccuccgggacauauggaacgggcucuuggcccgacggggccgauauuaaucugaugccuaucuga

SEQ ID NO: 208493 - RNA, 1410 nt, Artificial Sequence
  derived and/or modified CDS sequence (opt5) from neuraminidase__InfluenzaA__ACD85575
augaaccccaaucagaagaucauuaccaucggcagcgugucccugauuaucucuacaauuugcuucuuuaugcaaacggccauccucaucaccacagucacccugcacuucaaacaguacgaguuuaacagcccuccgaauaaccagguuaugcuuugugaacccacaauuaucgagagaaauauuaccgaaaucguguaucugacaaacaccacgauugagaaggaaaucugcccuaaacucgcugaguaccggaauugguccaagccccagugugacauuaccggguucgccccuuuuucuaaagauaacagcauccgccuguccgcgggaggcgacaucugggugacaagagagcccuaugucucuugcgauccugacaaguguuaccaauucgcucuugggcagggaaccacacugaauaacgugcauagcaaugauaccguucgggaccgcacgccguauagaacacuccugaugaacgaacugggcgugcccuuucaccucgggaccaagcaggucugcauugccugguccucuagcuccugucaugauggaaaagccuggcugcacgugugcaucacaggcgacgauaagaaugcuaccgccagcuucauuuacaacggccggcuuguugacucuaucguguccuggagcaaagagauucugcgcacccaggaaucugagugugucugcaucaaugggacauguacgguggugaugaccgauggauccgcuagcggcaaggccgacacaaaaauccucuuuauugaggaagggaagaucguccauaccuccacacugucuggaagcgcgcaacacguugaggaaugcuccugcuauccuagauaccccggcgugcggugugugugccgcgauaacuggaaggggagcaacagaccuauugucgacaucaauauuaaagaccacucuaucguguccagcuacguuuguucuggacuugugggcgauacgccccggaagaacgacagcuccucuagcucccauugccuggauccgaauaacgaggaaggcgggcacggagucaaaggcugggccuucgacgaugggaaugacguguggaugggacgcaccaucagcgagaagucuagacucggcuaugagacauuuaaaguuauugaagggugguccaaccauaagagcaaacugcagaucaaucgccaggugauugucgaucggggaaacagaucuggcuacuccggcaucuucagcguggaggggaaguccuguauuaaucggugcuuuuaugucgaacugaucagaggacgcaaggaggaaaccgaggugcucuggaccucuaacagcauuguuguguucuguggcacauccgggaccuacggaacaggcucuuggccugacggggcugauaucaaucugaugcccaucuga

SEQ ID NO: 208494 - RNA, 1410 nt, Artificial Sequence
  derived and/or modified CDS sequence (opt5) from neuraminidase__InfluenzaA__ACD85586
augaaccccaaucagaagaucauuaccaucggcagcgugucccugacaauuucuacgaucugcuucuuuaugcaaaccgccauucucaucacaaccgucacacugcacuucaaacaguacgaguuuaacagcccuccgaauaaccagguuaugcuuugugaacccaccaucauugagagaaauaucacagaaauuguguaucugaccaacacgaccaucgagaaggaaauuugcccuaaacucgcugaguaccggaauugguccaagccccagugugacaucacaggguucgccccuuuuucuaaagauaacagcauucgccuguccgcgggaggcgacaucugggugaccagagagcccuaugucucuugcgauccugacaaguguuaccaauucgcucuugggcagggaacaacccugaauaacgugcauagcaaugauacgguucgggaccgcacaccguauagaacccuccugaugaacgaacugggcgugcccuuucaccucgggacaaagcaggucugcaucgccugguccucuagcuccugucaugauggaaaagccuggcugcacgugugcauuaccggcgacgauaagaaugcuaccgccagcuucaucuacaacggccggcuuguugacucuauuguguccuggagcaaagagauccugcgcacacaggaaucugagugugucugcauuaaugggacguguaccguggugaugacagauggauccgcuagcggcaaggccgacaccaaaauccucuuuaucgaggaagggaagauuguccauacauccacccugucuggaagcgcgcaacacguugaggaaugcuccugcuauccuagauaccccggcgugcggugugugugccgcgauaacuggaaggggagcaacagaccuaucgucgacauuaauaucaaagaccacucuauuguguccagcuacguuuguucuggacuugugggcgauacgccccggaagaacgacagcuccucuagcucccauugccuggauccgaauaacgaggaaggcgggcgcggagucaaaggcugggccuucgacgaugggaaugacguguggaugggaagaacaaucagcgagaagucucggcucggcuaugagaccuuuaaaguuaucgaagggugguccaacccuaagagcaaacugcagaccaaucgccaggugauugucgauagaggaaaccggucuggcuacuccggcaucuucagcguggaggggaaguccuguauuaauagaugcuuuuaugucgaacugauccgcggacggaaggaggaaacagaggugcucuggaccucuaacagcauuguuguguucuguggcacauccgggacguacggaaccggcucuuggcccgacggggcugauaucaaucugaugccuauuuga

SEQ ID NO: 208495 - RNA, 1410 nt, Artificial Sequence
  derived and/or modified CDS sequence (opt5) from neuraminidase__InfluenzaA__ACD93582
augaaccccaaucagaagaucauuaccaucggcagcgugucccugacaauuucuacgaucugcuucuuuaugcaaauugccauccucgcuaccacagucacccugcacuucaaacaguacgaguuuaacagcccuccgaauaaccagguuaugcuuugugaacccacaaucauugagagaaauaucaccgaaauuguguaucugacaaacaccacgaucgagaaggaaauuugcccuaaacucgccgaguaccggaauugguccaagccccagugugacaucaccggguucgcgccuuuuucuaaagauaacagcauucgccuguccgcuggaggcgacaucugggugacaagagagcccuaugucucuugcgauccugacaaguguuaccaauucgcccuugggcagggaaccacacugaauaacgugcauagcaaugauaccguucggggccgcacgccguauagaacacuccugaugaacgaacugggggugcccuuucaccucggaaccaagcaggucugcaucgccugguccucuagcuccugucaugacggcaaggcuuggcugcacgugugcauuacaggcgaugacaaaaaugccaccgcuagcuucaucuacaacgggcggcuuguugauucuauuguguccuggagcaaagagauccugcgcacccaggaaucugagugugucugcauuaauggaacauguacgguggugaugaccgacggcuccgccagcgggaaggcggauacaaaaauccucuuuaucgaggaaggaaagauuguccauaccuccacacugucuggcagcgcccaacacguugaggaaugcuccugcuauccuagauaccccggggugcggugugugugccgcgacaacuggaagggaagcaacagaccuaucgucgauauuaauaucaaagaccacucuauuguguccagcuacguuuguucuggccuugugggcgacacgccccggaagaacgauagcuccucuagcucccauugccuggacccgaauaacgaggaagggggacacggcgucaaagggugggcuuucgaugacggaaaugauguguggaugggccgcaccaucagcgagaagucuagacucggguaugagacauuuaaaguuaucgaaggaugguccaacccuaagagcaaacugcagauuaaucgccaggugaucgucgacaagggcaaccggucuggcuacuccgggauuuucagcguggagggaaaguccuguaucaauagaugcuuuuaugucgaacugauucggggcagaaaagaggaaaccgaggugcucuggaccucuaacagcaucguuguguucugugggacauccggaaccuacggcacagggucuuggcccgauggcgccgacauuaaucugaugccuaucuga

SEQ ID NO: 208496 - RNA, 1410 nt, Artificial Sequence; identical to SEQ ID NO: 206784
  derived and/or modified CDS sequence (opt5) from neuraminidase__InfluenzaA__ACF09403

SEQ ID NO: 208497 - RNA, 1410 nt, Artificial Sequence; identical to SEQ ID NO: 208001
  derived and/or modified CDS sequence (opt5) from neuraminidase__InfluenzaA__ACF22151

SEQ ID NO: 208498 - RNA, 1410 nt, Artificial Sequence; identical to SEQ ID NO: 206167
  derived and/or modified CDS sequence (opt5) from neuraminidase__InfluenzaA__ACF22246

SEQ ID NO: 208499 - RNA, 1410 nt, Artificial Sequence; identical to SEQ ID NO: 206167
  derived and/or modified CDS sequence (opt5) from neuraminidase__InfluenzaA__ACF22257

SEQ ID NO: 208500 - RNA, 1410 nt, Artificial Sequence; identical to SEQ ID NO: 206167
  derived and/or modified CDS sequence (opt5) from neuraminidase__InfluenzaA__ACF22279

SEQ ID NO: 208501 - RNA, 1410 nt, Artificial Sequence; identical to SEQ ID NO: 206167
  derived and/or modified CDS sequence (opt5) from neuraminidase__InfluenzaA__ACF22290

SEQ ID NO: 208502 - RNA, 1410 nt, Artificial Sequence; identical to SEQ ID NO: 206167
  derived and/or modified CDS sequence (opt5) from neuraminidase__InfluenzaA__ACF22301

SEQ ID NO: 208503 - RNA, 1410 nt, Artificial Sequence; identical to SEQ ID NO: 206167
  derived and/or modified CDS sequence (opt5) from neuraminidase__InfluenzaA__ACF22312

SEQ ID NO: 208504 - RNA, 1410 nt, Artificial Sequence
  derived and/or modified CDS sequence (opt5) from neuraminidase__InfluenzaA__ACF22323
augaaccccaaucagaagaucauuaccaucggcagcgugucccugacaauugccacggucugcuuccucaugcaaaucgcuauucugguuaccacagugacccuucacuuuaaacaguacgagugugacucuccugccagcaaccaggugaugccguaugaacccaucaucauugagagaaauaucacagaaauugucuaccugaacaauaccacaaucgagaaggaaauuugcccuaaagugguugaguaucggaacugguccaagccccagugucaaaucaccggguucgcgccuuuuucuaaagauaauagcauucgccucuccgcuggaggcgacaucugggugacgagagagcccuacgucucuugcgaucaugggaaguguuaucaguucgcccugggacagggcaccacacuugacaacaagcacagcaaugauaccauccaugaccggauuccucaccgcacacugcucaugaacgaacugggggugccguuucaucugggaaccagacagguuugcaucgccugguccuccucuuccugucacgauggcaaggcuuggcuccacgugugcauuacgggcgacgauaaaaaugccacagcuagcuucaucuacgacgggcggcuggucgauucuauuggauccuggagccaaaacauccuucgcacccaggagucugaaugugugugcaucaauggcacauguaccguggucaugaccgacggguccgccagcggcagagcggauacacggauucuguuuaucgaggagggaaaaauuguucauaucagcccccucucugggagcgcccagcacguggaagagugcuccugcuauccucgcuaccccggagugagauguauuugccgggacaacuggaagggcagcaaucgcccugucguggacaucaacauggaagauuacucuaucgacuccagcuauguuuguucuggccuggugggggauacgcccagaaacgacgaucggagcuccaauucuaacugccgcaauccgaacaaugagagaggaaaccagggcgucaaagggugggcuuucgacaauggagaugacguguggaugggccggaccauuagcaaggaucuuagauccggguacgaaacauuuaagguuaucggaggcuggagcaccccuaacucuaaaucccaaauuaaucgccaggugaucgucgacagcgauaaccggucuggcuauuccgggauuuucagcguggagggaaaguccuguaucaauagaugcuuuuacgucgagcugauucgcggccggaaacaggaaacaagagugugguggaccucuaacagcaucguuguguucugugggacguccggaacauauggcaccgggucuuggcccgacggcgccaauaucaacuuuaugccuauuuga

SEQ ID NO: 208505 - RNA, 1410 nt, Artificial Sequence; identical to SEQ ID NO: 206167
  derived and/or modified CDS sequence (opt5) from neuraminidase__InfluenzaA__ACF22334

SEQ ID NO: 208506 - RNA, 1410 nt, Artificial Sequence; identical to SEQ ID NO: 206167
  derived and/or modified CDS sequence (opt5) from neuraminidase__InfluenzaA__ACF22367

SEQ ID NO: 208507 - RNA, 1410 nt, Artificial Sequence
  derived and/or modified CDS sequence (opt5) from neuraminidase__InfluenzaA__ACF22378
augaaccccaaucagaagaucauuaccaucggcagcgugucccugacaauugccacggucugcuuccucaugcaaaucgcuauucugguuaccacagugacccuucacuuuaaacaguacgagugugacucuccugccagcaaccaggugaugccgugcgaacccaucaucauugagagaaauaucacagaaauugucuaucugaacaauaccacaaucgagaaggaaauuuguccuaaagugguugaguaccggaacugguccaagccccagugccaaaucaccggguucgcgccuuuuucuaaagauaauagcauucgccucuccgcuggaggcgacaucugggugacgagagagcccuaugucucuugugaucaugggaagugcuaccaguucgcccugggacagggcaccacacuugacaacaagcacagcaaugauaccauccaugaccggauuccucaccgcacacugcucaugaacgaacugggggugccguuucaucugggaaccagacagguuuguaucgccugguccuccucuuccugccacgauggcaaggcuuggcuccacguguguauuacgggcgacgauaaaaaugccacagcuagcuucaucuaugacgggcggcuggucgauucuauuggauccuggagccaaaacauccuucgcacccaggagucugaaugcguguguaucaauggcacaugcaccguggucaugaccgacggguccgccagcggcagagcggauacacggauucuguuuaucgaggagggaaaaauuguucauaucagcccccucucugggagcgcccagcacguggaagagugcuccuguuacccucgcuaucccggagugagaugcauuugucgggacaacuggaagggcagcaaucgcccugucguggacaucaacauggaagauuacucuaucgacuccagcuacguuugcucuggccuggugggggauacgcccagaaacgacgaucggagcuccaauucuaacuguaaaaauccgaacaaugagcgcggaaaccagggcgucaaggggugggcuuucgacaauggagaugacguguggaugggcagaaccauuagcaaggaucuucgguccggguaugaaacauuuaaaguuaucggaggcuggagcaccccuaacucuaagucccaaauuaauagacaggugaucgucgacagcgauaaccgcucuggcuacuccgggauuuucagcguggagggaaaauccugcaucaaucgguguuuuuaugucgagcugauuagaggccgcaagcaggaaacacgggugugguggaccucuaacagcaucguuguguucugcgggacguccggaacauacggcaccgggucuuggcccgacggcgccaauaucaacuuuaugccuauuuga

SEQ ID NO: 208508 - RNA, 1410 nt, Artificial Sequence
  derived and/or modified CDS sequence (opt5) from neuraminidase__InfluenzaA__ACF22389
augaaccccaaucagaagaucauuaccaucggcagcgugucccugacaauugccacggucugcuuccucaugcaaaucgcuauucugguuaccacagugacccuucacuuuaaacaguacgagugugacucuccugccagcaaccaggugaugccgugcgaacccaucaucauugagagaaauaucacagaaauugucuaucugaacaauaccacaaucgagaaggaaauuuguccuaaagugguugaguaccggaacugguccaagccccagugccaaaucaccggguucgugccuuuuucuaaagauaauagcauucgccucuccgcgggaggcgacaucugggucacgagagagcccuaugugucuugugaucaugggaagugcuaccaguucgcucugggacagggcaccacacuugacaacaagcacagcaaugauaccauccaugaccggauuccucaccgcacacugcucaugaacgaacuggggguuccguuucaucugggaaccagacagguguguaucgccugguccuccucuuccugccacgauggcaaagccuggcuccacgucuguauuacgggcgacgauaagaaugcuacagccagcuucaucuaugacgggcggcugguggauucuauuggauccuggagccaaaacauccuucgcacccaggagucugaaugcguguguaucaauggcacaugcaccgucguuaugaccgacggguccgcuagcggcagagccgauacacggauucuguuuaucgaggagggaaaaauugugcauaucagcccccucucugggagcgcgcagcacguggaagagugcuccuguuacccucgcuaucccggagucagaugcauuugucgggacaacuggaagggcagcaaucgcccugugguugacaucaacauggaagauuacucuaucgacuccagcuacgugugcucuggccuggucggggauacgcccagaaacgacgaucggagcuccaauucuaacugucgcaauccgaacaaugagagaggaaaccagggcgugaaagggugggccuucgacaauggagaugacguuuggaugggccggaccauuagcaaggaucuuagauccggguaugaaacauuuaaggugaucggaggcuggagcaccccuaacucuaaaucccaaauuaaucgccaggucaucguggacagcgauaaccggucuggcuacuccgggauuuucagcgucgagggaaaguccugcaucaauagauguuuuuauguggagcugauucgcggccggaaacaggaaacaagaguuugguggaccucuaacagcaucguggucuucugcgggacguccggaacauacggcaccgggucuuggcccgacggcgcuaauaucaacuuuaugccuauuuga

SEQ ID NO: 208509 - RNA, 1410 nt, Artificial Sequence
  derived and/or modified CDS sequence (opt5) from neuraminidase__InfluenzaA__ACF22400
augaaccccaaucagaagaucauuaccaucggcagcgugucccugacaauugccacggucugcuuccucaugcaaaucgcuauucugguuaccacagugacccuucacuuuaaacaguacgagugugacucuccugccagcaaccaggugaugccgugcgaacccaucaucauugagagaaauaucacagaaauugucuaucugaacaauaccacaaucgagaaggaaauuuguccuaaagugguugaguaccggaacugguccaagccccagugccaaaucaccggguucgcgccuuuuucuaaagauaauagcauucgccucuccgcuggaggcgacaucugggugacgagagagcccuaugucucuugugaucaugggaagugcuaccaguucgcccugggacagggcaccacacuugacaacaagcacagcaaugauaccauccaugaccggauuccucaccgcacacugcucaugaacgaacugggggugccguuucaucugggaaccagacagguuuguaucgccugguccuccucuuccugccacgauggcaaggcuuggcuccacguguguauuacgggcgacgauaaaaaugccacagcuagcuucaucuaugacgggcggcugauggauucuauuggauccuggagccaaaacauccuucgcacccaggagucugaaugcgucuguaucaauggcacaugcaccguggugaugaccgacggguccgccagcggcagagcggauacacggauucuguuuaucgaggagggaaaaauuguccauaucagcccccucucugggagcgcccagcacguugaagagugcuccuguuacccucgcuaucccggagugagaugcauuugucgggacaacuggaagggcagcaaucgcccuguggucgacaucaacauggaagauuacucuaucgacuccagcuacgugugcucuggccugguuggggauacgcccagaaacgacgaucggagcuccaauucuaacugucgcaauccgaacaaugagagaggaaaccagggcgugaaagggugggcuuucgacaauggagaugacgucuggaugggccggaccauuagcaaggaucuuagauccggguaugaaacauuuaaggugaucggaggcuggagcaccccuaacucuaaaucccaaauuaaucgccagguuaucguggacagcgauaaccggucuggcuacuccgggauuuucagcgucgagggaaaguccugcaucaauagauguuuuuauguggagcugauucgcggccggaaacaggaaacaagagucugguggaccucuaacagcaucgugguuuucugcgggacguccggaacauacggcaccgggucuuggcccgacggcgccaauaucaacuuuaugccuauuuga

SEQ ID NO: 208510 - RNA, 1410 nt, Artificial Sequence; identical to SEQ ID NO: 208138
  derived and/or modified CDS sequence (opt5) from neuraminidase__InfluenzaA__ACF22411

SEQ ID NO: 208511 - RNA, 1413 nt, Artificial Sequence
  derived and/or modified CDS sequence (opt5) from neuraminidase__InfluenzaA__ACF33772
augaaccccaaucagaagaucauuaccaucggcagcauuuccaucgccauugggaucaucucucugaugcuccaaauuggaaacaucauuagcaucugggcuucccacucuauucagacaggcagccagaaucauacggggaucugcaaccagagaauuaucaccuacgaaaauuccacaugggugaaccacaccuaugucaauaucaacaauacaaacguuguggccggaaaagacaagaccccugugacacuggcgggcaauucuagccuuuguuccauuagcgggugggcuaucuacaccaaagauaacucuauucggaucggauccaagggcgacgucuucgugauucgcgagccguuuaucagcugcucucaucuggaguguaaaacguucuuucucacccaaggcgcccugcuuaaugauaagcacuccaacgggacaguuaaggacagaagccccuaucgggcccugaugucuugcccucucggagaagcucccuccccuuacaauagcaaauucgaguccguggccuggucugcuagcgccugucaugauggcaucggguggcugaccauuggaaucuccggccccgacaacggggcggucgccgugcugaaguauaacggaauuaucacaggcaccauuaaaagcuggaagaaacagauccuccgcacgcaggaaucugagugcguuuguaugaauggcuccugcuuuacaaucaugaccgaugggccuagcaacggagcugccucuuacaagauuuucaagaucgagaaaggcaaggugacaaaaagcauggaacugaaugcuccgaacuuuuauuacgaggaauguuccugcuaccccgacaccgggaccgucaugugugugugcagagauaauuggcacggaucuaaccggccuugggugagcuucaaucagaaccuugacuaucaaauuggcuacaucugcuccggggucuuuggagauaauccccgcccuaaggacggcgagggcagcuguaaccccguuacaguggauggggccaauggagugaaaggcuucucuuauaaguacgggaacggagucuggauuggcagaacgaaauccaaucggauccgcaagggguuugagaugauuugggacccgaacggcuggaccaauacagacagcgauuucucugugaagcaggacaucguugcgaucaccgauugguccggauauagcggcuccuuugugcagcacccugaacugacagggcucgacugcauuagacccuguuucugggucgagcuggugcggggacuuccucgcgaaaacaccacgaucuggacaucuggcagcuccauuucuuucugcgggguuaacagcgauaucgccaauugguccuggcccgacggagcugagcugcccuuuaccauugauaaauga

SEQ ID NO: 208512 - RNA, 1410 nt, Artificial Sequence
  derived and/or modified CDS sequence (opt5) from neuraminidase__InfluenzaA__ACF33778
augaaccccaaucagaagaucauuaccaucggcagcgugucccugacaauuucuacgaucugcuucuuuaugcaaauugccauccucaucaccacagucacccugcacuucaaacaguacgaguuuagcuccccuccgaacaaucagguuaugcuuugugaacccacaauuaucgagagaaacauuaccgaaaucguguaucugacaaauaccacgauugagaaggaaaucugcccuaaacucgcugaguaccggaacuggucuaagccccagugugacauuaccggguucgccccuuuuagcaaagauaauuccauccgccugucugcgggaggcgacaucugggugacaagagagcccuaugucagcugcgauccugacaaguguuaccaauucgcucuugggcagggaaccacacugaacaaugugcauuccaacgauaccguucacgaccggacgccguaucgcacacuccugaugaaugaacugggcauucccuuucaucucgggaccaaacaggugugcaucgccuggucuagcuccagcugucacgauggaaaggccuggcugcaugucugcgugacaggcgacgauaagaacgcuaccgccucuuucauuuacaauggcagacuuguugacuccaucgugagcuggucuaaagagauucugcggacccaggaauccgagugugucugcaucaacgggacauguacgguggugaugaccgauggaagcgcuuccggcaaggccgacacaaaaauccucuuuauugaggaagggaagaucguccacaccucuacacugagcggauccgcgcaaaauguugaggaaugcagcugcuauccucgcuaccccggcgugagaugugugugccgggauaacuggaaggggucuaaccgcccuauugucgacaucaauauuaaagacuacuccaucgugagcagauauguuuguucuggacuugugggcgauacgccccggaagaacgacagcuccucuagcucccacugccugaauccgaacaaugaggaaggcgggcauggagucaaaggcugggccuucgaugacgggaacgauguguggaugggacgcaccaucagcgagaagucuagauccggcuacgagacauuuaaaguuauugaaggguggagcaauccuaacucuaagcuccagaucaaucgccaggugauugucgaccggggaaacagauccggcuauagcggcaucuucuccguggaggggaaaucuuguauuaaucggugcuuuuacgucgaacugaucagaggacgcaaggaggaaaccgaggugcuguggaccagcaacuccauuguuguguucuguggcacaucugggaccuauggaacaggcagcuggcccgauggggcugacaucaaucucaugccuaucuga

SEQ ID NO: 208513 - RNA, 1410 nt, Artificial Sequence
  derived and/or modified CDS sequence (opt5) from neuraminidase__InfluenzaA__ACF33785
augaaccccaaucagaagaucauuaccaucggcagcgugucccugacaauuucuacgaucugcuucuuuaugcaaauugccauccucaucaccacagucacccugcacuucaaacaguacgaguuuaacagcccuccgaauaaccagguuaugcuuugugaacccacaauuaucgagagaaauauuaccgaaaucguguaucugacaaacaccacgauugagaaggaaaugugcccuaaacucgcugaguaccggaauugguccaagccccagugugacaucaccggguucgccccuuuuucuaaagauaacagcauucgccuguccgcgggaggcgacaucugggugacaagagagcccuaugucucuugcgauccugacaaguguuaccaauucgcucuugggcagggaaccacacugaauaacgugcauagcaaugauaccguucacgugcggacgccguaucgcacacuccugaugaacgaacugggcguccccuuucaucucgggaccaaacaggugugcaucgccugguccucuagcuccugucacgacggaaaggccuggcugcauguuugcgugacaggcgaugacaagaaugcuaccgccagcuucauuuacaacggcagacuugucgauucuaucguguccuggagcaaagacauucugcggacccaggagucugaaugugugugcaucaaugggacauguacggucguuaugaccgauggauccgcuagcggcaaggccgacacaaaaauucucuuuaucgaggaggggaagaucgugcacaccuccacacugucuggaagcgcgcaacacguggaagagugcuccugcuauccucgcuaccccggcgucagaugugugugccgggauaacuggaaggggagcaaccgcccuauuguugacaucaauauuaaagacuacucuaucguguccagcuaugucuguucuggacuugugggcgauacccccagaaagacggacagcuccucuagcucccauugccuggauccgaacaaugaagagggcgggcacggaguuaaaggcugggccuucgacgaugggaacgacguguggaugggacggacaauuagcgaaaagcuccgccugggcuacgagaccuuuaaagucaucgagggguggucuaauccuaacuccaagcugcagaucaauagacaggugauugucgaucggggaaaccgcagcggcuauucuggcaucuucuccguggaagggaaaagcuguauuaauagaugcuuuuacguugagcucauccggggaagaaaggaagagaccgaagugcuguggacauccaacucuauugucguguucuguggcaccagcgggacauauggaacgggcuccuggcccgacggggcugauaucaaucuuaugccuauuuga

SEQ ID NO: 208514 - RNA, 1413 nt, Artificial Sequence
  derived and/or modified CDS sequence (opt5) from neuraminidase__InfluenzaA__ACF33787
augaaccccaaucagaagaucauuaccaucggcagcauuuccaucgccauugggaucaucucucugaugcuccaaauuggaaacaucauuagcaucugggcuucccacucuauucagacaggcagccagaaucauacggggaucugcaaccagagaauuaucaccuacgaaaauuccacaugggugaaccacaccuaugucaauaucaacaauacaaacguuguggccggaaaagacaagaccccugugacacuggcgggcaauucuagccuuuguuccauuagcgggugggcuaucuacaccaaagauaacucuauucggaucggauccaagggcgacgucuucgugauucgcgagccguuuaucagcugcucucaucuggaguguaaaacguucuuucucacccaaggcgcccugcuuaaugauaagcacuccaacgggacaguuaaggacagaagccccuaucgggcccugaugucuugcccucucggagaagcucccuccccuuacaauagcaaauucgaguccguggccuggucugcuagcgccugucaugauggcaucggguggcugaccauuggaaucuccggccccgacaacggggcggucgccgugcugaaguauaacggaauuaucacaggcaccauuaaaagcuggaagaaacagauccuccgcacgcaggaaucugagugcguuuguaugaauggcuccugcuuuacaaucaugaccgaugggccuggaaacggcgcugccagcuacaagauuuucaagaucgagaaagggaaggugacaaaaucuauggaacugaaugcuccgaacuuucacuaugaggaauguagcugcuaccccgacaccggaaccgucaugugugugugcagagauaauuggcacggcuccaaccggccuugggugucuuucaaucagaaccuugacuaccaaauuggguauaucugcagcggagucuuuggcgauaauccccgcccuaaggacggcgagggguccuguaaccccguuacaguggauggagccaauggcgugaaaggguucagcuacaaguauggaaacggcgucuggauugggagaacgaaaucuaaucggauccgcaagggcuuugagaugauuugggacccgaacggauggaccaauacagacuccgauuucagcgugaagcaggacaucguugcgaucaccgauuggucuggcuacuccgggagcuuugugcagcauccugaacugacaggacucgacugcauuagacccuguuucugggucgagcuggugcggggccuuccuaaagaaaacaccacgaucuggacauccgggucuagcauuuccuucugcggaguuaacucuggcaucgccaauuggagcuggcccgauggggcugagcugcccuuuaccauugacaaguga

SEQ ID NO: 208515 - RNA, 1410 nt, Artificial Sequence; identical to SEQ ID NO: 207956
  derived and/or modified CDS sequence (opt5) from neuraminidase__InfluenzaA__ACF33798

SEQ ID NO: 208516 - RNA, 1410 nt, Artificial Sequence; identical to SEQ ID NO: 208129
  derived and/or modified CDS sequence (opt5) from neuraminidase__InfluenzaA__ACF41672

SEQ ID NO: 208517 - RNA, 1413 nt, Artificial Sequence; identical to SEQ ID NO: 208102
  derived and/or modified CDS sequence (opt5) from neuraminidase__InfluenzaA__ACF41683

SEQ ID NO: 208518 - RNA, 1410 nt, Artificial Sequence
  derived and/or modified CDS sequence (opt5) from neuraminidase__InfluenzaA__ACF41749
augaaccccaaucagaagaucauuaccaucggcagcgugucccugacaauugccacggucugcuuccucaugcaaaucgcuauucugguuaccacagugacccuucacuuuaaacaguacgagugugacucuccugccagcaaccaggugaugccgugcgaacccaucaucauugagagaaauaucacagggauugucuaucugaacaauaccacaaucgaaaaggagauuuguccuaaagugguugaauaccggaacugguccaagccccagugccaaaucaccggauucgcgccuuuuucuaaagauaauagcauucgccucuccgcuggcggggacaucugggugacgagagagcccuaugucucuugugaucauggaaagugcuaccaguucgcccugggccaggggaccacacuugacaacaagcacagcaaugauaccauccaugaccggauuccucaccgcacacugcucaugaacgagcugggagugccguuucaucugggcaccagacagguuuguaucgccugguccuccucuuccugccacgauggcaaggcuuggcuccacguguguauuacgggggacgauaaaaaugccacagcuagcuucaucuaugacggacggcuggucgauucuauuggcuccuggagccaaaacauccuucgcacccaggaaucugagugcguguguaucaaugggacaugcaccguggucaugaccgacggauccgccagcggcagagcggauacacggauucuguuuaucgaagaggggaaaauuguucauaucagcccccucucuggaagcgcccagcacguggaggaaugcuccuguuacccucgcuaucccggcgugagaugcauuugucgggacaacuggaagggcagcaaucgcccugucguggacaucaacauggaggauuacucuaucgacuccagcuacguuugcucugggcuggugggagauacgcccagaaacgacgaucggagcuccaauucuaacugucgcaauccgaacaaugaaagaggcaaccagggggucaaaggaugggcuuucgacaauggcgaugacguguggauggggcggaccauuagcaaggaucuuagauccggauaugagacauuuaagguuaucggcggcuggagcaccccuaacucuaaaucccaaauuaaucgccaggugaucgucgacagcgauaaccggucuggguacuccggaauuuucagcguggaaggcaaguccugcaucaauagauguuuuuaugucgagcugauucgcgggcggaaacaggagacaagagugugguggaccucuaacagcaucguuguguucugcggaacguccggcacauacgggaccggcucuuggcccgacggagccaauaucaacuuuaugccuauuuga

SEQ ID NO: 208519 - RNA, 1410 nt, Artificial Sequence
  derived and/or modified CDS sequence (opt5) from neuraminidase__InfluenzaA__ACF41760
augaaccccaaucagaagaucauuaccaucggcagcgugucccugacaauugccacggucugcuuccucaugcaaaucgcuauucugguuaccacagugacccuucacuuuaaacaguacgagugugacucuccugccagcaaccaggugaugccgugcgaacccaucaucauugagagaaauaucacagaaauugucuaucugaacaauaccacaaucgagaaggaaauuuguccuaaagugguugaguaccggaacugguccaagccccagugccaaaucaccggguucgcgccuuuuucuaaagauaauagcauucgccucuccgcuggaggcgacaucugggugacgagagagcccuaugucucuugugaucgggggaagugcuaccaguucgcccugggacagggcaccacacuugacaacaagcauagcaaugauaccauccacgaccgcauuccucauagaacacugcucaugaacgaacugggggugccguuucaccugggaacccggcagguuuguaucgccugguccuccucuuccugccaugauggcaaggcuuggcuccacguguguauuacgggcgacgauaaaaaugccacagcuagcuucaucuaugacgggcgccuggucgauucuauuggauccuggagccaaaacauccuuagaacccaggagucugaaugcguguguaucaauggcacaugcaccguggucaugaccgacggguccgccagcggacgggcggauacacgcauucuguuuaucgaggagggcaaaauuguucacaucagcccccucucugggagcgcccagcauguggaagagugcuccuguuacccuagauaucccggagugcggugcauuugucgcgacaacuggaagggcagcaauagaccugucguggacaucaacauggaagauuacucuaucgacuccagcuacguuugcucuggccuggugggggauacgccccggaacgacgaucgcagcuccaauucuaacuguagaaauccgaacaaugagcggggaaaccagggcgucaaagggugggcuuucgacaauggagaugacguguggaugggcagaaccauuagcaaggaucuucgcuccggguaugaaacauuuaagguuaucggaggcuggagcaccccuaacucuaaaucccaaauuaauagacaggugaucgucgacagcgauaaccggucuggcuacuccgggauuuucagcguggagggaaaguccugcaucaaucgcuguuuuuaugucgagcugauucggggcagaaaacaggaaacacgcgugugguggaccucuaacagcaucguuguguucugcgggacguccggaacauacggcaccgggucuuggcccgacggcgccaauaucaacuuuaugccuauuuga

SEQ ID NO: 208520 - RNA, 1410 nt, Artificial Sequence
  derived and/or modified CDS sequence (opt5) from neuraminidase__InfluenzaA__ACF41771
augaaccccaaucagaagaucauuaccaucggcagcgugucccugacaauugccacggucugcuuccucaugcaaaucgcuauucugguuaccacagugacccuucacuuuaaacaguacgagugugacucuccugccagcaaccaggugaugccgugcgaacccaucaucauugagagaaauaucacagaaauugucuaucugaacaauaccacaaucgagaaggaaauuuguccuaaagugguugaguaccggaacugguccaagccccagugccaaaucaccggguucgcgccuuuuucuaaagauaauagcauucgccucuccgcuggaggcgacaucugggugacgagagagcccuaugucucuugugaucaugggaagugcuaccaguucgcccugggacagggcaccacacuugacaacaagcacagcaaugauaccauccaugaccggauuccucaccgcacacugcucaugaacgaacugggggugccguuucaucugggaaccagacagguuuguaucgccugguccuccucuuccugccacgauggcaaggcuuggcuccacguguguauuacgggcgacgauaaaaaugccacagcuagcuucaucuaugacgggcggcuggucgauucuauuggauccuggagccaaaacauccuucgcacccaggagucugaaugcguguguaucaauggcacaugcaccguggucauuaccgacggguccgccagcggcagagcggauacacggauccuguuuauugaggagggaaaaaucguucauauuagcccccucucugggagcgcccagcacguggaagagugcuccuguuacccucgcuaucccggagugagaugcaucugucgggacaacuggaagggcagcaaucgcccugucguggacaucaacauggaagauuacucuauugacuccagcuacguuugcucuggccuggugggggauacgcccagaaacgacgaucggagcuccaauucuaacugucgcaauccgaacaaugagagaggaaaccagggcgucaaagggugggcuuucgacaauggagaugacguguggaugggccggaccaucagcaaggaucuuagauccggguaugaaacauuuaagguuauuggaggcuggagcaccccuaacucuaaaucccaaaucaaucgccaggugauugucgacagcgauaaccggucuggcuacuccgggaucuucagcguggagggaaaguccugcauuaauagauguuuuuaugucgagcugauccgcggccggaaacaggaaacaagagugugguggaccucuaacagcaucguuguguucugcgggacguccggaacauacggcaccgggucuuggcccgacggcgccaauauuaacuuuaugccuaucuga

SEQ ID NO: 208521 - RNA, 1410 nt, Artificial Sequence; identical to SEQ ID NO: 206167
  derived and/or modified CDS sequence (opt5) from neuraminidase__InfluenzaA__ACF41793

SEQ ID NO: 208522 - RNA, 1410 nt, Artificial Sequence; identical to SEQ ID NO: 206167
  derived and/or modified CDS sequence (opt5) from neuraminidase__InfluenzaA__ACF41804

SEQ ID NO: 208523 - RNA, 1410 nt, Artificial Sequence; identical to SEQ ID NO: 206167
  derived and/or modified CDS sequence (opt5) from neuraminidase__InfluenzaA__ACF41826

SEQ ID NO: 208524 - RNA, 1365 nt, Artificial Sequence; identical to SEQ ID NO: 207791
  derived and/or modified CDS sequence (opt5) from neuraminidase__InfluenzaA__ACF41837

SEQ ID NO: 208525 - RNA, 1413 nt, Artificial Sequence
  derived and/or modified CDS sequence (opt5) from neuraminidase__InfluenzaA__ACF41881
augaaccccaaucagaagaucauuaccaucggcagcauuuccaucgccauugggaucaucucucugaugcuccaaauuggaaacaucauuagcaucugggcuucccacucuauucagacaggcagccagaaucauacgggggugugcaaccagagaaucauuaccuacgagaauagcacaugggugaaccacaccuauguuaauaucaacaauacaaacgugguggccggaaaagacaagaccucugucacacuggcgggcaauagcucccuuuguagcaucucugggugggcuauuuacaccaaagauaacuccauccggauuggaagcaagggcgacguguucguuauccgcgaaccuuuuauuucuugcucccaucuggaguguagaacguucuuucucacccaaggcgcccugcuuaaugauaaacacagcaacgggacagugaaggaccggucuccguaucgcgcccugauguccugcccccucggagaagcuccuagccccuacaauuccaaguucgagucugucgccuggagcgcuuccgccugucaugauggcaugggguggcugaccaucggaaucagcggcccugacaacggggcgguggccguucugaaauauaacggaauuaucacagaaaccauuaagucuuggaaaaagagaauccuccggacgcaggaguccgagugcgugugugucaauggcagcugcuuuacaauuaugaccgauggccccucuaacggggcugccagcuacaaaaucuucaagaucgaaaagggaaaagugacaaaguccauugagcugaaugcuccuaacuuucacuaugaagaguguucuugcuacccggacaccggcaccgugaugugugucugccgcgauaauuggcacgggagcaacagacccuggguuuccuucaaucagaaccuugacuaccagaucggauauauuugcagcggcguguuuggggauaauccucggcccaaagacggagagggcucuuguaacccugugacagucgauggcgccgacggggugaagggauucuccuacaaauauggcaaugggguuuggaucggacgcacgaaguccaacagacugcggaaaggcuuugaaaugauuugggaccccaauggguggaccgauacagacucugauuucuccgugaagcaagacgucguggcgaucaccgauuggagcggcuacuccggaucuuuuguucagcauccggagcucacaggccuggacugcauucgcccuuguuucuggguggaacuugucagagggcugccccgggagaacaccacgaucuggacaagcggauccucuaucagcuucugcggcgucaauuccgauaccgccaacuggagcuggccugacggggcugaacuccccuuuaccauugauaaguga

SEQ ID NO: 208526 - RNA, 1410 nt, Artificial Sequence; identical to SEQ ID NO: 208001
  derived and/or modified CDS sequence (opt5) from neuraminidase__InfluenzaA__ACF41892

SEQ ID NO: 208527 - RNA, 1410 nt, Artificial Sequence; identical to SEQ ID NO: 206399
  derived and/or modified CDS sequence (opt5) from neuraminidase__InfluenzaA__ACF41903

SEQ ID NO: 208528 - RNA, 1410 nt, Artificial Sequence
  derived and/or modified CDS sequence (opt5) from neuraminidase__InfluenzaA__ACF41914
augaaccccaaucagaagaucauuaccaucggcagcgugucccugacaauuucuacgaucugcuucuuuaugcaaauugccauccucaucaccacagucacccugcacuucaaacaguacgaguuuaacagcccuccgaauaaccagguuaugcuuugugaacccacaauuaucgagagaaauauuaccgaaaucguguaucugacaaacaccacgauugagaaggaaaucugcccuaaacucgcugaguaccggaauugguccaagccccaguguaacauuaccggguucgccccuuuuucuaaagacaauagcauccgccuguccgcgggaggcgauaucugggugacaagagagcccuaugucucuugcgacccugauaaguguuaccaauucgcucuugggcagggaaccacacugaacaaugugcauagcaacgacaccguucacgaucggacgccguaucgcacacuccugaugaaugaacugggcgugcccuuucaucucgggaccaagcaggucugcauugccugguccucuagcuccugucacgacggaaaagccuggcugcaugugugcguuacaggcgaugacaagaacgcuaccgccagcuucaucuacaauggcagacuuguggauucuauugucuccuggagcaaagagauccugcggacccaggaaucugagugugugugcauuaacgggacauguacgguggucaugaccgacggauccgcuagcggcaaggccgauacaaaaauccucuuuaucgaggaagggaagauuguucacaccuccacacugucuggaagcgcgcaacacguggaggaaugcuccugcuauccucgcuaccuuggcgugagaugugucugccgggacaacuggaaggggagcaaucgccccaucguggauauuaacaucaaagacuacucuauuguuuccagcuauguguguucuggacuggucggcgacaccccuagaaagaaugauagcuccucuagcucccauugccucgaccccaacaaugaggaaggcgggcacggagugaaaggcugggccuucgaugacgggaacgauguuuggaugggacggacgaucagcgagaagcugcgcucuggcuacgagacauuuaaagugaucgaagggugguccaauccgaacagcaagcugcagauuaauagacaggucaucguggaccggggaaaccgcucuggcuauuccggcauuuucagcgucgaggggaaauccuguaucaauagaugcuuuuacguggaacucauucggggaagaaaggaggaaaccgagguucuguggaccucuaacagcaucguggucuucuguggcacauccgggaccuauggaacaggcucuuggccugauggggcugacauuaaucuuaugcccaucuga

SEQ ID NO: 208529 - RNA, 1413 nt, Artificial Sequence
  derived and/or modified CDS sequence (opt5) from neuraminidase__InfluenzaA__ACF41925
augaaccccaaucagaagaucauuaccaucggcagcauuuccauggccaucgggauuaucucucugauccuccaaauuggaaacaucauuagcaucugggcuucccacucuauucagacaggcagccagaaucauacggggaucugcaaccagagaauuaucaccuacgagaauagcacaugggugaaccaaaccuaugucaauaucaacaauacaaacguuguggccggaaaagacaagaccucugugacacuggcgggcaauagcucccuuuguccuauucgggggugggcuaucuacaccaaagauaacagcauucgcaucggaucuaagggcgacgucuucgugauuagagaaccguuuaucuccugcagccaccuggagugucggacguucuuucucacccagggcgcccugcuuaaugauaaacauucuaacgggacaguuaaggaccgcucccccuauagagcccugaugagcugcccucucggagaagcucccucuccuuacaauucccgguucgagagcguggccugguccgcuucugccugucacgauggcaugggguggcugaccaucggaauuagcggccccgacaacggggcggucgccgugcugaaguauaacggaaucauuacagaaaccaucaaauccuggaagaaacgcauucucagaacgcaggagagcgagugcguuugugugaauggcucuugcuuuacaaucaugaccgauggcccuuccaacggggcugccagcuaccggaucuucaagauugaaaaaggaaaggucacaaagucuaucgagcuggacgcuccgaauuaucauuacgaagaguguagcugcuaccccgauaccggcaccgugaugugugugugccgcgacaacuggcacggguccaauagaccuugggucucuuuuaaccagaaucuugauuaucaaauuggauacaucugcagcggcguuuucggggacaacccccggccuaaagauggagagggcuccuguaaucccgugacaguggacggcgccgacggggucaagggauuuagcuaucgcuacggcaacgggguguggauuggaagaacgaaaucuaaucggcugcgcaagggcuucgaaaugaucugggauccgaacggguggaccgacacagauuccgacuuuagcguuaaacaggauguggucgcgaugaccgacuggucuggcuauuccggauccuucgugcagcacccugagcucacaggccuggauugcaugagacccuguuuuuggguugaacuuauucgggggagaccucgcgagaauaccacgaucuggacauccggaucuagcaucuccuucugcggcgugaacucugacaccgccaauuggagcuggcccgauggggcugaacugcccuucaccauugacaaguga

SEQ ID NO: 208530 - RNA, 1413 nt, Artificial Sequence; identical to SEQ ID NO: 208529
  derived and/or modified CDS sequence (opt5) from neuraminidase__InfluenzaA__ACF41936

SEQ ID NO: 208531 - RNA, 1410 nt, Artificial Sequence
  derived and/or modified CDS sequence (opt5) from neuraminidase__InfluenzaA__ACF54392
augaaccccaaucagaagaucauuaccaucggcagcguuucccugacaacggccaccgcuugcuuccucacacaaauugccauccuggucaccacaguuacccuucacuuuaaacagcaugagugugacucuccugcgagcaaccaggugaugccgugcgaacccauuaucaucgagagaaauauuacagaaaucguguaccugaacaauaccacgauugagaaggaaaucuguccuaaagucguggaguaucggaacugguccaagccccagugccaaauuaccggguucgcuccuuuuucuaaagauaauagcauccgccucuccgccggaggcgacauuuggguuacaagagagcccuacgugucuugugauagcgggaagugcuaucaguucgcccugggacagggcaccacacuugacaacaagcacuccaaugauaccauccaugaccggaucccucaccgcacgcugcucaugaacgaacugggggucccguuucaucugggaacaagacagguguguauugcuuggucuagcuccagcugccacgauggcaaagccuggcuccacguuuguaucaccggcgacgauaagaaugcuacagccucuuucauuuacgacgggcggcugguggauuccaucggaagcuggucucaaaacauucuucgcacccaggaguccgaaugcgucuguaucaauggaaccugcacaguggugaugacggacgggagcgcguccggcagagccgauacccggauccuguuuauugaggagggcaaaaucguccauauuucuccccucagcggguccgcucagcacguugaagagugcagcuguuauccucgcuaccccggagugagaugcaucugucgggacaacuggaagggcucuaaucgcccuguggucgacauuaacauggaagauuauuccaucgacagcucuuacgugugcagcggccugguuggggauacacccagaaacgacgaucgguucuccaauucuaacugucgcaauccgaacaaugagagaggaaaccagggcgugaaagggugggccuuugacaauggagaugacgucuggaugggccggaccaucagcaaggaucuuagauccggguacgaaacauucaaggugauuggaggcuggagcaccccuaacucuaaaucccaaaucaaucgccagguuauuguggacagcgauaaccggucuggcuauuccgggaucuuuagcgucgagggaaaguccugcauuaauagauguuucuacguggagcugauccgcggccggaaacaggaaacgagagucugguggacaucuaacagcauugugguguuuugcgggaccuccggaaccuauggcacagggucuuggcccgacggcgcuaauaucaacuucaugccuaucuga

SEQ ID NO: 208532 - RNA, 1410 nt, Artificial Sequence; identical to SEQ ID NO: 206167
  derived and/or modified CDS sequence (opt5) from neuraminidase__InfluenzaA__ACF54403

SEQ ID NO: 208533 - RNA, 1410 nt, Artificial Sequence; identical to SEQ ID NO: 206167
  derived and/or modified CDS sequence (opt5) from neuraminidase__InfluenzaA__ACF54414

SEQ ID NO: 208534 - RNA, 1410 nt, Artificial Sequence; identical to SEQ ID NO: 206167
  derived and/or modified CDS sequence (opt5) from neuraminidase__InfluenzaA__ACF54425

SEQ ID NO: 208535 - RNA, 1410 nt, Artificial Sequence; identical to SEQ ID NO: 206167
  derived and/or modified CDS sequence (opt5) from neuraminidase__InfluenzaA__ACF54436

SEQ ID NO: 208536 - RNA, 1410 nt, Artificial Sequence
  derived and/or modified CDS sequence (opt5) from neuraminidase__InfluenzaA__ACF54447
augaaccccaaucagaagaucauuaccaucggcagcgugucccugacaauugccacggucugcuuccucaugcaaaucgcuauucugguuaccacagugacccuucacuuuaaacaguacgagugugacucuccugccagcaaccaggugaugccgugcgaacccaucaucauugagagaaauaucacagaaauugucuaucugaacaauaccacaaucgagaaggaaauuuguccuaaagugguugaguaccggaacugguccaagccccagugccaaaucaccggguucgcgccuuuuucuaaagauaauagcauucgccucuccgcuggaggcgacaucugggugacgagagagcccuaugucucuugugaucaugggaagugcuaccaguucgcccugggacagggcaccacacuugacaacaagcacagcaaugauaccauccaugaccggauuccucaccgcacacugcucaugaacgaacugggggugccguuucaucugggaaccaaacagguuuguaucgccugguccuccucuuccugccacgauggcaaggcuuggcuccacguguguauuacgggcgacgauaaaaaugccacagcuagcuucaucuaugacgggagacuggucgauucuauuggauccuggagccaaaacauccuucggacccaggagucugaaugcguguguaucaauggcacaugcaccguggucaugaccgacggguccgccagcggacgcgcggauacacggauucuguuuaucgaggagggcaagauuguucauaucagcccccucucugggagcgcccagcacguggaagagugcuccuguuacccuagauaucccggagugcgcugcauuuguagagacaacuggaaaggcagcaaucggccugucguggacaucaacauggaagauuacucuaucgacuccagcuacguuugcucuggccuggugggggauacgccccgcaacgacgauagaagcuccaauucuaacugucggaauccgaacaaugagcgcggaaaccagggcgucaaggggugggcuuucgacaauggagaugacguguggaugggcagaaccauuagcaaggaucuucgguccggguaugaaacauuuaaaguuaucggaggcuggagcaccccuaacucuaagucccaaauuaauagacaggugaucgucgacagcgauaaccgcucuggcuacuccgggauuuucagcguggagggaaaauccugcaucaaucgguguuuuuaugucgagcugauuagaggccgcaagcaggaaacacgggugugguggaccucuaacagcaucguuguguucugcgggacguccggaacauacggcaccgggucuuggcccgacggcgccaauaucaacuuuaugccuauuuga

SEQ ID NO: 208537 - RNA, 1410 nt, Artificial Sequence
  derived and/or modified CDS sequence (opt5) from neuraminidase__InfluenzaA__ACF54469
augaaccccaaucagaagaucauuaccaucggcagcgugucccugacaauugccacggucugcuuccucaugcaaaucgcuauucugguuaccacagugacccuucacuuuaaacaguacgagugugacucuccugccagcaaccaggugaugccgugcgaacccaucaucauugagagaaauaucacagaaauugucuaucugaacaauaccacaaucgagaaggaaauuuguccuaaagugguugaguaccggaacugguccaagccccagugccaaaucaccggguucgcgccuuuuucuaaagauaauagcauucgccucuccgcuggaggcgacaucugggugacgagagagcccuaugucucuugugaucaugggaagugcuaccaguucgcccugggacagggcaccacacuugacaacaagcacagcaaugauaccauccaugaccggauuccucaccgcacacugcucaugaacgaacugggggugccguuucaucugggaaccagacagguuuguauggccugguccuccucuuccugccacgauggcaaggcuuggcuccacguguguaucacgggcgacgauaaaaaugccacagcuagcuucauuuaugacgggcggcuggucgauucuaucggauccuggagccaaaacauucuucgcacccaggagucugaaugcguguguaucaauggcacaugcaccguggucaugaccgacggguccgccagcggcagagcggauacacggauccuguuuauugaggagggaaaaaucguucauauuagcccccucucugggagcgcccagcacguggaagagugcuccuguuacccucgcuaucccggagugagaugcaucugucgggacaacuggaagggcagcaaucgcccugucguggacauuaacauggaagauuacucuaucgacuccagcuacguuugcucuggccuggugggggauacgcccagaaacgacgaucggagcuccaauucuaacugucgcaauccgaacaaugagagaggaaaccagggcgucaaagggugggcuuucgacaauggagaugacguguggaugggccggaccaucagcaaggaucuuagauccggguaugaaacauuuaagguuauuggaggcuggagcaccccuaacucuaaaucccaaaucaaucgccaggugauugucgacagcgauaaccggucuggcuacuccgggaucuucagcguggagggaaaguccugcauuaauagauguuuuuaugucgagcugauccgcggccggaaacaggaaacaagagugugguggaccucuaacagcauuguuguguucugcgggacguccggaacauacggcaccgggucuuggcccgacggcgccaauaucaacuuuaugccuaucuga

SEQ ID NO: 208538 - RNA, 1410 nt, Artificial Sequence; identical to SEQ ID NO: 207832
  derived and/or modified CDS sequence (opt5) from neuraminidase__InfluenzaA__ACF54480

SEQ ID NO: 208539 - RNA, 1410 nt, Artificial Sequence
  derived and/or modified CDS sequence (opt5) from neuraminidase__InfluenzaA__ACF54502
augaaccccaaucagaagaucauuaccaucggcagcgugucccugacaauugccacggucugcuuccucaugcaaaucgcuauucuggccaccacaguuacccuucacuuuaaacagcaugagugugacucuccugcgagcaaccaggugaugccgugcgaacccaucaucauugagagaaauaucacagaaauuguguaccugaacaauaccacaaucgagaaggaaauuuguccugaggucguggaguaucggaacugguccaaaccccagugccaaaucaccggguucgcuccuuuuucuaaggauaauagcauucgccucuccgccggaggcgacaucuggguuacgagagaacccuacgugucuugugauccugggaaaugcuaucaguucgcccugggacagggcaccacacuugacaacaagcacagcaaugggaccauccaugaucggauuccgcaccgcacacugcucaugaacgagcugggagucuccuuucaucugggcaccaaacagguguguguugcuuggucuagcuccagcugccacgacggcaaggccuggcuccacgugugugucacgggggaugacagaaaugcuacagccucuuucaucuacgauggacggcugguggacuccauuggcagcuggucucaaaacauccuucgcacccaggaauccgagugcguguguauuaaugggacaugcaccgucguuaugaccgauggaagcgcguccggcagagccgacacacggauccuguuuaucaaggaggggaaaauugugcauaucucuccccucagcggauccgcucagcacauugaagagugcagcuguuauccucgcuaccccgaugugagaugcaucugucgggacaacuggaagggcucuaaucgcccugucauugacaucaacauggaagauuauuccaucgacagcucuuacgugugcagcggccugguuggggauacgcccagaaacgacgauuccucuagcaauuccaacugucgggacccgaauaacgagcgcggaaauccuggcgugaaagggugggccuucgauaacggagacgaugucuggaugggcagaaccauuaauaaggacagccggucuggguacgaaacauuuaaggugaucggaggcugguccacccccaacagcaaaucucagguuaauagacaagugauugucgauaacaauaacugguccggcuauagcgggaucuucuccguggagggaaagucuugcauuaaucgcuguuuuuacgucgagcuuauccggggcagaccucaggaaacacgcgugugguggaccagcaacuccauuguuguguucugcgggacgucuggaacauauggcaccgggagcuggcccgacggcgcuaauaucaacuuuaugcccaucuga

SEQ ID NO: 208540 - RNA, 1410 nt, Artificial Sequence; identical to SEQ ID NO: 208539
  derived and/or modified CDS sequence (opt5) from neuraminidase__InfluenzaA__ACF54513

SEQ ID NO: 208541 - RNA, 1410 nt, Artificial Sequence
  derived and/or modified CDS sequence (opt5) from neuraminidase__InfluenzaA__ACF54524
augaaccccaaucagaagaucauuaccaucggcagcgugucccugacaauugccacggucugcuucuuuaugcaaaucgcuauucucgccaccacaguuacccugcacuucaaacagcaugagugugacucuccugcgagcaaccaggugaugccgugcgaacccaucaucauugagagaaauaucacagaaauuguguaccuuaacaauaccacaaucgagaaggaaauuuguccugaggucguggaguaucggaacugguccaaaccccagugccaaaucaccggguuugcuccuuucucuaaggauaauagcauucgccuguccgccggaggcgacaucuggguuacgagagaacccuacgugucuugugauccugggaaaugcuaucaguuugcccucggacagggcaccacacuggacaacaagcacagcaaugggaccauccaugaucggauuccgcaccgcacacuucugaugaacgagcucggagucuccuuccaucugggcaccaaacagguguguguugcuuggucuagcuccagcugccacgacggcaaggccuggcugcacgugugugucacgggggaugacagaaaugcuacagccucuuuuaucuacgauggacggcucguggacuccauuggcagcuggucucaaaacauccugcgcacccaggaauccgagugcguguguauuaaugggacaugcaccgucguuaugaccgauggaagcgcguccggcagagccgacacacggauccuuuucaucaaggaggggaaaauugugcauaucucuccccugagcggauccgcucagcacauugaagagugcagcuguuauccucgcuaccccgaugugagaugcaucugucgggacaacuggaagggcucuaaucgcccugucauugacaucaacauggaagauuauuccaucgacagcucuuacgugugcagcggccucguuggggauacgcccagaaacgacgauuccucuagcaauuccaacugucgggacccgaauaacgagcgcggaaauccuggcgugaaagggugggccuuugauaacggagacgaugucuggaugggcagaaccauuaauaaggacagccggucuggguacgaaacauucaaggugaucggaggcugguccacccccaacagcaaaucucagguuaauagacaagugauugucgauaacaauaacugguccggcuauagcgggaucuuuuccguggagggaaagucuugcauuaaucgcuguuucuacgucgagcugauccggggcagaccucaggaaacacgcgugugguggaccagcaacuccauuguuguguuuugcgggacgucuggaacauauggcaccgggagcuggcccgacggcgcuaauaucaacuucaugcccaucuga

SEQ ID NO: 208542 - RNA, 1410 nt, Artificial Sequence
  derived and/or modified CDS sequence (opt5) from neuraminidase__InfluenzaA__ACF54535
augaaccccaaucagaagaucauuaccaucggcagcgugucccugauuaucucuacaauuugcuucuuuaugcaaacggccauccucaucaccacagucacccugcacuucaaacaguacgaguuuaacagcccuccgaauaaccagguuaugcuuugugaacccacaauuaucgagagaaauauuaccaagaucguguaucugacaaacaccacgauugaaaaagagaucugcccuaagcucgcugaauaccggaauugguccaaaccccagugugacauuaccggguucgccccuuuuucuaaggauaacagcauccgccuguccgcgggaggcgacaucugggugacaagagagcccuaugucucuugcgauccugacaaguguuaccaauucgcucuugggcagggaaccacacugaauaacgugcauagcaaugauaccguucgggaccgcacgccguauagaacacuccugaugaacgagcugggcgugcccuuucaccucgggaccaaacaggucugcauugccugguccucuagcuccugucaugauggaaaggccuggcugcacgugugcaucacaggcgacgauaaaaaugcuaccgccagcuucauuuacaacggccggcuuguugacucuaucguguccuggagcaaggaaauucugcgcacccaggagucugaaugugucugcaucaaugggacauguacgguggugaugaccgauggauccgcuagcggcaaagccgacacaaagauccucuuuauugaggaggggaagaucguccauaccuccacacugucuggaagcgcgcaacacguugaagagugcuccugcuauccuagauaccccggcgugcggugugugugccgcgauaacuggaaagggagcaacagaccuauugucgacaucaauauuaaggaccacucuaucguguccagcuacguuuguucuggacuugugggcgauacgccccggaaaaacgacagcuccucuagcucccauugccuggauccgaauaacgaagagggcgggcacggagucaagggcugggccuucgacgaugggaaugacguguggaugggacgcaccaucagcgaaaaaucuagacucggcuaugagacauuuaagguuauugaggggugguccaacccuaaaagcaagcugcagaucaaucgccaggugauugucgaucggggaaacagaucuggcuacuccggcaucuucagcguggaagggaaguccuguauuaaucggugcuuuuaugucgagcugaucagaggacgcaaagaagagaccgaagugcucuggaccucuaacagcauuguuguguucuguggcacauccgggaccuacggaacaggcucuuggcccgacggggcugauaucaaucugaugccuaucuga

SEQ ID NO: 208543 - RNA, 1410 nt, Artificial Sequence; identical to SEQ ID NO: 206356
  derived and/or modified CDS sequence (opt5) from neuraminidase__InfluenzaA__ACF54557

SEQ ID NO: 208544 - RNA, 1410 nt, Artificial Sequence; identical to SEQ ID NO: 208001
  derived and/or modified CDS sequence (opt5) from neuraminidase__InfluenzaA__ACF54568

SEQ ID NO: 208545 - RNA, 1410 nt, Artificial Sequence
  derived and/or modified CDS sequence (opt5) from neuraminidase__InfluenzaA__ACF54579
augaaccccaaucagaagaucauuaccaucggcagcgugucccugacaauuucuacgaucugcuucuuuaugcaaauugccauccucaucaccacagucacccugcacuucaaacaguacgaguuuaacagcccuccgaauaaccagguuaugcuuugugaacccacaauuaucgagagaaauauuaccgaaaucguguaucugacaaacaccacgauugagaaggaaaucugcccuaaacucgcugaguaccggaauugguccaagccccaguguaacauuaccggguucgccccuuuuucuaaagacaauagcauccgccuguccgcgggaggcgauaucugggugacaagagagcccuaugucucuugcgacccugauaaguguuaccaauucgcucuugggcagggaaccacacugaacaaugugcauagcaacgacaccguucacgaucggacgccguaucgcacacuccugaugaaugaacugggcgugcccuuucaucucgggaccaagcaggucugcauugccugguccucuagcuccugucacgacggaaaagccuggcugcaugugugcguuacaggcgaugacaagaacgcuaccgccagcuucaucuacaauggcagacuuguggauucuauugucuccuggagcaaagagauccugcggacccaggaaucugagugugugugcauuaacgggacauguacgguggucaucaccgacggauccgcuagcggcaaggccgauacaaaaauccucuuuauugaggaagggaagaucguucacaccuccacacugucuggaagcgcgcaacacguggaggaaugcuccugcuauccucgcuaccccggcgugagaugugucugccgggacaacuggaaggggagcaaucgcccuauuguggauaucaacauuaaagacuacucuaucguuuccagcuauguguguucuggacuugucggcgacacccccagaaagaaugauagcuccucuagcucccauugccuggacccgaacaaugaggaaggcgggcacggagugaaaggcugggccuucgaugacgggaacgauguuuggaugggacggacgaucagcgagaagcuccgcucuggcuacgagacauuuaaagugauugaagggugguccaauccuaacagcaagcugcagaucaauagacaggucauuguggaccggggaaaccgcucuggcuauuccggcaucuucagcgucgaggggaaauccuguauuaauagaugcuuuuacguggaacugauccggggaagaaaggaggaaaccgagguucucuggaccucuaacagcauuguggucuucuguggcacauccgggaccuauggaacaggcucuuggcccgauggggcugacaucaaucugaugccuaucuga

SEQ ID NO: 208546 - RNA, 1362 nt, Artificial Sequence
  derived and/or modified CDS sequence (opt5) from neuraminidase__InfluenzaA__ACF54601
augaaccccaaucagaagaucauuaccaucggcagcauuugcaugguggucgggaucauuucccugauccuccaaaucggaaacauuaucucuauuuggaucagccacuccauucagacaggcaaucagaaccauacggggaucuguaaucagggaucuauuaccuacaaaguuguggccggccaagacagcacauccgugauccugaccgggaacucuagccuuugcccuaucagaggaugggcuauucacuccaaggauaauggcauccggauuggcagcaaaggggacgucuucgugauccgcgagccguuuauuucuuguucccaucuggaaugcagaacauucuuucucacccagggagcccugcuuaacgauaagcacagccggggcacauucaaagaccgcucucccuauagagcgcugauguccuguccuguuggggaggcucccagcccuuacaauucucgguuugaauccguggccuggagcgccuccgcuugccaugauggaaugggcuggcucaccaucgggaucucuggacccgacgauggcgccgucgcugugcugaaguauaacggcauuaucacggagaccauuaagagcuggcgcaaaaauauccugagaacacaggaauccgaguguaccugcguuaacgggagcuguuucacaauuaugaccgacggaccuucugauggccucgccuccuacaagaucuuuaaaaucgagaaggggaaagugacaaagagcauugaacugaaugcgccgaacucucacuaugaggaaugcagcuguuaccccgacacgggaaaggucaugugcgugugccgggauaauuggcacggcuccaaccgcccuugggugucuuucgaccagaaccuugauuauaaaaucggguacauuuguagcggagucuuuggcgacaaucccagaccuaaggacggcaccggguccugcggacccguuagcgccgauggcgcuaacggggugaaaggauucucuuacaaguauggcaaugggguguggaucggccggacaaaauccgacagcucucgccauggauuugagaugauuugggauccgaacggcuggaccgagaccgacuccagauucagcaugcggcaagaugucguggccaugacagaccgcuccggguacucuggcagcuuuguucagcacccugaacugacgggacucgauuguaugagacccugcuucuggguggagcugauccgggggcuuccugaagagaaugcuauuuggaccuccggaucuaucaucagcuucuguggcgucaacuccgacacaguggauuggagcuggcccgacggggccgaacugcccuuuaccauugauaaguga

SEQ ID NO: 208547 - RNA, 1350 nt, Artificial Sequence
  derived and/or modified CDS sequence (opt5) from neuraminidase__InfluenzaA__ACG50700
augaaccccaaucagaagaucauuaccaucggcagcauuugcauggugaucgggauugucucccugaugcuccaaaucggaaacaugaucucuauuuggguuagccacuccauccagacaggcaaucagcaucaggccgagccuauuucuaacacgaauuuccugaccgaaaaagcuguggccagcgugacacuugcggggaacuccccgcugugucccaucucuggaugggcuguccacagcaaggacaauuccauuagaaucggcagcaaaggggauguguuuguuauucgggagccuuucaucucuugcucccaucucgaaugucgcaccuuuuuccugacacaaggagcccuucugaacgacaagcacagcaauggcaccgugaaagauagaucuccccaucggacacucauguccugcccugucggcgaggcccccagcccuuacaacucucgcuuugaauccguggcuuggagcgccuccgcuugucacgacgggaccucuuggcugacgaucggaauuagcggcccggauaauggggccguugcggugcugaaguauaacggaaucauuaccgacacaaucaaguccuggagaaauaacauucuccggacccaggagagcgagugcgccugugucaauggcucuugcuucacagugaugaccgaugggcccuccaacggacaggcuagcuacaaaaucuuuaagauggaaaaaggcaagguggucaaaucuguugagcuggacgccccuaacuaucacuacgaagaguguagcugcuaucccgaugcuuccgaggugacgugugugugccgcgacaauuggcauggcucuaacagaccuugggucagcuucaaucagaaccuugaauaccaaaucggguauauuugcuccggaguguuuggcgauaauccccggccgaacgacgggacaggaagcuguggcccuguuucuaccaauggggccuacggagugaagggcuucuccuuuaaguacggcaacggggucuggaucggacgcacaaaaagcaccaauucuagauccggcuucgagaugauuugggauagcaacggguggaccggaacagacuccucuuuuagcgugaagcaggacaucguugcgauuacggauugguccggcuauucugggagcuucgugcagcaccccgaacugaccggccucgacugcauccggccuuguuucugggucgagcugauccgcggaagacccaaagaauccacaauuuggaccagcgggucuuccaucagcuuuugcggcgucaauucugauacagugggaugguccuggcccgacggcgccgagcuuccuuucaccauugauaaguga

SEQ ID NO: 208548 - RNA, 1410 nt, Artificial Sequence; identical to SEQ ID NO: 208129
  derived and/or modified CDS sequence (opt5) from neuraminidase__InfluenzaA__ACG70145

SEQ ID NO: 208549 - RNA, 1410 nt, Artificial Sequence; identical to SEQ ID NO: 207956
  derived and/or modified CDS sequence (opt5) from neuraminidase__InfluenzaA__ACG70156

SEQ ID NO: 208550 - RNA, 1410 nt, Artificial Sequence
  derived and/or modified CDS sequence (opt5) from neuraminidase__InfluenzaA__ACG80407
augaaccccaaucagaagaucauuaccaucggcagcgugucccugacaauuucuacgaucugcuucuuuaugcaaauugccauccucaucaccacagucacccugcacuucaaacaguacgaguuuaacagcccuccgaauaaccagaugaugcuuugugaacccacaauuaucgagagaaauauuaccgaaaucguuuaucugacaaacaccacgauugagaaggaaaucugcccuaaacucgcuaaguaccggaauugguccaaaccccagugugacauuaccggguucgccccuuuuucuaaggauaacagcauccgccuguccgcgggaggcgacaucugggugacaagagagcccuaugugucuugcgauccugacaaguguuaccaauucgcucuugggcagggaaccacacugaauaacguccauagcaaugauaccgcccggggccgcacgccguauagaacacuccugaugaacgagcugggggugcccuuucaccucggaaccaaacagguuugcauugccugguccucuagcuccugucaugacggcaaggcuuggcugcacgugugcaucacaggcgaugacaaaaaugccaccgcuagcuucauuuacaacgggcggcuugucgauucugugguuuccuggagcaaggaaauccugcgcacccaggagucugaaugugugugcauuaauggaacauguacggucgugaugaccgacggcuccgccagcggggaggcggauacaaaaauccucuuuaucgaggaaggaaagauugugcauaccuccacacugucuggcagcgcccaacacgucgaggaaugcuccugcuauccuagauaccccgggguucggugugugugccgcgacaacuggaagggaagcaacagaccuaucguggauauuaauaucaaagaccacucuauugucuccagcuacguguguucuggccuuguuggcgacacgccccggaagaacgauagcuccucuagcucccauugccuggacccgaauaacgaggaagggggacacggcgugaaagggugggcuuucgaugacggaaaugaugucuggaugggccgcaccaucagcgagaagucuagacucggguaugagacauuuaaagugaucgaaggaugguccaacccuaagagcaaacugcagauuaaucggcagguuaucguggaccgcggcaacagaucuggcuacuccgggauuuucagcgucgagggaaaguccuguaucaaucggugcuuuuauguggaacugauuagaggccgcaaggaggaaaccgagguccucuggaccucuaacagcaucgugguuuucugugggacauccggaaccuacggcacagggucuuggcccgauggcgccgacauuaaucugaugccuaucuga

SEQ ID NO: 208551 - RNA, 1410 nt, Artificial Sequence
  derived and/or modified CDS sequence (opt5) from neuraminidase__InfluenzaA__ACG80411
auggacagcaacuccaagaucauuaccaucggcucugugagccugacaauuuccacgaucugcuucuuuaugcagauugccauccucaucaccacagucacccugcacuucaaacaauacgaguuuaauucucccccuaacaaucagaugaugcuuugugaaccgacaauuaucgagagaaacauuaccgaaaucguuuaucugacaaauaccacgauugagaaggaaaucugccccaaacucgcugaguaccggaacuggagcaagccucagugugauauuaccggguucgcccccuuuuccaaagacaauucuauccgccugagcgcgggaggcgauaucugggugacaagagagccuuauguguccugcgaccccgauaaguguuaccaguucgcucuugggcaaggaaccacacugaacaauguccauagcaacgacaccgccggcgggcggacgccuuaucgcacacuccugaugaaugaacugggagugccguuucaccucggcaccaagcagguuugcauugccuggucuuccagcucuugucaugauggcaaggcuuggcugcacgugugcaucacaggggacgauaaaaacgccaccgcuuccuucauuuacgacggaagacuugucgauggcgugguuagcuggucuaaagagauccugcggacccaggaauccgagugugugugcauuaaugggacauguacggucgugaugaccgacggaagcgccuccggcgaggcggauacaaagauccucuuuaucgaagaggggaaaauugugcauaccucuacacugagcggauccgcccagcacgucgaagagugcagcugcuauccccgcuacccuggcguuagaugugugugccgggacaacuggaagggcucuaaucgccccaucguggacauuaacaucaaggaucacuccauugucagcucuuacguguguagcgggcuuguuggagacaccccucggaaaaacgauuccucuagcuccagccauugccuggaccccaauaacgaagagggcgggcacggagugaagggcugggcuuucgaugacgggaaugaugucuggaugggaagaacgaucucugagaaaucccgccucggcuaugaaacauuuaaggugaucgagggcuggagcaacccgaaaucuaagcugcaaauuaauagacagguuaucguggaccgggggaaccgcuccggauacagcggcauuuucuccgucgaagggaaaucuuguaucaauagaugcuuuuauguggagcugauucggggaagaaaggaagagaccgagguccucuggaccagcaacuccaucgugguuuucuguggcacaucugggaccuacggcacaggaagcuggccugauggcgccgacauuaaucugaugcccaucuga

SEQ ID NO: 208552 - RNA, 1407 nt, Artificial Sequence
  derived and/or modified CDS sequence (opt5) from neuraminidase__InfluenzaA__ACG80421
augaaccccauccagaagauuaucaccauuggcagcgugucccugacaaucucuacgauuugcuucuuuaugcaaaucgccauccucauuaccacagucacccugcacuucaaacaguacgaguuuaauagcccuccgaacaaucagaugaugcuuugugaacccacaaucauugagagaaacaucaccgaaauuguuuaucugacaaauaccacgaucgagaaggaaauuugcccuaaacucgcugaguaccggaacugguccaagccccagugugacaucaccggguucgccccuuuuucuaaagauaauagcauccgccuguccgcgggaggcgacauuugggugacaagagagcccuaugugucuugcgauccugacaaguguuaccaauucgcucuugggcagggaaccacacugaacaauguccauagcgauaccgcccgggaccgcacgccguauagaacacuccugaugaacgaacugggcgugcccuuucaccucgggaccaagcagguuugcaucgccugguccucuagcuccugucaugauggaaaggcuuggcugcacgugugcauuacaggcgacgauaaaaaugccaccgcuagcuucaucuacaacggccggcuugucgacucugugguuuccuggagcaaagagauucugcgcacccaggaaucugagugugugugcaucaaugggacauguacggucgugaugaccgauggauccgccagcggcgaggcggacacaaagauccucuuuauugaagaggggaaaaucgugcauaccuccacacugucuggaagcgcccaacacgucgaagagugcuccugcuauccuagauaccccggcguucggugugugugccgcgauaacuggaaggggagcaauagaccuauuguggacaucaacauuaaggaccacucuaucgucuccagcuacguguguucuggacuuguuggcgauacgccccggaaaaacgacagcuccucuagcucccauugccuggauccgaauaacgaagagggcgggcacggagugaagggcugggcuuucgacgaugggaaugacgucuggaugggacgcaccaucagcgagaaaucuagacucggcuaugaaacauuuaaggugauugaggggugguccaacccuaaaagcaagcugcagaucaaucggcagguuauuguggaucgcggaaacagaucuggcuacuccggcaucuucagcgucgaagggaaauccuguauuaaucggugcuuuuauguggagcugaucagaggacgcaaggaagagaccgagguccucuggaccucuaacagcauugugguuuucuguggcacauccgggaccuacggaacaggcucuuggcccgacggggccgauaucaaucugaugccuaucuga

SEQ ID NO: 208553 - RNA, 1407 nt, Artificial Sequence
  derived and/or modified CDS sequence (opt5) from neuraminidase__InfluenzaA__ACG80427
auggaccccaacagcaagaucauuaccaucggcuccgugucucugacaauuagcacgaucugcuucuuuaugcagauugccauccucaucaccacagucacccugcacuucaaacaauacgaguuuaauuccccuccgaacaaucagaugaugcuuugugaacccacaauuaucgagagaaacauuaccgaaaucguuuaucugacaaauaccacgauugagaaggaaaucugcccuaaacucgcugaguaccggaacuggucuaagccccagugugauauuaccggguucgccccuuuuagcaaagacaauuccauccgccugucugcgggaggcgauaucugggugacaagagagcccuaugugagcugcgacccugauaaguguuaccaguucgcucuugggcaaggaaccacacugaacaauguccauuccgacaccgcccgggaucgcacgccguauagaacacuccugaugaacgaacugggcgugcccuuucaccucgggaccaagcagguuugcauugccuggucuagcuccagcugucaugacggaaaggcuuggcugcacgugugcaucacaggcgaugacaaaaaugccaccgcuucuuucauuuacaacggccggcuugucgauuccgugguuagcuggucuaaagagauccugcgcacccaggaauccgagugugugugcauuaaugggacauguacggucgugaugaccgacggaagcgccuccggcgaggcggauacaaagauccucuuuaucgaagaggggaaaauugugcauaccucuacacugagcggauccgcccagcacgucgaagagugcagcugcuauccuagauaccccggcguucggugugugugccgcgacaacuggaaggggucuaauagaccuaucguggacauuaacaucaaggaucacuccauugucagcucuuacguguguagcggacuuguuggcgacacgccccggaaaaacgauuccucuagcuccagccauugccuggacccgaauaacgaagagggcgggcacggagugaagggcugggcuuucgaugacgggaaugaugucuggaugggacgcaccaucucugagaaauccagacucggcuaugaaacauuuaaggugaucgagggguggagcaacccuaaaucuaagcugcaaauuaaucggcagguuaucguggaccgcggaaacagauccggcuacagcggcauuuucuccgucgaagggaaaucuuguaucaaucggugcuuuuauguggagcugauuagaggacgcaaggaagagaccgagguccucuggaccagcaacuccaucgugguuuucuguggcacaucugggaccuacggaacaggcagcuggcccgauggggccgacauuaaucugaugccuaucuga

SEQ ID NO: 208554 - RNA, 1410 nt, Artificial Sequence
  derived and/or modified CDS sequence (opt5) from neuraminidase__InfluenzaA__ACG80437
augaaccccaaucagaagaucauuaccaucggcagcgugucccugacaauuucuacgaucugcuucuuuaugcaaauugccauccucaucaccacagucacccugcacuucaaacaguacgaguuuaacagcuccccuaauaaccagguuaugcuuugugaaccgacaauuaucgagagaaauauuaccgaaaucguguaucugacaaacaccacgauugagaaggaaaucugccccaaacucgcugaguaccggaauuggucuaagccucagugugacauuaccggguucgcccccuuuagcaaagauaacuccauccgccugucugcgggaggcgacaucugggugacaagagagccuuaugucagcugcgaucccgacaaguguuaccaauucgcucuugggcagggaaccacacugaauaacgugcauuccaauaacaccguucgggaucgcacgccuuauagaacacuccugaugaaugaacugggcgugccguuucaccucgggaccaagcaggucugcauugccuggucuagcuccagcugucaugacggaaaagccuggcugcacgugugcaucacaggcgaugacaagaacgcuaccgccaauuucauuuacaacggccggcuuguugauucuaucguguccuggagcaaagagauuuuucgcacccaggaaucugagugugucugcaucaacgggacauguacgguggugaugaccgacggauccgcuagcggcaaggccgauacaaaaauccuguucauugaggaagggaagaucguccauaccuccacacucucuggaagcgcgcaacacguugaggaaugcuccugcuaucccagauacccuggcgugcggugugugugccgcgacaauuggaaggggagcaacagacccauugucgauaucaauauuaaagaccacucuaucguguccagcuacguuuguucuggacuggugggcgacaccccucggaagaacgauagcuccucuagcucccauugccuugaccccaauaacgaggaaggcgggcacggagucaaaggcugggccuuugaugacgggaaugauguguggaugggacgcacgaucagcgagaagucuagauccggcuaugagacauucaaaguuauugaaggguggagcaacccgaagucuaaacugcagaucaaucgccaggugauugucgaccggggaaacagauccggcuacagcggcaucuuuuccguggaggggaagucuuguauuaaucggugcuucuaugucgaacucaucagaggacgcaaggaggaaaccgaggugcuguggaccagcaacuccauuguuguguucuguggcacaucugggaccuacggaacaggcagcuggccugauggggcugacaucaaucugaugcccaucuga

SEQ ID NO: 208555 - RNA, 1407 nt, Artificial Sequence
  derived and/or modified CDS sequence (opt5) from neuraminidase__InfluenzaA__ACG80446
augaaccccaaucagaagaucauuaccaucggcagcgugucccugacaauuucuacgaucugcuucuuuaugcaaauugccauccucaucaccacagucacccugcacuucaaacaguacgaguuuaacagcccuccgaauaaccagaugaugcuuugugaacccacaauuaucgagagaaauauuaccgaaaucguuuaucugacaaacaccacgauugagaaggaaaucugcccuaaacucgcugaguaccggaauugguccaagccccagugugacauuaccggguucgccccuuuuucuaaagauaacagcauccgccuguccgcgggaggcgacaucugggugacaagagagcccuaugugucuugcgauccugacaaguguuaccaauucgcucuugggcagggaaccacacugaauaacguccauagcgauaccgcccgggaccgcacgccguauagaacacuccugaugaaugaacugggcgugcccuuucaccucgggaccaagcagguuugcauugccugguccucuagcuccugucaugauggaaaggcuuggcugcacgugugcaucacaggcgacgauaaaaacgccaccgcuagcuucauuuacaauggccggcuugucgacucugugguuuccuggagcaaagagauccugcgcacccaggaaucugagugugugugcauuaacgggacauguacggucgugaugaccgauggauccgccagcggcgaggcggacacaaagauccucuuuaucgaagaggggaaaauugugcauaccuccacacugucuggaagcgcccaacacgucgaagagugcuccugcuauccuagauaccccggcguucggugugugugccgcgauaauuggaaggggagcaacagaccuaucguggacauuaacaucaaggaccacucuauugucuccagcuacguguguucuggacuuguuggcgauacgccccggaaaaaugacagcuccucuagcucccauugccuggauccgaacaaugaagagggcgggcacggagugaagggcugggcuuucgacgaugggaacgacgucuggaugggacgcaccaucagcgagaaaucuagacucggcuaugaaacauuuaaggugaucgaggggugguccaauccuaaaagcaagcugcagauuaaccggcagguuaucguggaucgcggaaauagaucuggcuacuccggcauuuucagcgucgaagggaaauccuguaucaaccggugcuuuuauguggagcugauuagaggacgcaaggaagagaccgagguccucuggaccucuaauagcaucgugguuuucuguggcacauccgggaccuacggaacaggcucuuggcccgacggggccgauauuaaccugaugccuaucuga

SEQ ID NO: 208556 - RNA, 1410 nt, Artificial Sequence
  derived and/or modified CDS sequence (opt5) from neuraminidase__InfluenzaA__ACG80455
augaaccccaaucagaagaucauuaccaucggcagcguguccuucauuaucucuagcauuugcuuuuucaugcaaaucgccauccugauuacaacggucacccuccacuuuaaacaguacgaguucaacuccccuccgaauaaccagaugaugcugugugaacccacaaucauugagagaaauaucaccgaaauuguuuaucuuacaaacaccacaaucgagaaggaaauuugcccuaaacuggcugaguaccggaauuggucuaagccccagugugacaucaccggguuugccccuuucagcaaagauaacuccauccgccucucugcgggaggcgacauuugggugacgagagagcccuaugugagcugcgauccugacaaguguuaccaauuugcucuggggcagggaaccacacuuaauaacguccauuccaaugauaccgcccggggccgcacaccguauagaacccugcucaugaacgaacugggggugcccuuccaccugggaacgaagcagguuugcaucgccuggucuagcuccagcugucaugacggcaaggcuuggcuccacgugugcauuacaggcgaugacaaaaaugccaccgcuucuuuuaucuacgaugggcggcuggucgacuccgugguuagcuggucuaaagagauucuucgcacacaggaauccgagugugugugcaucaacggaaccuguaccgucgugaugacagauggcagcgccuccggggaggcggacacgaagauccuguucauugaagagggaaaaaucgugcauaccucuacacucagcggcuccgcccaacacgucgaagagugcagcugcuauccuagauaccccgggguucggugugugugccgcgauaauuggaagggaucuaacagaccuauuguggacaucaacauuaaggaccacuccaucgucagcucuuacguguguagcggccugguuggcgauacaccccggaaaaaugacuccucuagcuccagccauugccuugauccgaacaaugaagaagggggacacggcgugaaggggugggcuuuugacgauggaaacgacgucuggaugggccgcaccaucucugagaaauccagacugggguaugagaccuucaaggugauugagggauggagcaauccuaaaucuaagcuccagaucaaccggcagguuauuguggaucgcggcaauagauccggcuacagcgggaucuuuuccgucgaaggaaaaucuuguauuaaccggugcuucuauguggagcugaucagaggccgcaaggaagagacggagguccuguggacaagcaauuccauugugguuuucugugggaccucuggaaccuacggcacagggagcuggcccgacggcgccgauaucaaccucaugccuaucuga

SEQ ID NO: 208557 - RNA, 1407 nt, Artificial Sequence; identical to SEQ ID NO: 208555
  derived and/or modified CDS sequence (opt5) from neuraminidase__InfluenzaA__ACG80464

SEQ ID NO: 208558 - RNA, 1410 nt, Artificial Sequence
  derived and/or modified CDS sequence (opt5) from neuraminidase__InfluenzaA__ACG80473
auggaccccauccagaagauuaucaccauuggcagcgugucccugacaaucucuacgauuugcuucuuuaugcaaaucgccauccucauuaccacagucacccugcacuucaaacaguacgaguuuaacagcccuccgaauaaccagaugaugcuuugugaacccacaaucauugagagaaauaucaccgaaauuguuuaucugacaaacaccacgaucgagaaggaaauuugcccuaaacucgcugaguaccggaauugguccaagccccagugugauaucaccggguucgccccuuuuucuaaagacaacagcauccgccuguccgcgggaggcgauauuugggugacaagagagcccuaugugucuugcgacccugauaaguguuaccaauucgcucuugggcagggaaccacacugaauaacguccauagcaaugacaccgcccggggccgcacgccguauagaacacuccugaugaacgaacugggggugcccuuucaccucggaaccaagcagguuugcaucgccugguccucuagcuccugucaugauggcaaggcuuggcugcacgugugcauuacaggcgacgauaaaaaugccaccgcuagcuucaucuacgacgggcggcuugucgauucugugguuuccuggagcaaagagauucugcgcacccaggaaucugagugugugugcaucaacggaacauguacggucgugaugaccgacggcuccgccagcggggaggcggauacaaagauccucuuuauugaagagggaaaaaucgugcauaccuccacacugucuggcagcgcccaacacgucgaagagugcuccugcuauccuagauaccccgggguucggugugugugccgcgacaauuggaagggaagcaacagaccuauuguggacaucaauauuaaggaucacucuaucgucuccagcuacguguguucuggccuuguuggcgacacgccccggaaaaacgauagcuccucuagcucccauugccuggacccgaacaaugaagaagggggacacggcgugaaggggugggcuuucgaugacggaaacgaugucuggaugggccgcaccaucagcgagaaaucuagacucggguaugagacauuuaaggugauugagggaugguccaauccuaaaagcaagcugcagaucaaccggcagguuauuguggaccgcggcaauagaucuggcuacuccgggaucuucagcgucgaaggaaaauccuguauuaaccggugcuuuuauguggagcugaucagaggccgcaaggaagagaccgagguccucuggaccucuaauagcauugugguuuucugugggacauccggaaccuacggcacagggucuuggcccgauggcgccgacaucaaccugaugccuaucuga

SEQ ID NO: 208559 - RNA, 1410 nt, Artificial Sequence; identical to SEQ ID NO: 206784
  derived and/or modified CDS sequence (opt5) from neuraminidase__InfluenzaA__ACH69559

SEQ ID NO: 208560 - RNA, 1410 nt, Artificial Sequence
  derived and/or modified CDS sequence (opt5) from neuraminidase__InfluenzaA__ACH69570
augaaccccaaucagaagaucauuaccaucggcagcgugucccugacaauuucuacgaucugcuucuuuaugcaaauugccauccucaucaccacagucacccugcacuucaaacaguacgaguuuaacagcccuccgaauaaccagguuaugcuuugugaacccacaauuaucgagagaaauauuaccgaaaucguguaucugacaaacaccacgauugagaaggaaaucugcccuaaacucgcugaguaccggaauugguccaagccccaguguaacauuaccggguucgccccuuuuucuaaagacaauagcauccgccuguccgcgggaggcgauaucugggugacaagagagcccuaugucucuugcgacccugauaaguguuaccaauucgcucuugggcagggaaccacacugaacaaugugcauagcaacgacaccguucacgaucggacgccguaucgcacacuccugaugaaugaacugggcgugcccuuucaucucgggaccaagcaggucugcauugccugguccucuagcuccugucacgacggaaaagccuggcugcaugugugcguuacaggcgaugacaagaacgcuaccgccagcuucaucuacaauggcagacuuguggauucuauugucuccuggagcaaagagauccugcggacccaggaaucugagugugugugcauuaacgggacauguacgguggucaugaccgacggauccgcuagcggcaaggccgauacaaaaauccucuuuaucgaggaagggaagauuguucacaccuccacacugucuggaagcgcgcaacacguggaggaaugcuccugcuauccucgcuaccccggcgugagaugugucugccgggacaacuggaaggggagcaaucgcccuaucguggauauuaacaucaaagacuacucuauuguuuccagcuauguguguucuggacuugucggcgacacccccagaaauaacgauagcuccucuagcucccauugccuggacccgaauaacgaggaaggcgggcacggagugaagggcugggccuucgaugacgggaaugauguuuggaugggacggacgaucagcgagaaacuccgcucuggcuacgagacauuuaaggugaucgaagggugguccaacccuaauagcaaacugcagauuaacagacaggucaucguggaccggggaaaucgcucuggcuauuccggcauuuucagcgucgaggggaaguccuguaucaacagaugcuuuuacguggaacugauucggggaagaaaagaggaaaccgagguucucuggaccucuaauagcaucguggucuucuguggcacauccgggaccuauggaacaggcucuuggcccgauggggcugacauuaaccugaugccuaucuga

SEQ ID NO: 208561 - RNA, 1410 nt, Artificial Sequence; identical to SEQ ID NO: 206784
  derived and/or modified CDS sequence (opt5) from neuraminidase__InfluenzaA__ACH69581

SEQ ID NO: 208562 - RNA, 1410 nt, Artificial Sequence
  derived and/or modified CDS sequence (opt5) from neuraminidase__InfluenzaA__ACH69592
augaaccccaaucagaagaucauuaccaucggcagcgugucccugacaauugccacgaucugcuuccucaugcaaauugcuauccuggucaccacaguuacccuucacuuuaaacaguacgaguguaacucuccuccgaauaaccaggugaugcugugcgaacccacaaucauugagagaaauaucaccgaaauuguguaucucacaaacaccacgaucgagaaggaaauuuguccuaaacuggccgaguaccggaauuggagcaagccccagugcaacaucaccggguucgcgccuuuuuccaaagacaauucuauucgccuuagcgcuggaggcgauaucugggucacaagagagcccuauguguccugugacccugauaagugcuaccaauucgcccuggggcagggaaccacacucaacaauggccauucuaacgacaccguucacgaucggacgccguaucgcacacugcugaugaaugaacucggggugcccuuucaucugggaaccaagcaggucuguaucgccuggagcuccagcucuugccacgacggcaaggcuuggcuucauguguguguuacaggcgaugacgagaacgccaccgcuuccuucauuuacaaugggagacugguggauagcaucggaucuugguccaagaaaauucuccggacccaggaaagcgagugcgucuguaucaacggcacaugcacgguggugaugaccgacgggucugccuccggaaaggcggauacaaaaauucuguuuaucgaggaaggcaagaucguccacaccagcccucuuuccgggucugcccaacacguugaggaaugcagcuguuauccccgcuacccuggagugagaugcgugugucgggacaacuggaagggcuccaaucgccccauugucgauaucaacgugaaagacuacagcauuguuucuuccuaugugugcagcggccuggucggggacacaccgagaaagaaugauucuagcuccucuagccauugucucgacccuaacaaugaggaaggaggccacggggugaaaggaugggcuuucgaugacggcaacgauguuuggauggggcggaccaucuccgagaaaagccgcucuggauacgagacguuuaaagugauugaaggcugguccaagcccaauagcaaacugcagaucaacagacaggucaucguggaccggggcaaucgcucuggguauuccggaauuuucagcgucgagggcaaguccugcaucaaccaguguuuuuacguggaacugauuagagggcggaagcaagagacagaaguucucuggaccucuaauagcaucguggucuucugcggaaccuccggcacauaugggaccggcucuuggccugauggagccgaccugaaccuuaugcccauuuga

SEQ ID NO: 208563 - RNA, 1410 nt, Artificial Sequence
  derived and/or modified CDS sequence (opt5) from neuraminidase__InfluenzaA__ACH69603
augaaccccaaucagaagaucauuaccaucggcagcgugucccugacaauugccacgaucugcuuccucaugcaaauugucauccugguuaccacagugacccuucacuuuaaacaguacgaguguaacucuccuccgaauaaccaggugaugcugugcgaacccacaaucauugagagaaauaucaccgaaauugucuaucucacaaacaccacgaucgagaaggaaauuuguccuaaacuggcugaguaccggaauuggagcaagccccagugcaacaucaccggguucgccccuuuuuccaaagacaauucuauucgccuuagcgcgggaggcgauaucugggugacaagagagcccuauguuuccugugacccugauaagugcuaccaauucgcucuggggcagggaaccacacucaacaauggccauucuaacgacaccgugcacgaucggacgccguaucgcacacugcugaugaaugaacucgggguccccuuucaucugggaaccaaacagguguguaucgccuggagcuccagcucuugccacgacggcaaggccuggcuucauguuugugugacaggcgaugacgagaacgcuaccgccuccuucauuuacaaugggagacuggucgauagcaucggaucuugguccaagaaaauucuccggacccaggaaagcgagugcguguguaucaacggcacaugcacgguggucaugaccgacgggucugcuuccggaaaggccgauacaaaaauucuguuuaucgaggaaggcaagaucguucacaccagcccucuuuccgggucugcgcaacacguggaggaaugcagcuguuauccccgcuacccuggagugagaugcgucugucgggacaacuggaagggcuccaaucgccccauuguggauaucaacguuaaagacuacagcauugugucuuccuaugucugcagcggccuggugggggacacaccgagaaagaaugauucuagcuccucuagccauugucucgacccuaacaaugaggaaggaggccacgggguuaaaggaugggccuucgaugacggcaacgauguguggauggggcggaccaucuccgaaaagagccgcucuggauacgagacguuuaaagucauugagggcugguccaagcccaauagcaaacugcagaucaacagacaggugaucgucgaccggggcaaucgcucuggguauuccggaauuuucagcguggagggcaaguccugcaucaacagauguuuuuacguugaacugauucgggggagaaagcaggagacagaagugcucuggaccucuaauagcaucgucguguucugcggaaccuccggcacauaugggaccggcucuuggccugauggagcugaccugaaccuuaugcccauuuga

SEQ ID NO: 208564 - RNA, 1410 nt, Artificial Sequence
  derived and/or modified CDS sequence (opt5) from neuraminidase__InfluenzaA__ACH69614
augaaccccaaucagaagaucauuaccaucggcagcgugucccugacaauugccacgaucugcuuccucaugcaaauugcuauccuggucaccacaguuacccuucacuuuaaacaguacgaguguaacucuccuccgaauaaccaggugaugcugugcgaacccacaaucauugagagaaauaucaccgaaauuguguaucucacaaacaccacgaucgagaaggaaauuuguccuaaacuggccgaguaccggaauuggagcaagccccagugcaacaucaccggguucgcgccuuuuuccaaagacaauucuauucgccuuagcgcuggaggcgauaucugggucacaagagagcccuauguguccugugacccugauaagugcuaccaauucgcccuggggcagggaaccacacucaacaauggccauucuaacgacaccguucacgaucggacgccguaucgcacacugcugaugaaugaacucggggugcccuuucaucugggaaccaagcaggucuguaucgccuggagcuccagcucuugccacgacggcaaggcuuggcuucauguguguguuacaggcgaugacgagaacgccaccgcuuccuucauuuacaaugggagacugguggauagcaucggaucuugguccaagaaaauucuccggacccaggaaagcgagugcgucuguaucaacggcacaugcacgguggugaugaccgacgggucugccuccggaaaggcggauacaaaaauucuguuuaucgaggaaggcaagaucguccacaccagcccucuuuccgggucugcccaacacguugaggaaugcagcuguuauccccgcuacccuggagugagaugcgugugucgggacaacuggaagggcuccaaucgccccauugucgauaucaacgugaaagacuacagcauuguuucuuccuaugugugcagcggccuggucggggacacaccgagaaagaaugauucuagcuccucuagccauugucucgacccuaacaaugaggaaggaggccacggggugaaaggaugggcuuucgaugacggcaacgauguuuggauggggcggaccaucuccgagaaaagccgcucuggauacgagacguuuaaagugauugaaggcugguccaagcccaauagcaaacugcagaucaacagacaggucaucguggaccggggcaaucgcucuggguauuccggaauuuucagcgucgagggcaaguccugcaucaacagauguuuuuacguggaacugauucgggggagaaagcaggagacagaaguucucuggaccucuaauagcaucguggucuucugcggaaccuccggcacauaugggaccggcucuuggccugauggagccgaccugaaccuuaugcccauuuga

SEQ ID NO: 208565 - RNA, 1413 nt, Artificial Sequence
  derived and/or modified CDS sequence (opt5) from neuraminidase__InfluenzaA__ACI22525
augaaccccaaucagaagaucauuaccaucggcagcauuuccaucgccauugggaucaucucucugaugcuccaaauuggaaacaucauuagcaucugggcuucccacucuauucagacaggcagccagaaucauacggggaucugcaaccagagaauuaucaccuacgagaauagcacaugggugaacaauaccuaugucaacaucaauaacacaaauguuguggccgaaaaagacaagaccucugugacacuggcgggaaacagcucccuuuguagcauuucuggcugggcuaucuacaccaaagauaauuccauucggaucgggagcaagggagacgucuucgugauucgcgagccuuuuaucucuugcucccaccuggaauguagaacguucuuucucacccaaggcgcccugcuuaacgauaaacauagcaauggcacaguuaaggaccggucuccguaucgcgcccugauguccugcccccucggggaggcuccuagccccuacaacuccaaguucgaaucuguggccuggagcgcuuccgccugucacgauggaaugggcuggcugaccaucgggauuagcggaccugacaacggcgcggucgccgugcugaaauauaaugggaucauuacagagaccaucaagucuuggaaaaagcggauucucagaacgcaggaguccgaaugcguuuguaugaacggaagcugcuuuacaaucaugaccgauggccccucuaauggcgcugccagcuacaaaaucuucaagauugagaaggggaaagugacaaaguccaucgaacugaacgcuccuaauuuucauuaugaggaguguucuugcuacccggacaccggaaccgucaugugugugugccgcgauaacuggcacggcagcaauagacccuggguguccuucaaccagaaucuugacuaccagauuggguauaucugcagcggagucuuuggcgauaacccucggcccaaagacggggaaggaucuuguaauccuguuacaguggauggcgccgacggcgugaagggguucuccuacaaauauggaaacggcgucuggauugggcgcacgaaguccaauagacugcggaaaggauuugagaugaucugggaccccaacggcuggaccaauacagauucugacuucuccgugaagcaagauguuguggcgauuaccgacuggagcggguacuccggcucuuuuguccagcacccggaacucacaggacuggauugcauccgcccuuguuucuggguggagcuuguuagaggccugccccgggaaaacaccacgaucuggacaagcggguccucuauuagcuucugcggagugaacuccgacaccgccaauuggagcuggccugauggcgcugagcuccccuuuaccaucgacaaguga

SEQ ID NO: 208566 - RNA, 1413 nt, Artificial Sequence; identical to SEQ ID NO: 208565
  derived and/or modified CDS sequence (opt5) from neuraminidase__InfluenzaA__ACI22526

SEQ ID NO: 208567 - RNA, 1413 nt, Artificial Sequence; identical to SEQ ID NO: 208565
  derived and/or modified CDS sequence (opt5) from neuraminidase__InfluenzaA__ACI22527

SEQ ID NO: 208568 - RNA, 1413 nt, Artificial Sequence; identical to SEQ ID NO: 208565
  derived and/or modified CDS sequence (opt5) from neuraminidase__InfluenzaA__ACI22528

SEQ ID NO: 208569 - RNA, 1413 nt, Artificial Sequence; identical to SEQ ID NO: 208565
  derived and/or modified CDS sequence (opt5) from neuraminidase__InfluenzaA__ACI22529

SEQ ID NO: 208570 - RNA, 1413 nt, Artificial Sequence; identical to SEQ ID NO: 208565
  derived and/or modified CDS sequence (opt5) from neuraminidase__InfluenzaA__ACI22530

SEQ ID NO: 208571 - RNA, 1413 nt, Artificial Sequence
  derived and/or modified CDS sequence (opt5) from neuraminidase__InfluenzaA__ACI22532
augaaccccaaucagaagaucauuaccaucggcagcauuuccaucgccauugggaucaucucucugaugcuccaaauuggaaacaucauuagcaucugggcuucccacucuauucagacaggcagccagaaucauacggggaucugcaaccagagaauuaucaccuacgagaauagcacaugggugaacaauaccuaugucaacaucaauaacacaaauguuguggccggaaaagacaagaccucugugacacuggcgggcaacagcucccuuuguagcauuucugggugggcuaucuacaccaaagauaauuccauucggaucggaagcaagggcgacgucuucgugauucgcgaaccuuuuaucucuugcucccaccuggaguguagaacguucuuucucacccaaggcgcccugcuuaacgauaaacauagcaaugggacaguuaaggaccggucuccguaucgcgcccugauguccugcccccucggagaagcuccuagccccuacaacuccaaguucgagucuguggccuggagcgcuuccgccugucacgauggcaugggguggcugaccaucggaauuagcggcccugacaacggggcggucgccgugcugaaauauaauggaaucauuacagaaaccaucaagucuuggaaaaagcggauucucagaacgcaggaguccgagugcguuuguaugaacggcagcugcuuuacaaucaugaccgauggccccucuaauggggcugccagcuacaaaaucuucaagauugaaaagggaaaagugacaaaguccaucgagcugaacgcuccuaauuuucauuaugaagaguguucuugcuacccggacaccggcaccgucaugugugugugccgcgauaacuggcacgggagcaauagacccuggguguccuucaaccagaaucuugacuaccagauuggauauaucugcagcggcgucuuuggggauaacccucggcccaaagacggagagggcucuuguaauccuguuacaguggauggcgccgacggggugaagggauucuccuacaaauauggcaacggggucuggauuggacgcacgaaguccaauagacugcggaaaggcuuugaaaugaucugggaccccaacggguggaccaauacagauucugacuucuccgugaagcaagauguuguggcgauuaccgacuggagcggcuacuccggaucuuuuguccagcacccggagcucacaggccuggauugcauccgcccuuguuucuggguggaacuuguuagagggcugccccgggagaacaccacgaucuggacaagcggauccucuauuagcuucugcggcgugaacuccgacaccgccaauuggagcuggccugauggggcugaacuccccuuuaccaucgacaaguga

SEQ ID NO: 208572 - RNA, 1413 nt, Artificial Sequence; identical to SEQ ID NO: 208571
  derived and/or modified CDS sequence (opt5) from neuraminidase__InfluenzaA__ACI22533

SEQ ID NO: 208573 - RNA, 1413 nt, Artificial Sequence; identical to SEQ ID NO: 208565
  derived and/or modified CDS sequence (opt5) from neuraminidase__InfluenzaA__ACI22534

SEQ ID NO: 208574 - RNA, 1410 nt, Artificial Sequence
  derived and/or modified CDS sequence (opt5) from neuraminidase__InfluenzaA__ACI25727
augaaccccaaucagaagaucauuaccaucggcagcgugucccugacaauugccacggucugcuuccucaugcaaaucgcuauucugguuaccacagugacccuucacuuuaaacagcaugaguguaacucuccugccagcaaucaggugaugccgugcgaacccaucaucauugagagaaacaucacagaaauugucuaccugaauaacaccacaaucgagaaggaaauuuguccuaaagugguugaguaucggaauugguccaagccccagugccaaaucaccggguucgcgccuuuuucuaaagacaacagcauucgccucuccgcuggaggcgauaucugggugacgagagagcccuacgucucuugugacccugggaagugcuaucaguucgcccugggacagggcaccacacuugauaauaagcacagcaacgacaccauccaugaucggauuccgcaccgcacacugcucaugaaugaacugggggugcccuuucaucugggaaccagacagguuuguaucgccugguccucuagcuccugccacgacggcaaggcuuggcuccacguguguauuacgggcgaugacaaaaacgccacagcuagcuucaucuacgaugggcggcuggucgacucuauuggauccuggagccaaaauauccuucgcacccaggagucugaaugcguguguaucaacggcacaugcaccguggucaugaccgauggguccgccagcggcagagcggacacacggauucuguuuaucaaagagggaaagauuguucauaucuccccucucucugggagcgcccagcacguggaggaaugcuccuguuauccccgcuacccuggagugagaugcauuugucgggauaauuggaaaggcagcaaccgccccgucguggacaucaacauggaggacuauucuaucgauuccagcuacguuugcucuggccuggugggggacacgccgagaaaugaugaccggagcuccaacucuaauugucgcaacccuaauaacgaaagaggaaaucagggcgucaaggggugggcuuucgauaacggagacgauguguggaugggccggaccauuagcaaggaccuuagauccggguacgagacauuuaaaguuaucggaggcuggagcacccccaauucuaagucccaaauuaaccgccaggugaucgucgauagcgacaaucggucuggcuauuccgggauuuucagcguggaaggaaaauccugcaucaacagauguuuuuacgucgagcugauucgcggccggaagcaggagacaagagugugguggaccucuaauagcaucguuguguucugcgggacguccggaacauauggcaccgggucuuggccugauggcgccaacaucaauuuuaugcccauuuga

SEQ ID NO: 208575 - RNA, 1410 nt, Artificial Sequence
  derived and/or modified CDS sequence (opt5) from neuraminidase__InfluenzaA__ACI25749
augaaccccaaucagaagaucauuaccaucggcagcgugucccugacaauugccacggucugcuuccucaugcaaaucgcuauucugguuaccacagugacccuucacuuuaaacaguacgagugugacucuccugccagcaaccaggugaugccgugcgaacccaucaucauugagagaaauaucacagaaauugucuaucugaacaauaccacaaucgagaaggaaauuuguccuaaagugguugaguaccggaacugguccaagccccagugccaaaucaccggguucgcgccuuuuucuaaagauaauagcauucgccucuccgcuggaggcgacaucugggugacgagagagcccuaugucucuugugaucaugggaagugcuaccaguucgcccugggacagggcaccacacuugacaacaagcacagcaaugauaccauccaugaccggauuccucaccgcacacugcucaugaacgaacugggggugccguuucaucugggaaccagacagguuuguaucgccugguccuccucuuccugccacgauggcaaggcuuggcuccacguguguauuacgggcgacgauaaaaaugccacagcuagcuucaucuaugacgggcggcuggucgauucuauuggauccuggagccaaaacauccuucgcacccaggagucugaaugcguguguaucaauggcacaugcaccguggucaugaccgacggguccgccagcggcagagcggauacacggauucuguuuaucgaggagggaaaaauuguucauaucagcccccucucugggagcgcccagcacguggaagagugcuccuguuacccucgcuaucccggagugagaugcauuugucgggacaacuggaagggcagcaaucgcccugucguggacaucaacauggaagauuacucuaucgacuccagcuacguuugcucuggccuggugggggauacgcccagaaacgacgaucggagcuccaauucuaacugucgcaauccgaacaaugagagaggaaaccagggcgucaaagggugggcuuucgacaauggagaugacguguggaugggccggaccauuagcaaggaucuuagauccggguaugaaacauuuaagguuaucggaggcuggagcaccccuaacucuaaaucccaaauuaaucgccaggugaucgucgacagcgauaaccggucuggcuacuccgggauuuucagcguggagggaaaguccugcaucaauagauguuuuuaugucgagcugauucgcggccggaaacaggaaacaagagugugguggaccucuaacagcaucguuguguucugcgggacguccggaacauacggcaccgggucuuggcccgacggcgccaauaucaacuuuaugcauauuuga

SEQ ID NO: 208576 - RNA, 1410 nt, Artificial Sequence; identical to SEQ ID NO: 208575
  derived and/or modified CDS sequence (opt5) from neuraminidase__InfluenzaA__ACI25760

SEQ ID NO: 208577 - RNA, 1410 nt, Artificial Sequence; identical to SEQ ID NO: 208575
  derived and/or modified CDS sequence (opt5) from neuraminidase__InfluenzaA__ACI25771

SEQ ID NO: 208578 - RNA, 1410 nt, Artificial Sequence; identical to SEQ ID NO: 206167
  derived and/or modified CDS sequence (opt5) from neuraminidase__InfluenzaA__ACI25782

SEQ ID NO: 208579 - RNA, 1410 nt, Artificial Sequence
  derived and/or modified CDS sequence (opt5) from neuraminidase__InfluenzaA__ACI25793
augaaccccaaucagaagaucauuaccaucggcagcgugucccugacaauugccacggucugcuuccucaugcaaaucgcuauucugguuaccacagugacccuucacuuuaaacaguacgagugugacucuccugccagcaaccaggugaugccgugcgaacccaucaucauugagagaaauaucacagaaauugucuaucugaacaauaccacaaucgagaaggaaauuuguccuaaagugguugaguaccggaacugguccaagccccagugccaaaucaccggguucgcgccuuuuucuaaagauaauagcauucgccucuccgugggaggcgacaucugggucacgagagagcccuaugugucuugugaucaugggaagugcuaccaguucgcucugggacagggcaccacacuugacaacaagcacagcaaugauaccauccaugaccggauuccucaccgcacacugcucaugaacgaacuggggguuccguuucaucugggaaccagacagguguguaucgccugguccuccucuuccugccacgauggcaaagccuggcuccacgucuguauuacgggcgacgauaagaaugcuacagccagcuucaucuaugacgggcggcugguggauucuauuggauccuggagccaaaacauccuucgcacccaggagucugaaugcguguguaucaauggcacaugcaccgucguuaugaccgacggguccgcuagcggcagagccgauacacggauucuguuuaucgaggagggaaaaauugugcauaucagcccccucucugggagcgcgcagcacguggaagagugcuccuguuacccucgcuaucccggagucagaugcauuugucgggacaacuggaagggcagcaaucgcccugugguugacaucaacauggaagauuacucuaucgacuccagcuacgugugcucuggccuggucggggauacgcccagaaacgacgaucggagcuccaauucuaacugucgcaauccgaacaaugagagaggaaaccagggcgugaaagggugggccuucgacaauggagaugacguuuggaugggccggaccauuagcaaggaucuuagauccggguaugaaacauuuaaggugaucggaggcuggagcaccccuaacucuaaaucccaaauuaaucgccaggucaucguggacagcgauaaccggucuggcuacuccgggauuuucagcgucgagggaaaguccugcaucaauagauguuuuuauguggagcugauucgcggccggaaacaggaaacaagaguuugguggaccucuaacagcaucguggucuucugcgggacguccggaacauacggcaccgggucuuggcccgacggcgcuaauaucaacuuuaugccuauuuga

SEQ ID NO: 208580 - RNA, 1410 nt, Artificial Sequence
  derived and/or modified CDS sequence (opt5) from neuraminidase__InfluenzaA__ACI25804
augaaccccaaucagaagaucauuaccaucggcagcgugucccugacaauugccacggucugcuuccucaugcaaaucgcuauucugguuaccacagugacccuucacuuuaaacaguacgagugugacucuccugccagcaaccaggugaugccgugcgaacccaucaucauugagagaaauaucacagaaauugucuaucugaacaauaccacaaucgagaaggaaauuuguccuaaagugguugaguaccggaacugguccaagccccagugccaaaucaccggguucgcgccuuuuucuaaagauaauagcauucgccucuccgcuggaggcgacaucugggugacgagagagcccuaugucucuugugaucaugggaagugcuaccaguucgcccugggacagggcaccacacuugacaacaagcacagcaaugauaccauccaugaccggauuccucaccgcacacugcucaugaacgaacugggggugccguuucaucugggaaccagacagguuuguaucgccugguccuccucuuccugccacgauggcaaggcuuggcuccacguguguauuacgggcgacgauaaaaaugccacagcuagcuucaucuaugacgggcggcuggucgauucuauuggauccuggagccaaaacauccuucgcacccaggagucugaaugcguguguaucaauggcacaugcaccguggucaugaccgacggguccgccagcggcagagcggauacacggauucuguuuaucgaggagggaaaaauuguucauaucagcccccucucugggagcgcccagcacguggaagagugcuccuguuacccucgcuaucccggagugagaugcauuugucgggacaacuggaagggcagcaaucgcccugucguggacaucaacauggaagauuacucuaucgacuccagcuacguuugcucuggccuggugggggauacgcccagaaacgacgaucggagcuccaauucuaacugucgcaauccgaacaaugagagaggaaaccagggcgucaaagggugggcuuucgacaauggagaugacguguggaugggccggaccauuagcaaggaucuuagauccggguaugaaacauuuaagguuaucggaggcuggagcaccccuaacucuaaaucccaaauuaaucgccaggugaucgucgacagcgaucaucggucuggcuacuccgggauuuucagcguggagggaaaguccugcaucaacagauguuuuuaugucgagcugauucgcggccggaaacaggaaacaagagugugguggaccucuaauagcaucguuguguucugcgggacguccggaacauacggcaccgggucuuggcccgacggcgccaacaucaauuuuaugccuauuuga

SEQ ID NO: 208581 - RNA, 1410 nt, Artificial Sequence; identical to SEQ ID NO: 208539
  derived and/or modified CDS sequence (opt5) from neuraminidase__InfluenzaA__ACI26277

SEQ ID NO: 208582 - RNA, 1410 nt, Artificial Sequence; identical to SEQ ID NO: 206399
  derived and/or modified CDS sequence (opt5) from neuraminidase__InfluenzaA__ACI26299

SEQ ID NO: 208583 - RNA, 1410 nt, Artificial Sequence
  derived and/or modified CDS sequence (opt5) from neuraminidase__InfluenzaA__ACI26321
augaaccccaaucagaagaucauuaccaucggcagcgugucccugacaauuucuacgaucugcuucuuuaugcaaauugccauccucaucaccacagucacccugcacuucaaacaguacgaguuuaacagcccuccgaauaaccagguuaugcuuugugaacccacaauuaucgagagaaauauuaccgaaaucguguaucugacaaacaccacgauugagaaggaaaucugcccuaaacucgcugaguaccggaauugguccaagccccagugugacauuaccggguucgccccuuuuucuaaagauaacagcauccgccuguccgcgggaggcgacaucugggugacaagagagcccuaugucucuugcgauccugacaaguguuaccaauucgcucuugggcagggaaccacacugaauaacgugcauagcaaugauaccguucgggaccgcacgccguauagaacacuccugaugaacgaacugggcgugcccuuucaccucgggaccaagcaggucugcauugccugguccucuagcuccugucaugauggaaaagccuggcugcacgugugcaucacaggcgacgauaagaaugcuaccgccagcuucauuuacaacggccggcuuguugacucuaucguguccuggagcaaagagauucugcgcacccaggaaucugagugugucugcaucaaugggacauguacgguggugaugaccgauggauccgcuagcggcaaggccgacacaaaaauccucuuuauugaggaagggaagaucguccauaccuccacacugucuggaagcgcgcaacacguugaggaaugcuccugcuauccuagauaccccggcgugcggugugugugccgcgauaacuggaaggggagcaacagaccuauugucgacaucaauauuaaagaccacucuaccguguccagcuacguuuguucuggacuugugggcgauacgccccggaagaacgacagcuccucuagcucccauugccuggauccgaauaacgaggaaggcgggcacggagucaaaggcugggccuucgacgaugggaaugacguguggaugggacgcacaaucagcgagaagucuagacucggcuaugagaccuuuaaaguuaucgaagggugguccaacccuaagagcaaacugcagauuaaucgccaggugaucgucgaucggggaaacagaucuggcuacuccggcauuuucagcguggaggggaaguccuguaucaaucggugcuuuuaugucgaacugauuagaggacgcaaggaggaaaccgaggugcucuggacaucuaacagcaucguuguguucuguggcaccuccgggacauacggaacgggcucuuggcccgacggggcugauauuaaucugaugccuaucuga

SEQ ID NO: 208584 - RNA, 1410 nt, Artificial Sequence
  derived and/or modified CDS sequence (opt5) from neuraminidase__InfluenzaA__ACI26354
augaaccccaaucagaagaucauuaccaucggcagcgugucccugacaauuucuacgaucugcuucuuuaugcaaauugccauccucaucaccacagucacccugcacuucaaacaguacgaguuuaacagcccuccgaauaaccagguuaugcuuugugaacccacaauuaucgagagaaauauuaccgaaaucguguaucugacaaacaccacgauugagaaggaaaucugcccuaaacucgcugaguaccggaauugguccaagccccagugugacauuaccggguucgccccuuuuucuaaagauaacagcauccgccuguccgcgggaggcgacaucugggugacaagagagcccuaugucucuugcgauccugacaaguguuaccaauucgcucuugggcagggaaccacacugaauaacgugcauagcaaugauaccguucgggaccgcacgccguauagaacacuccugaugaacgaacugggcgugcccuuucaccucgggaccaagcaggucugcauugccugguccucuagcuccugucaugauggaaaagccuggcugcacgugugcaucacaggcgacgauaagaaugcuaccgccagcuucauuuacaacggccggcuuguugacucuguggucuccuggagcaaagagauccugcgcacccaggaaucugagugugugugcauuaaugggacauguacgguggucaugaccgauggauccgcuagcggcaaggccgacacaaaaauccucuuuaucgaggaagggaagauuguucauaccuccacacugucuggaagcgcgcaacacguggaggaaugcuccugcuauccuagauaccccggcgugcggugugucugccgcgauaacuggaaggggagcaacagaccuaucguggacauuaauaucaaagaccacucuauuguuuccagcuacguguguucuggacuugucggcgauacgccccggaagaacgacagcuccucuagcucccauugccuggauccgaauaacgaggaaggcgggcacggagugaaaggcugggccuucgacgaugggaaugacguuuggaugggacgcaccaucagcgagaagucuagacucggcuaugagacauuuaaagugaucgaagggugguccaacccuaagagcaaacugcagauuaaucggcaggucaucguggaucgcggaaacagaucuggcuacuccggcauuuucagcgucgaggggaaguccuguaucaaucggugcuuuuauguggaacugauuagaggacgcaaggaggaaaccgagguucucuggaccucuaacagcaucguggucuucuguggcacauccgggaccuacggaacaggcucuuggcccgacggggcugauauuaaucugaugccuaucuga

SEQ ID NO: 208585 - RNA, 1410 nt, Artificial Sequence
  derived and/or modified CDS sequence (opt5) from neuraminidase__InfluenzaA__ACI26365
augaaccccaaucagaagaucauuaccaucggcagcgugucccugacaauuucuacgaucugcuucuuuaugcaaauugccauccucaucaccacagucacccugcacuucaaacaguacgaguuuaacagcccuccgaauaaccagguuaugcuuugugaacccacaauuaucgagagaaauauuaccgaaaucguguaucugacaaacaccacgauugagaaggaaaucugcccuaaacucgcugaguaccggaauugguccaagccccagugugacauuaccggguucgccccuuuuucuaaagauaacagcauccgccuguccgcgggaggcgacaucugggugacaagagagcccuaugucucuugcgauccugacaaguguuaccaauucgcucuugggcagggaaccacacugaauaacgugcauagcaaugauaccguucgggaccgcacgccguauagaacacuccugaugaacgaacugggcgugcccuuucaccucgggaccaagcaggucugcauugccugguccagcagcuccugucaugauggaaaagccuggcugcacgugugcaucacaggcgacgauaagaaugcuaccgccagcuucauuuacaacggccggcuuguugacucuguggucuccuggagcaaagagauccugcgcacccaggaaucugagugugugugcauuaaugggacauguacgguggucaugaccgauggauccgcuagcggcaaggccgacacaaaaauccucuuuaucgaggaagggaagauuguucauaccuccacacugaccggaucugcgcaacacguggaggaaugcagcugcuauccuagauaccccggcgugcggugugucugccgcgauaacuggaagggguccaacagaccuaucguggacauuaauaucaaagaccacagcauuguuucuuccuacguguguagcggacuugucggcgauacgccccggaagaacgacucuagcuccucuagccauugccuggauccgaauaacgaggaaggcgugcacgggguuaaaggaugggccuucgacgauggcaaugacguguggauggggcgcacaaucuccgagaagucuagacucggauaugagaccuuuaaagucaucgaaggcuggucuaacccuaaguccaaacugcagauuaaucgccaggugaucgucgaucgggggaacagaagcggauacucuggcauuuucuccguggagggcaagagcuguaucaaucggugcuuuuauguugaacugauuagagggcgcaaggaggaaaccgaggugcucuggacauccaacucuaucgucguguucuguggaaccagcggcacauacgggacgggauccuggcccgacggcgcugauauuaaucugaugccuaucuga

SEQ ID NO: 208586 - RNA, 1410 nt, Artificial Sequence; identical to SEQ ID NO: 208584
  derived and/or modified CDS sequence (opt5) from neuraminidase__InfluenzaA__ACI26376

SEQ ID NO: 208587 - RNA, 1410 nt, Artificial Sequence; identical to SEQ ID NO: 208476
  derived and/or modified CDS sequence (opt5) from neuraminidase__InfluenzaA__ACI26387

SEQ ID NO: 208588 - RNA, 1410 nt, Artificial Sequence; identical to SEQ ID NO: 208488
  derived and/or modified CDS sequence (opt5) from neuraminidase__InfluenzaA__ACI26420

SEQ ID NO: 208589 - RNA, 1410 nt, Artificial Sequence; identical to SEQ ID NO: 206399
  derived and/or modified CDS sequence (opt5) from neuraminidase__InfluenzaA__ACI26431

SEQ ID NO: 208590 - RNA, 1413 nt, Artificial Sequence
  derived and/or modified CDS sequence (opt5) from neuraminidase__InfluenzaA__ACI26442
augaaccccaaucagaagaucauuaccaucggcagcauuuccaucgccauugggaucaucucucugaugcuccaaauuggaaacaucauuagcaucugggcuucccacucuauucagacaggcagccagaaucauacggggaucugcaaccagagaauuaucaccuacgaaaauuccacaugggugaaccacaccuaugucaauaucaacaauacaaacguuguggccggaaaagacaagaccucugugacacuggcgggcaauagcucccuuuguagcauuucugggugggcuaucuacaccaaagauaacuccauucggaucggaagcaagggcgacgucuucgugauucgcgagccuuuuaucucuugcucccaucuggaguguaaaacguucuuucucacccaaggcgcccugcuuaaugauaagcacagcaacgggacaguuaaggacagaucuccguaucgggcccugauguccugcccccucggagaagcuccuagccccuacaauuccaaauucgagucuguggccuggagcgcuuccgccugucaugauggcaugggguggcugaccaucggaauuagcggcccugacaacggggcggucgccgugcugaaguauaacggaaucauuacaggcaccaucaaaucuuggaagaaacagauucuccgcacgcaggaauccgagugcguuuguaugaauggcagcugcuuuacaaucaugaccgaugggcccucuaacggagcugccagcuacaagaucuucaagauugagaaaggcaaggugacaaaauccaucgaacugaaugcuccuaacuuucacuaugaggaauguucuugcuacccggacaccgggaccgucaugugugugugcagagauaauuggcacggaagcaaccggcccuggguguccuucaaucagaaccuugacuaccaaauuggcuauaucugcagcggggucuuuggagauaauccucgccccaaggacagagagggcucuuguaacccuguuacaauugauggcgccgacggggugaaaggauucuccuacaaguauggcaaugggguguggaucggacggacgaaaagcaaccgccugagaaagggcuuugagaugauuugggaccccaauggguggaccaacacagauucugacuucuccgucaagcaggaugugguugcgaucaccgacuggagcggcuacuccggaucuuuugugcagcauccggaacucacaggccuggauugcauccggccuuguuucugggucgagcuugugcgcgggcugcccagagaaaauaccacgauuuggacaagcggauccucuaucagcuucugcggcguuaacuccgacaccgccaacuggagcuggccugauggggcugagcuccccuuuaccauugacaaauga

SEQ ID NO: 208591 - RNA, 1413 nt, Artificial Sequence; identical to SEQ ID NO: 208590
  derived and/or modified CDS sequence (opt5) from neuraminidase__InfluenzaA__ACI26453

SEQ ID NO: 208592 - RNA, 1410 nt, Artificial Sequence
  derived and/or modified CDS sequence (opt5) from neuraminidase__InfluenzaA__ACI26464
augaaccccaaucagaagaucauuaccaucggcagcgugucccugacaauuucuacgaucugcuucuuuaugcaaauugccauccucaucgcuaccgucacacugcacuucaaacaguacgaguuuaacagcccuccgaauaaccagguuaugcuuugugaacccaccauuaucgagagaaauauuacagaaaucguguaucugaccaacacaaccauugagaaggaaaucugcccuaaacucgccgaguaccggaauugguccaagccccagugugacauuacgggguucgcgccuuuuucuaaagauaacagcauccgccuguccgcuggaggcgacaucugggugaccagagagcccuaugucucuugcgauccugacaaguguuaccaauucgcccuugggcagggaacaacccugaauaacgugcauagcaaugauacaguucgggaccgcaccccguauagaacgcuccugaugaacgaacugggcgugcccuuucaccucgggacaaagcaggucugcauugccugguccucuagcuccugucaugauggaaaggcuuggcugcacgugugcaucaccggcgacgauaaaaaugccacagcuagcuucauuuacaacggccggcuuguugacucuaucguguccuggagcaaagagauucugcgcacccaggaaucugagugugucugcaucaaugggaccuguacaguggugaugacggauggauccgccagcggcaaggcggacaccaaaauccucuuuauugaggaagggaagaucguccauacauccacccugucuggaagcgcccaacacguugaggaaugcuccugcuauccuagauaccccggcgugcggugugugugccgcgauaacuggaaggggagcaacagaccuauugucgacaucaauauuaaagaccacucuacaguguccagcuacguuuguucuggacuugugggcgauacgccccggaagaacgacagcuccucuagcucccauugccuggauccgaauaacgaggaaggcgggcacggagucaaaggcugggcuuucgacgaugggaaugacguguggaugggacgcaccaucagcgagaagucuagacucggcuaugagacauuuaaaguuaucgaagggugguccaacccuaagagcaaacugcagauuaaucgccaggugaucgucgaucggggaaacagaucuggcuacuccggcauuuucagcguggaggggaaguccuguaucaaucggugcuuuuaugucgaacugauuagaggacgcaaggaggaaaccgaggugcucuggaccucuaacagcaucguuguguucuguggcacauccgggaccuacggaacaggcucuuggcccgacggggccgauauuaaucugaugccuaucuga

SEQ ID NO: 208593 - RNA, 1410 nt, Artificial Sequence; identical to SEQ ID NO: 208583
  derived and/or modified CDS sequence (opt5) from neuraminidase__InfluenzaA__ACI26475

SEQ ID NO: 208594 - RNA, 1410 nt, Artificial Sequence; identical to SEQ ID NO: 208584
  derived and/or modified CDS sequence (opt5) from neuraminidase__InfluenzaA__ACI26486

SEQ ID NO: 208595 - RNA, 1410 nt, Artificial Sequence; identical to SEQ ID NO: 208584
  derived and/or modified CDS sequence (opt5) from neuraminidase__InfluenzaA__ACI26497

SEQ ID NO: 208596 - RNA, 1410 nt, Artificial Sequence; identical to SEQ ID NO: 208584
  derived and/or modified CDS sequence (opt5) from neuraminidase__InfluenzaA__ACI26508

SEQ ID NO: 208597 - RNA, 1410 nt, Artificial Sequence
  derived and/or modified CDS sequence (opt5) from neuraminidase__InfluenzaA__ACI26519
augaaccccaaucagaagaucauuaccaucggcagcgugucccugacaauuucuacgaucugcuucuuuaugcaaauugccauccucaucaccacagucacccugcacuucaaacaguacgaguuuaacagcccuccgaauaaccagguuaugcuuugugaacccacaauuaucgagagaaauauuaccgaaaucguguaucugacaaacaccacgauugagaaggaaaucugcccuaaacucgcugaguaccggaauugguccaagccccagugugacauuaccggguucgccccuuuuucuaaagauaacagcauccgccuguccgcgggaggcgacaucugggugacaagagagcccuaugucucuugcgauccugacaaguguuaccaauucgcucuugggcagggaaccacacugaauaacgugcauagcaaugauaccguucgggaccgcacgccguauagaacacuccugaugaacgaacugggcgugcccuuucaccucgggaccaagcaggucugcauugccugguccucuagcuccugucaugauggaaaagccuggcugcacgugugcaucacaggcgacgauaagaaugcuaccgccagcuucauuuacaacggccggcuuguugacucuguggucuccuggagcaaagagauccugcgcacccaggaaucugagugugugugcauuaaugggacauguacgguggucaugaccgauggauccgcuagcggcaaggccgacacaaaaauccucuuuaucgaggaagggaagauuguucauaccuccacacugucuggaagcgcgcaacacguggaggaaugcuccugcuauccuagauaccccggcgugcggugugucugccgcgauaacuggaaggggagcaacagaccuaucguggacauuaauaucaaagaccacucuauuguuuccagcuacguguguucuggacuugucggcgauacgccccggaagaacgacagcuccucuagcucccauugccuggauccgaauaacgaggaaggcgggcacggagugaaaggcugggccuucgacgaugggaaugacguuuggaugggacgcaccaucagcgagaagucuagacucggcuaugagacauuuaaagugaucgaagggugguccaacccuaagagcaaacugcagauuaaucggcaggucaucguggaucgcggaaacagaucuggcuacuccggcauuuucagcgucgaggggaaguccuguaucaaucggugcuuuuauguggaacugauuagaggacgcaaggaggaaaccgagguucucuggaccucuaacagcaucguggucuucuguggcacauccgggaccuacggaacaggcucuuggcccgacggggcuaauauuaaccugaugccuaucuga

SEQ ID NO: 208598 - RNA, 1410 nt, Artificial Sequence; identical to SEQ ID NO: 208584
  derived and/or modified CDS sequence (opt5) from neuraminidase__InfluenzaA__ACI26530

SEQ ID NO: 208599 - RNA, 1410 nt, Artificial Sequence; identical to SEQ ID NO: 208584
  derived and/or modified CDS sequence (opt5) from neuraminidase__InfluenzaA__ACI26541

SEQ ID NO: 208600 - RNA, 1410 nt, Artificial Sequence
  derived and/or modified CDS sequence (opt5) from neuraminidase__InfluenzaA__ACI26552
augaaccccaaucagaagaucauuaccaucggcagcgugucccugacaauugccacgaugugcuuccucaugcaaaucgcuauucuggucaccacaguuacccuucacuuuaaacaguacgaguguucuagcccuccgaacaaucaggugaugcccugcgaaccuacaaucaucgagagaaacauuaccgaaaucguguaucugacaaauaccacgauugagaaggaaaucugucccaaacucgucgaguaccggaacugguccaagccucagugcaaaauuaccggguucgcccccuuuucuaaggacaauagcauccgccuguccgcgggaggcgauauuugggugacaagagagccuuauguuucuugugacccggggaagugcuaccaauucgcucuuggacagggcaccacacugaacaaucggcauagcaacgauaccgugcacgaccgcacgcccuauagaacacuccugaugaaugaacugggggucccuuuucaucucggaaccaaacagguguguaucgccugguccuccucuuccugccacgauggcaaggccuggcugcauguuugugugacaggccacgacaaaaacgcuaccgccagcuucaucuacgaugggcggcuugucgacucuauuggauccuggagcaagaauauccugcgcacccaggagucugaaugcguguguauuaacggcacaugcacgguggucaugaccgauggguccgcuagcgagagagccgacacaaaaauccucuuuauugaggaaggaaagaucguucacaucagcccccugucuggcagcgcgcaacauguggaggaaugcuccuguuauccucgguaccccggggugcgcugcgucuguagagauaauuggaagggaagcaaccggccgauuguggacaucaacguuaaagauuacucuauuguguccagcuaugucugcucuggccuugugggcgacaccccucgcaagaaugacagaagcuccucuagcuacugucggaaccccaauaacgagaaagggucccacggaguuaagggcugggccuucgaugacgggaaugauguguggaugggacgcacaaucagcgaggaacugagaucuggcuaugagaccuuuaaagucauugggggaugguccacgccuaacagcaagcuccagaucaauagacaggugaucgucgacucuggcaaccgguccggcuacagcgggauuuucuccguggaaggaaaaucuugcaucaaucgcuguuuuuauguugagcugauucggggcagagaacaggagacacgcgugugguggaccagcaacuccaucgucguguucugcgggaccucuggaacauacggcaccgggagcuggcccgauggcgcugacauuaaucugaugcccaucuga

SEQ ID NO: 208601 - RNA, 1410 nt, Artificial Sequence
  derived and/or modified CDS sequence (opt5) from neuraminidase__InfluenzaA__ACI26574
augaaccccaaucagaagaucauuaccaucggcagcgugucccugacacucgccacgauuugcuuccugaugcaaaucgcuauucuugucaccacaguuacccugcacuuuaaacaguacgaguguucuagcccuccgaacaaucaggugaugcccugcgaaccuacaaucaucgagagaaacauuaccgaaaucguguaucucacaaauauuaccaucgagaaggaaauuugucccaaacuggucgaguaccggaacugguccaagccucagugcaaaaucacgggguucgcccccuuuucuaaggacaauagcauucgccuuuccgcgggaggcgauaucugggugaccagagagccuuauguuucuugugacccgagcaagugcuaccaauucgcucuggggcagggaacaacccucaacaaucggcauuccaacgauacagugcacgaccgcacccccuauagaacgcugcugaugaaugaacucggcgucccuuuucaucuggggacacgccagguguguauggccuggucuagcuccagcugccacgauggaaaagccuggcuucauguuugugugaccggccacgacgagaacgcuacagccucuuucaucuacgauggccggcuggucgacuccauugggagcuggucuaagaauauccucagaacccaggaauccgagugcguguguauuaacggaaccugcacaguggucaugacggauggcagcgcuuccgagcgggccgacaccaaaauccuguuuauugaagaggggaagaucguucacaucucuccccuuagcggauccgcgcaacauguggaagagugcagcuguuauccucgcuaccccggcgugagaugcgucugucgggauaauuggaaagggucuaaccgcccgauuguggacaucaacguuaaggauuacuccauugugagcucuuaugucugcagcggacuggugggcgacacaccuagaaagaaugaccgguccucuagcuccuacugucgcaaccccaauaacgaaaaaggcagccacgggguuaagggaugggccuucgaugacggcaaugauguguggauggggagaaccaucggagaggagcuccggucuggcuaugaaacauuuaaagucauugggggaugguccaccccuaacagcaagcugcagaucaauagacaggugaucgucgacucuggcaaccgcuccggcuacagcgggauuuucuccguggagggaaaaucuugcaucaaucgguguuuuuauguugaacugauuagaggccgcaagcaggagacgcgggugugguggacaagcaacuccaucgucguguucugcgggaccucuggaaccuacggcacagggagcuggcccgauggcgcugacauuaaucucaugcccaucuga

SEQ ID NO: 208602 - RNA, 1410 nt, Artificial Sequence
  derived and/or modified CDS sequence (opt5) from neuraminidase__InfluenzaA__ACI26585
augaaccccaaucagaagaucauuaccaucggcagcgugucccugacaauugccacgaucugcuuccucaugcaaauugcuauccuggucaccacaguuacccuucacuuuaaacagcaugaguguaacucuccuccgaauaaccaggugaugcccugcgaaccuacaaucauugagagaaauaucaccgaaauuguguaccugacaaacaccacgaucgagaaggaaauuugucccaaacucgucgaguaucggaauuggagcaagccucagugcaaaaucaccggguucgcccccuuuuccaaggacaacucuauucgccugagcgcgggaggcgauaucugggugacaagagagccuuacguuuccugugacccggggaagugcuaucaauucgcucuuggacagggcaccacacugaauaaccggcacucuaaugauaccgugcaugaccgcacgcccuacagaacacuccugaugaacgaacugggggucccuuuucaccucggaaccaaacagguguguaucgccuggagcuccagcucuugccaugauggcaaggccuggcugcacguuugugugacaggccacgacgagaaugcuaccgccuccuucauuuaugaugggcggcuugucgacagcaucgugucuugguccaaaaacgugcugcgcacccaggaaagcgagugcgucuguauuaauggaacaugcacgguugugaugaccgauggcucugcuuccgagagagccgacacaaagauccucuuuauugaagaggggaaaaucgugcauaucagcccccuguccggaucugcgcaacacgucgaagagugcagcuguuacccucgguaucccggcgugcgcugcguuuguagagauaacuggaagggguccaaccggccgauuguggacaucaaugucaaggauuacagcauugugucuuccuacguuugcagcggacuugugggcgacaccccucgcaaaaacgacucuagcuccucuagcuauuguagaaaucccaacaaugaaaagggcucccauggggucaaaggaugggccuucgaugacggcaacgauguguggauggggcggacaaucggagaggagcugcgcagcggcuacgaaaccuuuaaggucauugggggauggucuacgccuaauuccaaacuccagacaaacagacaggugaucguugaccggggcaauagaagcggcuauucugggaucuucuccguggagggaaagagcugcauuaaccgcuguuuuuacgucgaacugauccggggcagaaaacaggagaccaaggugugguggaccuccaauucuauuguuguguucugcgggacaagcggaaccuauggcacaggguccuggcccgauggcgcugacaucaaccugaugcccauuuga

SEQ ID NO: 208603 - RNA, 1413 nt, Artificial Sequence
  derived and/or modified CDS sequence (opt5) from neuraminidase__InfluenzaA__ACI32764
augaaccccaaucagaagaucauuaccaucggcagcauuuccauggccaucgggauuaucucucugaugcuccaaaucggaaacauuaucagcauuugggcuucccacucuauccagacaggcagccagaaucauacggggauuugcaaccagagaaucauuaccuacgaaaauuccacaugggugaaccacaccuaugucaauaucaacaauacaaacguuguggccggaaaagacaagaccucugugacacuggcgggcaauagcucccuuuguagcaucucugggugggcuauuuacaccaaagauaacuccauccggauuggaagcaagggcgacgucuucgugauccgcgagccuuuuauuucuugcucccaucuggaguguagaacguucuuucucacccaaggcgcccugcuuaaugauaaacacagcaacgggacaguuaaggaccggucuccguaucgcgcccugauguccugcccccucggagaagcuccuagccccuacaauuccaaguucgagucuguggccuggagcgcuuccgccugucaugauggcaugggguggcugaccaucggaaucagcggcccugacaacggggcggucgccgugcugaaauauaacggaauuaucacagaaaccauuaagucuuggaaaaagagaauccuccggacgcaggaguccgagugcguuugugugaauggcagcugcuuuacaauuaugaccgauggccccucuaacggggcugccagcuacaaaaucuucaagaucgaaaagggaaaagucacaaaguccauugagcugaaugcuccuaacuuucacuaugaagaguguucuugcuacccggacaccggcaccgugaugugugugugccgcgauaauuggcacgggagcaacagacccugggucuccuucaaucagaaccuugacuaccagaucggauauauuugcagcggcguuuuuggggauaauccucggcccaaagacggaaagggcucuuguaacccugugacaguggauggcgccgacggggucaaaggauucuccuacaaguauggcaaugggguguggaucggacgcacgaaaagcaacagacugcggaagggcuuugagaugauuugggaccccaauggguggaccgauacagacucugauuucuccguuaagcaagacguggucgcgaucaccgauuggagcggcuacuccggaucuuuugugcagcauccggaacucacaggccuggacugcauucgcccuuguuucuggguugagcuugugagagggcugccccgggaaaacaccacgaucuggacaagcggauccucuaucagcuucugcggcgucgauuccgacaccgccaauuggagcuggccugauggggcugagcuccccuuuaccauugacaaauga

SEQ ID NO: 208604 - RNA, 1413 nt, Artificial Sequence
  derived and/or modified CDS sequence (opt5) from neuraminidase__InfluenzaA__ACI32765
augaaccccaaucagaagaucauuaccaucggcagcauuuccaucgccauugggaucaucucucugaugcuccaaauuggaaacaucauuagcaucugggcuucccacucuauucagacaggcagccagaaucauacggggaucugcaaccagagaauuaucaccuacgagaauaacacaugggugaaucacaccuaugucaacaucaauaacacaaauguuguggcccggaaagacaagaccuccgugacacuggcgggaaacucuagccuuuguuccauuagcggcugggcuaucuacaccaaagauaauucuauucgcaucggguccaagggagacgucuucgugauuagagaaccuuuuaucagcugcucucaucuggagugucggacguucuuuaugacccaaggcgcccuccugaacgauaaacacuccaauggcacaguuaaggaccgcagcccguauagagcccuuaugucuugcccccugggggaagcuccuucccccuacaacagcaaguucgaguccguggccuggucugcuagcgccugucaugauggaaugggcuggcucaccaucgggauuuccggaccugacaacggcgcggucgccgugcugaaauauaaugggaucauuacagaaaccaucaagagcuggaaaaagcggauucugcgcacgcaggagucugagugcguuugugugaacggauccugcuuuacaaucaugaccgauggccccagcaauggcgcugccucuuacaaaaucuucaagauugaaaaggggaaagucacaaagagcguggagcucaacgcuccuaauuuucacuaugaagaguguuccugcuacccggacaccggaaccgugaugugugucugcagagauaacuggcacggcucuaaucggcccuggguuagcuucaaccagaaucuggacuaccagaucggguauauuugcuccggaguguuuggcgauaacccucgccccaaagacgggaagggaagcuguaauccugugacagucgauggcgccgacggcgugaaaggguucucuuacaaguauggaaacggcguuuggaucgggagaacgaaauccaaucggcuucgcaagggauuugagaugauuugggaccccaacggcuggaccgauacagacagcgauuucucugugaagcaagacgucguggcgaucaccgauugguccggguacagcggcuccuuuguucagcauccggaacugacaggacucgacugcauuagaccuuguuucuggguggagcugguccggggccuuccccgcgaaaauaccacgaucuggacaucugggagcuccaucucuuucugcggaguggauagcgacaccgccaacugguccuggccugauggcgcugagcugcccuuuaccauugacaaauga

SEQ ID NO: 208605 - RNA, 1413 nt, Artificial Sequence; identical to SEQ ID NO: 206458
  derived and/or modified CDS sequence (opt5) from neuraminidase__InfluenzaA__ACI32766

SEQ ID NO: 208606 - RNA, 1413 nt, Artificial Sequence
  derived and/or modified CDS sequence (opt5) from neuraminidase__InfluenzaA__ACI32767
augaaccccaaucagaagaucauuaccaucggcagcauuuccaucgccauugggaucaucucucugaugcuccaaauuggaaacaucauuagcaucugggcuucccacucuacacagacgggcagccagaaucauaccgggauuugcaaccagagaaucauuacauacgaaaauuccaccugggugaaccacacauaugucaauaucaacaauaccaacguuguggccggaaaagacaagacaucugugacccuggcgggcaauagcucccuuuguagcaucucugggugggcuauuuacacgaaagauaacuccguccggaucggaagcaagggcgacguguucguuauucgcgagccuuuuaucucuugcucccaucuggaguguagaaccuucuuucucacacaaggcgcccugcuuaaugauaaacacagcaacgggaccgugaaggaccggucuccguaucgcgcccugauguccugcccccucggagaagcuccuagccccuacaauuccaaguucgagucugucgccuggagcgcuuccgccugucaugauggcaugggguggcugacaauuggaaucagcggcccugacaacggggcgguggccguucugaaauauaacggaaucauuaccgaaacgaucaagucuuggaaaaagcggauucucagaacacaggaguccgagugcgugugugucaauggcagcugcuuuaccaucaugacagauggccccucuaacggggcugccagcuacaaaauuuucaagaucgaaaagggaaaagugaccaaguccaucgagcugaaugcuccuaacuuucacuaugaagaguguucuugcuacccggacaccggcacagugaugugugucugccgcgauaauuggcacgggagcaacagacccuggguuuccuucaaucagaaccuugacuaccagauuggauauaucugcagcggcguguuuggggauaauccucggcccaaagacggaaagggcucuuguaacccugugacggucgauggcgccgacggggugaaaggauucuccuacaaguauggcaaugggguuuggauuggacgcaccaaaagcaacagacugcggaagggcuuugagaugaucugggaccccaauggguggacagauaccgacucugauuucuccgugaagcaagacgucguggcgauuacagauuggagcggcuacuccggaucuuuuguucagcauccggaacucaccggccuggacugcauccgcccuuguuucuggguggagcuugucagagggcugccccgggaaaacacgacaauuuggaccagcggauccucuaucagcuucugcggcguggauuccgacaccgccaauuggagcuggccugauggggcugagcuccccuuuacaaucgacaaauga

SEQ ID NO: 208607 - RNA, 1413 nt, Artificial Sequence
  derived and/or modified CDS sequence (opt5) from neuraminidase__InfluenzaA__ACI32768
augaaccccaaucagaagaucauuaccaucggcagcauuuccaucgccauugggaucaucucucugaugagccaaauuggaaacaucauuuccaucugggcuucucacagcauucagacaggcucccagaaucauacggggaucugcaaccagagaauuaucaccuacgagaauagcacaugggugaaccacaccuaugucaauaucaacaauacaaacguuguggccggaaaagacaagaccagcgugacacucgcgggcaauuccagccuguguucuauuuccgggugggcuaucuacaccaaagauaacagcauucggaucggaucuaagggcgacgucuucgugauucgcgaaccuuuuaucuccugcagccaucuugaguguagaacguucuuucugacccaaggcgcccuccugaaugauaaacacucuaacgggacaguuaaggaccgguccccguaucgcgcccuuaugagcugcccccugggagaagcuccuucccccuacaauucuaaguucgagagcguggccugguccgcuagcgccugucaugauggcaugggguggcucaccaucggaauuucuggcccugacaacggggcggucgccgugcugaaauauaacggaaucauuacagaaaccaucaaguccuggaaaaagcggauucugagaacgcaggagagcgagugcguuugugugaauggcucuugcuuuacaaucaugaccgauggccccagcaacggggcugccuccuacaaaaucuucaagauugaaaagggaaaagucacaaagucuaucgagcucaaugcuccuaacuuucacuaugaagaguguagcugcuacccggacaccggcaccgugaugugugugugccgcgauaauuggcacggguccaacagacccugggucagcuucaaucagaaccuggacuaccagauuggauauaucugcucuggcguuuuuggggauaauccucggcccaaagacggaaagggcuccuguaacccugugacaguggauggcgccgacggggucaaaggauucagcuacaaguauggcaaugggguguggauuggacgcacgaaaucuaacagacuucggaagggcuuugagaugaucugggaccccaauggguggaccgauacagacuccgauuucagcguuaagcaagacguggucgcgauuaccgauugguccggcuacucuggaucuuuugugcagcauccggaacugacaggccucgacugcauccgcccuuguuucuggguugagcuggugagagggcuuccccgggaaaacaccacgaucuggacauccggaucuagcauuuccuucugcggcgucgauagcgacaccgccaauuggucuuggccugauggggcugagcugcccuuuaccaucgacaaauga

SEQ ID NO: 208608 - RNA, 1413 nt, Artificial Sequence
  derived and/or modified CDS sequence (opt5) from neuraminidase__InfluenzaA__ACI32769
augaaccccaaucagaagaucauuaccaucggcagcauuuccaucgccauugggaucaucucucugaugcuccaaauuggaaacaucauuagcaucugggcuucccacucuauucagacaggcagccagaaucauacggggaucugcaaccagagaauuaucaccuacgaaaauuccacaugggugaaccacaccuaugucaauaucaacaauacaaacguuguggccggaaaagacaagauuucugugacccuggcgggcaauagcucccuuuguagcaucucugggugggcuauuuacacaaaagauaacuccauccggauuggaagcaagggcgacgucuucgugauccgcgagccuuuuaucucuugcucccaucuggaguguagaaccuucuuucucacgcaaggcgcccugcuuaaugauaaacacagcaacgggaccguuaaggaccggucuccguaucgcgcccugauguccugcccccucggagaagcuccuagccccuacaauuccaaguucgagucuguggccuggagcgcuuccgccugucaugauggcaugggguggcugacaauuggaaucagcggcccugacaacggggcggucgccgugcugaaauauaacggaauuaucaccgaaacaauuaagucuuggaaaaagagaauccuccggacccaggaguccgagugcguuugugugaauggcagcugcuuuacgaucaugacagauggccccucuaacggggcugccagcuacaaaauuuucaagaucgaaaagggaaaagucaccaaguccauugagcugaaugcuccuaacuuucacuaugaagaguguucuugcuacccggacacaggcaccgugaugugugugugccgcgauaauuggcacgggagcaacagacccugggucuccuucaaucagaaccuugacuaccagaucggauauauuugcagcggcguuuuuggggauaauccucggcccaaagacggaaagggcucuuguaacccugugaccguggauggcgccgacggggucaaaggauucuccuacaaguauggcaaugggguguggaucggacgcacaaaaagcaacagacugcggaagggcuuugagaugauuugggaccccaauggguggacggauaccgacucugauuucuccguuaagcaagacguggucgcgaucacagauuggagcggcuacuccggaucuuuugugcagcauccggaacucaccggccuggacugcauccgcccuuguuucuggguugagcuugugagagggcugccccgggaaaacacaaccauuuggacgagcggauccucuaucagcuucugcggcgucgauuccgacacagccaauuggagcuggccugauggggcugagcuccccuuuaccauugacaaauga

SEQ ID NO: 208609 - RNA, 1413 nt, Artificial Sequence; identical to SEQ ID NO: 206458
  derived and/or modified CDS sequence (opt5) from neuraminidase__InfluenzaA__ACI32770

SEQ ID NO: 208610 - RNA, 1413 nt, Artificial Sequence
  derived and/or modified CDS sequence (opt5) from neuraminidase__InfluenzaA__ACI32771
augaaccccaaucagaagaucauuaccaucggcagcauuuccaucgccauugggaucaucucucugaugcuccaaauuggaaacaucauuagcaucugggcuucccacucuauucagacaggcagccagaaucauacggggaucugcaaccagagaauuaucaccuacaaaaauuccacaugggugaaccacaccuaugucaauaucaacaauacaaacguuguggccggaaagggcaaaaccucugugacacuggcggggaauagcucccuuuguagcauuucuggaugggcuaucuacaccaaggacaacuccauucggaucggcagcaaaggcgaugucuucgugauucgcgagccuuuuaucucuugcucccaucuggaauguagaacguucuuucucacccaaggggcccugcuuaaugacaagcacagcaacggaacaguuaaggaucggucuccguaucgcgcccugauguccugcccccucggcgaggcuccuagccccuacaauuccaaauucgaaucuguggccuggagcgcuuccgccugucaugacgggaugggauggcugaccaucggcauuagcgggccugauaacggagcggucgccgugcugaaguauaacggcaucauuacagagaccaucaaaucuuggaagaaacggauucucagaacgcaggaauccgagugcguuugugugaauggcagcugcuuuacaaucaugaccgacgggcccucuaacggagcugccagcuacaagaucuucaagauugagaaaggcaaggucacaaaauccaucgaacugaaugcuccuaacuuucacuaugaggaauguucuugcuacccggauaccgggaccgugaugugugugugccgcgacaauuggcacggaagcaacagacccugggucuccuucaaucagaaccuugauuaccagauuggcuauaucugcagcgggguuuuuggagacaauccucggcccaaggauggcaaaggcucuuguaacccugugacaguggacggggccgauggagucaagggcuucuccuacaaauaugggaauggaguguggauuggccgcaccaagagcaacagacugcggaagggguuugagaugaucugggaccccaauggcuggacggacacagauucugacuucuccguuaaacaagauguggucgcgauuaccgacuggagcggauacuccggcucuuuugugcagcauccggagcucacagggcuggauugcauccgcccuuguuucuggguugaacuugugagaggacugccccgggagaacaccacgaucuggacaagcggcuccucuauuagcuucugcggggucgacuccgauaccgccaauuggagcuggccugacggagcugaacuccccuuuaccaucgauaaguga

SEQ ID NO: 208611 - RNA, 1413 nt, Artificial Sequence; identical to SEQ ID NO: 206458
  derived and/or modified CDS sequence (opt5) from neuraminidase__InfluenzaA__ACI32772

SEQ ID NO: 208612 - RNA, 1413 nt, Artificial Sequence; identical to SEQ ID NO: 206458
  derived and/or modified CDS sequence (opt5) from neuraminidase__InfluenzaA__ACI32773

SEQ ID NO: 208613 - RNA, 1413 nt, Artificial Sequence; identical to SEQ ID NO: 206458
  derived and/or modified CDS sequence (opt5) from neuraminidase__InfluenzaA__ACI32774

SEQ ID NO: 208614 - RNA, 1413 nt, Artificial Sequence; identical to SEQ ID NO: 206458
  derived and/or modified CDS sequence (opt5) from neuraminidase__InfluenzaA__ACI32775

SEQ ID NO: 208615 - RNA, 1413 nt, Artificial Sequence
  derived and/or modified CDS sequence (opt5) from neuraminidase__InfluenzaA__ACI32776
augaaccccaaucagaagaucauuaccaucggcagcauuuccaucgccauugggaucaucucucugaugcuccaaauuggaaacaucauuagcaucugggcuucccacucuauucagacaggcagccagaaucauacggggaucugcaaccagagaauuaucaccuacaaaaauuccacaugggugaaccacaccuaugucaauaucaacaauacaaacguuguggccggaaaggacaaaaccucugugacacuggcgggcaauagcucccuuuguagcauuucugggugggcuaucuacaccaaggauaacuccauucggaucggaagcaaaggcgacgucuucgugauucgcgagccuuuuaucucuugcucccaucuggaauguagaacguucuuucucacccaaggcgcccugcuuaaugauaagcacagcaacgggacaguuaaggaccggucuccguaucgcgcccugauguccugcccccucggagaggcuccuagccccuacaauuccaaauucgaaucuguggccuggagcgcuuccgccugucaugauggcaugggguggcugaccaucggaauuagcggcccugacaacggggcggucgccgugcugaaguauaacggaaucauuacagagaccaucaaaucuuggaagaaacggauucucagaacgcaggaauccgagugcguuugugugaauggcagcugcuuuacaaucaugaccgauggccccucuaacggggcugccagcuacaagaucuucaagauugagaaaggaaaggucacaaaauccaucgaacugaaugcuccuaacuuucacuaugaggaauguucuugcuacccggacaccggcaccgugaugugugugugccgcgauaauuggcacgggagcaacagacccugggucuccuucaaucagaaccuugacuaccagauuggauauaucugcagcggcguuuuuggggauaauccucggcccaaggacggaaaaggcucuuguaacccugugacaguggauggcgccgacggggucaagggauucuccuacaaauauggcaaugggguguggauuggacgcaccaagagcaacagacugcggaagggcuuugagaugaucugggaccccaauggguggacggauacagacucugauuucuccguuaaacaagacguggucgcgauuaccgauuggagcggcuacuccggaucuuuugugcagcauccggagcucacaggccuggacugcauccgcccuuguuucuggguugaacuugugagagggcugccccgggagaacaccacgaucuggacaagcggauccucuauuagcuucugcggcgucgauuccgacaccgccaauuggagcuggccugauggggcugaacuccccuuuaccaucgacaaguga

SEQ ID NO: 208616 - RNA, 1413 nt, Artificial Sequence
  derived and/or modified CDS sequence (opt5) from neuraminidase__InfluenzaA__ACI32777
augaaccccaaucagaagaucauuaccaucggcagcauuuccaucgccauugggaucaucucucugaugcuccaaauuggaaacaucauuagcaucugggcuucccacucuauucagacaggcagccagaaucauacggggaucugcaaccagagaauuaucaccuacaaaaauuccacaugggugaaccacaccuaugucaauaucaacaauacaaacguuguggccggaaaggacaaaaccucugugacacuggcgggcaauagcucccuuuguagcauuucugggugggcuaucuacaccaaggauaacuccauucggaucggaagcaaaggcgacgucuucgugauucgcgagccuuuuaucucuugcucccaucuggaauguagaacguucuuucucacccaaggcgcccugcuuaaugauaagcacagcaacgggacaguuaaggaccggucuccguaucgcgcccugauguccugcccccucggagaggcuccuagccccuacaauuccaaauucgaaucuguggccuggagcgcuuccgccugucaugauggcaugggguggcugaccaucggaauuagcggcccugacaacggggcggucgccgugcugaaguauaacggaaucauuacagagaccaucaaaucuuggaagaaacggauucucagaacgcaggaauccgagugcguuugugugaauggcagcugcuuuacaaucaugaccgauggccccucuaacggggcugccagcuacaagaucuucaagauugagaaaggaaaggucacaaaauccaucgaacugaaugcuccuaacuuucacuaugaggaauguucuugcuacccggacaccggcaccgugaugugugugugccgcgauaauuggcacgggagcaacagacccugggucuccuucaaucagaaccuugacuaccagauuggauauaucugcagcggcguuuuuggggauaauccucggcccaaggacggaaaaggcucuuguaacccugugacaguggauggcgccgacggggucaagggauucuccuacaaauauggcaaugggguguggauuggacgcaccaagagcaacagacugcggaagggcuuugagaugaucugggaccccaauggguggacggauacagacucugauuucuccguuaaacaagacguggucgcgauuaccgauuggagcggcuacuccggaucuuuugugcagcauccggagcucacaggccuggacugcauccgcccuuguuucuggguugaacuugugagagggcugccccgggagaacaccacgaucuggacaagcggauccucuauuagcuucugcggcgucgauuccgacaccgccaauuggagcuggccugauggggcugaacuccccuuugccaucgacaaguga

SEQ ID NO: 208617 - RNA, 1413 nt, Artificial Sequence; identical to SEQ ID NO: 206458
  derived and/or modified CDS sequence (opt5) from neuraminidase__InfluenzaA__ACI32778

SEQ ID NO: 208618 - RNA, 1413 nt, Artificial Sequence; identical to SEQ ID NO: 206458
  derived and/or modified CDS sequence (opt5) from neuraminidase__InfluenzaA__ACI32779

SEQ ID NO: 208619 - RNA, 1413 nt, Artificial Sequence; identical to SEQ ID NO: 206458
  derived and/or modified CDS sequence (opt5) from neuraminidase__InfluenzaA__ACI32780

SEQ ID NO: 208620 - RNA, 1413 nt, Artificial Sequence; identical to SEQ ID NO: 206458
  derived and/or modified CDS sequence (opt5) from neuraminidase__InfluenzaA__ACI32781

SEQ ID NO: 208621 - RNA, 1413 nt, Artificial Sequence
  derived and/or modified CDS sequence (opt5) from neuraminidase__InfluenzaA__ACI32782
augaaccccaaucagaagaucauuaccaucggcagcauuuccaucgccauugggaucaucucucugaugcuccaaauuggaaacaucauuagcaucugggcuucccacucuauucagacaggcagccagaaucauacggggaucugcaaccagagaauuaucaccuacgaaaauuccacaugggugaaccacaccuaugucaauaucaacaauacaaacguuguggccggaaaagacaagaccucugugacacuggcgggcaauagcucccuuuguagcauuucugggugggcuaucuacaccaaagauaacuccauucggaucggaagcaagggcgacgucuucgugauucgcgagccuuuuaucucuugcucccaucuggaguguagaacguucuuucucacccaaggcgcccugcuuaaugauaaacacagcaacgggacaguuaaggaccggucuccguaucgcgcccugauguccugcccccucggagaagcuccuagccccuacaauuccaaguucgagucuguggccuggagcgcuuccgccugucaugauggcaugggguggcugaccaucggaauuagcggcccugacaacggggcggucgccgugcugaaauauaacggaaucauuacaggcaccaucaagucuuggaaaaagcagauucucagaacgcaggaauccgagugcguuuguaugaauggcagcugcuuuacaaucaugaccgaugggcccucuaacggagcugccagcuacaaaaucuucaagauugagaagggcaaagcuacaaaguccaucgaacugaaugccccuaacuuucacuaugaggaauguucuugcuacccggacaccgggaccgugaugugugucugccgggauaauuggcacggaagcaaccgccccuggguguccuucaaucagaaccuugacuaccaaauuggcuauaucugcagcgggguguuuggagauaauccuagacccaaagaccggaagggcucuuguaacccugucacaguugauggcgcggacggggugaaaggauucuccuacaaguauggcaaugggguguggauuggacgcacgaaaagcaacagacugcggaagggcuuugagaugaucugggaccccaauggguggaccaacacagauucugacuucuccgucaagcaggaugugguugccauuaccgacuggagcggcuacuccggaucuuuugugcagcauccggagcucacaggccuggauugcauccgcccuuguuucugggucgaacuugugagagggcugccccgggagaauaccacgaucuggacaagcggauccucuauuagcuucugcggcguuaacuccgacaccgcuaacuggagcuggccugauggggccgaacuccccuuuaccaucgacaaauga

SEQ ID NO: 208622 - RNA, 1413 nt, Artificial Sequence
  derived and/or modified CDS sequence (opt5) from neuraminidase__InfluenzaA__ACI32783
augaaccccaaucagaagaucauuaccaucggcagcauuuccaucgccauugggaucaucucucugaugcuccaaauuggaaacaucauuagcaucugggcuucccacucuauucagacaggcagccagaaucauacggggaucugcaaccagagaauuaucaccuacgaaaauuccacaugggugaaccacaccuaugucaauaucaacaauacaaacguuguggccggaaaagacaagaccucugugacacuggcgggcaauagcucccuuuguagcauuucugggugggcuaucuacaccaaagauaacuccauucggaucggaagcaagggcgacgucuucgugauucgcgagccuuuuaucucuugcucccaucuggaguguagaacguucuuucucacccaaggcgcccugcuuaaugauaaacacagcaacgggacaguuaaggaccggucuccguaucgcgcccugauguccugcccccucggagaagcuccuagccccuacaauuccaaguucgagucuguggccuggagcgcuuccgccugucaugauggcaugggguggcugaccaucggaauuagcggcccugacaacggggcggucgccgugcugaaauauaacggaaucauuacagaaaccaucaagucuuggaaaaagcagauucucagaacgcaggaguccgagugcguuugugugaauggcagcugcuuuacaaucaugaccgauggccccucuaacggggcugccagcuacaaaaucuucaagauugaaaagggaaaagucacaaaguccaucgagcugaaugcuccuaacuuucacuaugaagaguguucuugcuacccggacaccggcaccgugaugugugugugccgggauaauuggcacgggagcaaccgccccuggcuuuccuucaaucagaaccuggacuaccaaauuggauauaucugcagcggcgucauuggggauaauccuagacccaaagacggaaagggcucuuguaacccuguuacaguggauggcgccgacggggugaaaggauuuuccuacaaguauggcaauggggucuggaucggacggacgaaaagcaaccgccucagaaagggcuucgagaugauuugggaccccaauggguggaccgauacagacucugauuuuuccgugaagcaggacguuguggcgaucaccgauuggagcggcuacuccggaucuuucguccagcauccggaacugacaggccuugacugcauccggccuuguuuuuggguggagcugguucgcgggcuccccagagaaaacaccacgauuuggacaagcggauccucuaucagcuucugcggcguggauggggacaccgccaauugguccuggccugauggagcugagcugcccuucaccauugacaaauga

SEQ ID NO: 208623 - RNA, 1413 nt, Artificial Sequence
  derived and/or modified CDS sequence (opt5) from neuraminidase__InfluenzaA__ACI32784
augaaccccaaucagaagaucauuaccaucggcagcauuuccaucgccauugggaucaucucucugaugcuccaaauuggaaacaucauuagcaucugggcuucccacucuauucagacaggcagccagaaucauacggggaucugcaaccagagaauuaucaccuacgagaauagcacaugggugaaccacaccuaugucaauaucaacaauacaaacguuguggccggaaaagacaagaccucugugacacuggcgggcaauagcucccuuuguagcauuucugggugggcuaucuacaccaaagauaacuccauucggaucggaagcaagggcgacgucuucgugauucgcgaaccuuuuaucucuugcucccaucuggaguguagaacguucuuucucacccaaggcgcccugcuuaaugauaaacacagcaacgggacaguuaaggaccggucuccguaucgcgcccugauguccugcccccucggagaagcuccuagccccuacaauuccaaguucgagucuguggccuggagcgcuuccgccugucaugauggcaugggguggcugaccaucggaauuagcggcccugacaacggggcggucgccgugcugaaauauaacggaaucauuacaggcaccaucaagucuuggaaaaagcagauucucagaacgcaggaauccgagugcguuuguaugaauggcagcugcuuuacaaucaugaccgaugggcccucuaacggagcugccagcuacaaaaucuucaagauugagaagggcaaagcuacaaaguccaucgaacugaaugccccuaacuuucacuaugaggaauguucuugcuacccggacaccgggaccgugaugugugucugccgggauaauuggcacggaagcaaccgccccuggguguccuucaaucagaaccuugacuaccaaauuggcuauaucugcagcgggguguuuggagauaauccuagacccaaagaccgggagggcucuuguaacccugucacaguugauggcgcggacggggugaagggauucuccuacaaauauggcaaugggguguggauuggacgcacgaaguccaacagacugcggaaaggcuuugagaugaucugggaccccaauggguggaccaacacagauucugacuucuccgucaagcaggaugugguugccauuaccgacuggagcggcuacuccggaucuuuugugcagcauccggaacucacaggccuggauugcauccgcccuuguuucugggucgagcuugugagagggcugccccgggaaaauaccacgaucuggacaagcggauccucuauuagcuucugcggcguuaacuccgacaccgcuaacuggagcuggccugauggggccgagcuccccuuuaccaucgacaaguga

SEQ ID NO: 208624 - RNA, 1413 nt, Artificial Sequence
  derived and/or modified CDS sequence (opt5) from neuraminidase__InfluenzaA__ACI32785
augaaccccaaucagaagaucauuaccaucggcagcauuuccaucgccauugggaucaucucucugaugcuccaaauuggaaacaucauuagcaucugggcuucccacucuauucagacaggcagccagaaucauacggggaugugcaaccagagaaucauuaccuacgaaaauuccacaugggugaaccacaccuaugucaauaucaacaauacaaacguuguggccgagaaagacaagaccucugugacacuggcgggaaauagcucccuuuguagcaucucuggcugggcuauuuacaccaaagauaacuccauccggauugggagcaagggagacgucuucgugauccgcgagccuuuuauuucuugcucccaucuggaauguagaacguucuuucucacccaaggcgcccugcuuaaugauaaacacagcaacggcacaguuaaggaccggucuccguaucgcgcccugauguccugcccccucggggaggcuccuagccccuacaauuccaaguucgaaucuguggccuggagcgcuuccgccugucaugauggaaugggcuggcugaccaucgggaucagcggaccugacaacggcgcggucgccgugcugaaauauaacgggauuaucacagagaccauuaagucuuggaaaaagagaauccuccggacgcaggaguccgaaugcguuugugugaauggaagcugcuuuacaauuaugaccgauggccccucuaacggcgcugccagcuacaaaaucuucaagaucgagaaggggaaagucacaaaguccauugaacugaaugcuccuaacuuucacuaugaggaguguucuugcuacccggacaccggaaccgugaugugugugugccgcgauaauuggcacggcagcaacagacccugggucuccuucaaucagaaccuugacuaccagaucggguauauuugcagcggaguuuuuggcgauaauccucggcccaaagacgggaagggaucuuguaacccugugacaguggauggcgccgacggcgucaaaggguucuccuacaaguauggaaauggcguguggaucgggcgcacgaaaagcaacagacugcggaagggauuugaaaugauuugggaccccaauggcugggcggauaccgacucugauuucuccguuaagcaagacguggucgccaucacagauuggagcggguacuccggcucuuuugugcagcauccggagcucaccggacugaacugcauucgcccuuguuucuggguugaacuugugagaggccugccccgggagaauacaaccaucuggacgagcggguccucuaucagcuucugcggagucgacuccgauacagcuaacuggagcuggccugacggcgccgaacuccccuuuaccauugauaaauga

SEQ ID NO: 208625 - RNA, 1413 nt, Artificial Sequence
  derived and/or modified CDS sequence (opt5) from neuraminidase__InfluenzaA__ACI32787
augaaccccaaucagaagaucauuaccaucggcagcauuuccaucgccauugggaucaucucucugauucuccaaaucggaaacauuaucagcauuugggcuucccacucuauccagacaggcagccagaaucauacggggauuugcaaccagagaaucaucaccuacgaaaauuccacaugggugaacaauaccuaugucaacauuaauaacacaaauguuguggccgagaaagacaagaccucugugacacuggcgggaaacagcucccuuuguagcaucucuggcugggcuauuuacaccaaagauaauuccauccggauugggagcaagggagacgucuucgugauccgcgagccuuuuaucucuugcucccaccuggaauguagaacguucuuucucacccaaggcgcccugcuuaacgauaaacauagcaauggcacaguuaaggaccggucuccguaucgcgcccugauguccugcccccucggggaggcuccuagccccuacaacuccagauucgaaucuguggccuggagcgcuuccgccugucacgauggaaugggcuggcugaccauugggaucagcggaccugacaacggcgcggucgccgugcugaaguauaaugggauuaucacagagaccauuaaaucuuggaagaaacggauccuccgcacgcaggaguccgaaugcguuuguaugaacggaagcugcuuuacaaucaugaccgauggccccucuaauggcgcugccagcuacaagauuuucaaaaucgagaaggggaaggugacaaaaaccauugaacugaacgcuccuaauuuucauuaugaggaguguuccugcuacccggacaccggaacagucaugugugugugcagagauaacuggcacggcucuaaucggcccugggugagcuucaaccagaaucuugacuaccagaucggguauauuugcuccggagucuuuggcgauaacccucgccccaaggacggggaaggaagcuguaauccuguuacgguggauggcgccgacggcgugaaaggguucucuuacaaguauggaaacggcgucuggaucgggagaaccaaauccaaucggcugcgcaagggauuugagaugauuugggaccccaacggcuggacaaauaccgauagcgacuucucugugaaacaagauguuguggcgaucacagacugguccggguacagcggcuccuuuguccagcacccggaacucaccggacuggauugcaucagaccuuguuucuggguggagcuuguucggggccugccccgcgaaaacacgacaauuuggaccucugggagcuccaucucuuucugcggagugaacggcgggaccgccgacuggagcuggccugauggagcugagcuccccuuuacaauugacaaguga

SEQ ID NO: 208626 - RNA, 1413 nt, Artificial Sequence
  derived and/or modified CDS sequence (opt5) from neuraminidase__InfluenzaA__ACI32788
augaaccccaaucagaagaucauuaccaucggcagcauuuccaucgccauugggaucaucucucugaugcuccaaauuggaaacaucauuagcaucugggcuucccacucuauucagacaggcagccagaaucauacggggaccugcaaccagagaaucauuacauacgagaauaacaccugggugaaucacacaugugucaacaucaauaacaccaauguuguggccggaaaagacaagacauccgugacccuggucggcaacucuagccuuugcuccaucagcgggugggcgauuuauacgaaagauaauucuauccggauuggauccaagggcgacguguucguuauccgcgaaccuuuuauuagcuguucucaucuggagugcagaaccuucuuucucacacaaggcgcucugcuuaacgauaaacacuccaaugggaccgugaaggaccggagcccguaccgcgcccugaugucuuguccccucggagaagccccuucccccuauaacagcaaguucgaguccgucgcuuggucugccagcgcuugccaugauggcaaaggguggcugacaaucggaaucuccggcccugacaacggggccguggcgguucugaaguacaauggaauuaucaccgaaacgauuaaaagcuggaagaaaagaauccuccggacacaggagucugagugugugugcgucaacggcuccuguuuuaccauuaugacagauggccccagcaauggggccgcuucuuauaagaucuucaagaucgaaaaaggaaaggugaccaaaagcauugagcugaacgccccuaauuuucacuacgaagagugcuccuguuauccggacaccggcacagugaugugcgucugccgcgauaacuggcacgggucuaauagacccuggguuagcuucaaccagaaucuugacuaccagaucggauacauuuguuccggcguguuuggggauaacccucggcccaaggacggaaaaggcagcugcaauccuaugacgguggauggcgcugacggggucaagggauucucuuauaaauacggcaacgggguguggaucggacgcaccaaguccaauagacugcggaagggcuuugagaugauuugggaccccaacggguggacagauaccgacagcgauuucucuguuaaacaagacguggucgccaucacagauugguccggcuauagcggauccuuugugcagcauccggaacucaccggccuggacuguauucgcccuugcuucuggguugagcuugugagagggcugccccgggaaaauacgacaaucuggaccucuggaagcuccaucucuuucuguggcgucgauagcgacaccgcgaacugguccuggccugauggggccgagcuccccuuuacaauugacaaguga

SEQ ID NO: 208627 - RNA, 1410 nt, Artificial Sequence
  derived and/or modified CDS sequence (opt5) from neuraminidase__InfluenzaA__ACI32790
augaaccccaaucagaagaucauuaccaucggcagcgugucccugacaauugccacgaucugcuuccucacccaaauugcuauccuggucacaaccguuacacuucacuuuaaacaguacgaguguaacucuccuccgaauaaccaggugaugcugugcgaacccaccaucauugagagaaauaucacagaaauuguguaucucaccaacacgaccaucgagaaggaaauuuguccuaaacuggccgaguaccggaauuggagcaagccccagugcaacaucacaggguucgcgccuuuuuccaaagacaauucuauucgccuuagcgcuggaggcgauaucugggucaccagagagcccuauguguccugugacccugauaagugcuaccaauucgcccuggggcagggaacaacccucaacaauggccauucuaacgacacgguucacgaucggacaccguaucgcacccugcugaugaaugaacucggggugcccuuucaucugggaacaaagcaggucuguaucgccuggagcuccagcucuugccacgacggcaaggcuuggcuucauguguguguuaccggcgaugacaaaaacgccaccgcuuccuucauuuacaaugggagacugguggauagcaucggaucuugguccaaaaagauucuccggacacaggagagcgaaugcgucuguaucaacggcacgugcaccguggugaugacagacgggucugccuccggaaaagcggauaccaagauucuguuuaucgaggagggcaagaucguccacacaagccuucuguccgggucugcccaacacguugaagagugcagcuguuauccucgcuaccccggagugagaugcgugugucgggacaacuggaaaggcuccaaucgcccuauugucgauaucaacgugaaggacuacagcauuguuucuuccuaugugugcagcggccucgucggggacacccccagaaagaaugauucuagcuccucuagccauugucuggacccgaacaaugaagagggaggccacggggugaaaggaugggcuuucgaugacggcaacgauguuuggauggggcggacgaucuccgaaaaacugcgcagcggauacgagacauuuaaggugauugagggcuggucuaaaccuaauuccaagcuccagaucaacagacaggucaucguggaccggggcaaucgcagcggguauucuggaauuuucuccgucgaaggcaagagcugcaucaacagauguuuuuacguggagcugauucgggggagaaaucaggaaaccgagguucuuuggaccuccaacucuaucguggucuucugcggaacaagcggcaccuaugggacaggcuccuggcccgauggagccgacauuaaucugaugccuaucuga

SEQ ID NO: 208628 - RNA, 1410 nt, Artificial Sequence; identical to SEQ ID NO: 206454
  derived and/or modified CDS sequence (opt5) from neuraminidase__InfluenzaA__ACI32791

SEQ ID NO: 208629 - RNA, 1410 nt, Artificial Sequence; identical to SEQ ID NO: 206454
  derived and/or modified CDS sequence (opt5) from neuraminidase__InfluenzaA__ACI32793

SEQ ID NO: 208630 - RNA, 1410 nt, Artificial Sequence; identical to SEQ ID NO: 206454
  derived and/or modified CDS sequence (opt5) from neuraminidase__InfluenzaA__ACI32794

SEQ ID NO: 208631 - RNA, 1410 nt, Artificial Sequence; identical to SEQ ID NO: 206784
  derived and/or modified CDS sequence (opt5) from neuraminidase__InfluenzaA__ACI32795

SEQ ID NO: 208632 - RNA, 1410 nt, Artificial Sequence
  derived and/or modified CDS sequence (opt5) from neuraminidase__InfluenzaA__ACI32796
augaaccccaaucagaagaucauuaccaucggcagcgugucccugacaauuucuacgaucugcuucuuuaugcaaauugccauccucaucaccacagucacccugcacuucaaacaguacgaguuuaacagcccuccgaauaaccagguuaugcuuugugaacccacaauuaucgagagaaauauuaccgaaaucguguaucugacaaacaccacgauugagaaggaaaucugcccuaaacucgcugaguaccggaauugguccaagccccaguguucuauuaccggguucgccccuuuuagcaaagacaacuccauccgccugucugcgggaggcgauaucugggugacaagagagcccuaugucagcugcgacccugauaaguguuaccaauucgcucuugggcagggaaccacacugaauaacgugcauuccaaugacaccguucacgaucggacgccguaucgcacacuccugaugaacgaacugggcgugcccuuucaucucgggaccaagcaggucugcauugccuggucuagcuccagcugucacgacggaaaagccuggcugcaugugugcguuacaggcgaugacaagaaugcuaccgccucuuucaucuacaacggcagacuuguggauuccauugucagcuggucuaaagagauccugcggacccaggaauccgagugugugugcauuaaugggacauguacgguggucaugaccgacggaagcgcuuccggcaaggccgauacaaaaauccucuuuaucgaggaagggaagauuguucacaccucuacacugagcggauccgcgcaacacguggaggaaugcagcugcuauccucgcuaccccggcgugagaugugucugccgggacaacuggaaggggucuaaccgcccuaucguggauauuaauaucaaagacuacuccauuguuagcucuuauguguguagcggacuugucggcgacacccccagaaagaacgauuccucuagcuccagccauugccuggacccgaauaacgaggaaggcgggcacggagugaaaggcugggccuucgaugacgggaaugauguuuggaugggacggacgaucucugagaagucccgcagcggcuacgagacauuuaaagugaucgaaggguggucuaacccuaauuccaagcuccagauuaacagacaggucaucguggaccggggaaaucgcagcggcuauuccggcauuuucucugucgaggggaaaagcuguaucaacagaugcuuuuacguggaacugauucggggaagaaaggaggaaaccgagguucuguggaccuccaauucuaucguggucuucuguggcacaagcgggaccuauggaacaggcuccuggcccgauggggcugacauuaaccucaugccuaucuga

SEQ ID NO: 208633 - RNA, 1410 nt, Artificial Sequence
  derived and/or modified CDS sequence (opt5) from neuraminidase__InfluenzaA__ACI32797
augaaccccaaucagaugaucauuaccaucggcagcgugucccugacaauuucuacgaucugcuucuuuaugcaaauugccauccucaucaccacagucacccugcacuucaagcaguacgaguuuaacagcccuccgaauaaccagguuaugcuuugugaacccacaauuaucgagagaaauauuaccgaaaucguguaucugacaaacaccacgauugagaaagaaaucugcccuaagcucgcugaguaccggaauugguccaaaccccaguguucuauuaccggguucgccccuuuuagcaaggacaacuccauccgccugucugcgggaggcgauaucugggugacaagagagcccuaugucagcugcgacccugauaaauguuaccaauucgcucuugggcagggaaccacacugaauaacgugcauuccaaugacaccguucacgaucggacgccguaucgcacacuccugaugaacgaacugggcgugcccuuucaucucgggaccaagcaggucugcauugccuggucuagcuccagcugucacgacggaaaggccuggcugcaugugugcguuacaggcgaugacaaaaaugcuaccgccucuuucaucuacaacggcagacuuguggauuccauugucagcuggucuaaggagauccugcggacccaggaauccgagugugugugcauuaaugggacauguacgguggucaugaccgacggaagcgcuuccggcaaagccgauacaaagauccucuuuaucgaggaagggaaaauuguucacaccucuacacugagcggauccgcgcaacacguggaggaaugcagcugcuauccucgcuaccccggcgugagaugugucugccgggacaacuggaaggggucuaaccgcccuaucguggauauuaauaucaaggacuacuccauuguuagcucuuauguguguagcggacuugucggcgacacccccagaaagaacgauuccucuagcuccagccauugccuggacccgaauaacgaggaaggcgggcacggagugaagggcugggccuucgaugacgggaaugauguuuggaugggacggacgaucucugagaaaucccgcagcggcuacgagacauuuaaggugaucgaaggguggucuaacccuaauuccaaacuccagauuaacagacaggucaucguggaccggggaaaucgcagcggcuauuccggcauuuucucugucgaggggaaaagcuguaucaacagaugcuuuuacguggaacugauucggggaagaaaagaggaaaccgagguucuguggaccuccaauucuaucguggucuucuguggcacaagcgggaccuauggaacaggcuccuggcccgauggggcugacauuaaccucaugccuaucuga

SEQ ID NO: 208634 - RNA, 1410 nt, Artificial Sequence
  derived and/or modified CDS sequence (opt5) from neuraminidase__InfluenzaA__ACI32798
augaaccccaaucagaagaucauuaccaucggcagcgugucccugacaauuucuacgaucugcuucuuuaugcaaauugccauccucaucaccacagucacccugcacuucaaacaguacgaguuuaacagcccuccgaauaaccagguuaugcuuugugaacccacaauuaucgagagaaauauuaccgaaaucguguaucugacaaacaccacgauugagaaggaaaucugcccuaaacucgcugaguaccggaauugguccaagccccaguguaacauuaccggguucgccccuuuuucuaaagacaauagcauccgccuguccgcgggaggcgauaucugggugacaagagagcccuaugucucuugcgacccugauaaguguuaccaauucgcucuugggcagggaaccacacugaacaaugugcauagcaacgacaccguucacgaucggacgccguaucgcacacuccugaugaaugaacugggcgugcccuuucaucucgggaccaagcaggucugcauugccugguccucuagcuccugucacgacggaaaagccuggcugcaugugugcguuacaggcgaugacaagaacgcuaccgccagcuucaucuacaauggcagacuuguggauucuauugucuccuggagcaacgagauccugcggacccaggaaucugagugugugugcauuaacgggacauguacgguggucaugaccgacggauccgcuagcggcaaagccgauacaaagauccucuuuaucgaggaagggaaaauuguucacaccuccacacugucuggaagcgcgcaacacguggaggaaugcuccugcuauccucgcuaccccggcgugagaugugucugccgggacaauuggaaggggagcaaccgcccuaucguggauauuaauaucaaggacuacucuauuguuuccagcuauguguguucuggacuugucggcgacacccccagaaagaacgauagcuccucuagcucccauugccuggacccgaauaacgaggaaggcgggcacggagugaaaggcugggccuucgaugacgggaaugauguuuggaugggacggacgaucagcgagaaacuccgcucuggcuacgagacauuuaaggugaucgaagggugguccaacccuaauagcaaacugcagauuaacagacaggucaucguggaccggggaaaucgcucuggcuauuccggcauuuucagcgucgaggggaaguccuguaucaacagaugcuuuuacguggaacugauucggggaagaaaagaggaaaccgagguucucuggaccucuaauagcaucguggucuucuguggcacauccgggaccuauggaacaggcucuuggcccgauggggcugacauuaaccugaugccuaucuga

SEQ ID NO: 208635 - RNA, 1410 nt, Artificial Sequence
  derived and/or modified CDS sequence (opt5) from neuraminidase__InfluenzaA__ACI32799
augaaccccaaucagagaaucauuaccaucggcagcgugucccugacaauuucuacgaucugcuucuuuaugcaaauugccauccucaucaccacagucacccugcacuucaagcaguacgaguuuaacagcccuccgaauaaccagguuaugcuuugugaacccacaauuaucgagcggaauauuaccgaaaucguguaucugacaaacaccacgauugagaaagaaaucugcccuaagcucgcugaguaccgcaauugguccaaaccccagugugacauuaccggguucgccccuuuuucuaaggauaacagcaucagacuguccgcgggaggcgacaucugggugacacgggagcccuaugucucuugcgauccugacaaauguuaccaauucgcucuugggcagggaaccacacugaauaacgugcauagcaaugauaccguucacgaccgcacgccguauagaacacuccugaugaacgaacugggcgugcccuuucaucucgggaccaagcaggucugcauugccugguccagcagcuccugucacgauggaaaggccuggcugcaugugugcguuacaggcgacgauaaaaaugcuaccgccagcuucaucuacaacggccggcuuguggacucugucguguccuggagcaaggauauucugcgcacccaggagucugaaugugugugcaucaaugggacauguacggucguuaugaccgacggauccgcuagcggcaaagccaacacaaagauucucuuuaucgaggaggggaaaaucgugcacaccuccacacugucuggaagcgcgcaacacguggaagagugcuccugcuauccuagauaccccggcguccggugugugugccgcgauaacuggaaggggagcaauagaccuauuguugacaucaacauuaagaauuacucuaucguguccagcuaugucuguucuggacuugugggcgacacgccccggaaaaccgauagcuccucuagcucccauugccuggacccgaacaaugaagagggcgggcacggaguuaagggcugggccuucgaugacgggaacgauguguggaugggacgcacaauuagcgaaaaacucagacugggcuacgagaccuuuaaggucaucgagggguggucuaauccuaacuccaaacugcagaucaaucgccaggugauugucgaccggggaaacagaagcggcuauucuggcaucuucuccguggaagggaagucuuguauuaaucggugcuuuuacguugagcucaucagaggacgcaaagaagagaccgaagugcuguggacauccaacucuauugucguguucuguggcaccagcgggacauauggaacgggcuccuggcccgauggggcugacaucaaucuuaugccuauuuga

SEQ ID NO: 208636 - RNA, 1410 nt, Artificial Sequence
  derived and/or modified CDS sequence (opt5) from neuraminidase__InfluenzaA__ACI32800
augaaccccaaucagaagaucauuaccaucggcagcgugucccugacaauuucuacgaucugcuucuuuaugcaaauugccauccucaucaccacagucacccugcacuucaaacaguacgaguuuaacagcccuccgaauaaccagguuaugcuuugugaacccacaauuaucgagagaaauauuaccgaaaucguguaucugacaaacaccacgauugagaaggaaaucugcccuaaacucgcugaguaccggaauugguccaagccccaguguaacauuaccggguucgccccuuuuucuaaagacaauagcauccgccuguccgcgggaggcgauaucugggugacaagagagcccuaugucucuugcgacccugauaaguguuaccaauucgcucuugggcagggaaccacacugaacaaugugcauagcaacgacaccguucacgaucggacgccguaucgcacacuccugaugaaugaacugggcgugcccuuucaucucgggaccaagcaggucugcauugccugguccucuagcuccugucacgacggaaaagccuggcugcaugugugcguuacaggcgaugacaagaacgcuaccgccagcuucaucuacaauggcagacuuguggauucuauugucuccuggagcaaagagauccugcggacccaggaaucugagugugugugcauuaacgggacauguacgguggucaugaccgacggauccgcuagcggcaaggccgauacaaaaauccucuuuaucgaggaagggaagauuguucacaccuccacacugucuggaagcgcgcaacacguggaggaaugcuccugcuauccucgcuaccccggcgugagaugugucugccgggacaacuggaaggggagcaaucgcccuaucguggauauuaacaucaaagacuacucuauuguuuccagcuauguguguucuggacuugucggcgacacccccagaaagaaugauagcuccucuagcucccauugccuggacccgaacaaugaggaaggcgggcacggagugaaaggcugggccuucgaugacgggaacgauguuuggaugggacggacgaucagcgagaagcuccgcucuggcuacgagacauuuaaagugaucgaagggugguccaauccuaacagcaagcugcagaccaauagacaggucauuguggaccggggaaaccgcucuggcuauuccggcaucuucagcgucgaggggaaauccuguauuaauagaugcuuuuacguggaacugauccggggaagaaaggaggaaaccgagguucucuggacaucuaacagcauuguggucuucuguggcaccuccgggacauauggaacgggcucuuggcccgauggggcugacaucaaucugaugccuauuuga

SEQ ID NO: 208637 - RNA, 1410 nt, Artificial Sequence; identical to SEQ ID NO: 208636
  derived and/or modified CDS sequence (opt5) from neuraminidase__InfluenzaA__ACI32802

SEQ ID NO: 208638 - RNA, 1410 nt, Artificial Sequence; identical to SEQ ID NO: 208636
  derived and/or modified CDS sequence (opt5) from neuraminidase__InfluenzaA__ACI32803

SEQ ID NO: 208639 - RNA, 1410 nt, Artificial Sequence; identical to SEQ ID NO: 207779
  derived and/or modified CDS sequence (opt5) from neuraminidase__InfluenzaA__ACI32804

SEQ ID NO: 208640 - RNA, 1410 nt, Artificial Sequence
  derived and/or modified CDS sequence (opt5) from neuraminidase__InfluenzaA__ACI32805
augaaccccaaucagaagaucauuaccaucggcagcgugucccugacaauuucuacgaucugcuucuuuaugcaaauugccauccucaucaccacagucacccugcacuucaaacaguacgaguuuaacagcccuccgaauaaccagguuaugcuuugugaacccacaauuaucgagagaaauauuaccgaaaucguguaucugacaaacaccacgauugagaaggaaaucugcccuaaacucgcugaguaccggaauugguccaagccccaguguaacauuaccggguucgccccuuuuucuaaagacaauagcauccgccuguccgcgggaggcgauaucugggugacaagagagcccuaugucucuugcgacccugauaaguguuaccaauucgcucuugggcagggaaccacacugaacaaugugcauagcaacgacaccguucacgaucggacgccguaucgcacacuccugaugaaugaacugggcgugcccuuucaucucgggaccaagcaggucugcauugccugguccagcagcuccugucacgacggaaaagccuggcugcaugugugcguuacaggcgaugacaagaacgcuaccgccagcuucaucuacaauggcagacuuguggauucuauugucuccuggagcaaagagauccugcggacccaggaaucugagugugugugcauuaacgggacauguacgguggucaugaccgacggauccgcuagcggcaaggccguuacaaaaauccucuuuaucgaggaagggaagauugugcacaccuccacacugucuggaagcgcgcaacacguggaggaaugcuccugcuauccucgcuaccccggcgucagaugugugugccgggauaacuggaaggggagcaaucgcccuaucguugacauuaacaucaaagauuacucuauuguguccagcuaugucuguucuggacuugugggcgacacccccagaaagaaugaccggagcuccucuagccauugccuggauccgaacaaugaggaaggcgggcacggaguuaaaggcugggccuucgacgaugggaacgacguguggaugggacgcacgaucuccgagaagucuagaucuggcuacgagacauuuaaagucaucgaagggugguccaauccuaacagcaagcuccagaccaaucgccaggugauugucgaucggggaaacagaucuggcuauuccggcaucuucagcguggaggggaaauccuguauuaaucggugcuuuuacguugaacugaucagaggacgcaaggaggaaaccgaggugcuguggacaucuaacagcauugucguguucuguggcaccuccgggacauauggaacgggcucuuggcccgacggggcugauaucaaucucaugccuauuuga

SEQ ID NO: 208641 - RNA, 1410 nt, Artificial Sequence; identical to SEQ ID NO: 206784
  derived and/or modified CDS sequence (opt5) from neuraminidase__InfluenzaA__ACI32806

SEQ ID NO: 208642 - RNA, 1410 nt, Artificial Sequence
  derived and/or modified CDS sequence (opt5) from neuraminidase__InfluenzaA__ACI32807
augaaccccaaucagaagaucauuaccaucggcagcgugucccugacaauuucuacgaucugcuucuuuaugcaaauugccauccucaucaccacagucacccugcacuucaaacaguacgaguuuaacagcccuccgaauaaccagguuaugcuuugugaacccacaauuaucgagagaaauauuaccgaaaucguguaucugacaaacaccacgauugagaaggaagugugcccuaaacucgcugaguaccggaauugguccaagccccagugugacaucaccggguucgccccuuuuucuaaagauaacagcauucgccuguccgcgggaggcgacaucugggucacaagagagcccuaugugucuugcgauccugacaaguguuaccaauucgcucuugggcagggaaccacacugaauaacguucauagcaaugauaccgugcgggaccgcacgccguauagaacacuccugaugaacgaacugggcguccccuuucaccucgggaccaaacaggugugcaucgccugguccucuagcuccugucaugauggaaaggccuggcugcacguuugcauuacaggcgacgauaagaaugcuaccgccagcuucaucuacaacggccggcuuguggacucuauugucuccuggagcaaagagauccugcgcacccaggaaucugagugugugugcauuaaugggacauguacgguggucaugaccgauggauccgcuagcggcaaggccgacacaaaaauccucuuuaucgaggaagggaagauuguucauaccuccacacugucuggaagcgcgcaacacguggaggaaugcuccugcuauccuagauaccccggcgugcggugugucugccgcgauaacuggaaggggagcaacagaccuaucguggacauuaauaucaaagaccacucuauuguuuccagcuacguguguucuggacuugucggcgauacgccccggaagaacgacagcuccucuagcucccauugccuggauccgaauaacgaggaaggcgggcacggagugaaaggcugggccuucgacgaugggaaugacguuuggaugggacgcaccaucagcgagaagucuagacucggcuaugagacauuuaaagugaucgaagggugguccaacccuaauagcaagcugcagauuaaccggcaggucaucguggaucgcggaaauagaucuggcuacuccggcauuuucagcgucgaggggaaauccuguaucaaccggugcuuuuauguggaacugauuagaggacgcaaggaggaaaccgagguucucuggaccucuaauagcaucguggucuucuguggcacauccgggaccuacggaacaggcucuuggcccgacggggcugauauuaaccugaugccuaucuga

SEQ ID NO: 208643 - RNA, 1410 nt, Artificial Sequence
  derived and/or modified CDS sequence (opt5) from neuraminidase__InfluenzaA__ACI32808
augaaccccaaucagaagaucauuaccaucggcagcgugucccugacaauuucuacgaucugcuucuuuaugcaaauugccauccucaucaccacagucacccugcacuucaaacaguacgaguuuaacagcccuccgaauaaccagguuaugcuuugugaacccacaauuaucgagagaaauauuaccgaaaucguguaucugacaaacaccacgauugagaaggaaaucugcccuaaacucgcugaguaccggaauugguccaagccccagugugacauuaccggguucgccccuuuuucuaaagauaacagcauccgccuguccgcgggaggcgacaucugggugacaagagagcccuaugucucuugcgauccugacaaguguuaccaauucgcucuugggcagggaaccacacugaauaacgugcauagcaaugauaccguucacgaccggacgccguaucgcacacuccugaugaacgaacugggcgugcccuuucaucucgggaccaagcaggucugcauugccugguccucuagcuccugucacgauggaaaagccuggcugcaugugugcguuacaggcgacgauaagaaugcuaccgccagcuucaucuacaacggcagacuuguggacucugucguguccuggagcaaagauauucugcggacccaggagucugaaugugugugcaucaaugggacauguacggucguuaugaccgacggauccgcuagcggcaaggccgauacaaaaauucucuuuaucgaggaggggaagaucgugcacaccuccacacugucuggaagcgcgcaacacguggaagagugcuccugcuauccucgcuaccccggcgucagaugugugugccgggacaacuggaaggggagcaaccgcccuauuguugacaucaauauuaaaaacuacucuaucguguccagcuaugucuguucuggacuugugggcgauacccccagaaagacggacagcuccucuagcucccauugccuggauccgaauaacgaagagggcgggcacggaguuaaaggcugggccuucgacgaugggaaugacguguggaugggacggacaauuagcgaaaagcuccgccugggcuacgagaccuuuaaagucaucgagggguggucuaacccuaauuccaagcugcagaucaacagacaggugauugucgaucggggaaaucgcagcggcuauucuggcaucuucuccguggaagggaaaagcuguauuaacagaugcuuuuacguugagcucauccggggaagaaaggaaaagaccgaggugcuguggacauccaauucuauugucguguucuguggcaccagcgggacauauggaacgggcuccuggcccgacggggcugauaucaaccuuaugccuauuuga

SEQ ID NO: 208644 - RNA, 1410 nt, Artificial Sequence; identical to SEQ ID NO: 207779
  derived and/or modified CDS sequence (opt5) from neuraminidase__InfluenzaA__ACI32809

SEQ ID NO: 208645 - RNA, 1410 nt, Artificial Sequence
  derived and/or modified CDS sequence (opt5) from neuraminidase__InfluenzaA__ACI32810
augaaccccaaucagaagaucauuaccaucggcagcgugucccugacaauuucuacgaucugcuucuuuaugcaaauugccauccucaucaccacagucacccugcacuucaaacaguacgaguuuaacagcccuccgaauaaccagguuaugcuuugugaacccacaauuaucgagagaaauauuaccgaaaucguguaucugacaaacaccacgauugagaaggaaaucugcccuaaacucgcugaguaccggaauugguccaagccccagugugacauuaccggguucgccccuuuuucuaaagauaacagcauccgccuguccgcgggaggcgacaucugggugacaagagagcccuaugucucuugcgauccugacaaguguuaccaauucgcucuugggcagggaaccacacugaauaacgugcauagcaaugauaccguucacgaccggacgccgcaucgcacacuccugaugaacgaacugggcgugcccuuucaccucgggaccaagcaggucugcauugccugguccucuagcuccugucaugauggaaaagccuggcugcacgugugcguuacaggcgacgauaagaaugcuaccgccagcuucaucuauaacggcagacuuguggacucugucguguccuggagcaaagauauucugcggacccaggagucugaaugugugugcaucaaugggacauguacggucguuaugaccgacggauccgcuagcggcaaggccgauacaaaaauucucuuuaucgaggaggggaagaucgugcacaccuccacacugucuggaagcgcgcaacauguggaagagugcuccugcuacccucgcuaucccggcgucagaugugugugccgggacaacuggaaggggagcaaccgcccuauuguugacaucaauauuaaaaacuacucuaucguguccagcuacgucuguucuggacuugugggcgauacccccagaaagacggacagcuccucuagcucccacugccuggauccgaauaacgaagagggcgggcauggaguuaaaggcugggccuucgacgaugggaaugacguguggaugggacggacaauuagcgaaaagcuccgccugggcuaugagaccuuuaaagucaucgagggguggucuaacccuaauuccaagcugcagaucaacagacaggugauugucgaucggggaaaucgcagcggcuacucuggcaucuucuccguggaagggaaaagcuguauuaacagaugcuuuuauguugagcucauccggggaagaaaggaagagaccgaagugcuguggacauccaauucuauugucguguucuguggcaccagcgggacauacggaacgggcuccuggcccgacggggcugauaucaaccuuaugccuauuuga

SEQ ID NO: 208646 - RNA, 1410 nt, Artificial Sequence
  derived and/or modified CDS sequence (opt5) from neuraminidase__InfluenzaA__ACI32811
augaaccccaaucagaagaucauuaccaucggcagcgugucccugacaauuucuacgaucugcuucuuuaugcaaauugccauccucaucaccacagucacccugcacuucaaacaguacgaguuuaacagcccuccgaauaaccagguuaugcuuugugaacccacaauuaucgagagaaauauuaccgaaaucguguaucugacaaacaccacgauugagaaggaaaucugcccuaaacucgcugaguaccggaauugguccaagccccaguguaacauuaccggguucgccccuuuuucuaaagacaauagcauccgccuguccgcgggaggcgauaucugggugacaagagagcccuaugucucuugcgacccugauaaguguuaccaauucgcucuugggcagggaaccacacugaacaaugugcauagcaacgacaccguucacgaucggacgccguaucgcacacuccugaugaaugaacugggcgugcccuuucaucucgggaccaagcaggucugcauugccugguccucuagcuccugucacgacggaaaagccuggcugcaugugugcguuacaggcgaugacaagaacgcuaccgccagcuucaucuacaauggcagacuuguggauucuauugucuccuggagcaaagagauccugcggacccaggaaucugagugugugugcauuaacgggacauguacgguggucaugaccgacggauccgcuagcggcaaggccgauacaaaaauccucuuuaucgaggaagggaagauuguucacaccuccacacugucuggaagcgcgcaacacguggaggaaugcuccugcuauccucgcuaccccggcgugagaugugucugccgggacaacuggaaggggagcaaucgcccuaucguggauauuaacaucaaagacuacucuauuguuuccagcuauguguguucuggacuugucggcgacacccccagaaagaaugauagcuccucuagcucccauugccuggacccgaacaaugaggaaggcgggcacggagugaaaggcugggccuucgaugacgggaacgauguuuggaugggacggacgaucagcgagaagcuccgcucuggcuacgagacauuuaaagugaucgaagggugguccaauccuaagagcaaacugcagauuaacagacaggucaucguggaccggggaaaucgcucuggcuauuccggcauuuucagcgucgaggggaaguccuguaucaacagaugcuuuuacguggaacugauucggggaagaaaggaggaaaccgagguucucuggaccucuaauagcaucguggucuucuguggcacauccgggaccuauggaacaggcucuuggcccgauggggcugacauuaaccugaugccuaucuga

SEQ ID NO: 208647 - RNA, 1410 nt, Artificial Sequence
  derived and/or modified CDS sequence (opt5) from neuraminidase__InfluenzaA__ACI32812
augaaccccaaucagaagaucauuaccaucggcagcgugucccugacaauuucuacgaucugcuucuuuaugcaaauugccauccucaucaccacagucacccugcacuucaaacaguacgaguuuaacagcccuccgaauaaccagguuaugcuuugugaacccacaauuaucgagagaaauauuaccgaaaucguguaucugacaaacaccacgauugagaaggaaaucugcccuaaacucgcugaguaccggaauugguccaagccccagugugacauuaccggguucgccccuuuuucuaaagauaacagcauccgccuguccgcgggaggcgacaucugggugacaagagagcccuaugucucuugcgauccugacaaguguuaccaauucgcucuugggcagggaaccacacugaauaacgugcauagcaaugauaccguucacgaccggacgccguaucgcacacuccugaugaacgaacugggcgugcccuuucaucucgggaccaagcaggucugcauugccugguccucuagcuccugucacgauggaaaagccuggcugcaugugugcguuacaggcgacgauaagaaugcuaccgccagcuucaucuacaacggcagacuuguggacucugucguguccuggagcaaagauauucugcggacccaggagucugaaugugugugcaucaaugggacauguacggucguuaugaccgacggauccgcuagcggcaaggccaacacaaaaauucucuuuaucgaggaggggaagaucgugcacaccuccacacugucuggaagcgcgcaacacguggaagagugcuccugcuauccucgcuaccccggcgucagaugugugugccgggauaacuggaaggggagcaaucgcccuauuguugacaucaacauuaaaaauuacucuaucguguccagcuaugucuguucuggacuugugggcgacacccccagaaagacggauagcuccucuagcucccauugccuggacccgaacaaugaagagggcgggcacggaguuaaaggcugggccuucgaugacgggaacgauguguggaugggacggacaauuagcgaaaagcuccgccugggcuacgagaccuuuaaagucaucgagggguggucuaauccuaacuccaagcugcagaucaauagacaggugauugucgaccggggaaaccgcagcggcuauucuggcaucuucuccguggaagggaaaagcuguauuaauagaugcuuuuacguugagcucauccggggaagaaaggaagagaccgaagugcuguggacauccaacucuauugucguguucuguggcaccagcgggacauauggaacgggcuccuggcccgauggggcugacaucaaucuuaugccuauuuga

SEQ ID NO: 208648 - RNA, 1410 nt, Artificial Sequence; identical to SEQ ID NO: 206871
  derived and/or modified CDS sequence (opt5) from neuraminidase__InfluenzaA__ACI32814

SEQ ID NO: 208649 - RNA, 1350 nt, Artificial Sequence
  derived and/or modified CDS sequence (opt5) from neuraminidase__InfluenzaA__ACJ53848
augaaccccaaucagaagaucauuaccaucggcagcauuugcauggugaucgggauugucucccugaugcuccaaaucggaaacaugaucucuauuuggguuagccacuccauccagacaggcaaucagugucaggccgagccuauuucuaacacgaaauuccugaccgaaaaggcuguggccagcgugacacuugcgggaaauuccucucugugcccgaucagcgggugggcugucuacuccaaagacaacagcauuagaaucggcucucgcggggauguguuuguuauucgggagcccuucaucuccuguagccaucucgaaugcagaaccuuuuuccugacacaaggagcccuucugaaugacaagcacucuaacggcaccgugaaagaucgguccccucaucgcacacucaugagcugucccgucggcgaggccccuucucccuauaauuccagauuugaaagcguggcuugguccgccucugcuugccacgacgggaccagcuggcugacgaucggaauuuccggcccugauaacggggccguugcggugcugaaguacaauggaaucauuaccgacacaaucaagagcuggcggaacaauauucuccgcacccaggagucugagugugccugcgucaacggcuccuguuucacagugaugaccgaugggccgagcucuggacaggcuagcuauaaaaucuuuaagauggaaaaaggcaagguggucaaauccguugagcuggacgcccccaauuaccauuaugaagagugcucuuguuacccugaugcuggcgagaucacgugcgugugcagagacaacuggcacgggagcaaccggcccuggguguccuucaaucagaaccuugaauaucaaauuggauacaucuguagcggcgucuuuggggauaauccucgccccaacgacggaacaggcucuugcgggccgguguccccuaauggagccuacggcguuaagggcuucagcuuuaaguaugggaacggaguguggauuggcagaaccaaaucuacaaauucccggagcggguucgagaugaucugggaucccaacggauggaccggcaccgacuccucuuuuagcgucaagcaggacauuguggcgaucacagauugguccggguacucuggcagcuucguucagcacccugaacugacgggacucgacuguauccgccccugcuucuggguggagcugauuagaggccggcccaaagaauccaccaucuggacaagcgggucuuccauuagcuuuuguggagucaauucugauaccguguccuggagcuggccugacggcgccgagcuuccguucacaaucgauaaguga

SEQ ID NO: 208650 - RNA, 1350 nt, Artificial Sequence
  derived and/or modified CDS sequence (opt5) from neuraminidase__InfluenzaA__ACJ53849
augaaccccaaucagaagaucauuaccaucggcagcauuugcauggugaucgggauugucucccugaugcuccaaaucggaaacaugaucucuauuuggguuagccacuccauccagacaggcaaucagugucaggccgagccuauuucuaacacgaaauuccugaccgaaaaggcuguggccagcgugacacuugcgggaaauuccucucugugcccgaucagcgggugggcugucuacuccaaagacaacagcauuagaaucggcucucgcggggauguguuuguuauucgggagcccuucaucuccuguagccaucucgaaugcagaaccuuuuuccugacacaaggagcccuucugaaugacaagcacucuaacggcaccgugaaagaucgguccccucaucgcacacucaugagcugucccgucggcgaggccccuucucccuauaauuccagauuugaaagcguggcuugguccgccucugcuugccacgacgggaccagcuggcugacgaucggaauuuccggcccugauaacggggccguugcggugcugaaguacaauggaaucauuaccgacacaaucaagagcuggcggaacaauauucuccgcacccaggagucugagugugccugcgucaacggcuccuguuucacagugaugaccgaugggccgagcucuggacaggcuagcuauaaaaucuuuaagauggaaaaaggcaagguggucaaauccguugagcuggacgcccccaauuaccauuaugaagagugcucuuguuacccugaugcuggcgagaucacgugcgugugcagagacaacuggcacgggagcaaccggcccuggguguccuucaaucagaaccuugaauaucaaauuggauacaucuguagcggcgucuuuggggauaauccucgccccaacgacggaacaggcucuugcuccccggugagcccuaauggggccuacggaguuaagggcuucucuuuuaaguauggcaacgggguguggauuggaagaaccaaauccacaaauagccgguccggcuucgagaugaucugggaucccaacggguggaccggaaccgacucuagcuuuuccgucaagcaggacauuguggcgaucacagauuggucuggcuacagcggguccuucguucagcacccugaacugacgggccucgacuguauccgccccugcuucuggguggagcugauuagaggacggcccaaagaaagcaccaucuggacaucuggcuccagcauuucuuuuuguggggucaauuccgauaccgugagcuggucuuggccugacggagccgagcuuccguucacaaucgauaaguga

SEQ ID NO: 208651 - RNA, 1350 nt, Artificial Sequence
  derived and/or modified CDS sequence (opt5) from neuraminidase__InfluenzaA__ACJ53853
augaaccccaaucagaagaucauuaccaucggcagcauuugcauggugaucgggauugucucccugaugcuccaaaucggaaacaugaucucuauuuggguuagccacuccauccagacaggcaaucagugucaggacgagccuauuucuaacacgaaauuccugaccgaaaaggccguggcuagcgugacacuugccggaaauuccucucugugcccgaucagcgggugggcggucuacuccaaagauaacagcauuagaaucggcucucgcggggacguguuuguuauucgggagcccuucaucuccuguagccaucucgaaugcagaaccuuuuuccugacacaaggagcccuucugaaugauaagcacucuaacggcaccgugaaagaccgguccccucaucgcacacucaugagcugucccgucggcgaggcuccuucucccuauaauuccagauuugaaagcguggccugguccgcuucugccugccacgaugggaccagcuggcugacgaucggaauuuccggcccugacaacggggcuguugccgugcugaaguacaauggaaucauuaccgauacaaucaagagcuggcggaacaauauucuccgcacccaggagucugagugugcgugcgucaacggcuccuguuucacagugaugaccgacgggccgagcucuggacaggccagcuauaaaaucuuuaagauggaaaaaggcaagguggucaaauccguugagcuggaugcucccaauuaccauuaugaagagugcucuuguuacccugacgccggcgagaucacgugcgugugcagagauaacuggcacgggagcaaccggcccuggguguccuucaaucagaaccuugaauaucaaauuggauacaucuguagcggcgucuuuggggacaauccucgccccaacgauggaacaggcucuugcgggccgguguucccuaauggagcuuacggcguuaagggcuuuuccuucaaguaugggaacggaguguggauuggcagaaccaaaagcacaaauucucgguccggguuugagaugaucugggaccccaacggauggaccggcaccgacagcuccuucucugucaagcaggauauuguggccaucacagacuggagcggguacuccggcucuuucguucagcacccugaacugacgggacucgauuguauccgccccugcuuuuggguggagcugauuagaggccggcccaaagaaagcaccaucuggacauccgggagcucuauuuccuucuguggagucaauagcgacaccgugucuugguccuggccugauggcgcggagcuuccguuuacaaucgacaaguga

SEQ ID NO: 208652 - RNA, 1350 nt, Artificial Sequence; identical to SEQ ID NO: 208651
  derived and/or modified CDS sequence (opt5) from neuraminidase__InfluenzaA__ACJ53866

SEQ ID NO: 208653 - RNA, 1350 nt, Artificial Sequence
  derived and/or modified CDS sequence (opt5) from neuraminidase__InfluenzaA__ACJ53867
augaaccccaaucagaagaucauuaccaucggcagcauuugcauggccaucgggauugugucccugaugcuccaaaucggaaacaugaucucucugugggucagccacuccauucagacaggcaaucagugucaggcugagccuaucucuaacacgaaauuccuuaccgaaaaggccguugcgagcgugacacuggcuggaaauuccucucucugcccgauuagcgggugggccguguacuccaaagacaacagcaucagaauuggcucucgcggggaugucuuugugauccgggagcccuucauuuccuguagccaucuggaaugcagaaccuuuuuccuuacacaaggagcccugcucaaugacaagcacucuaacggcaccguuaaagaucgguccccucaucgcacacugaugagcugucccgugggcgaggcuccuucucccuauaauuccagauuugaaagcgucgccugguccgcuucugccugccacgacgggaccagcuggcugacgaucggaaucuccggcccugauaacggggcgguggccguucucaaguacaauggaauuaucaccgacacaauuaagagcuggcggaacaauauccugcgcacccaggagucugagugugcuugcgugaacggcuccuguuucacagucaugaccgaugggccgagcucuggacaggccagcuauaaaauuuuuaagauggaaaaaggcaagguggugaaauccgucgagcuugacgcucccaauuaccauuaugaagagugcucuuguuacccugaugccggcgagaucacgugcguuugcagagacaacuggcacgggagcaaccggcccuggguguccuucaaucagaaccuggaauaucaaaucggauacauuuguagcggcguguuuggggauaauccucgccccaacgacggaacaggcucuugcgggccggucuccccuaauggagcguacggcgugaagggcuucagcuuuaaguaugggaacggaguuuggaucggcagaaccaaaucuacaaauucccggagcggguucgagaugauuugggaucccaacggauggaccggcaccgacuccucuuuuagcgugaagcaggacaucgucgccauuacagauugguccggguacucuggcagcuucgugcagcacccugaacucacgggacuggacuguauccgccccugcuucuggguugagcuuaucagaggccggcccaaagaauccaccauuuggacaagcgggucuuccaucagcuuuuguggagucaauucugauaccguguccuggagcuggccugacggcgcugagcugccguucacaauugauaaguga

SEQ ID NO: 208654 - RNA, 1350 nt, Artificial Sequence
  derived and/or modified CDS sequence (opt5) from neuraminidase__InfluenzaA__ACJ53875
augaaccccaaucagaagaucauuaccaucggcagcauuugcauggugaucgggauugucucccugaugcuccaaaucggaaacaugaucucuauuuggguuagccacuccauccagacaggcaaucagugucaggccgagccuauuucuaacacgaaauuccugaccgaaaaggcuguggccagcgugacacuugcgggaaauuccucucugugcccgaucagcgggugggcugucuacuccaaagacaacagcauuagaaucggcucucgcggggauguguuuguuauucgggagcccuucaucuccuguagccaucucgaaugcagaaccuuuuuccugacacaaggagcccuucugaaugacaagcacucuaacggcaccgugaaagaucgguccccucaucgcacacucaugagcugucccgucggcgaggccccuucucccuauaauuccagauuugaaagcguggcuugguccgccucugcuugccacgacgggaucagcuggcugaccauuggaaucuccggcccugauaacggggccguugcggugcugaaguacaauggaauuaucacggacaccauuaagagcuggcggaacaauauccuccgcacacaggagucugagugugccugcgucaacggcuccuguuucaccgugaugacagaugggccgagcucuggacaggcuagcuauaaaaucuuuaagauggaaaaaggcaagguggucaaauccguugagcuggaagcccccaauuaccauuaugaggagugcucuuguuacccugacgcuggcgaaauuaccugcgugugcagagauaacuggcacgggagcaaccggcccuggguguccuucaaucagaaccuugaguaucaaaucggauacauuuguagcggcgucuuuggggacaauccucgccccaacgauggaacgggcucuugcgggccgguguccccuaauggagccuacggcguuaagggcuucagcuuuaaguaugggaacggaguguggaucggcagaacaaaaucuaccaauucccggagcggguucgaaaugauuugggaccccaacggauggacaggcaccgauuccucuuuuagcgucaagcaggacaucguggcgaucaccgacugguccggguacucuggcagcuucguucagcacccugagcugacaggacucgauuguauucgccccugcuucuggguggaacugaucagaggccggcccaaagaguccacgauuuggaccagcgggucuuccaucagcuuuuguggagucaauucugacacaguguccuggagcuggccugauggcgccgagcuuccguucaccauugacaaguga

SEQ ID NO: 208655 - RNA, 1350 nt, Artificial Sequence
  derived and/or modified CDS sequence (opt5) from neuraminidase__InfluenzaA__ACJ53876
augaaccccaaucagaagaucauuaccaucggcagcauuugcauggugaucgggauugucucccugaugcuccaaaucggaaacaucauuucuaucuggguuagccacuccauucagacaggcaaucagugucaggccgagccuaucucuaacacgaaauuccugaccgaaaaggcuguggccagcgugacacuugcgggaaauuccucucugugcccgauuagcgggugggcugucuacuccaaagacaacagcaucagaauuggcucucgcggggauguguuuguuauccgggagcccuucaucuccuguagccaucucgaaugcagaaccuuuuuccugacacaaggagcccuucugaaugacaagcacucuaacggcaccgugaaagaucgguccccucaucgcacacucaugagcugucccgucggcgaggccccuucucccuauaauuccagauuugaaagcguggcuugguccgccucugcuugccacgacgggaccagcuggcugacgauuggaaucuccggcccugauaacggggccguugcggugcugaaguacaauggaauuaucaccgacacaauuaagagcuggcggaacaauauccuccgcacccaggagucugagugugccugcgucaacggcuccuguuucacagugaugaccgaugggccgagcucuggacaggcuagcuauaaaaucuuuaagauggaaaaaggcaagguggucaaauccguugagcuggacgcccccaauuaccauuaugaagagugcucuuguuacccugaugcuggcgagauuacgugcgugugcagagacaacuggcacgggagcaaccggcccuggguguccuucaaucagaaccuugaauaucaaaucggauacauuuguagcggcgucuuuggggauaauccucgccccaacgacggaacaggcucuugcgggccgguguccccuaauggagccuacggcguuaagggcuucagcuuuaaguaugggaacggaguguggaucggcagaaccaaaucuacaaauucccggagcggguucgagaugauuugggaucccaacggauggaccggcaccgacuccucuuuuagcgucaagcaggacaucguggcgaucacagauugguccggguacucuggcagcuucguucagcacccugaacugacgggacucgacuguauucgccccugcuucuggguggagcugaucagaggccggcccaaagaauccaccauuuggacaagcgggucuuccaucagcuuuuguggagucaauucugauaccgugggcugguccuggccugacggggccgagcuuccguucacaauugauaaguga

SEQ ID NO: 208656 - RNA, 1404 nt, Artificial Sequence
  derived and/or modified CDS sequence (opt5) from neuraminidase__InfluenzaA__ACJ67535
augaaccccaaucagaagaucauugcccugggcagcguguccaucaccauugcuacaaucugccucauuaugcaaaucgccguccuggcgacgaccaugacacuucacuucaacgaguguaccaauccuucuaacaaucaggcuaugccgugcgaacccaucauuaucgagagaaacaugacagaaauuguucaucugaauaacaccacaaucgagaaagaaagcuguccuaagguggccgaguacaaaaauugguccaagccccagugccagauuaccggguuugccccuuucucuaaagacaacagcauccggcucuccgcuggaggcgauauuugggugacgcgcgagcccuaugucucuugugggcugggaaauugcuaccaauuugcccuuggccaggggaccacacugaacaauaagcacagcaacgacaccauccaugauagauccccucaccggacacuccugaugaaugaacugggagugccguuccaucucggcaccaagcagguuuguaucgcuuggucuagcuccagcugccacgacggcaaagccuggcugcacgugugugucacgggggaugaccgcaacgcgacagccucuauuaucuaugauggaaugcuuaccgacuccauuggcagcuggucuaagaacauccugagaacacaggaguccgaaugcguguguauuaaugggaccugcaccguugugaugacagauggaagcgcuuccggccgggccgacacgaaaauccucuuuauccgcgaggggaagauuguccauaucucuccccugagcggauccgcucaacacguggaggaaugcagcuguuacccuagauaucccgaggugcggugcgucugucgcgauaacuggaaaggcucuaauagaccuguucuuuacauuaacguggccgacuauuccguggauagcucuuacgucugcagcggccuggugggggacacaccccggaaugacgauuccucuagcuccagcaacugucgcgacccgaauaacgaaagaggaggcccugggguuaagggaugggcguucgauaauggcaacgacguguggauggggcggaccaucaagaaagauucucgcuccggauacgagaccuuuagagucgugggcggcuggacaaccgccaauagcaagucucagauuaaccggcagguuaucguggacuccgauaauuggagcggguauuccggaaucuucucugucgaaggcaaaacgugcauuaacagauguuuuuacguggagcucauccgcgggcggccccaggagacaagagucugguggaccagcaauuccauuaucguguucugcggaaccucuggcacauaugggaccggcagcuggccugacggagcuaacauuaacuuuauguccaucuga

SEQ ID NO: 208657 - RNA, 1410 nt, Artificial Sequence
  derived and/or modified CDS sequence (opt5) from neuraminidase__InfluenzaA__ACK99424
augaaccccaaucagaagaucauuaccaucggcagcgugucccugacaauugccacgaucugcuuccucaugcaaauugcuauccuggucaccacaguuacccuucacuuuaaacaguacgaguguucuagcccuccgaacaaucaggugauccccugccagccuacaauuaucgaaagaaacauuaccgagaucguguaucugacaaauaccacgauugaaaaggagaucugucccaaacucgucgaauaccggaacugguccaagccucaaugcaaaauuaccggguucgcccccuuuucuaaggacaauagcauccgccuguccgcgggaggcgauaucugggugacaagagagccuuauguuucuugugacccgagcaagugcuaccaguucgcucuugggcagggaaccacacugaacaaucggcauuccaacgauaccgugcacgaccgcacgcccuauagaacacuccugaugaaugagcugggcgucccuuuucaucucgggaccaaacagguguguauugccuggucuagcuccagcugccacgauggaaaggccuggcugcauguuugugugacaggccacgacgaaaacgcuaccgccucuuucaucuacgauggccggcuugucgacuccauugggagcuggucuaaaaauauccugcgcacccaagaguccgaaugcguguguauuaacggaacaugcacgguggucaugaccgauggcagcgcuuccgagagagccgacacaaagauccucuuuaucgaggaagggaaaguugugcacauuucuccccugagcggauccgcgcagcauguggaggaaugcagcuguuauccucgguaccccggcguccgcugcguguguagagauaauuggaaggggucuaaccggccgaucguugacauuaacgugaaggauuacuccaucgucagcucuuaugugugcagcggacuuguuggcgacaccccucgcaaaaaugacuccucuagcuccagcuacuguagaaaccccaauaacgagaagggcucucacggggugaaaggaugggccuucgaugacggcaaugaugucuggauggggcggacaauuuccgaggaacugcgcagcggauaugagaccuuuaaggugaucggcggguggucuacgccuaacuccaaacuccagaucaauagacaggucauuguggacagcggaaaccgguccggcuacucuggcaucuucagcguugaagggaaguccugcauuaauagauguuuuuauguggagcugauccgcggacggaaacaagaaacaaaggucugguggaccucuaacagcauugugguuuucugcggcaccuccgggacauacggaaccggcagcuggcccgauggggcugacaucaaucugaugcccauuuga

SEQ ID NO: 208658 - RNA, 1410 nt, Artificial Sequence; identical to SEQ ID NO: 208477
  derived and/or modified CDS sequence (opt5) from neuraminidase__InfluenzaA__ACK99435

SEQ ID NO: 208659 - RNA, 1413 nt, Artificial Sequence
  derived and/or modified CDS sequence (opt5) from neuraminidase__InfluenzaA__ACK99446
augaaccccaaucagaagaucauuaccaucggcagcauuuccauggccaucgggauuaucucucugacacuccaaaucggaaacauuaucagcauuugggugucccacucuauccagacgggcagccagaaucauaccgggauuugcaaccagagaaucauuacauacgaaaauuccaccugggucaaccaaacauauguuaauaucaacaauaccaacgugguggcuggaaaagacaagacaucugucacccuggccggcaauagcucccuuuguccuauccgggggugggcgauuuacacgaaagauaacagcauccgcauuggaucuaagggcgacguguucguuaucagagagccguuuauuuccugcagccaccuggagugucggaccuucuuucucacacagggcgcucugcuuaaugauaaacauucuaacgggaccgugaaggaccgcagcccccacagagcccugauguccugcccucucggagaagcccccucuccuuauaauucccgguucgagagcgucgcuugguccgccucugcuugucaugauggcaugggguggcugacaaucggaaucagcggccccgacgauggggccguggcgguucugaaguacaacggaauuaucaccgaaacgauuaaauccuggaagaaacgcauccucagaacacaggagagcgagugcgugugugucaacggcucuugcuuuaccauuaugacagacggcccuuccaauggggccgcuagcuaucggaucuucaagaucgaaaaaggaaaggugaccaagucuauugagcuggaugccccgaacagccacuacgaagaguguuccugcuaucccgacaccggcacagugaugugugucugccgcgauaauuggcacgggucuaacagaccuuggguuagcuuuaaucagaaccuugacuaccaaaucggauacauuugcuccggcguguucggggauaauccccggccuaaagacggaaagggcagcuguaaccccgugacggucgacggcgcugauggggugaaaggauuuucuuaucgcuacggcaaugggguuuggaucggaagaaccaaguccaaccgguuccgcaaaggcuuugagaugauuugggacccgaauggguggacagauaccgacagcgauuucucugugaagcaggacgucguggccaugacagauugguccggcuauagcggauccuuuguucagcauccugaacugaccggccucgacugcaugagacccuguuucuggguggagcugguccgggggagaccucgcgaaaacacgacaaucuggaccucuggaagcuccauuucuuucugcggcgugaauagcgauaccgcgaacugguccuggcccgacggggccgagcuucccuuuacaaucgauaaauga

SEQ ID NO: 208660 - RNA, 1410 nt, Artificial Sequence
  derived and/or modified CDS sequence (opt5) from neuraminidase__InfluenzaA__ACK99457
augaaccccaaucagaagaucauuaccaucggcagcgugucccugacaauugccacgaucugcuuccucaugcaaauugcuauccuggucaccacaguuacccuucacuuuaaacagcaugaguguaacucuccuccgaauaaccaggugaugcccugcgaaccuacaaucauugagagaaauaucaccgaaauuguguaccugacaaacaccacgaucgagaaggaaauuugucccaaacucgucgaguaucggaauuggagcaagccucagugcaaaaucaccggguucgcccccuuuuccaaggacaacucuauucgccugagcgcgggaggcgauaucugggugacaagagagccuuacguuuccugugacccggggaagugcuaucaauucgcucuuggacagggcaccacacugaauaaccggcacucuaaugauaccgugcaugaccgcacgcccuacagaacacuccugaugaacgaacugggggucccuuuucaccucggaaccaaacagguguguaucgccuggagcuccagcucuugccaugauggcaaggccuggcugcacguuugugugacaggccacgacgagaaugcuaccgccuccuucauuuaugaugggcggcuugucgacagcaucgugucuugguccaaaaacauucugcgcacccaggaaagcgagugcguguguaucaauggaacaugcacggucguuaugaccgauggcucugcuuccgagagagccgacacaaagauucucuuuaucgaagaggggaaaaucgugcauauuagcccccuguccggaucugcgcaacacguggaagagugcagcuguuacccucgguaucccggcguccgcugcguguguagagauaacuggaagggguccaaccggccgaucguugacauuaaugugaaggauuacagcaucgucucuuccuacgugugcagcggacuuguuggcgacaccccucgcaaaaacgacucuagcuccucuagcuauuguagaaaucccaacaaugaaaagggcucccauggggugaaaggaugggccuucgaugacggcaacgaugucuggauggggcggacaauuggagaggagcugcgcagcggcuacgaaaccuuuaaggugaucgggggauggucuacgccuaauuccaaacuccagacaaacagacaggucaucguggaccggggcaauagaagcggcuauucugggauuuucuccguugagggaaagagcugcaucaaccgcuguuuuuacguggaacugauucggggcagaaaacaggagaccaaggucugguggaccuccaauucuaucgugguuuucugcgggacaagcggaaccuauggcacaggguccuggcccgauggcgcugacauuaaccugaugcccaucuga

SEQ ID NO: 208661 - RNA, 1413 nt, Artificial Sequence
  derived and/or modified CDS sequence (opt5) from neuraminidase__InfluenzaA__ACK99468
augaaccccaaucagaagaucauuaccaucggcagcauuuccaucgccauugggaucaucucucugauucuccaaaucggaaacauuaucagcauuugggcuucccacucuauccagacaggcagccagaaucauacggggauuugcaaccagagaaucaucaccuacgaaaauuccacaugggugaaccaaaccuaugucaauauuaacaauacaaacguuguggccggaaaagacaagaccucuaugacacuggcgggcaauagcucccuuuguccuauccgggggugggcuauuuacaccaaagauaacagcauccgcauuggaucuaagggcgacguguucgucaucagagagccguuuaucuccugcagccaccuggagugucggacguucuuucucacccagggcgcccugcuuaaugauaaacauucuaacgggacagugaaggaccgcucccccuauagagcccugaugagcugcccucucggagaagcucccucuccuuacaauucccgguucgagagcguugccugguccgcuucugccugucacgauggccugggguggcugaccauuggaaucagcggccccgacaacggggcgguggccguccucaaguauaacggaauuaucacagaaaccauuaaauccuggaagaaacgcauccugagaacgcaggagagcgagugcguguguaugaacucuuccugcuuuacaaucaugaccgauggcccuagcaauggcgcugccucuuaccggauuuucaagaucgaaaaagggcgcguuacaaagagcauugagcuugacgcuccgaauuaucauuacgaagaguguuccugcuaccccgauaccggaaccgugaugugugucugcagagacaacuggcacggcucuaaucggccuugggugagcuuuaaccagaaucuggauuaucaaaucggguacauuugcuccggaguguucggcgacaacccccgcccuaaggauggggagggaagcuguaaucccgucacaguugacggcgccgacggcgugaaaggguuuucuuauagauacggaaacggcguguggaucgggcggacgaaguccaaucgccucagaaaaggauucgaaaugauuugggauccgaacggcuggaccgacacagauagcgacuuuucuaugaagcaggauaucgucgcgaugaccgacugguccggguauagcggcuccuucgugcagcacccugagcugacaggacuugauugcaugcggcccuguuuuuggguugaacuggugagaggccucccucgcgagaauaccacgaucuggacaucugggagcuccauuucuuucugcggagucaacagcgacaccgccaauugguccuggcccgauggcgcugaacugcccuucaccaucgacaaauga

SEQ ID NO: 208662 - RNA, 1410 nt, Artificial Sequence
  derived and/or modified CDS sequence (opt5) from neuraminidase__InfluenzaA__ACK99479
augaaccccaaucagaagaucauuaccaucggcagcgugucccugacaauugccacgaucugcuuccucaugcaaauugcuauccuggucaccacaguuacccuucacuuuaaacaguacgaguguaacucuccuccgaauaaccaggugaugcugugcgaacccacaaucauugagagaaauaucaccgaaauuguguaucucacaaacaccacgaucgagaaggaaauuuguccuaaacuggccgaguaccggaauuggagcaagccccagugcaaaaucaccggguucgcgccuuuuuccaaggacaacucuauucgccuuagcgcuggaggcgauaucugggucacaagagagcccuauguguccugugacccugauaagugcuaccaauucgcccuggggcagggaaccacacucaauaaccggcauucuaaugacaccguucacgaucgcacgccguauagaacacugcugaugaacgaacucggcgugcccuuucaucuggggaccaaacaggucuguaucgccuggagcuccagcucuugccacgacggaaaggcuuggcuucauguguguguuacaggccacgaugagaaugccaccgcuuccuucauuuacgacggccggcugguggauagcaucgggucuugguccaaaaagauucuccgcacccaggaaagcgagugcgucuguaucaacggaacaugcacgguggugaugaccgacggcucugccuccgggagagcggauacaaaaauucuguuuaucgaggaaggaaagaucguccacauuagcccucuucugggcuccgcccaacauguugaggaaugcucuuguuauccccgguacccuggggugcgcugcguguguagagacaauuggaagggaagcaaccggcccaucgucgauauuaacgugaaagacuacuccaucguuagcucuuaugugugcuccggccucgucggcgacaccccgcgcaagaaugauagcucuagcuccucucacugucugaacccuaauaacgaggaagggggacauggcgugaaagggugggcuuucgacgauggaaaugacguuuggaugggcagaacaauuagcgagaagcugcgguccggguacgagaccuuuaaagugaucgaaggauggagcaagcccaacucuaaacuccagaucaaucgccaggucauuguggauagaggcaaccgguccggcuauagcgggaucuucucugucgagggaaaguccugcauuaauagauguuuuuacguggaacugauccgcggccggaagcaggagacggaaguuugguggacaagcaacuccauuguggucuucugcgggaccucuggaaccuauggcacagggagcuggccugacggcgccaauaucaaccuuaugcccauuuga

SEQ ID NO: 208663 - RNA, 1413 nt, Artificial Sequence; identical to SEQ ID NO: 208356
  derived and/or modified CDS sequence (opt5) from neuraminidase__InfluenzaA__ACL12066

SEQ ID NO: 208664 - RNA, 1410 nt, Artificial Sequence; identical to SEQ ID NO: 207257
  derived and/or modified CDS sequence (opt5) from neuraminidase__InfluenzaA__ACL12132

SEQ ID NO: 208665 - RNA, 1413 nt, Artificial Sequence; identical to SEQ ID NO: 208590
  derived and/or modified CDS sequence (opt5) from neuraminidase__InfluenzaA__ACL12154

SEQ ID NO: 208666 - RNA, 1410 nt, Artificial Sequence; identical to SEQ ID NO: 208584
  derived and/or modified CDS sequence (opt5) from neuraminidase__InfluenzaA__ACL12165

SEQ ID NO: 208667 - RNA, 1410 nt, Artificial Sequence; identical to SEQ ID NO: 208584
  derived and/or modified CDS sequence (opt5) from neuraminidase__InfluenzaA__ACL12176

SEQ ID NO: 208668 - RNA, 1410 nt, Artificial Sequence
  derived and/or modified CDS sequence (opt5) from neuraminidase__InfluenzaA__ACL12198
augaaccccaaucagaagaucauuaccaucggcagcgugucccugacaauuucuacgaucugcuucuuuaugcaaauugccauccucaucaccacagucacccugcacuucaaacaguacgaguuuaacagcacaccuaauaaccagguuaugcuuugugaaccgaccauuaucgagagaaauauuacagaaaucguguaucugaccaacacgaccauugagaaggaaaucugccccaaacucgcugaguaccggaauugguccaagccucagugugacauuacaggguucgcccccuuuucuaaagauaacagcauccgccuguccgcgggaggcgacaucugggugaccagagagccuuaugucucuugcgaucccgacaaguguuaccaauucgcucuugggcagggaacaacccugaauaacgugcauagcaaugauacgguucgggaccgcacaccuuauagaacccuccugaugaacgaacugggcgugccguuucaccucgggacaaagcaggucugcauugccugguccagcagcuccugucaugauggaaaagccuggcugcacgugugcaucaccggcgacgauaagaaugcuaccgccagcuucauuuacaacggccggcuuguugacucuguggucuccuggagcaaagagauccugcgcacacaggaaucugagugugugugcauuaaugggacguguaccguggucaugacagauggauccgcuagcggcaaggccgacaccaaaauccucuuuaucgaggaagggaagauuguucauacauccacccugucuggaagcgcgcaacacguggaggaaugcuccugcuaucccagauacccuggcgugcggugugucugccgcgauaacuggaaggggagcaacagacccaucguggacauuaauaucaaagaccacucuauuguuuccagcuacguguguucuggacuugucggcgauacgccucggaagaacgacagcuccucuagcucccauugccuggaucccaauaacgaggaaggcgggcacggagugaaaggcugggccuucgacgaugggaaugacguuuggaugggacgcacaaucagcgagaagucuagacucggcuaugagaccuuuaaagugaucgaagggugguccaacccgaagucuaaacugcagauuaaucggcaggucaucguggaucgcggaaacagaucuggcuacuccggcauuuucagcgucgaggggaaguccuguaucaaucggugcuuuuauguggaacugauuagaggacgcaaggaggaaaccgagguucucuggacaucuaacagcaucguggucuucuguggcaccuccgggacauacggaacgggcucuuggccugacggggcugauauuaaucugaugcccaucuga

SEQ ID NO: 208669 - RNA, 1410 nt, Artificial Sequence; identical to SEQ ID NO: 208162
  derived and/or modified CDS sequence (opt5) from neuraminidase__InfluenzaA__ACL12209

SEQ ID NO: 208670 - RNA, 1410 nt, Artificial Sequence; identical to SEQ ID NO: 208584
  derived and/or modified CDS sequence (opt5) from neuraminidase__InfluenzaA__ACL12220

SEQ ID NO: 208671 - RNA, 1410 nt, Artificial Sequence
  derived and/or modified CDS sequence (opt5) from neuraminidase__InfluenzaA__ACL12242
augaaccccaaucagaagaucauuaccaucggcagcgugucccugacaauuucuacgaucugcuucuuuaugcaaauugccauccucaucaccacagucacccugcacuucaaacaguacgaguuuaacagcccuccgaauaaccagguuaugcuuugugaacccacaauuaucgagagaaauauuaccgaaaucguguaucugacaaacaccacgauugagaaggaaaucugcccuaaacucgcugaguaccggaauugguccaagccccagugugacauuaccggguucgccccuuuuucuaaagauaacagcauccgccuguccgcgggaggcgacaucugggugacaagagagcccuaugucucuugcgauccugacaaguguuaccaauucgcucuugggcagggaaccacacugaauaacgugcauagcaauaacaccguucgggaucgcacgccguauagaacacuccugaugaaugaacugggcgugcccuuucaccucgggaccaagcaggucugcauugccugguccucuagcuccugucaugacggaaaagccuggcugcacgugugcaucacaggcgaugacaagaacgcuaccgccagcuucauuuacaauggccggcuuguugauucuguggucuccuggagcaaagagauccugcgcacccaggaaucugagugugugugcauuaacgggacauguacgguggucaugaccgacggauccgcuagcggcaaggccgauacaaaaauccucuuuaucgaggaagggaagauuguucauaccuccacacugucuggaagcgcgcaacacguggaggaaugcuccugcuauccuagauaccccggcgugcggugugucugccgcgacaacuggaaggggagcaauagaccuaucguggauauuaacaucaaagaccacucuauuguuuccagcuacguguguucuggacuugucggcgacacgccccggaagaaugauagcuccucuagcucccauugccuggacccgaacaaugaggaaggcgggcacggagugaaaggcugggccuucgaugacgggaacgauguuuggaugggacgcaccaucagcgagaagucuagacucggcuaugagacauuuaaagugaucgaagggugguccaauccuaagagcaaacugcagauuaaccggcaggucaucguggaccgcggaaauagaucuggcuacuccggcauuuucagcgucgaggggaaguccuguaucaaccggugcuuuuauguggaacugauuagaggacgcaaggaggaaaccgagguucucuggaccucuaauagcaucguggucuucuguggcacauccgggaccuacggaacaggcucuuggcccgauggggcugacauuaaccugaugccuaucuga

SEQ ID NO: 208672 - RNA, 1413 nt, Artificial Sequence
  derived and/or modified CDS sequence (opt5) from neuraminidase__InfluenzaA__ACL12264
augaaccccaaucagaagaucauuaccaucggcagcauuuccauggccaucgggauuaucucucugauccuccaaauugugaacaucauuagcaucugggucucccacucuauucagacaggaagccagaaucauacgggcaucugcaaccagagaauuaucaccuacgaaaauuccacauggguuaaccaaaccuaugugaauaucaacaauacaaacguggucgcugggaaagacaagaccucugugacacuggccggaaauagcucccuuuguccuauucggggcugggcgaucuacaccaaagauaacagcauucgcaucgggucuaagggagacguuuucgugauuagagagccguuuaucuccugcagccaccuggagugucggacguucuuucucacccagggcgcucugcuuaaugauaaacauucuaacggcacagucaaggaccgcucccccuauagagcccugaugagcugcccucucggggaagcccccucuccuuacaauucccgguucgagagcguggcuugguccgccucugcuugucacgauggaaugggcuggcugaccaucgggauuagcggacccgacgauggcgccguugcggugcugaaguauaacgggaucauuacagaaaccaucaaauccuggaagaaacgcauucucagaacgcaggagagcgagugcgucugugugaacggaucuugcuuuacaaucaugaccgacggcccuuccaauggcgccgcuagcuaccggaucuucaagauugaaaaagggaaggugacaaagucuaucgagcuggaugccccgaacagccauuaugaagaguguuccugcuaccccgacaccggaaccgucauguguguuugccgcgauaauuggcacggcucuaacagaccuugggugagcuuuaaucagaaccuugacuaccaaauuggguauaucugcuccggaguguucggcgauaauccccggccuaaagacgggaagggaagcugugaccccgucacaguggauggcgcugacggcguuaaaggguuuucuuaccgcuauggaaacggcguguggauugggagaacgaaguccaaucgguuccgcaaaggauuugagaugaucugggauccgaacggcuggaccgacacagauagcgacuucucugucaagcaggaugugguugccaugaccgacugguccggguacagcggcuccuuugugcagcacccugaacugacaggacucgauugcaugagacccuguuucugggucgagcuggugcggggcagaccucgcgaaaauaccacgauuuggacaucugggagcuccaucucuuucugcggagucaacagcgacaccgcgaauugguccuggcccgauggcgccgagcuucccuuuaccaucgacaaauga

SEQ ID NO: 208673 - RNA, 1410 nt, Artificial Sequence; identical to SEQ ID NO: 208477
  derived and/or modified CDS sequence (opt5) from neuraminidase__InfluenzaA__ACN32275

SEQ ID NO: 208674 - RNA, 1410 nt, Artificial Sequence
  derived and/or modified CDS sequence (opt5) from neuraminidase__InfluenzaA__ACN32286
augaaccccaauaagaaaaucauuaccaucggcagcgugucccugacaauuucuacgaucugcuucuuuaugcagauugccauccucaucaccacagucacccugcacuucaagcaauacgaguuuaacagcccuccgaauaaccagguuaugcuuugugaacccacaauuaucgagagaaauauuaccgaaaucguguaucugacaaacaccacgauugagaaagaaaucugcccuaagcucgcugaguaccggaauugguccaaaccccagugugacauuaccggguucgccccuuuuucuaaggauaacagcauccgccuguccgcgggaggcgacaucugggugacaagagagcccuaugucucuugcgauccugacaaguguuaccaguucgcucuugggcaaggaaccacacugaauaacgugcauagcaaugauaccguucgggaccgcacgccguauagaacacuccugaugaacgaacugggcgugcccuuucaccucgggaccaaacaggucugcauugccugguccucuagcuccugucaugauggaaaggccuggcugcacgugugcaucacaggcgacgauaaaaaugcuaccgccagcuucauuuacaacggccggcuuguugacucuaucguguccuggagcaaggagauucugcgcacccaggaaucugagugugucugcaucaaugggacauguacgguggugaugaccgauggauccgcuagcggcaaagccgacacaaagauccucuuuauugaggaagggaagaucguccauaccuccacacugcuuggaucugcgcagcacguugaggaaugcagcugcuauccuagauaccccggcgugcggugugugugccgcgauaacuggaaaggguccaacagaccuauugucgacaucaauauuaaggaccacagcaucgugucuuccuacguuuguagcggacuggugggcgauacgccccggaaaaacgacucuagcuccucuggccauugccucgauccgaauaacgaggaagggggacacggcgucaaggggugggccuucgacgauggaaaugacguguggaugggccgcaccaucagcgagaaauccagacugggguaugagacauuuaagguuauugaaggauggagcaacccuaaaucuaagcugcaaaucaaucgccaggugauugucgaucggggcaacagauccggcuacagcgggaucuucucuguggagggaaaguccuguauuaaucggugcuuuuaugucgaacucaucagaggccgcaaagaggaaaccgaggugcuguggaccagcaacuccauuguuguguucugugggacaucuggaaccuacggcacagggagcuggcccgacggcgcugauaucaaucuuaugccuaucuga

SEQ ID NO: 208675 - RNA, 1410 nt, Artificial Sequence
  derived and/or modified CDS sequence (opt5) from neuraminidase__InfluenzaA__ACN32493
augaaccccaaucagaagaucauuaccaucggcagcgugucccugacaauuucuacgaucugcuucuuuaugcaaauugccauccucaucaccacagucacccugcacuucaaacaguacgaguuuaacagcuccccuaauaaccagguuaugcuuugugaaccgacaauuaucgagagaaauauuaccgaaaucguguaucugacaaacaccacgauugagaaggaaaucugccccaaacucgcugaguaccggaauuggucuaagccucagugugacauuaccggguucgcccccuuuagcaaagauaacuccauccgccugucugcgggaggcgacaucugggugacaagagagccuuaugucagcugcgaucccgacaaguguuaccaauucgcucuugggcagggaaccacacugaauaacgugcauuccaauaacaccguucgggaucgcacgccuuauagaacacuccugaugaaugaacugggcgugccguuucaccucgggaccaagcaggucugcauugccuggucuagcuccagcugucaugacggaaaagccuggcugcacgugugcaucacaggcgaugacaagaacgcuaccgccucuuucauuuacaauggccggcuuguugauuccaucgugagcuggucuaaagagauucugcgcacccaggaauccgagugugucugcaucaacgggacauguacgguggugaugaccgacggaagcgcuuccggcaaggccgauacaaaaauccucuuuauugaggaagggaagaucguccauaccucuacacugagcggauccgcgcaacacguugaggaaugcagcugcuaucccagauacccuggcgugcggugugugugccgcgacaacuggaaggggucuaauagacccauugucgauaucaacauuaaagaccacuccaucgugagcucuuacguuuguagcggacuugugggcgacaccccucggaagaaugauuccucuagcuccagccauugccuggaccccaacaaugaggaaggcgggcacggagucaaaggcugggccuucgaugacgggaacgauguguggaugggacgcacgaucucugagaaguccagacucggcuaugagacauuuaaaguuauugaaggguggagcaauccgaagucuaaacugcagaucaaccgccaggugauugucgaccggggaaauagauccggcuacagcggcaucuucuccguggaggggaagucuuguauuaaccggugcuuuuaugucgaacugaucagaggacgcaaggaggaaaccgaggugcucuggaccagcaauuccauuguuguguucuguggcacaucugggaccuacggaacaggcagcuggccugauggggcugacaucaaccugaugcccaucuga

SEQ ID NO: 208676 - RNA, 1410 nt, Artificial Sequence; identical to SEQ ID NO: 206226
  derived and/or modified CDS sequence (opt5) from neuraminidase__InfluenzaA__ACN32526

SEQ ID NO: 208677 - RNA, 1410 nt, Artificial Sequence
  derived and/or modified CDS sequence (opt5) from neuraminidase__InfluenzaA__ACN32537
augaaccccaaucagaagaucauuaccaucggcagcgugucccugacaauugccacgaucugcuuccucaugcaaauugcuauccuggucaccacaguuacccuucacuuuaaacaguacgaguguaacucuccuccgaauaaccaggugaugcugugcgaacccacaaucauugagagaaauaucaccgaaauuguguaucucacaaacaccacgaucgagaaggaaauuuguccuaaacuggccgaguaccggaauuggagcaagccccagugcaacaucaccggguucgcgccuuuuuccaaagacaauucuauucgccuuagcgcuggaggcgauaucugggucacaagagagcccuauguguccugugacccugauaagugcuaccaauucgcccuggggcagggaaccacacucaacaauggccauucuaacgacaccguucacgaucggacgccguaucgcacacugcugaugaaugaacucggggugcccuuucaucugggaaccagacaggucuguaucgccuggagcuccagcucuugccacgacggcaaggcuuggcuucauguguguguuacaggcgaugacgagaacgccaccgcuuccuucauuuacaaugggcggcugguggauagcaucggaucuugguccaaaaagauucuccgcacccaggaaagcgagugcgucuguaucaacggcacaugcacgguggugaugaccgacgggucugccuccggaaaagcggauacaaagauucuguuuaucgaggaaggcaaaaucguccacauuagcacccuuuccgggucugcccaacacguugaggaaugcagcuguuauccuagauaccccgacgugcggugcgugugucgcgauaacuggaagggauccaauagaccuaucgucgacauuaacgugaaggacuacagcaucguuucuuccuaugugugcagcggccuggucggcgauacaccccggaaaaaugacucuuucagcuccucucauugucucgauccgaacaaugaggaagggggacacggcgugaaggggugggcuuuugacgauggaaacgacguuuggaugggccgcaccauuagcgagaaacugagauccggguacgagacguucaaggugaucgauggauggagcaaaccuaauucuaagcugcagaucaaccggcaggucauuguggaacgcggcaauagauccggcuauagcgggaucuuuucugucgagggaaaauccugcauuaaccgguguuucuacguggaacucaucagaggccgcaaggaggaaacagagguuugguggaccagcaauuccauuguggucuuuugcgggaccucuggaacauauggcaccgggagcuggcccgacggcgccgauaucaaccugaugccuauuuga

SEQ ID NO: 208678 - RNA, 1413 nt, Artificial Sequence; identical to SEQ ID NO: 208154
  derived and/or modified CDS sequence (opt5) from neuraminidase__InfluenzaA__ACN32807

SEQ ID NO: 208679 - RNA, 1413 nt, Artificial Sequence; identical to SEQ ID NO: 208102
  derived and/or modified CDS sequence (opt5) from neuraminidase__InfluenzaA__ACN32818

SEQ ID NO: 208680 - RNA, 1413 nt, Artificial Sequence; identical to SEQ ID NO: 208102
  derived and/or modified CDS sequence (opt5) from neuraminidase__InfluenzaA__ACN32829

SEQ ID NO: 208681 - RNA, 1413 nt, Artificial Sequence
  derived and/or modified CDS sequence (opt5) from neuraminidase__InfluenzaA__ACN32840
augaaccccaaucagaagaucauuaccaucggcagcauuuccaucgccauugggaucaucucucugaugcuccaaauuggaaacaucauuagcaucugggcuucccacucuauucagacaggcagccagaaucauacggggaucugcaaccagagaauuaucaccuacgagaauagcacaugggugaaccacaccuaugucucuaucaauaacacaaauguuguggccggaaaagacaagaccagcgugacacuggcgggcaacuccagccuuuguucuauuuccgggugggcuaucuacaccaaagauaauagcauucggaucggaucuaagggcgacgucuucgugauucgcgaaccuuuuaucuccugcagccaucuggaguguagaacguucuuucucacccaaggcgcccugcuuaacgauaaacacucuaaugggacaguuaaggaccgguccccguaucgcgcccugaugagcugcccccucggagaagcuccuucccccuacaacucuaaguucgagagcguggccugguccgcuagcgccugucaugauggcaugggguggcugaccaucggaauuucuggcccugacaauggggcggucgccgugcugaaauauaacggaaucauuacagaaaccaucaaguccuggaaaaagcggauucucagaacgcaggagagcgagugcguuugugugaacggcucuugcuuuacaaucaugaccgauggccccagcaauggggcugccuccuacaaaaucuucaagauugaaaagggaaaagucacaaagucuaucgagcugaacgcuccuaauuuucacuaugaagaguguagcugcuacccggacaccggcaccgugaugugugugugccgcgauaacuggcacggguccaauagacccugggucagcuucaaccagaaucuugacuaccagauuggauauaucugcucuggcguuuuuggggauaacccucggcccaaagacggaaagggcuccuguaauccugugacaguggauggcgccgacggggucaaaggauucagcuacaaguauggcaacgggguguggauuggacgcacgaaaucuaauagacugcggaagggcuuugagaugaucugggaccccaacggguggaccgauacagacuccgauuucagcguuaagcaagacguggucgcgauuaccgauugguccggcuacucuggauccuuugugcagcauccggaacucacaggccuggacugcauccgcccuuguuucuggguugagcuugugagagggcugccccgggaaaauaccacgaucuggacauccggaucuagcauuuccuucugcggcgucgauagcgacaccgugaacuggucuuggccugauggggccgagcuccccuuuaccaucgacaaauga

SEQ ID NO: 208682 - RNA, 1410 nt, Artificial Sequence; identical to SEQ ID NO: 208584
  derived and/or modified CDS sequence (opt5) from neuraminidase__InfluenzaA__ACN32851

SEQ ID NO: 208683 - RNA, 1410 nt, Artificial Sequence; identical to SEQ ID NO: 208671
  derived and/or modified CDS sequence (opt5) from neuraminidase__InfluenzaA__ACN32862

SEQ ID NO: 208684 - RNA, 1410 nt, Artificial Sequence; identical to SEQ ID NO: 208675
  derived and/or modified CDS sequence (opt5) from neuraminidase__InfluenzaA__ACN32873

SEQ ID NO: 208685 - RNA, 1410 nt, Artificial Sequence; identical to SEQ ID NO: 208671
  derived and/or modified CDS sequence (opt5) from neuraminidase__InfluenzaA__ACN32884

SEQ ID NO: 208686 - RNA, 1410 nt, Artificial Sequence; identical to SEQ ID NO: 208675
  derived and/or modified CDS sequence (opt5) from neuraminidase__InfluenzaA__ACN32895

SEQ ID NO: 208687 - RNA, 1410 nt, Artificial Sequence; identical to SEQ ID NO: 208584
  derived and/or modified CDS sequence (opt5) from neuraminidase__InfluenzaA__ACN32906

SEQ ID NO: 208688 - RNA, 1410 nt, Artificial Sequence
  derived and/or modified CDS sequence (opt5) from neuraminidase__InfluenzaA__ACN32917
augaaccccaaucagaagaucauuaccaucggcagcgugucccugacaauuucuacgaucugcuucuuuaugcaaauugccauccucaucaccacagucacccugcacuucaaacaguacgaguuuaacagcccuccgaauaaccagguuaugcuuuguaagcccacaauuaucgaaagaaauauuaccgagaucguguaucugacaaacaccacgauugaaaaagagaucugcccuaagcucgcugaauaccggaauugguccaaaccccagugugacauuaccggguucgccccuuuuucuaaggauaacagcauccgccuguccgcgggaggcgacaucugggugacaagagagcccuaugucucuugcgauccugacaaguguuaccaauucgcucuugggcagggaaccacacugaauaacgugcauagcaauaacaccguucgggaucgcacgccguauagaacacuccugaugaaugagcugggcgugcccuuucaccucgggaccaaacaggucugcauugccugguccucuagcuccugucaugacggaaaggccuggcugcacgugugcaucacaggcgaugacaaaaacgcuaccgccagcuucauuuacaauggccggcuuguugauucuguggucuccuggagcaaggaaauccugcgcacccaggagucugaaugugugugcauuaacgggacauguacgguggucaugaccgacggauccgcuagcggcaaagccgauacaaagauccucuuuaucgaggaggggaagauuguucauaccuccacacugucuggaagcgcgcaacacguggaagagugcuccugcuauccuagauaccccggcgugcggugugucugccgcgacaacuggaaagggagcaauagaccuaucguggauauuaacaucaccgaccacucuauuguuuccagcuacguguguucuggacuugucggcgacacgccccggaagaaugauagcuccucuagcucccauugccuggacccgaacaaugaagagggcgggcacggagugaaaggcugggccuucgaugacgggaacgauguuuggaugggacgcacaaucagcgaaaagucuagacucggcuaugagaccuuuaaagugaucgaggggugguccaauccuaagagcaaacugcagauuaaccggcaggucaucguggaccgcggaaauagaucuggcuacuccggcauuuucagcgucgaagggaaguccuguaucaaccggugcuuuuauguggagcugauuagaggacgcaaggaagagaccgaaguucucuggacaucuaauagcaucguggucuucuguggcaccuccgggacauacggaacgggcucuuggcccgauggggcugacauuaaccugaugccuaucuga

SEQ ID NO: 208689 - RNA, 1410 nt, Artificial Sequence
  derived and/or modified CDS sequence (opt5) from neuraminidase__InfluenzaA__ACN32928
augaaccccaaucagaagaucauuaccaucggcagcgugucccugacaauuucuacgaucugcuucuuuaugcaaauugccauccucaucaccacagucacccugcacuucaaacaguacgaguuuaacagcccuccgaauaaccagguuaugcuuugugaacccacaauuaucgagagaaauauuaccgaaaucguguaucugacaaacaccacgauugagaaggaaaucugcccuaaacucgcugaguaccggaauugguccaagccccagugugacauuaccggguucgccccuuuuucuaaagauaacagcauccgccuguccgcgggaggcgacaucugggugacaagagagcccuaugucucuugcgauccugacaaguguuaccaauucgcucuugggcagggaaccacacugaauaacgugcauagcaauaacaccguucgggaucgcacgccguauagaacacuccugaugaaugaacugggcgugcccuuucaccucgggaccaagcaggucugcauugccugguccucuagcuccugucaugacggaaaagccuggcugcacgugugcaucacaggcgaugacaagaacgcuaccgccagcuucauuuacaauggccggcuuguugauucuguggucuccuggagcaaagagauccugcgcacccaggaaucugagugugugugcauuaacgggacauguacgguggucaugaccgacggauccgcuagcggcaaggccgauacaaaaauccucuuuaucgaggaagggaagauuguucauaccuccacacugucuggaagcgcgcaacacguggaggaaugcuccugcuauccuagauaccccggcgugcggugugucugccgcgacaacuggaaggggagcaauagaccuaucguggauauuaacaucaccgaccacucuauuguuuccagcuacguguguucuggacuugucggcgacacgccccggaaaaaugauagcuccucuagcucccauugccuggacccgaacaaugaggaaggcgggcacggagugaagggcugggccuucgaugacgggaacgauguuuggaugggacgcacaaucagcgagaaaucuagacucggcuaugagaccuuuaaggugaucgaagggugguccaauccuaaaagcaagcugcagauuaaccggcaggucaucguggaccgcggaaauagaucuggcuacuccggcauuuucagcgucgaggggaaauccuguaucaaccggugcuuuuauguggaacugauuagaggacgcaaggaggaaaccgagguucucuggacaucuaauagcaucguggucuucuguggcaccuccgggacauacggaacgggcucuuggcccgauggggcugacauuaaccugaugccuaucuga

SEQ ID NO: 208690 - RNA, 1410 nt, Artificial Sequence; identical to SEQ ID NO: 208675
  derived and/or modified CDS sequence (opt5) from neuraminidase__InfluenzaA__ACN32939

SEQ ID NO: 208691 - RNA, 1410 nt, Artificial Sequence; identical to SEQ ID NO: 208584
  derived and/or modified CDS sequence (opt5) from neuraminidase__InfluenzaA__ACN32950

SEQ ID NO: 208692 - RNA, 1410 nt, Artificial Sequence
  derived and/or modified CDS sequence (opt5) from neuraminidase__InfluenzaA__ACN32961
augaaccccaaucagaagaucauuaccaucggcagcgugucccugacaauuucuacgaucugcuucuuuaugcaaauugccauccucaucaccacagucacccugcacuucaaacaguacgaguuuaacagcccuccgaauaaccagguuaugcuuugugaacccacaauuaucgagagaaauauuaccgaaaucguguaucugacaaacaccacgauugagaaggaaaucugcccuaaacucgcugaguaccggaauugguccaagccccagugugacauuaccggguucgccccuuuuucuaaagauaacagcauccgccuguccgcgggaggcgacaucugggugacaagagagcccuaugucucuugcgauccugacaaguguuaccaauucgcucuugggcagggaaccacacugaauaacgugcauagcaauaacaccguucgggaucgcacgccguauagaacacuccugaugaaugaacugggcgugcccuuucaccucgggaccaagcaggucugcauugccugguccucuagcuccugucaugacggaaaagccuggcugcacgugugcaucacaggcgaugacaagaacgcuaccgccagcuucauuuacaauggccggcuuguugauucuguggucuccuggagcaaagagauccugcgcacccaggaaucugagugugugugcauuaacgggacauguacgguggucaugaccgacggauccgcuagcggcaaggccgauacaaaaauccucuuuaucgaggaagggaagauuguucauaccuccacacugucuggaagcgcgcaacacguggaggaaugcuccugcuauccuagauaccccggcgugcggugugucugccgcgacaacuggaaggggagcaauagaccuaucguggauauuaacaucaccgaccacucuauuguuuccagcuacguguguucuggacuugucggcgacacgccccggaaaaaugauagcuccucuagcucccauugccuggacccgaacaaugaggaaggcgggcacggagugaagggcugggccuucgaugacgggaacgauguuuggaugggacgcacaaucagcgagaaaucuagacucggcuaugagaccuuuaaggugaucgaagggugguccaauccuaaaagcaagcugcagauuaaccggcaggucaucguggaccgcggaaauagaucuggcuacuccggcauuuucagcgucgaggggaaauccuguaucaaccggugcuuuuauguggaacugauuagaggacgcaaggaggaaaccgagguucucuggacaucuaauagcaucguggucuucuguggcaccuccgggacauacggaacgggcucuuggcccgauggggcugacauuaacaucaugccuaucuga

SEQ ID NO: 208693 - RNA, 1410 nt, Artificial Sequence; identical to SEQ ID NO: 208671
  derived and/or modified CDS sequence (opt5) from neuraminidase__InfluenzaA__ACN32972

SEQ ID NO: 208694 - RNA, 1410 nt, Artificial Sequence; identical to SEQ ID NO: 208671
  derived and/or modified CDS sequence (opt5) from neuraminidase__InfluenzaA__ACN32994

SEQ ID NO: 208695 - RNA, 1410 nt, Artificial Sequence
  derived and/or modified CDS sequence (opt5) from neuraminidase__InfluenzaA__ACN33005
augaaccccaaucagaagaucauuaccaucggcagcgugucccugacaauuucuacgaucugcuucuuuaugcaaauugccauccucaucaccacagucacccugcacuucaaacaguacgaguuuaacagcccuccgaauaaccagguuaugcuuugugaacccacaauuaucgagagaaauauuaccgaaaucguguaucugacaaacaccacgauugagaaggaaaucugcccuaaacucgcugaguaccggaauugguccaagccccagugugacauuaccggguucgccccuuuuucuaaagauaacagcauccgccuguccgcgggaggcgacaucugggugacaagagagcccuaugucucuugcgauccugacaaguguuaccaauucgcucuugggcagggaaccacacugaauaacgugcauagcaaugauaccguucgggaccgcacgccguauagaacacuccugaugaacgaacugggcgugcccuuucaccucgggaccaagcaggucugcauugccugguccucuagcuccugucaugauggaaaagccuggcugcacgugugcaucacaggcgacgauaagaaugcuaccgccagcuucauuuacaacggccggcuuguugacucuguggucuccuggagcaaagagauccugcgcacccaggaaucugagugugugugcauuaaugggacauguacgguggucaugaccgauggauccgcuagcggcaaggccgacacaaaaauccucuuuaucgaggaagggaagauuguucauaccuccacacugucuggaagcgcgcaacacguggaggaaugcuccugcuauccuagauaccccggcgugcggugugucugccgcgauaacuggaaggggagcaacagaccuaucguggacauuaauaucaaagaccacucuauuguuuccagcuacguguguucuggacuugucggcgauacgccccggaagaacgacagcuccucuagcucccauugccuggauccgaauaacgaggaaggcgggcacggagugaaaggcugggccuucgacgaugggaaugacguuuggaugggacgcaccaucagcgagaagucuagacucggcuaugagacauuuaaagugaucgaagggugguccaacccuaagagcaaacugcagauuaaucggcaggucaucguggaucgcggaaacagaucuggcuacuccggcauuuucagcgucgagggggaauccuguaucaaucggugcuuuuauguggagcugauuagaggacgcaaggaagagaccgagguucucuggaccucuaacagcaucguggucuucuguggcacauccgggaccuacggaacaggcucuuggcccgacggggcugauauuaaucugaugccuaucuga

SEQ ID NO: 208696 - RNA, 1410 nt, Artificial Sequence; identical to SEQ ID NO: 208671
  derived and/or modified CDS sequence (opt5) from neuraminidase__InfluenzaA__ACN33016

SEQ ID NO: 208697 - RNA, 1410 nt, Artificial Sequence; identical to SEQ ID NO: 208671
  derived and/or modified CDS sequence (opt5) from neuraminidase__InfluenzaA__ACN33049

SEQ ID NO: 208698 - RNA, 1410 nt, Artificial Sequence; identical to SEQ ID NO: 208671
  derived and/or modified CDS sequence (opt5) from neuraminidase__InfluenzaA__ACN33060

SEQ ID NO: 208699 - RNA, 1410 nt, Artificial Sequence; identical to SEQ ID NO: 208675
  derived and/or modified CDS sequence (opt5) from neuraminidase__InfluenzaA__ACN33082

SEQ ID NO: 208700 - RNA, 1413 nt, Artificial Sequence; identical to SEQ ID NO: 208141
  derived and/or modified CDS sequence (opt5) from neuraminidase__InfluenzaA__ACN33093

SEQ ID NO: 208701 - RNA, 1413 nt, Artificial Sequence; identical to SEQ ID NO: 208102
  derived and/or modified CDS sequence (opt5) from neuraminidase__InfluenzaA__ACN33104

SEQ ID NO: 208702 - RNA, 1410 nt, Artificial Sequence; identical to SEQ ID NO: 208675
  derived and/or modified CDS sequence (opt5) from neuraminidase__InfluenzaA__ACN33115

SEQ ID NO: 208703 - RNA, 1413 nt, Artificial Sequence
  derived and/or modified CDS sequence (opt5) from neuraminidase__InfluenzaA__ACN33126
augaaccccaaucagaagaucauuaccaucggcagcauuuccaucgccauugggaucaucucucugaugcuccaaauuggaaacaucauuagcaucugggcuucccacucuauucagacaggcagccagaauaacacggggaucugcaaucagagaauuaucaccuacgagaacuccacaugggugaaucauaccuaugucaacaucaauaacacaaauguuguggccggagaagacaaaaccucugugacacuggcgggcagcuccagccuuuguucuauuuccgggugggcuaucuacaccaaggauaacagcauucggaucggaucuaaaggcgacgucuucgugauucgcgagccuuuuaucuccugcagccaccuggaauguagaacguucuuucucacccaaggcgcccugcuuaaugauaagcauucuaacgggacaguuaaagaccgguccccguaucgcgcccugaugagcugcccccucggagaggcuccuucccccuacaauucuaaguucgaaagcguggccugguccgcuagcgccugucacgauggcaugggguggcugaccaucggaauuucuggcccugacaacggggcggucgccgugcugaaguauaacggaaucauuacaggcaccaucaaauccuggaagaaacagauucucagaacgcaggagagcgagugcguuuguaugaauggcucuugcuuuacaaucaugaccgaugggcccagcaacaaggcugccuccuacaaaaucuucaagauugaaaagggaaaagugacaaagucuaucgagcugaaugcuccuaacuuucauuaugaagaguguagcugcuacccggacaccggcauugucaugugugugugccgggauaauuggcacggguccaaccgccccugggugagcuucaaucagaaccuugacuaccaaaucggauauauuugcucuggcgucuuuggggauaauccuagacccgaggacggagaaggcuccuguaacccuguuaccguggauggcgccaauggggugaaaggauucagcuacaaguaugacaacggcgucuggaucgggcggacaaaaucuaaucgccugagaaagggauuugagaugauuugggaccccaacggcuggacgaauaccgauuccgacuucagcgugaaacaggauguuguggcgaucacagacugguccggguacucuggcagcuuuguccagcacccggaacucaccggacuggauugcauccggccuuguuucuggguggagcuuguucgcggccugcccagagaaaacacaaccauuuggacguccgggucuagcaucuccuucugcggagugaacagcgacacagccaauuggucuuggccugauggcgcugagcuccccuuuaccauugacaaguga

SEQ ID NO: 208704 - RNA, 1413 nt, Artificial Sequence
  derived and/or modified CDS sequence (opt5) from neuraminidase__InfluenzaA__ACN33148
augaaccccaaucagaagaucauuaccaucggcagcauuuccaucgccauugggaucaucucucugaugcuccaaauuggaaacaucauuagcaucugggcuucccacucuauucagacaggcagccagaauaacacggggaucugcaaucagagaauuaucaccuacgagaacuccacaugggugaaucauaccuaugugaacaucaauaacacaaauguuguggccggagaagacaaaaccucugugacacuggcgggcaacagcucccuuuguagcauuucugggugggcuaucuacaccaaggauaauuccauucggaucggaagcaaaggcgacgucuucgugauucgcgagccuuuuaucucuugcucccaccuggaauguagaacguucuuucucacccaaggcgcccugcuuaacgauaagcauagcaaugggacaguuaaagaccggucuccguaucgcgcccugauguccugcccccucggagaggcuccuagccccuacaacuccaaguucgaaucuguggccuggagcgcuuccgccugucacgauggcaugggguggcugaccaucggaauuagcggcccugacaacggggcggucgccgugcugaaguauaauggaaucauuacaggcaccaucaaaucuuggaagaaacagauucucagaacgcaggaguccgagugcguuuguaugaacggcagcugcuuuacaaucaugaccgaugggcccucuaauaaggcugccagcuacaaaaucuucaagauugaaaagggaaaagugacaaaguccaucgagcugaacgcuccuaauuuucauuaugaagaguguucuugcuacccggacaccggcauugucaugugugugugccgggauaacuggcacgggagcaaucgccccuggguguccuucaaccagaaucuugacuaccaaaucggauauauuugcagcggcgucuuuggggauaacccuagacccgaggacggagaaggcucuuguaauccuguuaccguggauggcgccaacggggugaaaggauucuccuacaaguaugacaauggcgucuggaucgggcggacaaaaagcaaccgccugagaaagggauuugagaugauuugggaccccaauggcuggacgaacaccgauucugacuucuccgugaaacaggauguuguggcgaucacagacuggagcggguacuccggcucuuuuguccagcacccggaacucaccggacuggauugcauccggccuuguuucuggguggagcuuguucgcggccugcccagagaaaacacaaccauuuggacgagcggguccucuaucagcuucugcggagucaauuccgacacagccaacuggagcuggccugauggcgcugagcuccccuuuaccauugacaaguga

SEQ ID NO: 208705 - RNA, 1410 nt, Artificial Sequence
  derived and/or modified CDS sequence (opt5) from neuraminidase__InfluenzaA__ACN33159
augaaccccaaucagaagaucauuaccaucggcagcgugucccugacaauuucuacgaucugcuucuuuaugcaaauugccauccucaucaccacagucacccugcacuucaaacaguacgaguuuaacagcccuccgaauaaccagguuaugcuuugugaacccacaauuaucgagagaaauauuaccgaaaucguguaucugacaaacaccacgauugagaaggaaaaaugcccuaagcucgcugaguaccggaauugguccaaaccccagugugacaucaccggguucgccccuuuuucuaaggauaacagcauucgccuguccgcgggaggcgacaucugggugacaagagagcccuaugucucuugcgauccugacaaguguuaccaauucgcucuugggcagggaaccacacugaauaacgugcauagcaauaacaccguucgggaucgcacgccguauagaacacuccugaugaaugaacugggcgugcccuuucaccucgggaccaaacaggucugcaucgccugguccucuagcuccugucaugacggaaaggccuggcugcacgugugcauuacaggcgaugacaaaaacgcuaccgccagcuucaucuacaauggccggcuuguugauucuguggucuccuggagcaaggagauucugcgcacccaggaaucugagugugugugcaucaacgggacauguacgguggucaugaccgacggauccgcuagcggcaaagccgauacaaagauucucuuuaucgaggaagggaagaucguucauaccuccacacugucuggaagcgcgcaacacguggaggaaugcuccugcuauccuagauaccccggcgugcggugugucugccgcgacaacuggaaagggagcaauagaccuauuguggauaucaacauuaaggaccacucuaucguuuccagcuacguguguucuggacuugucggcgacacgccccggaaaaaugauagcuccucuagcucccauugccuggacccgaacaaugaggaaggcgggcacggagugaagggcugggccuucgaugacgggaacgauguuuggaugggacgcaccauuagcgagaaaucuagacucggcuaugagacauuuaaggugaucgaagggugguccaauccuaaaagcaagcugcagaucaaccggcaggucauuguggaccgcggaaauagaucuggcuacuccggcaucuucagcgucgaggggaaguccuguauuaaccggugcuuuuauguggaacugaucagaggacgcaaagaggaaaccgagguucucuggaccucuaauagcauuguggucuucuguggcacauccgggaccuacggaacaggcucuuggcccgauggggcugacaucaaccugaugccuauuuga

SEQ ID NO: 208706 - RNA, 1410 nt, Artificial Sequence; identical to SEQ ID NO: 208584
  derived and/or modified CDS sequence (opt5) from neuraminidase__InfluenzaA__ACN33170

SEQ ID NO: 208707 - RNA, 1410 nt, Artificial Sequence; identical to SEQ ID NO: 208675
  derived and/or modified CDS sequence (opt5) from neuraminidase__InfluenzaA__ACN33181

SEQ ID NO: 208708 - RNA, 1410 nt, Artificial Sequence; identical to SEQ ID NO: 208675
  derived and/or modified CDS sequence (opt5) from neuraminidase__InfluenzaA__ACN33203

SEQ ID NO: 208709 - RNA, 1410 nt, Artificial Sequence
  derived and/or modified CDS sequence (opt5) from neuraminidase__InfluenzaA__ACN33214
augaaccccaaucagaagaucauuaccaucggcagcgugucccugacaauuucuacgaucugcuucuuuaugcaaauugccauccucaucaccacagucacccugcacuucaaacaguacgaguuuaacagcccuccgaauaaccagguuaugcuuugugaacccacaauuaucgagagaaauauuaccgaaacaguguaucugaccaacacgaccaucgagaaggaaauuugcccuaaacucgcugaguaccggaauugguccaagccccagugugacaucacaggguucgccccuuuuucuaaagauaacagcauucgccuguccgcgggaggcgacaucugggugaccagagagcccuaugucucuugcgauccugacaaguguuaccaauucgcucuugggcagggaacaacccugaauaacgugcauagcaauaacacgguucgggaucgcacaccguauagaacccuccugaugaaugaacugggcgugcccuuucaccucgggacaaagcaggucugcaucgccugguccucuagcuccugucaugacggaaaagccuggcugcacgugugcauuaccggcgaugacaagaacgcuaccgccagcuucaucuacaauggccggcuuguugauucuguggucuccuggagcaaagagauucugcgcacacaggaaucugagugugugugcaucaacgggacguguaccguggucaugacagacggauccgcuagcggcaaggccgauaccaaaauucucuuuaucgaggaagggaagaucguucauacauccacccugucuggaagcgcgcaacacguggaggaaugcuccugcuauccuagauaccccggcgugcggugugucugccgcgacaacuggaaggggagcaauagaccuauuguggauaucaacauuaaagaccacucuaucguuuccagcuacguguguucuggacuugucggcgacacgccccggaagaaugauagcuccucuagcucccauugccuggacccgaacaaugaggaaggcgggcacggagugaaaggcugggccuucgaugacgggaacgauguuuggaugggacgcacaauuagcgagaagucuagacucggcuaugagaccuuuaaagugaucgaagggugguccaauccuaagagcaaacugcagaucaaccggcaggucauuguggaccgcggaaauagaucuggcuacuccggcaucuucagcgucgaggggaaguccuguauuaaccggugcuuuuauguggaacugaucagaggacgcaaggaggaaaccgagguucucuggacaucuaauagcauuguggucuucuguggcaccuccgggacauacggaacgggcucuuggcccgauggggcugacaucaaccugaugccuauuuga

SEQ ID NO: 208710 - RNA, 1413 nt, Artificial Sequence; identical to SEQ ID NO: 208143
  derived and/or modified CDS sequence (opt5) from neuraminidase__InfluenzaA__ACN42984

SEQ ID NO: 208711 - RNA, 1413 nt, Artificial Sequence; identical to SEQ ID NO: 208143
  derived and/or modified CDS sequence (opt5) from neuraminidase__InfluenzaA__ACN42995

SEQ ID NO: 208712 - RNA, 1410 nt, Artificial Sequence
  derived and/or modified CDS sequence (opt5) from neuraminidase__InfluenzaA__ACN43006
augaaccccaaucagaagaucauuaccaucggcagcgugucccugacaauuucuacgaucugcuucuuuaugcaaauugccauccucaucaccacagucacccugcacuucaaacaguacgaguuuaacagcccuccgaauaacagaguuaugcuuugugaacccacaauuaucgagcggaauauuaccgaaaucguguaucugacaaacaccacgauugagaaggaaaucugcccuaaacucgcugaguaccgcaauugguccaagccccagugugacauuaccggguucgccccuuuuucuaaagauaacagcaucagacuguccgcgggaggcgacaucugggugacacgggagcccuaugucucuugcgauccugacaaguguuaccaguucgcucuugggcaaggaaccacacugaauaacgugcauagcaauaacaccguucgcgauagaacgccguaucggacacuccugaugaaugaacugggcgugcccuuucaccucgggaccaagcaggucugcauugccugguccucuagcuccugucaugacggaaaagccuggcugcacgugugcaucacaggcgaugacaagaacgcuaccgccagcuucauuuacaauggccgccuuguugauucuguggucuccuggagcaaagagauccugagaacccaggaaucugagugugugugcauuaacgggacauguacgguggucaugaccgacggauccgcuagcggcaaggccgauacaaaaauccucuuuaucgaggaagggaagauuguucauaccuccacacugucuggaagcgcgcagcacguggaggaaugcuccugcuauccucgguaccccggcgugcgcugugucugcagagacaacuggaaggggagcaaucggccuaucguggauauuaacaucaaagaccacucuauuguuuccagcuacguguguucuggacuugucggcgacacgccccgcaagaaugauagcuccucuagcucccauugccuggacccgaacaaugaggaaggcgggcacggagugaaaggcugggccuucgaugacgggaacgauguuuggaugggaagaaccaucagcgagaagucucggcucggcuaugagacauuuaaagugaucgaagggugguccaauccuaagagcaaacugcaaauuaaccgccaggucaucguggacagaggaaaucggucuggcuacuccggcauuuucagcgucgaggggaaguccuguaucaacagaugcuuuuauguggaacugauucgcggacggaaggaggaaaccgagguucucuggaccucuaauagcaucguggucuucuguggcacauccgggaccuacggaacaggcucuuggcccgauggggcugacauuaaccugaugccuaucuga

SEQ ID NO: 208713 - RNA, 1410 nt, Artificial Sequence; identical to SEQ ID NO: 208675
  derived and/or modified CDS sequence (opt5) from neuraminidase__InfluenzaA__ACN43017

SEQ ID NO: 208714 - RNA, 1410 nt, Artificial Sequence; identical to SEQ ID NO: 208671
  derived and/or modified CDS sequence (opt5) from neuraminidase__InfluenzaA__ACN43028

SEQ ID NO: 208715 - RNA, 1410 nt, Artificial Sequence
  derived and/or modified CDS sequence (opt5) from neuraminidase__InfluenzaA__ACN43039
augaaccccaaucagaagaucauuaccaucggcagcgugucccugacaauuucuacgaucugcuucuuuaugcaaauugccauccucaucaccacagucacccugcacuucaaacaguacgaguuuaacagcccuccgaauaaccagguuaugcuuugugaacccacaauuaucgagagaaauauuaccgaaaucguguaucugacaaacaccacgauugagaaggaaaucugcccuaaacucgcugaguaccggaauugguccaagccccagugugacauuaccggguucgccccuuuuucuaaagauaacagcauccgccuguccgcgggaggcgacaucugggugacaagagagcccuaugucucuugcgauccugacaaguguuaccaauucgcucuugggcagggaaccacacugaauaacgugcauagcaaugauaccguucgggaccgcacgccguauagaacacuccugaugaacgaacugggcgugcccuuucaccucgagaccaagcaggucugcauugccugguccucuagcuccugucaugaugggaaagccuggcugcacgugugcaucacaggagacgauaagaaugcuaccgccagcuucauuuacaacggccggcuuguugacucuguggucuccuggagcaaagaaauccugcgcacccaggagucugagugugugugcauuaauggcacauguacgguggucaugaccgauggguccgcuagcggaaaggccgacacaaaaauccucuuuaucgaagagggcaagauuguucauaccuccacacugucugggagcgcgcaacacguggaagagugcuccugcuauccuagauaccccggagugcggugugucugccgcgauaacuggaagggcagcaacagaccuaucguggacauuaauaucaaagaccacucuauuguuuccagcuacguguguucugggcuugucggagauacgccccggaagaacgacagcuccucuagcucccauugccuggauccgaauaacgaagagggcggccacggggugaaaggaugggccuucgacgauggcaaugacguuuggauggggcgcaccaucagcgagaagucuagacucggauaugaaacauuuaaagugaucgagggcugguccaacccuaagagcaaacugcagauuaaucggcaggucaucguggaucgcgggaacagaucuggauacuccggcauuuucagcgucgaaggcaaguccuguaucaaucggugcuuuuauguggagcugauuagagggcgcaaggaagagaccgagguucucuggaccucuaacagcaucguggucuucuguggaacauccggcaccuacgggacaggaucuuggcccgacggcgcugauauuaaucugaugccuaucuga

SEQ ID NO: 208716 - RNA, 1410 nt, Artificial Sequence; identical to SEQ ID NO: 208584
  derived and/or modified CDS sequence (opt5) from neuraminidase__InfluenzaA__ACN43050

SEQ ID NO: 208717 - RNA, 1410 nt, Artificial Sequence; identical to SEQ ID NO: 208671
  derived and/or modified CDS sequence (opt5) from neuraminidase__InfluenzaA__ACN43061

SEQ ID NO: 208718 - RNA, 1410 nt, Artificial Sequence
  derived and/or modified CDS sequence (opt5) from neuraminidase__InfluenzaA__ACN43072
augaaccccaaucagaagaucauuaccaucggcagcgugucccugacaauuucuacgaucugcuucuuuaugcaaauugccauccucaucaccacagucacccugcacuucaaacaguacgaguuuaacagcccuccgaauaaccagguuaugcuuugugaacccacaauuaucgagagaaauauuaccgaaaucguguaucugacaaacaccacgauugagaaggaaaucugcccuaaacucgcugaguaccggaauugguccaagccccagugugacauuaccggguucgccccuuuuucuaaagauaacagcauccgccuguccgcgggaggcgacaucugggugacaagagagcccuaugucucuugcgauccugacaaguguuaccaauucgcucuugggcagggaaccacacugaauaacgugcauagcaauaacaccguucgggaucgcacgccguauagaacacuccugaugaaugaacugggcgugcccuuucaccucgggaccaagcaggucugcauugccugguccucuagcuccugucaugacggaaaagccuggcugcacgugugcaucacaggcgaugacaagaacgcuaccgccagcuucauuuacaauggccggcuuguugauucuguggucuccuggagcaaagagauccugcgcacccaggaaucugagugugugugcauuaacgggacauguacgguggucaugaccgacggauccgcuagcggcaaggccgauacaaaaauccucuuuaucgaggaagggaagauuguucauaccuccacacugucuggaagcgcgcaacacguggaggaaugcuccugcuauccuagauaccccggcgugcggugugucugccgcgacaacuggaaggggagcaauagaccuaucguggauauuaacaucaaagaccacucuauuguuuccagcuacguguguucuggacuugucggcgacacgccccggaagaaugauagcuccucuagcucccauugccuggacccgaacaaugaggaaggcgggcacggagugaaaggcugggccuucgaugacgggaacgauguuuggaugggacgcaccaucagcgagaagucuagacucggcuaugagacauuuaaagugaucgaagggugguccaauccuaagagcaaacugcagauuaaccggcaggucaucguggaccgcggaaauagaucuggcuacuccggcauuuucagcgucgaggggaaguccuguaucaaccggugcuuuuauguggaacugauuagaggacgcaaggaggaaaccgagguucucuggaccucuaauagcguggucguguucuguggcacauccgggaccuacggaacaggcucuuggcccgauggggcugacaucaaccugaugccuauuuga

SEQ ID NO: 208719 - RNA, 1410 nt, Artificial Sequence
  derived and/or modified CDS sequence (opt5) from neuraminidase__InfluenzaA__ACN43083
augaaccccaaucagaagaucauuaccaucggcagcgugucccugacaauuucuacgaucugcuucuuuaugcaaauugccauccucaucaccacagucacccugcacuucaaacaguacgaguuuaacagcuccccuaauaaccagguuaugcuuugugaaccgacaauuaucgagagaaauauuaccgaaaucguguaucugacaaacaccacgauugagaaggaaaucugccccaaacucgcugaguaccggaauuggucuaagccucagugugacauuaccggguucgcccccuuuagcaaagauaacuccauccgccugucugcgggaggcgacaucugggugacaagagagccuuaugucagcugcgaucccgacaaguguuaccaauucgcucuugggcagggaaccacacugaauaacgugcauuccaauaacaccguucgggaucgcacgccuuauagaacacuccugaugaaugaacugggcgugccguuucaccucgggaccaagcaggucugcauugccuggucuagcuccagcugucaugacggaaaagccuggcugcacgugugcaucacaggcgaugacaagaacgcuaccgccucuuucauuuacaauggccggcuuguugauuccaucgugagcuggucuaacgagauucugcgcacccaggaauccgagugugucugcaucaacgggacauguacgguggugaugaccgacggaagcgcuuccggcaaagccgauacaaagauccucuuuauugaggaagggaaaaucguccauaccucuacacugagcggauccgcgcaacacguugaggaaugcagcugcuaucccagauacccuggcgugcggugugugugccgcgacaauuggaaggggucuaacagacccauugucgauaucaauauuaaggaccacuccaucgugagcucuuacguuuguagcggacuugugggcgacaccccucggaaaaacgauuccucuagcuccagccauugccuggaccccaauaacgaggaaggcgggcacggagucaagggcugggccuucgaugacgggaaugauguguggaugggacgcacgaucucugagaaauccagacucggcuaugagacauuuaagguuauugaaggguggagcaacccgaaaucuaagcugcagaucaaucgccaggugauugucgaccggggaaacagauccggcuacagcggcaucuucuccguggaggggaaaucuuguauuaaucggugcuuuuaugucgaacugaucagaggacgcaaggaggaaaccgaggugcucuggaccagcaacuccauuguuguguucuguggcacaucugggaccuacggaacaggcagcuggccugauggggcugacaucaaucugaugcccaucuga

SEQ ID NO: 208720 - RNA, 1410 nt, Artificial Sequence; identical to SEQ ID NO: 206399
  derived and/or modified CDS sequence (opt5) from neuraminidase__InfluenzaA__ACN50231

SEQ ID NO: 208721 - RNA, 1410 nt, Artificial Sequence
  derived and/or modified CDS sequence (opt5) from neuraminidase__InfluenzaA__ACN50233
augaaccccaaucagaagaucauuaccaucggcagcgugucccugacaauuucuacgaucugcuucuuuaugcaaauugccauccucaucaccacagucacccugcacuucaaacaguacgaguuuaacagcccuccgaauaaccagguuaugcuuugugaacccacaauuaucgagagaaauauuaccgaaaucguguaucugacaaacaccacgauugagaaggaaaucugcccuaaacucgcugaguaccggaauugguccaagccccagugugacauuaccggguucgccccuuuuucuaaagauaacagcauccgccuguccgcgggaggcgacaucugggugacaagagagcccuaugucucuugcgauccugacaaguguuaccaauucgcucuugggcagggaaccacacugaauaacgugcauagcaaugauaccguucacgaccggacgccguaucgcacacuccugaugaacgaacugggcgugcccuuucaucucgggaccaagcaggucugcauugccugguccucuagcuccugucacgauggaaaagccuggcugcaugugugcguuacaggcgacgauaagaaugcuaccgccagcuucaucuacaacggcagacuuguggacucuauugucuccuggagcaaagagauccugcggacccaggaaucugagugugugugcauuaaugggacauguacggugguccucaccgauggauccgcuagcggcaaggccgacacaaaaauccuguuuaucgaggaagggaagauuguucacaccuccaaacuuucuggaagcgcgcaacacguggaggaaugcuccugcuauccucgcuaccccggcgugagaugugucugccgggauaacuggaaagggagcaaccgcccuaucguggacauuaauaucaaggacuacucuauuguuuccagcuauguguguucuggacuggucggcgauacacccagaaagaacgacagcuccucuagcggccauugccucgauccgaauaacgaggaagggggacacggcgugaaggggugggccuucgacgauggaaaugacguuuggaugggccggaccaucuccgagaaacugcgcagcggguacgagacguuuaaggugaucgaaggauggucuaacccuaauuccaaacugcagauuaacagacaggucaucguggaucggggcaaucgcagcggcuauucugggauuuucuccgucgagggaaagagcuguaucaacagaugcuuuuacguggaacucauucggggcagaaaggaggaaacagagguucuguggaccuccaauucuaucguggucuucugugggaccagcggaacauauggcaccggguccuggcccgacggcgcugauauuaaccuuaugccuaucuga

SEQ ID NO: 208722 - RNA, 1410 nt, Artificial Sequence
  derived and/or modified CDS sequence (opt5) from neuraminidase__InfluenzaA__ACN50245
augaaccccaaucagaagaucauuaccaucggcagcgugucccugacaauuucuacgaucugcuucuuuaugcaaauugccauccucaucaccacagucacccugcacuucaaacaguacgaguuuaacagcccuccgaauaaccagguugugcuuugugaacccacaauuaucgagagaaauauuaccgaaaucguguaucugacaaacaccacgauugagaaggaaaucugcccuaaacucgcugaguaccggaauugguccaagccccagugugacauuaccggguucgccccuuuuucuaaagauaacagcauccgccuguccgcgggaggcgacaucugggucacaagagagcccuaugugucuugcgauccugacaaguguuaccaauucgcucuugggcagggaaccacacugaauaacguucauagcaaugauaccgugcgggaccgcacgccguauagaacacuccugaugaacgaacugggcguccccuuucaccucgggaccaaacaggugugcauugccugguccucuagcuccugucaugauggaaaggccuggcugcacguuugcaucacaggcgacgauaagaaugcuaccgccagcuucauuuacaacggccggcuuguggacucuaucgucuccuggagcaaagagauucugcgcacccaggaaucugagugugugugcaucaaugggacauguacgguggucaugaccgauggauccgcuagcggcaaggccgacacaaaaauccucuuuauugaggaagggaagaucguucauaccuccacacugucuggaagcgcgcaacacguggaggaaugcuccugcuauccuagauaccccggcgugcggugugucugccgcgauaacuggaaggggagcaacagaccuauuguggacaucaauauuaaagaccacucuaucguuuccagcuacguguguucuggacuugucggcgauacgccccggaagaacgacagcuccucuagcucccauugccuggauccgaauaacgaggaaggcgggcacggagugaaaggcugggccuucgacgaugggaaugacguuuggaugggacgcaccaucagcgagaagucuagacucggcuaugagacauuuaaagugauugaagggugguccaacccuaagagcaaacugcagaucaaucggcaggucauuguggaucgcggagacagaucuggcuacuccggcaucuucagcgucgaggggaaguccuguauuaaccggugcuuuuauguggaacugaucagaggacgcaaggaggaaaccgagguucucuggaccucuaauagcauuguggucuucuguggcacauccgggaccuacggaacaggcucuuggcccgauggggcugacaucaaccugaugccuaucuga

SEQ ID NO: 208723 - RNA, 1413 nt, Artificial Sequence
  derived and/or modified CDS sequence (opt5) from neuraminidase__InfluenzaA__ACN72609
augaaccccaaucagaagaucauuaccaucggcagcauuuccaucgccauugggaucaucucucugaugcuccaaauuggaaacaucauuagcaucugggcuucccacucuauucagacaggcagccagaauaacacggggaucugcaaucagagaauuaucaccuacgagaacuccacaugggugaaucauaccuaugugaacaucaauaacacaaauguuguggccggagaagacaaaaccucugugacacuggcgggcaacagcucccuuuguagcauuucugggugggcuaucuacaccaaggauaauuccauucggaucggaagcaaaggcgacgucuucgugauucgcgagccuuuuaucucuugcucccaccuggaauguagaacguucuuucucacccaaggcgcccugcuuaacgauaagcauagcaaugggacaguuaaagaccggucuccguaucgcgcccugauguccugcccccucggagaggcuccuagccccuacaacuccaaguucgaaucuguggccuggagcgcuuccgccugucacgauggcaugggguggcugaccaucggaauuagcggcccugacaacggggcggucgccgugcugaaguauaauggaaucauuacaggcaccaucaaaucuuggaagaaacagauucucagaacgcaggaguccgagugcguuuguaugaacggcagcugcuuuacaaucaugaccgaugggcccucuaauaaggcugccagcuacaaaaucuucaagauugaaaagggaaaagugacaaaguccaucgagcugaacgcuccuaauuuucauuaugaagaguguucuugcuacccggacaccggcauugucaugugugugugccgggauaacuggcacgggagcaaucgccccuggguguccuucaaccagaaucuugacuacaaaaucggauauauuugcagcggcgucuuuggggauaacccuagacccgaggacggagaaggcucuuguaauccuguuaccguggauggcgccaacggggugaagggauucuccuacaaauaugacaauggcgucuggaucgggcggacaaagagcaaccgccugagaaaaggauuugagaugauuugggaccccaauggcuggacgaacaccgauucugacuucuccgugaagcaagauguuguggcgaucacagacuggagcggguacuccggcucuuuuguccagcacccggaacucaccggacuggauugcauccggccuuguuucuggguggagcuuguucgcggccugcccagagaaaacacaaccauuuggacgagcggguccucuaucagcuucugcggagucaauuccgacacagccaacuggagcuggccugauggcgcugagcuccccuuuaccauugacaaguga

SEQ ID NO: 208724 - RNA, 1410 nt, Artificial Sequence
  derived and/or modified CDS sequence (opt5) from neuraminidase__InfluenzaA__ACN72621
augaaccccaaucagaagaucauuaucauuagcuccaucugcaugaccaacggcauugccucucugauccuccaaaucgggaauauuaucagcauuuggaucucccacucuauucagacaggaaaccagaaucagacggagaccuguaaccaaagcgugaucauuuacgaaaauaacacaugggucaaucagaccuauguuaacaucuccaauaacaauuucguggcugagcagacaguggucccugugaaacugguuggcucuagcccgcuuugccccguguccgggugggccaucuacagcaaggacaacucugucagaauuggauccaaaggcgauguguuuguuauccgggaaccuuucauuagcuguucucaucuggagugccgcaccuuuuuccucacacagggggcgcugcuuaaugacaagcacuccaacggaaccgugaaagauagaagccccuaucggacgcugaugucuuguccuaucggcgaaguccccuccccuuacaacagccgcuuugaguccguggcuuggucugccagcgccugccaugacggcuccagcuggcucaccauugggaucucuggaccggauaauggcgcuguggccguccugaaguauaacgacaucauuacagauaccaucaaguccuggaaaaauaacauucugagaacacaagagagcgaaugugcuugccucaaugggucuuguuucaccguuaugacggacggacccagcaacggccaggccuccuacaagaucuuuaaaauugagaaggggaaaguggugaagucugucgaacugaaugcgccuaacuaucacuacgaggagugcagcuguuaccccgauuccggagaaaucaucugcgugugccgggacaauuggcauggcagcaaccgcccuuggguuucuuucaaucagaaccuugaguaucagauuggcuacaucuguuccggggugcugggagauaaucccagaccgaacgaccggacaggcaauugcgggccugucagcucucacggagccaacggcgugaagggguuuuccuucaaauauggagauggcauuuggaucggccgcaccaagagcacauccucuagaagcggguuugaaaugauuugggaccccaacggauggaccggcaccgacaauaacuucuccguuaaacaagauaucguggggauuacagacuggacgggauacucuggcagcuuuguccagcacccugagcucaccgggcuggauuguauccggcccugcuucuggguggaacuuauccgcggcagacccaaggagaauacaauuuggaccuccggaagcucuaucuccuucuguggcgucaacagcgacacagugggguggucuuggccugauggagcugagcugccguuuaccauugacaaauga

SEQ ID NO: 208725 - RNA, 1410 nt, Artificial Sequence; identical to SEQ ID NO: 208584
  derived and/or modified CDS sequence (opt5) from neuraminidase__InfluenzaA__ACN76503

SEQ ID NO: 208726 - RNA, 1410 nt, Artificial Sequence
  derived and/or modified CDS sequence (opt5) from neuraminidase__InfluenzaA__ACO36345
augaaccccaaucagaagaucauuaccaucggcagcgugucccugacaauuucuacgaucugcuucuuuaugcaaauugccauccucaucaccacagucacccugcacuucaaacaguacgaguuuaacagcuccccuaauaaccagguuaugcagugugaaccgacaauuaucgagagaaauauuaccgaaaucguguaucuuacaaacaccacgauugagaaggaaaucugccccaaacuggcugaguaccggaauuggucuaagccucaaugugacauuaccggguucgcccccuuuagcaaagauaacuccauccgccucucugcgggaggcgacaucugggugacaagagagccuuaugucagcugcgaucccgacaaguguuaccaguucgcucuggggcagggaaccacacuuaauaacgugcauuccaauaacaccguucgggaucgcacgccuuauagaacacugcucaugaaugaacugggcgugccguuucaccuggggaccaagcaggucugcauugccuggucuagcuccagcugucaugacggaaaagccuggcuccacgugugcaucacaggcgaugacaagaacgcuaccgccucuuucauuuacaauggccggcugguugauuccaucgugagcuggucuaaagagauucuucgcacccaagaauccgagugugucugcaucaacgggacauguacgguggugaugaccgacggaagcgcuuccggcaaggccgauacaaaaauccuguuuauugaggaagggaagaucguccauaccucuacacucagcggauccgcgcagcacguugaggaaugcagcugcuaucccagauacccuggcgugcggugugugugccgcgacaacuggaaggggucuaauagacccauugucgauaucaacauuaaagaccacuccaucgugagcucuuacguuuguagcggacuggugggcgacaccccucggaagaaugauuccucuagcuccagccauugccuugaccccaacaaugaggaaggcgggcacggagucaaaggcugggccuucgaugacgggaacgauguguggaugggacgcacgaucucugagaaguccagacugggcuaugagacauuuaaaguuauugaaggguggagcaauccgaagucuaaacuccagaucaaccgccaggugauugucgaccggggaaauagauccggcuacagcggcaucuucuccguggaggggaagucuuguauuaaccggugcuuuuaugucgaacugaucagaggacgcaaggaggaaaccgaggugcuguggaccagcaauuccauuguuguguucuguggcacaucugggaccuacggaacaggcagcuggccugauggggcugacaucaaccucaugcccaucuga

SEQ ID NO: 208727 - RNA, 1410 nt, Artificial Sequence; identical to SEQ ID NO: 207052
  derived and/or modified CDS sequence (opt5) from neuraminidase__InfluenzaA__ACO36356

SEQ ID NO: 208728 - RNA, 1410 nt, Artificial Sequence
  derived and/or modified CDS sequence (opt5) from neuraminidase__InfluenzaA__ACO36367
augaaccccaaucagaagaucauuaccaucggcagcgugucccugauuaucucuacaauuugcuucuuuaugcaaacggccauccucaucaccacagucacccugcacuucaaacaguacgaguuuaacagcccuccgaauaaccagguuaugcuuugugaacccacaauuaucgagagaaauauuaccgaaaucguguaucugacaaacaccacgauugagaaggaaaucugcccuaaacucgcugaguaccggaauugguccaagccccagugugacauuaccggguucgccccuuuuucuaaagauaacagcauccgccuguccgcgggaggcgacaucugggugacaagagagcccuaugucucuugcgauccugacaaguguuaccaauucgcucuugggcagggaaccacacugaauaacgugcauagcaaugauaccguucggaaccgcacgccguauagaacacuccugaugaaugaacugggcgugcccuuucaccucgggaccaagcaggucugcauugccugguccucuagcuccugucaugacggaaaagccuggcugcacgugugcaucacaggcgaugacaagaacgcuaccgccagcuucauuuacaauggccggcuuguugauucuaucguguccuggagcaaagagauucugcgcacccaggaaucugagugugucugcaucaacgggacauguacgguggugaugaccgacggauccgcuagcggcaaggccgauacaaaaauccucuuuauugaggaagggaagaucguccauaccuccacacugucuggaagcgcgcaacacguugaggaaugcuccugcuauccuagauaccccggcgugcggugugugugccgcgacaacuggaaggggagcaauagaccuauugucgauaucaacauuaaagaccacucuaucguguccagcuacguuuguucuggacuugugggcgacacgccccggaagaaugauagcuccucuagcucccauugccuggacccgaacaaugaggaaggcgggcacggagucaaaggcugggccuucgaugacgggaacgauguguggaugggacgcaccaucagcgagaagucuagacucggcuaugagacauuuaaaguuauugaagggugguccaauccuaagagcaaacugcagaucaaccgccaggugauugucgaccggggaaauagaucuggcuacuccggcaucuucagcguggaggggaaguccuguauuaaccggugcuuuuaugucgaacugaucagaggacgcaaggaggaaaccgaggugcucuggaccucuaauagcauuguuguguucuguggcacauccgggaccuucggaacaggcucuuggcccgauggggcugacaucaaccugaugccuaucuga

SEQ ID NO: 208729 - RNA, 1413 nt, Artificial Sequence; identical to SEQ ID NO: 208704
  derived and/or modified CDS sequence (opt5) from neuraminidase__InfluenzaA__ACO36400

SEQ ID NO: 208730 - RNA, 1410 nt, Artificial Sequence
  derived and/or modified CDS sequence (opt5) from neuraminidase__InfluenzaA__ACO36411
augaaccccaaucagaagaucauuaccaucggcagcgugucccugacaauuucuacgaucggguucuuuaugcaaaccgccauucucaucacaaccgucacacugcacuucaaacaguacgaguuuaacagcccuccgaauaaccagguuaugcuuugcgaacccaccaucauugagagaaauaucacagaaauuguguaucugaccaacacgaccaucgagaaggaaauuuguccuaaacucgcugaguaccggaauugguccaagccccagugcgacaucacaggauucgccccuuuuucuaaagauaacagcauucgccuguccgcgggcggggacaucugggugaccagagagcccuaugucucuugugauccugacaagugcuaccaauucgcucuuggacagggcacaacccugaauaacgugcauagcaaugauacgguucgggggcgcacaccguauagaacccuccugaugaacgaacugggagugcccuuucaccucggcacaaagcaggucuguaucgccugguccucuagcuccugccaugacggcaaagccuggcugcacguguguauuaccggggaugacaagaaugcuaccgccagcuucaucuacaacggacggcuuguugauucuauuguguccuggagcaaagagauccugcgcacacaggaaucugagugcgucuguauuaauggcacgugcaccguggugaugacagacggguccgcuagcggaaaggccgauaccaaaauccucuuuaucgaggaaggcaagauuguccauacauccacccugucugggagcgcgcaacacguugaggaauguuccugcuauccuagauaccccggagugcggugcgugugucgcgacaacuggaagggcagcaacagaccuaucgucgauauuaauaucaaagaccacucuauuguguccagcuacguuugcucuggccuugugggggacacgccccggaagaacgauagcuccucuagcucccauugucuggacccgaauaacgaggaaggaggccacggggucaaaggaugggccuucgaugacggcaaugauguguggauggggcgcacaaucagcgagaagucuagacucggauaugagaccuuuaaaguuaucgaaggcugguccaacccuaagagcaaacugcagauuaaucgccaggugaucgucgaccggggcaacagaucuggguacuccggaauuuucagcguggagggcaaguccugcaucaaucgguguuuuuaugucgaacugauuagagggcgcaaggaggaaaccgaggugcucuggacaucuaacagcaucguuguguucugcggaaccuccggcacauacgggacgggcucuuggcccgauggagcugacauuaaucugaugccuaucuga

SEQ ID NO: 208731 - RNA, 1410 nt, Artificial Sequence
  derived and/or modified CDS sequence (opt5) from neuraminidase__InfluenzaA__ACO36422
augaaccccaaucagaagaucauuaccaucggcagcgugucccugauuaucucuacaauuugcuucuuuaugcaaacggccauccucaucaccacagucacccugcacuucaaacaguacgaguuuaacagcccuccgaauaaccagguuaugcuuugugaacccacaauuaucgagagaaauauuaccgaaaucguguaucugacaaacaccacgauugagaaggaaaucugcccuaaacucgcugaguaccggaauugguccaagccccagugugacauuaccggguucgccccuuuuucuaaagauaacagcauccgccuguccgcgggaggcgacaucugggugacaagagagcccuaugucucuugcgauccugacaaguguuaccaauucgcucuugggcagggaaccacacugaauaacgugcauagcaaugauaccguucggggccgcacgccguauagaacacuccugaugaacgaacugggggugcccuuucaccucggaaccaagcaggucugcauugccugguccucuagcuccugucaugacggcaaagccuggcugcacgugugcaucacaggcgaugacaagaaugcuaccgccagcuucauuuacaacgggcggcuuguugauucuaucguguccuggagcaaagagauucugcgcacccaggaaucugagugugucugcaucaauggaacauguacgguggugaugaccgacggcuccgcuagcgggaaggccgauacaaaaauccucuuuauugaggaaggaaagaucguccauaccuccacacugucuggcagcgcgcaacacguugaggaaugcuccugcuauccuagauaccccggggugcggugugugugccgcgacaacuggaagggaagcaacagaccuauugucgauaucaauauuaaagaccacucuaucguguccagcuacguuuguucuggccuugugggcgacacgccccggaagaacgauagcuccucuagcucccauugccuggacccgaauaacgaggaagggggacacggcgucaaagggugggccuucgaugacggaaaugauguguggaugggccgcaccaucagcgagaagucuagacucggguaugagacauuuaaaguuauugaaggaugguccaacccuaagagcaaacugcagaucaaucgccaggugauugucgaccggggcaacagaucuggcuacuccgggaucuucagcguggagggaaaguccuguauuaaucggugcuuuuaugucgaacugaucagaggccgcaaggaggaaaccgaggugcucuggaccucuaacagcauuguuguguucugugggacauccggaaccuacggcacagggucuuggcccgauggcgcugacaucaaucugaugccuaucuga

SEQ ID NO: 208732 - RNA, 1410 nt, Artificial Sequence; identical to SEQ ID NO: 208488
  derived and/or modified CDS sequence (opt5) from neuraminidase__InfluenzaA__ACO36433

SEQ ID NO: 208733 - RNA, 1410 nt, Artificial Sequence
  derived and/or modified CDS sequence (opt5) from neuraminidase__InfluenzaA__ACO36444
augaaccccaaucagaagaucauuaccaucggcagcgugucccugacaauugccacgaucugcuuccucaugcaaauugcuauccuggucaccacaguuacccuucacuuuaaacagcaugaguguaacucuccuccgaauaaccaggugaugcugugcgaacccacaaucauugagagaaauaucaccgaaauuguguaccucacaaacaccacgaucgagaaggaaaaauguccuaagcuggccgaguaucggaauuggagcaaaccccagugcaacauuaccggguucgcgccuuuuuccaaggacaauucuauccgccuuagcgcuggaggcgauauuugggucacaagagagcccuacguguccugugacccugauaagugcuaucaauucgcccuggggcagggaaccacacucaacaauggccacucuaacaauaccguucaugaccggacgccguaccgcacacugcugaugaacgaacucggggugcccuuucaccugggaaccagacaggucuguaucgccuggagcuccagcucuugccaugauggcaaggcuuggcuucacguguguguuacaggcgacgauaaaaaugccaccgcuuccuucaucuauaacgggcggcugguggacagcauuggaucuugguccaaaaagauccuccgcacccaggagagcgaaugcgucuguauuaacggcacaugcacgguggugaugaccgaugggucugccuccgagaaagcggacacaaagauccuguuuauugaggaaggaaagaucguccacaucagcacccuuuccggcucugcccaacauguugaggaaugcagcuguuacccuagauaucccggggugcggugcgugugucgcgauaauuggaaaggauccaacagaccuauugucgacaucaaugugaaggauuacagcauuguuucuuccuacgugugcagcggccuggucggcgacacaccccggaaaaacgacucuuucagcuccucucacugucucgauccgaauaacgaggaagggggacauggcgugaaggggugggcuuuugacgauggaaaugacguuuggaugggccgcaccaucagcgagaaacugagauccggguaugagacguucaaggugauugaaggauggagcaaaccuaacucuaagcugcagaucaaucggcaggucaucguggagcgcggcaacagauccggcuacagcgggaucuuuucugucgaaggaaaguccugcauuaaucgguguuucuauguggagcucauuagaggccgcaaagaagagacagagguuugguggaccagcaacuccaucguggucuuuugcgggaccucuggaacauacggcaccgggagcuggcccgauggcgccgacauuaaucugaugccuaucuga

SEQ ID NO: 208734 - RNA, 1410 nt, Artificial Sequence
  derived and/or modified CDS sequence (opt5) from neuraminidase__InfluenzaA__ACO36466
augaaccccaaucagaagaucauuaccaucggcagcgugucccugacaauuucuacgaucugcuucuuuaugcaaauugccauccucaucaccacagucacccugcacuucaaacaguacgaguuuaacagcccuccgaauaaccagguuaugcuuugugaacccacaauuaucgagagaaauauuaccgaaaucgcuuaucugacaaacaccacgauugagaaggaaaucugcccuaaacucgccgaguaccggaauugguccaagccccaguguaacauuaccggguucgcgccuuuuucuaaagacaauagcauccgccuguccgcuggaggcgauaucugggugacaagagagcccuaugugucuugcgacccugauaaguguuaccaauucgcccuugggcagggaaccacacugaacaauguccauagcaacgacaccgugcacgaucggacgccguaucgcacacuccugaugaaugaacugggcguucccuuucaucucgggaccaaacaggugugcauugccugguccucuagcuccugucacgacggaaaggcuuggcugcaugucugcgugacaggcgaugacgagaacgccaccgcuagcuucaucuacaauggcagacuuguugauucuguggucuccuggagcaagaaaauucugcggacccaggaaucugagugugugugcaucaacgggacauguacgguggucaugaccgacggauccgccagcggcaaggcggauacaaaaauucucuuuaucgaggaagggaagaucguucacaccuccacacugucuggaagcgcccaacacguggaggaaugcuccugcuauccucgcuaccccggcgugagaugugucugccgggacaacuggaaggggagcaaucgcccuauuguggauaucaacauuaaagacuacucuaucguuuccagcuauguguguucuggacuugucggcgacacccccagaaagaaugauagcuccucuagcucccauugccuggacccgaacaaugaggaaggcgggcacggagugaaaggcugggcuuucgaugacgggaacgauguuuggaugggacggacgauuagcgagaagcuccgcucuggcuacgagacauuuaaagugaucgaagggugguccaauccuaacagcaagcugcagaucaauagacaggucauuguggaccggggaaaccgcucuggcuauuccggcaucuucagcgucgaggggaaauccuguauuaauagaugcuuuuacguggaacugauccggggaagaaaccaggagaccgaaguucucuggaccucuaauagcauuguggucuucuguggcacauccgggaccuauggaacaggcucuuggcccgauggggccgacaucaaccugaugccuauuuga

SEQ ID NO: 208735 - RNA, 1410 nt, Artificial Sequence
  derived and/or modified CDS sequence (opt5) from neuraminidase__InfluenzaA__ACO36477
augaaccccaaucagaagaucauuaccaucggcagcgugucccugacaauugccacgaucugcuuccucaugcaaauugcuauccuggucaccacaguuacccuucacuuuaaacagcaugaguguaacucuccuccgaauaaccaggugaugcugugcgaacccacaaucauugagagaaauaucaccgaaauuguguaccucacaaacaccacgaucgagaaggaaauuuguccuaaacuggccgaguaucggaauuggagcaagccccagugcaacaucaccggguucgcgccuuuuuccaaagacaauucuauucgccuuagcgcuggaggcgauaucugggucacaagagagcccuacguguccugugacccugauaagugcuaucaauucgcccuggggcagggaaccacacucaacaauggccacucuaacgacaccguucaugaucggacgccguaccgcacacugcugaugaaugaacucggggugcccuuucaccugggaaccagacaggucuguaucgccuggagcuccagcucuugccaugacggcaaggcuuggcuucacguguguguuacaggcgaugacaaaaacgccaccgcuuccuucauuuauaaugggcggcugguggauagcaucggaucuugguccaagaacauucuccgcacccaggagagcgaaugcgucuguaucaacggcacaugcacgguggugaugaccgacgggucugccuccggaaaagcggauacaaagauucuguuuaucgaggagggcaaaaucguccacauuagcacccuuuccgggucugcccaacauguugaagagugcagcuguuacccuagauaucccggagugcggugcgugugucgcgacaauuggaagggcuccaacagaccuaucgucgauauuaaugugaaggacuacagcaucguuucuuccuacgugugcagcggccuggucggggacacaccccggaaaaacgauucuuucagcuccucucacugucucgacccgaauaacgaagagggaggccauggggugaagggaugggcuuuugaugacggcaaugauguuuggauggggcgcaccauuagcgaaaaacugagauccggauaugagacguucaaggugaucgagggcuggagcaaaccuaacucuaagcugcagaucaaucggcaggucauuguggaacgcggcaacagauccggguacagcggaaucuuuucugucgagggcaaauccugcauuaaucgguguuucuauguggaacucaucagagggcgcaaggaggaaacagagguuugguggaccagcaacuccauuguggucuuuugcggaaccucuggcacauacgggaccggcagcuggcccgacggagccgauaucaaucugaugccuauuuga

SEQ ID NO: 208736 - RNA, 1410 nt, Artificial Sequence
  derived and/or modified CDS sequence (opt5) from neuraminidase__InfluenzaA__ACO36499
augaaccccaaucagaagaucauuaccaucggcagcgugucccugacaauuucuacgaucugcuucuuuaugcaaauugccauccucaucaccacagucacccugcacuucaaacaguacgaguuuaacagcccuccgaauaaccagguuaugcuuugugaacccacaauuaucgagagaaauauuaccgaaaucguguaucugacaaacaccacgauugagaaggaaaucugcccuaaacucgcugaguaccggaauugguccaagccccaguguaacauuaccggguucgccccuuuuucuaaagacaauagcauccgccuguccgcgggaggcgauaucugggugacaagagagcccuaugucucuugcgacccugauaaguguuaccaauucgcucuugggcagggaaccacacugaacaaugugcauagcaacgacaccguucacgaucggacgccguaucgcacacuccugaugaaugaacugggcgugcccuuucaucucgggaccaagcaggucugcauugccugguccucuagcuccugucacgacggaaaagccuggcugcaugugugcguuacaggcgaugacaagaacgcuaccgccagcuucaucuacaauggcagacuuguggauucugucguguccuggagcaaaaagauucugcggacccaggagucugaaugugugugcaucaacgggacauguacggucguuaugaccgacggauccgcuagcggcaaagccgauacaaagauucucuuuaucgaggaggggaagaucgugcacaccuccacacugucuggaagcgcgcaacacguggaagagugcuccugcuauccucgcuaccccggcgucagaugugugugccgggacaacuggaaagggagcaaucgcccuauuguugauaucaacauuaaggacuacucuaucguguccagcuaugucuguucuggacuugugggcgacacccccagaaagaaugauagcuccucuagcucccauugccuggacccgaacaaugaagagggcgggcacggaguuaaaggcugggccuucgaugacgggaacgauguguggaugggacggacgauuagcgaaaaacuccgcucuggcuacgagacauuuaaggucaucgaggggugguccaauccuaacagcaaacugcagaucaauagacaggugauugucgaccggggaaaccgcucuggcuauuccggcaucuucagcguggaagggaaguccuguauuaauagaugcuuuuacguugagcugauccggggaagaaaccaggaaaccgaggugcucuggaccucuaauagcauugucguguucuguggcacauccgggaccuauggaacaggcucuuggcccgauggggcugacaucaaccugaugccuauuuga

SEQ ID NO: 208737 - RNA, 1410 nt, Artificial Sequence; identical to SEQ ID NO: 206399
  derived and/or modified CDS sequence (opt5) from neuraminidase__InfluenzaA__ACO36510

SEQ ID NO: 208738 - RNA, 1410 nt, Artificial Sequence; identical to SEQ ID NO: 206399
  derived and/or modified CDS sequence (opt5) from neuraminidase__InfluenzaA__ACO36543

SEQ ID NO: 208739 - RNA, 1410 nt, Artificial Sequence; identical to SEQ ID NO: 206399
  derived and/or modified CDS sequence (opt5) from neuraminidase__InfluenzaA__ACO36554

SEQ ID NO: 208740 - RNA, 1410 nt, Artificial Sequence; identical to SEQ ID NO: 206399
  derived and/or modified CDS sequence (opt5) from neuraminidase__InfluenzaA__ACO36565

SEQ ID NO: 208741 - RNA, 1410 nt, Artificial Sequence
  derived and/or modified CDS sequence (opt5) from neuraminidase__InfluenzaA__ACO36576
augaaccccaaucagaagaucauuaccaucggcagcgugucccugacaauuucuacgaucugcuucuuuaugcaaauugccauccucaucaccacagucacccugcacuucaaacaguacgaguuuaacagcccuccgaauaaccagguuaugcuuugugaacccacaauuaucgagagaaauauuaccgaaaucguguaucugacaaacaccacgauugagaaggaaaucugcccuaaacucgcugaguaccggaauugguccaagccccagugugacauuaccggguucgccccuuuuucuaaagauaacagcauccgccuguccgcgggaggcgacaucugggugacaagagagcccuaugucucuugcgauccugacaaguguuaccaauucgcucuugggcagggaaccacacugaauaacgugcauagcaaugauaccguucacgaccggacgccguaucgcacacuccugaugaacgaacugggcgugcccuuucaucucgggaccaagcaggucugcauugccugguccucuagcuccugucacgauggaaaagccuggcugcaugugugcguuacaggcgacgauaagaaugcuaccgccagcuucaucuacaacggcagacuuguggacucuauugucuccuggagcaaagagauccugcggacccaggaaucugagugugugugcauuaaugggacauguacgguggucaugaccgauggauccgcuagcggcaaggccgacacaaaaauccucuuuaucgaggaagggaagauuguucacaccuccacacugucuggaagcgcgcaacacguggaggaaugcuccugcuauccucgcuaccccggcgugagaugugucugccgggauaacuggaaggggagcaaccgcccuaucguggacauuaauaucaaagacuacucuauuguuuccagcuauguguguucuggacuugucggcgauacccccagaaagaacgacagcuccucuagcucccauugccuggauccgaauaacgaggaaggcgggcacggagugaaaggcugggccuucgacgaugggaaugacguuuggaugggacggacgaucagcgagaagcuccgcucuggcuacgagacauuuaaagugaucgaagggugguccaacccuaauagcaagcugcagauuaacagacaggucaucgugggacggggcaaucgcucuggcuauuccgggauuuucagcgucgagggaaaauccuguaucaacagaugcuuuuacguggaacugauucggggcagaaaggaggaaaccgagguucucuggaccucuaauagcaucguggucuucugugggacauccggaaccuauggcacagggucuuggcccgauggcgcugacauuaaccugaugccuaucuga

SEQ ID NO: 208742 - RNA, 1410 nt, Artificial Sequence; identical to SEQ ID NO: 206399
  derived and/or modified CDS sequence (opt5) from neuraminidase__InfluenzaA__ACO36587

SEQ ID NO: 208743 - RNA, 1410 nt, Artificial Sequence; identical to SEQ ID NO: 206784
  derived and/or modified CDS sequence (opt5) from neuraminidase__InfluenzaA__ACO36609

SEQ ID NO: 208744 - RNA, 1410 nt, Artificial Sequence
  derived and/or modified CDS sequence (opt5) from neuraminidase__InfluenzaA__ACO36620
augaaccccaaucagaagaucauuaccaucggcagcgugucccugacaauuucuacgaucugcuucuuuaugcaaauugccauccucaucaccacagucacccugcacuucaaacaguacgaguuuaacagcccuccgaauaaccagguuaugcuuugugaacccacaauuaucgagagaaauauuaccgaaaucguguaucugacaaacaccacgauugagaaggaaaucugcccuaaacucgcugaguaccggaauugguccaagccccaguguaacauuaccggguucgccccuuuuucuaaagacaauagcauccgccuguccgcgggaggcgauaucugggugacaagagagcccuaugucucuugcgacccugauaaguguuaccaauucgcucuugggcagggaaccacacugaacaaugugcauagcaacgacaccguucacgaucggacgccguaucgcacacuccugaugaaugaacugggcgugcccuuucaucucgggaccaagcaggucugcauugccugguccucuagcuccugucacgacggaaaagccuggcugcaugugugcguuacaggcgaugacaagaacgcuaccgccagcuucaucuacaauggcagacuuguggauucuauugucuccuggagcaaagagauccugcggacccaggaaucugagugugugugcauuaacgggacauguacgguggucaugaccgacggauccgcuagcggcaaggccgauacaaaaauccucuuuaucgaggaagggaagauuguucacaccuccacacugucuggaagcgcgcaacacguggaggaaugcuccugcuauccucgcuaccccggcgugagaugugucugccgggacaacuggaaggggagcaaucgcccuaucguggauauuaacaucaaagacuacucuauuguuuccagcuauguguguucuggacuugucggcgacacccccagaaagaaugauagcuccucuagcucccauugccuggacccgaacaaugaggaaggcgggcacggagugaaaggcugggccuucgaugacgggaacgauguuuggaugggacggacgaucagcgagaagcuccgcucuggcuacgagacauuuaaagugaucgaagggugguccaauccuaacagcaagcugcaggucaauagacaggugauugucgaccggggaaaccgcucuggcuauuccggcaucuucagcguggaggggaaauccuguauuaauagaugcuuuuacguugaacugauccggggaagaaaggaggaaaccgaggugcucuggaccucuaacagcauugucguguucuguggcacauccgggaccuauggaacaggcucuuggcccgauggggcugacaucaaucugaugccuauuuga

SEQ ID NO: 208745 - RNA, 1410 nt, Artificial Sequence; identical to SEQ ID NO: 206784
  derived and/or modified CDS sequence (opt5) from neuraminidase__InfluenzaA__ACO36631

SEQ ID NO: 208746 - RNA, 1410 nt, Artificial Sequence; identical to SEQ ID NO: 206784
  derived and/or modified CDS sequence (opt5) from neuraminidase__InfluenzaA__ACO36653

SEQ ID NO: 208747 - RNA, 1410 nt, Artificial Sequence
  derived and/or modified CDS sequence (opt5) from neuraminidase__InfluenzaA__ACO36675
augaaccccaaucagaagaucauuaccaucggcagcgugucccugacaauuucuacgaucugccucuucaugcaaauugccauccugaucaccacagucacccuucacuuuaaacaguacgaguucaacagcccuccgaauaaccagguuaugcugugugaacccacaauuaucgagagaaauauuaccgaaaucguguaucucacaaacaccacgauugagaaggaaaucugcccuaaacuggcugaguaccggaauugguccaagccccaguguaacauuaccggguuugccccuuucucuaaagacaauagcauccgccuuuccgcgggaggcgauaucugggugacaagagagcccuaugucucuugcgacccugauaaguguuaccaauuugcucuggggcagggaaccacacucaacaaugugcauagcaacgacaccguucacgaucggacgccguaucgcacacugcugaugaaugaacucggcgugcccuuccaucuggggaccaagcaggucugcauugccugguccucuagcuccugucacgacggaaaagccuggcuucaugugugcguuacaggcgaugacaagaacgcuaccgccagcuuuaucuacaauggcagacugguggauucuauugucuccuggagcaaagagauccuccggacccaggaaucugagugugugugcauuaacgggacauguacgguggucaugaccgacggauccgcuagcggcaaggccgauacaaaaauccuguucaucgaggaagggaagauuguucacaccuccacacuuucuggaagcgcgcaacacguggaggaaugcuccugcuauccucgcuaccccggcgugagaugugucugccgggacaacuggaaggggagcaaucgcccuaucguggauauuaacaucaaagacuacucuauuguuuccagcuauguguguucuggacuggucggcgacacccccagaaagaaugauagcuccucuagcucccauugccucgacccgaacaaugaggaaggcgggcacggagugaaaggcugggccuuugaugacgggaacgauguuuggaugggacggacgaucagcgagaagcugcgcucuggcuacgagacauucaaagugaucgaagggugguccaauccuaacagcaagcugcagauuaauagacaggucaucguggaccggggaaaccgcucuggcuauuccggcauuuuuagcgucgaggggaaauccuguaucaauagaugcuucuacguggaacucauucggggaagaaaggaggaaaccgagguucuguggaccucuaacagcaucguggucuuuuguggcacauccgggaccuauggaacaggcucuuggcccgauggggcugacauuaaucuuaugccuaucuga

SEQ ID NO: 208748 - RNA, 1410 nt, Artificial Sequence
  derived and/or modified CDS sequence (opt5) from neuraminidase__InfluenzaA__ACO36686
augaaccccaaucagaagaucauuaccaucggcagcgugucccugacaauuucuacgaucugcuucuuuaugcaaauugccauccucaucaccacagucacccugcacuucaaacaguacgaguuuaacagcccuccgaauaaccagguuaugcuuugugaacccacaauuaucgagagaaauauuaccgaaaucguguaucugacaaacaccacgauugagaaggaaaucugcccuaaacucgcugaguaccggaauugguccaagccccaguguaacauuaccggguucgccccuuuuucuaaagacaauagcauccgccuguccgcgggaggcgauaucugggugacaagagagcccuaugucucuugcgaccaugauaaguguuaccaauucgcucuugggcagggaaccacacugaacaaugugcacagcaacgacaccguucaugaucggacgccuuaucgcacacuccugaugaaugaacugggcgugccguuucaccucgggaccaagcaggucugcauugccugguccucuagcuccugucaugacggaaaagccuggcugcacgugugcguuacaggcgaugacaagaacgcuaccgccagcuucaucuacaauggcagacuuguggauucuauugucuccuggagcaaagagauccugcggacccaggaaucugagugugugugcauuaacgggacauguacgguggucaugaccgacggauccgcuagcggcaaggccgauacaaaaauccucuuuaucgaggaagggaagauuguucacaccuccacacugucuggaagcgcgcaacauguggaggaaugcuccugcuauccccgcuacccuggcgugagaugugucugccgggacaacuggaaggggagcaaucgccccaucguggauauuaacaucaaagacuacucuauuguuuccagcuauguguguucuggacuugucggcgacaccccuagaaagaaugauagcuccucuagcucccacugccuggaccccaacaaugaggaaggcgggcauggagugaaaggcugggccuucgaugacgggaacgauguuuggaugggacggacgaucagcgagaagcuccgcucuggcuacgagacauuuaaagugaucgaagggugguccaauccgaacagcaagcugcagauuaauagacaggucaucguggaccggggaaaccgcucuggcuauuccggcauuuucagcgucgaggggaaauccuguaucaauagaugcuuuuacguggaacugauucggggaagaaaggaggaaaccgagguucucuggaccucuaacagcaucguggucuucuguggcacauccgggaccuauggaacaggcucuuggccugauggggcugacauuaaucugaugcccaucuga

SEQ ID NO: 208749 - RNA, 1410 nt, Artificial Sequence
  derived and/or modified CDS sequence (opt5) from neuraminidase__InfluenzaA__ACO37125
augaaccccaaucagaagaucauuaccaucggcagcgugucccugacaauuucuacgaucugcuucuuuaugcaaauugccauccucaucaccacagucacccugcacuucaaacaguacgaguuuaacagcccuccgaauaaccagguuaugcuuugugaacccacaauuaucgagagaaauauuaccgaaaucguguaucugacaaacaccacgauugagaaggaaaucugcccuaaacucgcugaguaccggaauugguccaagccccagugugacauuaccggguucgccccuuuuucuaaagauaacagcauccgccuguccgcgggaggcgacaucugggugacaagagagcccuaugucucuugcgauccugacaaguguuaccaauucgcucuugggcagggaaccacacugaauaacgugcauagcaaugauaccguucacgaccggacgccguaucgcacacuccugaugaacgaacugggcgugcccuuucaucucgggaccaagcaggucugcauugccugguccucuagcuccugucacgauggaaaagccuggcugcaugugugcguuacaggcgacgauaagaaugcuaccgccagcuucaucuacaacggcaugcuuguggacucuauugucuccuggagcaaagagauccugagaacccaggaaucugagugugugugcauuaaugggacauguacgguggucaugaccgauggauccgcuagcggcaaggccgacacaaaaauccucuuuaucgaggaagggaagauuguucacaccuccacacugucuggaagcgcgcaacacguggaggaaugcuccugcuauccucgguaccccggcgugcgcugugucugcagagauaacuggaaggggagcaaccggccuaucguggacauuaauaucaaagacuacucuauuguuuccagcuauguguguucuggacuugucggcgauacgccccgcaagaacgacagcuccucuagcucccauugccuggauccgaauaacgaggaaggcgggcacggagugaaaggcugggccuucgacgaugggaaugacguuuggaugggaagaaccaucagcgagaagcuccggucuggcuacgagacauuuaaagugaucgaagggugguccaacccuaauagcaagcugcagauuaaccgccaggucaucguggauagaggaaaucggucuggcuauuccggcauuuucagcgucgaggggaaauccuguaucaaccgcugcuuuuacguggaacugauuagaggacggaaggaggaaaccgagguucucuggaccucuaauagcaucguggucuucuguggcacauccgggaccuauggaacaggcucuuggcccgacggggcugauauuaaccugaugccuaucuga

SEQ ID NO: 208750 - RNA, 1410 nt, Artificial Sequence
  derived and/or modified CDS sequence (opt5) from neuraminidase__InfluenzaA__ACO94511
augaaccccaaucagaagaucauuaccaucggcagcgugucccugacaauuucuacgaucugcuucuuuaugcaaauugccauccucaucaccacagucacccugcacuucaaacaguacgaguuuaacagcccuccgaauaaccagguuaugcuuugugaacccacaauuaucgagagaaauauuaccgaaaucguguaucugacaaacaccacgauugagaaggaaaucugcccuaaacucgcugaguaccggaauugguccaagccccagugugacauuaccggguucgccccuuuuucuaaagauaacagcauccgccuguccgcgggaggcgacaucugggugacaagagagcccuaugucucuugcgauccugacaaguguuaccaauucgcucuugggcagggaaccacacugaauaacgugcauagcaaugauaccguucgggaccgcacgccguauagaacacuccugaugaacgaacugggcgugcccuuucaccucgggaccaagcaggucugcauugccugguccucuagcuccugucaugauggaaaagccuggcugcacgugugcaucacaggcgacgauaagaaugcuaccgccagcuucauuuacaacggccggcuuguugacucuguggucuccuggagcaaagagauccugcgcacccaggaaucugagugugugugcauuaaugggacauguacgguggucaugaccgauggauccgcuagcggcaaggccgacacaaaaauccucuuuaucgaggaagggaagauuguucauaccuccacacugucuggaagcgcgcaacacguggaggaaugcuccugcuauccuagauaccccggcgugcggugugucugccgcgauaacuggaaggggagcaacagaccuaucguggacauuaauaucaaagaccacucuauuguuuccagcuacguguguucuggacuugucggcgauacgccccggaagaacgacagcuccucuagcuccaauugccuggauccgaacaaugaggaaggcgggcauggagugaaaggcugggccuucgacgaugggaacgacguuuggaugggacgcaccaucagcgagaagucuagacucggcuaugagacauuuaaagugaucgaagggugguccaauccuaagagcaaacugcagauuaaccggcaggucaucguggaucgcggaaauagaucuggcuacuccggcauuuucagcgucgaggggaaguccuguaucaaccggugcuuuuauguggaacugauuagaggacgcaaggaggaaaccgagguucucuggaccucuaauagcaucguggucuucuguggcacauccgggaccuacggaacaggcucuuggcccgacggggcugauauuaaccugaugccuaucuga

SEQ ID NO: 208751 - RNA, 1410 nt, Artificial Sequence; identical to SEQ ID NO: 208584
  derived and/or modified CDS sequence (opt5) from neuraminidase__InfluenzaA__ACO94512

SEQ ID NO: 208752 - RNA, 1410 nt, Artificial Sequence; identical to SEQ ID NO: 208671
  derived and/or modified CDS sequence (opt5) from neuraminidase__InfluenzaA__ACO94513

SEQ ID NO: 208753 - RNA, 1410 nt, Artificial Sequence
  derived and/or modified CDS sequence (opt5) from neuraminidase__InfluenzaA__ACO94675
augaaccccaaucagaagaucauuaccaucggcagcgugucccugacaauuucuacgaucugcuucuuuaugcaaauugccauccucaucaccacagucacccugcacuucaaacaguacgaguuuaacagcccuccgaauaaccagguuaugcuuugugaacccacaauuaucgagagaaauauuaccgaaaucguguaucugacaaacaccacgauugagaaggaaaucugcccuaaacucgcugaguaccggaauugguccaagccccagugugacauuaccggguucgccccuuuuucuaaagauaacagcauccgccuguccgcgggaggcgacaucugggugacaagagagcccuaugucucuugcgauccugacaaguguuaccaauucgcucuugggcagggaaccacacugaauaacgugcauagcaaugauaccguucgggaccgcacgccguauagaacacuccugaugaacgaacugggcgugcccuuucaccucgggaccaagcaggucugcauugccugguccucuagcuccugucaugauggaaaagccuggcugcacgugugcaucacaggcgacgauaagaaugcuaccgccagcuucauuuacaacggccggcuuguugacucuguggucuccuggagcaaagagauccugcgcacccaggaaucugagugugugugcauuaaugggacauguacgguggucaugaccgauggauccgcuagcggcaaggccgacacaaaaauccucuuuaucgaggaagggaagauuguucauaccuccacacugucuggaagcgcgcaacacguggaggaaugcuccugcuauccuagauaccccggcgugcggugugucugccgcgauaacuggaaggggagcaacagaccuaucguggacauuaauaucaaaaaccacucuauuguuuccagcuacguguguucuggacuugucggcgacacgccccggaagaaugauagcuccucuagcucccauugccuggacccgaacaaugaggaaggcgggcacggagugaaaggcugggccuucgaugacgggaacgauguuuggaugggacgcaccaucagcgagaagucuagacucggcuaugagacauuuaaagugaucgaagggugguccaauccuaagagcaaacugcagauuaaccggcaggucaucguggaccgcggaaauagaucuggcuacuccggcauuuucagcgucgaggggaaguccuguaucaaccggugcuuuuauguggaacugauuagaggacgcaaggaggaaaccgagguucucuggaccucuaauagcaucguggucuucuguggcacauccgggaccuacggaacaggcucuuggcccgauggggcugacauuaaccugaugccuaucuga

SEQ ID NO: 208754 - RNA, 1410 nt, Artificial Sequence
  derived and/or modified CDS sequence (opt5) from neuraminidase__InfluenzaA__ACO94686
augaaccccaaucagaagaucauuaccaucggcagcgugucccugacaauuucuacgaucugcuucuuuaugcaaauugccauccucaucaccacagucacccugcacuucaaacaguacgaguuuaacagcccuccgaauaaccagguuaugcuuugugaacccacaaccauugagagaaauaucacagaaauuguguaucugaccaacacgaccaucgagaaggaaauuugcccuaaacucgcugaguaccggaauugguccaagccccagugugacaucacaggguucgccccuuuuucuaaagauaacagcauucgccuguccgcgggaggcgacaucugggugaccagagagcccuaugucucuugcgauccugacaaguguuaccaauucgcucuugggcagggaacaacccugaauaacgugcauagcaaugauacgguucgggaccgcacaccguauagaacccuccugaugaacgaacugggcgugcccuuucaccucgggacaaagcaggucugcaucgccugguccucuagcuccugucaugauggaaaagccuggcugcacgugugcauuaccggcgacgauaagaaugcuaccgccagcuucaucuacaacggccggcuuguugacucuauuguguccuggagcaaagauauccugcgcacacaggagucugaaugugucugcauuaaugggacguguaccguggugaugacagacggauccgcuagcggcaaggccgauaccaaaauccucuuuaucgaggaggggaagauuguccauacauccacccugucuggaagcgcgcaacacguugaagagugcuccugcuauccuagauaccccggcgugcggugugugugccgcgacaacuggaaggggagcaacagaccuaucgucgacauuaauaucaaagaucacucuauuguguccagcuacguuuguucuggacuugugggcgacacgccccggaagaacgauagcuccucuagcggccauugccuggacccgaauaacgaagagggagggcacggcgucaaagggugggccuucgaugacggaaaugauguguggaugggccgcacaaucuccgaaaagagcagacucggguaugagaccuuuaaaguuaucgagggauggucuaacccuaaguccaaacugcagauuaaucgccaggugaucgucgaccggggcaacagaagcggcuacucugggauuuucuccguggaaggaaagagcuguaucaaucggugcuuuuaugucgagcugauuagaggccgcaaggaagagaccgaagugcucuggacauccaacucuaucguuguguucugugggaccagcggaacauacggcacgggguccuggcccgauggcgcugagauuaaucugaugccuaucuga

SEQ ID NO: 208755 - RNA, 1410 nt, Artificial Sequence; identical to SEQ ID NO: 208671
  derived and/or modified CDS sequence (opt5) from neuraminidase__InfluenzaA__ACO94697

SEQ ID NO: 208756 - RNA, 1413 nt, Artificial Sequence; identical to SEQ ID NO: 208704
  derived and/or modified CDS sequence (opt5) from neuraminidase__InfluenzaA__ACO94708

SEQ ID NO: 208757 - RNA, 1410 nt, Artificial Sequence
  derived and/or modified CDS sequence (opt5) from neuraminidase__InfluenzaA__ACO94719
augaaccccaaucagaagaucauuaccaucggcagcgugucccugacaauuucuacgaucugcuucuuuaugcaaauugccauccucaucaccacagucacccugcacuucaaacaguacgaguuuaacagcccuccgaauaaccagguuaugcuuugugaacccacaauuaucgagagaaauauuaccgaaaucguguaucugacaaacaccacgauugagaaggaaaucugcccuaaacucgcugaguaccggaauugguccaagccccagugugacauuaccggguucgccccuuuuucuaaagauaacagcauccgccuguccgcgggaggcgacaucugggugacaagagagcccuaugucucuugcgauccugacaaguguuaccaauucgcucuugggcagggaaccacacugaauaacgugcauagcaaugauaccguucgggaccgcacgccguauagaacacuccugaugaacgaacugggcgugcccuuucaccucgggaccaagcaggucugcauugccugguccucuagcuccugucaugauggaaaagccuggcugcacgugugcaucacaggcgacgauaagaaugcuaccgccagcuucauuuacaacggccggcuuguugacucuaucguguccuggagcaaagauauucugcgcacccaggagucugaaugugucugcaucaaugggacauguacgguggugaugaccgacggauccgcuagcggcaaggccgauacaaaaauccucuuuauugaggaggggaagaucguccauaccuccacacugucuggaagcgcgcaacacguugaagagugcuccugcuauccuagauaccccggcgugcggugugugugccgcgacaacuggaaggggagcaacagaccuauugucgacaucaauauuaaagaucacucuaucguguccagcuacguuuguucuggacuugugggcgacacgccccggaagaacgauagcuccucuagcggccauugccuggacccgaauaacgaagagggagggcacggcgucaaagggugggccuucgaugacggaaaugauguguggaugggccgcaccaucuccgaaaagagcagacucggguaugagacauuuaaaguuauugagggauggucuaacccuaaguccaaacugcagaucaaucgccaggugauugucgaccggggcaacagaagcggcuacucugggaucuucuccguggaaggaaagagcuguauuaaucggugcuuuuaugucgagcugaucagaggccgcaaggaagagaccgaagugcucuggaccuccaacucuauuguuguguucugugggacaagcggaaccuacggcacaggguccuggcccgauggcgcugagaucaaucugaugccuaucuga

SEQ ID NO: 208758 - RNA, 1410 nt, Artificial Sequence
  derived and/or modified CDS sequence (opt5) from neuraminidase__InfluenzaA__ACO94741
augaaccccaaucagaagaucauuaccaucggcagcgugucccugacaauuucuacgaucugcuucuuuaugcaaauugccauccucaucaccacagucacccugcacuucaaacaguacgaguuuaacagcuccccuaauaaccagguuaugcuuugugaaccgacaauuaucgagagaaauauuaccgaaaucguguaucugacaaacaccacgauugagaaggaaaucugccccaaacucgcugaguaccggaauuggucuaagccucagugugacauuaccggguucgcccccuuuagcaaagauaacuccauccgccugucugcgggaggcgacaucugggugacaagagagccuuaugucagcugcgaucccgacaaguguuaccaauucgcucuugggcagggaaccacacugaauaacgugcauuccaauaacaccguucgggaucgcacgccuuauagaacacuccugaugaaugaacugggcgugccguuucaccucgggaccaagcaggucugcauugccuggucuagcuccagcugucaugacggaaaagccuggcugcacgugugcaucacaggcgaugacaagaacgcuaccgccucuuucauuuacaauggccggcuuguugauuccaucgugagcuggucuaaagagauucugcgcacccaggaauccgagugugucugcaucaacgggacauguacgguggugaugaccgacggaagcgcuuccggcaaggccgauacaaaaauccucuuuauugaggaagggaagaucguccauaccucuacacugagcggauccgcgcaacacguugaggaaugcagcugcuaucccagauacccuggcgugcggugugugugccgcgacaacuggaaggggucuaauagacccauugucgauaucaacauuaaagaccacuccaucgugagcucuuacguuuguagcggacuugugggcgacaccccucggaagaaugauuccucuagcuccagccauugccuggaccccaacaaugaggaaggcgggcacggagucaaaggcugggccuucgaugacgggaacgauguguggaugggacgcacgaucucugagaaguccagacucggcuaugagacauuuaaaguuauugaaggguggagcaauccgaagucuaaacugcagaucaaccgccaggugauugucgaccggggaaauagauccggcuacagcggcaucuucuccguggagucuaagagcuguauuaaccggugcuuuuaugucgaacugaucagagggcgcaaggaggaaaccgaggugcucuggaccuccaauucuauuguuguguucuguggaacaagcggcaccuacgggacaggauccuggccugauggcgcugacaucaaccugaugcccaucuga

SEQ ID NO: 208759 - RNA, 1410 nt, Artificial Sequence; identical to SEQ ID NO: 208675
  derived and/or modified CDS sequence (opt5) from neuraminidase__InfluenzaA__ACO94763

SEQ ID NO: 208760 - RNA, 1410 nt, Artificial Sequence
  derived and/or modified CDS sequence (opt5) from neuraminidase__InfluenzaA__ACO94774
augaaccccaaucagaagaucauuaccaucggcagcgugucccugacaauuucuacgaucugcuucuuuaugcaaauugccauccucaucaccacagucacccugcacuucaaacaguacgaguuuaacagcccuccgaauaaccagguuaugcuuugugaacccacaauuaucgagagaaauauuaccgaaaucguguaucugacaaacaccacgauugagaaggaaaucugcccuaaacucgcugaguaccggaauugguccaagccccagugugacauuaccggguucgccccuuuuucuaaagauaacagcauccgccuguccgcgggaggcgacaucugggugacaagagagcccuaugucucuugcgauccugacaaguguuaccaauucgcucuugggcagggaaccacacugaauaacgugcauagcaauaacaccguucgggaucgcacgccguauagaacacuccugaugaaugaacugggcgugcccuuucaccucgggaccaagcaggucugcauggccugguccucuagcuccugucaugacggacgggccuggcugcacgugugcauuacaggcgaugacaaaaacgcuaccgccagcuucaucuacaauggccgccuuguugauucuguggucuccuggagcaaggagauucugagaacccaggaaucugagugugugugcaucaacgggacauguacgguggucaugaccgacggauccgcuagcggcaaagccgauacaaagauucucuuuaucgaggaagggaaaaucguucauaccuccacacugucuggaagcgcgcaacacguggaggaaugcuccugcuauccucgguaccccggcgugcgcugugucugcagagacaacuggaaggggagcaaucggccuauuguggauaucaacauuaaggaccacucuaucguuuccagcuacguguguucuggacuugucggcgacacgccccgcaaaaaugauagcuccucuagcucccauugccuggacccgaacaaugaggaaggcgggcacggagugaagggcugggccuucgaugacgggaacgauguuuggaugggaagaaccauuagcgagaaaucucggcucggcuaugagacauuuaaggugaucgaagggugguccaauccuaaaagcaagcugcagaucaaccgccaggucauuguggacagaggaaaucggucuggcuacuccggcaucuucagcgucgaggggaaauccuguauuaacagaugcuuuuauguggaacugauccgcggacggaaggaggaaaccgagguucucuggaccucuaauagcauuguggucuucuguggcacauccgggaccuacggaacaggcucuuggcccgauggggcugacaucaaccugaugccuauuuga

SEQ ID NO: 208761 - RNA, 1410 nt, Artificial Sequence
  derived and/or modified CDS sequence (opt5) from neuraminidase__InfluenzaA__ACO94785
augaaccccaaucagaagaucauuaccaucggcagcgugucccugacaauuucuacgaucugcuucuuuaugcaaauugccauccucaucaccacagucacccugcacuucaaacaguacgaguuuaacagcccuccgaauaaccagguuaugcuuuguaagcccacaauuaucgaaagaaauauuaccgagaucguguaucugacaaacaccacgauugaaaaagagaucugcccuaagcucgcugaauaccggaauugguccaaaccccagugugacauuaccggguucgccccuuuuucuaaggauaacagcauccgccuguccgcgggaggcgacaucugggugacaagagagcccuaugucucuugcgauccugacaaguguuaccaauucgcucuugggcagggaaccacacugaauaacgugcauagcaauaacaccguucgggaucgcacgccguauagaacacuccugaugaaugagcugggcgugcccuuucaccucgggaccaaacaggucugcauugccugguccucuagcuccugucaugacggaaaggccuggcugcacgugugcaucacaggcgaugacaaaaacgcuaccgccagcuucauuuacaauggccggcuuguugauucuguggucuccuggagcaaggaaauccugcgcacccaggagucugaaugugugugcauuaacgggacauguacgguggucaugaccgacggauccgcuagcggcaaagccgauacaaagauccucuuuaucgaggaggggaagauuguucauaccuccacacugucuggaagcgcgcaacacguggaagagugcuccugcuauccuagauaccccggcgugcggugugucugccgcgacaacuggaaagggagcaauagaccuaucguggauauuaacaucaaggaccacucuauuguuuccagcuacguguguucuggacuugucggcgacacgccccggaaaaaugauagcuccucuagcucccauugccuggacccgaacaaugaagagggcgggcacggagugaagggcugggccuucgaugacgggaacgauguuuggaugggacgcaccaucagcgaaaaaucuagacucggcuaugagacauuuaaggugaucgaggggugguccaauccuaaaagcaagcugcagauuaaccggcaggucaucguggaccgcggaaauagaucuggcuacuccggcauuuucagcgucgaagggaaguccuguaucaaccggugcuuuuauguggagcugauuagaggacgcaaagaagagaccgaaguucucuggaccucuaauagcaucguggucuucuguggcacauccgggaccuacggaacaggcucuuggcccgauggggcugacauuaaccugaugccuaucuga

SEQ ID NO: 208762 - RNA, 1410 nt, Artificial Sequence; identical to SEQ ID NO: 208671
  derived and/or modified CDS sequence (opt5) from neuraminidase__InfluenzaA__ACO94796

SEQ ID NO: 208763 - RNA, 1413 nt, Artificial Sequence
  derived and/or modified CDS sequence (opt5) from neuraminidase__InfluenzaA__ACO94807
augaaccccaaucagaagaucauuaccaucggcagcauuuccaucgccauugggaucaucucucugauucuccaaaucggaaacauuaucagcauuugggcuucccacucuauccagacaggcagccagaaucauacggggauuugcaaccagagaaucaucaccuacgaaaauuccacaugggugaacaauaccuaugucaacauuaauaacacaaauguuguggccgagaaagacaagaccucugugacacuggcgggaaacagcucccuuuguagcaucucuggcugggcuauuuacaccaaagauaauuccauccggauugggagcaagggagacgucuucgugauccgcgagccuuuuaucucuugcucccaccuggaauguagaacguucuuucucacccaaggcgcccugcuuaacgauaaacauagcaauggcacaguuaaggaccggucuccguaucgcgcccugauguccugcccccucggggaggcuccuagccccuacaacuccagauucgaaucuguggccuggagcgcuuccgccugucacgauggaaugggcuggcugaccauugggaucagcggaccugacaacggcgcggucgccgugcugaaguauaaugggauuaucacagagaccauuaaaucuuggaagaaacggauccuccgcacgcaggaguccgaaugcguuuguaugaacggaagcugcuuuacaaucaugaccgauggccccucuaauggcacagcuagcuacaagauuuucaaaaucgagaaggggaaggugaccaaaaccauugaacugaacgccccuaauuuucauuaugaggaguguuccugcuacccggacacaggaacggucaugugugugugcagagauaacuggcacggcucuaaucggcccugggugagcuucaaccagaaucuugacuaccagaucggguauauuugcuccggagucuuuggcgauaacccucgccccaaggacggggaaggaagcuguaauccuguuaccguggauggcgcugacggcgugaaaggguucucuuacaaguauggaaacggcgucuggaucgggagaacaaaauccaaucggcugcgcaagggauuugagaugauuugggaccccaacggcuggaccaauacagauagcgacuucucugugaaacaagauguuguggccaucaccgacugguccggguacagcggcuccuuuguccagcacccggaacucacgggacuggauugcaucagaccuuguuucuggguggagcuuguucggggccugccccgcgaaaacacaaccauuuggaccucugggagcuccaucucuuucugcggagugaacagcggcacagcgaauugguccuggccugacggggccgagcuccccuuuaccauugauaaguga

SEQ ID NO: 208764 - RNA, 1410 nt, Artificial Sequence; identical to SEQ ID NO: 208486
  derived and/or modified CDS sequence (opt5) from neuraminidase__InfluenzaA__ACO94818

SEQ ID NO: 208765 - RNA, 1365 nt, Artificial Sequence; identical to SEQ ID NO: 207791
  derived and/or modified CDS sequence (opt5) from neuraminidase__InfluenzaA__ACO94829

SEQ ID NO: 208766 - RNA, 1365 nt, Artificial Sequence; identical to SEQ ID NO: 207791
  derived and/or modified CDS sequence (opt5) from neuraminidase__InfluenzaA__ACO94840

SEQ ID NO: 208767 - RNA, 1410 nt, Artificial Sequence
  derived and/or modified CDS sequence (opt5) from neuraminidase__InfluenzaA__ACO94851
augaaccccaaucagaagaucauuaccaucggcagcgugucccugacaauuucuacgaucugcuucuuuaugcaaaccgccauucucaucacaaccgucacacugcacuucaaacaguacgaguuuaacagcccuccgaauaaccagguuaugcuuugugaacccaccaucauugagagaaauaucacagaaauuguguaucugaccaacacgaccaucgagaaggaaauuugcccuaaacucgcugaguaccggaauugguccaagccccagugugacaucacaggguucgccccuuuuucuaaagauaacagcauucgccuguccgcgggaggcgacaucugggugaccagagagcccuaugucucuugcgauccugacaaguguuaccaauucgcucuugggcagggaacaacccugaauaacgugcauagcaaugauaucguucgggaccgcacgccguauagaacacuccugaugaacgaacugggcgugcccuuucaccucgggaccaagcaggucugcauugccugguccucuagcuccugucaugauggaaaagccuggcugcacgugugcaucacaggcgacgauaagaaugcuaccgccagcuucauuuacaacggccggcuuguugacucuaucguguccuggagcaaagagauucugcgcacccaggaaucugagugugucugcaucaaugggacauguacgguggugaugaccgauggauccgcuagcggcaaggccgacacaaaaauccucuuuauugaggaagggaagaucguccauaccuccacacugucuggaagcgcgcaacacguugaggaaugcuccugcuauccuagauaccccggcgugcggugugugugccgcgauaacuggaaggggagcaacagaccuauugucgacaucaauauuaaagaccacucuaucguguccagcuacguuuguucuggacuugugggcgauacgccccggaagaacgacagcuccucuagcucccauugccuggauccgaauaacgaggaaggcgggcacggagucaaaggcugggccuucgacgaugggaaugacguguggaugggacgcaccaucagcgagaagucuagacucggcuaugagacauuuaaaguuauugaagggugguccaacccuaagagcaaacugcagaucaaucgccaggugauugucgaucggggaaacagaucuggcuacuccggcaucuucagcguggaggggaaguccuguauuaaucggugcuuuuaugucgaacugaucagaggacgcaaggaggaaaccgaggugcucuggaccucuaacagcauuguuguguucuguggcacauccgggaccuacggaacaggcucuuggcccgacggggcugauaucaaucugaugccuaucuga

SEQ ID NO: 208768 - RNA, 1413 nt, Artificial Sequence; identical to SEQ ID NO: 208704
  derived and/or modified CDS sequence (opt5) from neuraminidase__InfluenzaA__ACO94873

SEQ ID NO: 208769 - RNA, 1410 nt, Artificial Sequence
  derived and/or modified CDS sequence (opt5) from neuraminidase__InfluenzaA__ACO94884
augaaccccaaucagaagaucauuaccaucggcagcgugucccugacaauugccacgaucugcuuccucaugcaaauugcuauccuggucaccacaguuacccuucacuuuaaacagcaugaguguaacucuccuccgaauaaccaggugaugcugugcgaacccacaaucauugagagaaauaucaccgaaauuguguaccucacaaacaccacgaucgagaaggaaauguguccuaaacuggccgaguaucggaauuggagcaagccccagugcaacauuaccggguucgcgccuuuuuccaaagacaauucuauccgccuuagcgcuggaggcgauauuugggucacaagagagcccuacguguccugugacccugauaagugcuaucaauucgcccuggggcagggaaccacacucaacaauggccacucuaacgacaccguucaugaucggacgccguaccgcacacugcugaugaaugaacucggggugcccuuucaccugggaaccagacaggucuguaucgccuggagcuccagcucuugccaugacggcaaggcuuggcuucacguguguguuacaggcgaugacaaaaacgccaccgcuuccuucaucuauaaugggcggcugguggauagcauuggaucuugguccaagaaaauccuccgcacccaggagagcgaaugcgucuguauuaacggcacaugcacgguggugaugaccgacgggucugccuccggaaaggcggauacaaaaauccuguuuauugaggagggcaagaucguccacaucagcacccuuuccgggucugcccaacauguugaagagugcagcuguuacccuagauaucccggagugcggugcgugugucgcgacaacuggaagggcuccaauagaccuauugucgauaucaacgugaaagacuacagcauuguuucuuccuacgugugcagcggccuggucggggacacaccccggaagaaugauucuuucagcuccucucacugucucgacccgaacaaugaagagggaggccauggggugaaaggaugggcuuuugaugacggcaacgauguuuggauggggcgcaccaucagcgaaaagcugagauccggauaugagacguucaaagugauugagggcuggagcaagccuaauucuaaacugcagaucaaccggcaggucaucguggaacgcggcaauagauccggguacagcggaaucuuuucugucgagggcaaguccugcauuaaccgguguuucuauguggaacucauuagagggcgcaaggaggaaacagagguuugguggaccagcaauuccaucguggucuuuugcggaaccucuggcacauacgggaccggcagcuggcccgacggagccgauauuaaccugaugccuaucuga

SEQ ID NO: 208770 - RNA, 1410 nt, Artificial Sequence; identical to SEQ ID NO: 206786
  derived and/or modified CDS sequence (opt5) from neuraminidase__InfluenzaA__ACO94906

SEQ ID NO: 208771 - RNA, 1410 nt, Artificial Sequence; identical to SEQ ID NO: 206217
  derived and/or modified CDS sequence (opt5) from neuraminidase__InfluenzaA__ACO94917

SEQ ID NO: 208772 - RNA, 1410 nt, Artificial Sequence; identical to SEQ ID NO: 206786
  derived and/or modified CDS sequence (opt5) from neuraminidase__InfluenzaA__ACO94928

SEQ ID NO: 208773 - RNA, 1410 nt, Artificial Sequence; identical to SEQ ID NO: 206217
  derived and/or modified CDS sequence (opt5) from neuraminidase__InfluenzaA__ACO94939

SEQ ID NO: 208774 - RNA, 1410 nt, Artificial Sequence
  derived and/or modified CDS sequence (opt5) from neuraminidase__InfluenzaA__ACO94950
augaaccccaaucagaagaucauuaccaucggcagcgugucccugacaauuucuacgaucugcuuccucaugcaaauugccauccugaucaccacagucacccuucacuuuaaacaguacgaguucaacagcccuccgaauaaccagguuaugcugugugaacccacaauuaucgagagaaauauuaccgaaaucguguaucucacaaacaccacgauugagaaggaaaucugcccuaaacuggcugaguaccggaauugguccaagccccagugugacauuaccggguuugccccuuucucuaaagauaacagcauccgccuuuccgcgggaggcgacaucugggugacaagagagcccuaugucucuugcgauccugacaaguguuaccaauuugcucuggggcagggaaccacacucaauaacgugcauagcaaugauaccguucacgaccggacgccguaucgcacacugcugaugaacgaacucggcgugcccuuccaucuggggaccaagcaggucugcauugccugguccucuagcuccugucacgauggaaaagccuggcuucaugugugcguuacaggcgacgauaagaaugcuaccgccagcuuuaucuacaacggcagacugguggacucuauugucuccuggagcaaaaagauccuccggacccaggagucugaaugugugugcauuaaugggacauguacgguggucaugaccgauggauccgcuagcggcaaagccgacacaaagauccuguucaucgaggaggggaagauuguucacaccuccacacuuucuggaagcgcgcaacacguggaagagugcuccugcuauccucgcuaccccggcgugagaugugucugccgggauaacuggaaagggagcaaccgcccuaucguggacauuaauaucaaggacuacucuauuguuuccagcuauguguguucuggacuggucggcgauacccccagaaagaacgacagcuccucuagcucccauugccucgauccgaauaacgaagagggcgggcacggagugaaaggcugggccuuugacgaugggaaugacguuuggaugggacggacgaucagcgaaaaacugcgcucuggcuacgagacauucaaggugaucgaggggugguccaacccuaauagcaaacugcagauuaacagacaggucaucguggaucggggaaaucgcucuggcuauuccggcauuuuuagcgucgaagggaaguccuguaucaacagaugcuucuacguggagcucauucggggaagaaaggaagagaccgaaguucuguggaccucuaauagcaucguggucuuuuguggcacauccgggaccuauggaacaggcucuuggcccgacggggcugauauuaaccuuaugccuaucuga

SEQ ID NO: 208775 - RNA, 1410 nt, Artificial Sequence
  derived and/or modified CDS sequence (opt5) from neuraminidase__InfluenzaA__ACO94961
augaaccccaaucagaagaucauuaccaucggcagcgugucccugacaauuucuacgaucugcuucuuuaugcaaauugccauccucaucaccacagucacccugcacuucaaacaguacgaguuuaacagcccuccgaauaaccagguuaugcuuugugaacccacaauuaucgagagaaauauuaccgaaaucguguaucugacaaacaccacgauugagaaggaacucugcccuaaacuggcugaguaccggaauugguccaagccccagugugacaucaccggguucgccccuuuuucuaaagauaacagcauucgccuuuccgcgggaggcgacaucugggugacaagagagcccuaugucucuugcgauccugacaaguguuaccaauucgcucuggggcagggaaccacacucaauaacgugcauagcaaugauaccguucacgaccggacgccguaucgcacacugcugaugaacgaacucggcgugcccuuucaucuggggaccaagcaggucugcaucgccugguccucuagcuccugucacgauggaaaagccuggcuucaugugugcguuacaggcgacgauaagaaugcuaccgccagcuucauuuacaacggcagacugguggacucuaucgucuccuggagcaaaaagauucuccggacccaggagucugaaugugugugcaucaaugggacauguacgguggucaugaccgauggauccgcuagcggcaaagccgacacaaagauucuguuuaucgaggaggggaagaucguucacaccuccacacuuucuggaagcgcgcaacacguggaagagugcuccugcuauccucgcuaccccggcgugagaugugucugccgggauaacuggaaagggagcaaccgcccuauuguggacaucaauauuaaggacuacucuaucguuuccagcuauguguguucuggacuggucggcgauacccccagaaagaacgacagcuccucuagcucccauugccucgauccgaauaacgaagagggcgggcacggagugaaaggcugggccuucgacgaugggaaugacguuuggaugggacggacgauuagcgaaaaacugcgcucuggcuacgagacauuuaaggugaucgaggggugguccaacccuaauagcaaacugcagaucaacagacaggucauuguggaucggggaaaucgcucuggcuauuccggcaucuucagcgucgaagggaaguccuguauuaacagaugcuuuuacguggagcucauccggggaagaaaggaagagaccgaaguucuguggaccucuaauagcauuguggucuucuguggcacauccgggaccuauggaacaggcucuuggcccgacggggcugauaucaaccuuaugccuauuuga

SEQ ID NO: 208776 - RNA, 1410 nt, Artificial Sequence
  derived and/or modified CDS sequence (opt5) from neuraminidase__InfluenzaA__ACO94972
augaaccccaaucagaagaucauuaccaucggcagcgugucccugacaauuucuacgaucugcuucuuuaugcaaauugccauccucaucaccacagucacccugcacuucaaacaguacgaguuuaacagcccuccgaauaaccagguuaugcuuugugaacccacaauuaucgagagaaauauuaccgaaaucguguaucugacaaacaccacgauugagaaggaaaucugcccuaaacucgcugaguaccggaauugguccaagccccaguguaacauuaccggguucgccccuuuuucuaaagacaauagcauccgccuguccgcgggaggcgauaucugggugacaagagagcccuaugucucuugcgacccugauaaguguuaccaauucgcucuugggcagggaaccacacugaacaaugugcauagcaacgacaccguucacgaucggacgccguaucgcacacuccugaugaaugaacugggcgugcccuuucaucucgggaccaagcaggucugcauugccugguccucuagcuccugucacgacggaaaagccuggcugcaugugugcguuacaggcgaugacgagaacgcuaccgccagcuucaucuacaauggcagacuuguggauucugucguguccuggagcaagaaaauucugcggacccaggaaucugagugugugugcaucaacgggacauguacggucguuaugaccgacggauccgcuagcggcaaggccgauacaaaaauucucuuuaucgaggaagggaagaucgugcacaccuccacacugucuggaagcgcgcaacacguggaggaaugcuccugcuauccucgcuaccccggcgucagaugugugugccgggacaacuggaaggggagcaaucgcccuauuguugauaucaacauuaaagacuacucuaucguguccagcuaugucuguucuggacuugugggcgacacccccagaaagaaugauagcuccucuagcucccauugccuggacccgaacaaugaggaaggcgggcacggaguuaaaggcugggccuucgaugacgggaacgauguguggaugggacggacgauuagcgagaagcuccgcucuggcuacgagacauuuaaagucaucgaagggugguccaauccuaacagcaagcugcagaucaauagacaggugauugucgaccggggaaaccgcucuggcuauuccggcaucuucagcguggaggggaaauccuguauuaauagaugcuuuuacguugaacugauccggggaagaaaccaggagaccgaagugcucuggaccucuaauagcauugucguguucuguggcacauccgggaccuauggaacaggcucuuggcccgauggggcugacaucaaccugaugccuauuuga

SEQ ID NO: 208777 - RNA, 1410 nt, Artificial Sequence
  derived and/or modified CDS sequence (opt5) from neuraminidase__InfluenzaA__ACO95156
augaaccccaaucagaagaucauuaccaucggcagcgugucccugacaauuucuacgaucugcuucuuuaugcaaauugccauccucaucaccacagucacccugcacuucaaacaguacgaguuuaacagcccuccgaauaaccagguuaugcuuugugaacccacaauuaucgagagaaauauuaccgaaaucguguaucugacaaacaccacgauugagaaggaaaccugcccuaaacucgcugaguaccggaauugguccaagccccaguguaacaucacaggguucgccccuuuuucuaaagacaauagcauucgccuguccgcgggaggcgauaucugggugaccagagagcccuaugucucuugcgacccugauaaguguuaccaauucgcucuugggcagggaacaacccugaacaaugugcauagcaacgacacgguucacgaucggacaccguaucgcacccuccugaugaaugaacugggcgugcccuuucaucucgggacaaagcaggucugcaucgccugguccucuagcuccugucacgacggaaaagccuggcugcaugugugcauuaccggcgaugacaagaacgcuaccgccagcuucaucuacaauggcagacuuguugauucuguggucuccuggagcaaaaagauucugcggacacaggagucugaaugugugugcaucaacgggacguguaccguggucaugacagacggauccgcuagcggcaaagccgauaccaagauucucuuuaucgaggaggggaagaucguucacacauccacccugucuggaagcgcgcaacacguggaagagugcuccugcuauccucgcuaccccggcgugagaugugucugccgggacaacuggaaagggagcaaucgcccuauuguggauaucaacauuaaggacuacucuaucguuuccagcuauguguguucuggacuugucggcgacacgccccggaaaaaugauagcuccucuagcucccauugccuggacccgaacaaugaagagggcgggcacggagugaagggcugggccuucgaugacgggaacgauguuuggaugggaagaacaauuagcgaaaaacuccgcucuggcuacgagaccuuuaaggugaucgaggggugguccaauccuaacagcaaacugcagaucaauagacaggucauuguggaccggggaaaccgcucuggcuauuccggcaucuucagcgucgaagggaaguccuguauuaauagaugcuuuuacguggagcugauccggggaagaaaccaggaaaccgagguucucuggacaucuaauagcauuguggucuucuguggcaccuccgggacauauggaacgggcucuuggcccgauggggcugacaucaaccugaugccuauuuga

SEQ ID NO: 208778 - RNA, 1410 nt, Artificial Sequence; identical to SEQ ID NO: 206399
  derived and/or modified CDS sequence (opt5) from neuraminidase__InfluenzaA__ACO95174

SEQ ID NO: 208779 - RNA, 1410 nt, Artificial Sequence; identical to SEQ ID NO: 206399
  derived and/or modified CDS sequence (opt5) from neuraminidase__InfluenzaA__ACO95185

SEQ ID NO: 208780 - RNA, 1410 nt, Artificial Sequence
  derived and/or modified CDS sequence (opt5) from neuraminidase__InfluenzaA__ACO95196
augaaccccaaucagaagaucauuaccaucggcagcgugucccugacaauuucuacgaucugcuucuuuaugcaaauugccauccucaucaccacagucacccugcacuucaaacaguacgaguuuaacagcccuccgaauaaccagguuaugcuuugugaacccacaauuaucgagagaaauauuaccgaaaucguguaucugacaaacaccacgauugagaaggaaaucugcccuaaacucgcugaguaccggaauugguccaagccccaguguaacauuaccggguucgccccuuuuucuaaagacaauagcauccgccuguccgcgggaggcgauaucugggugacaagagagcccuaugucucuugcgacccugauaaguguuaccaauucgcucuugggcagggaaccacacugaacaaugugcauagcaacgacaccauucacgaucggacgccguaucgcacacuccugaugaaugaacugggcguucccuuucaucucgggaccaaacaggugugcaucgccugguccucuagcuccugucacgacggaaaagccuggcugcaugucugcgugacaggcgaugacaagaacgcuaccgccagcuucauuuacaauggcagacuuguugauucuguggucuccuggagcaaaaagauccugcggacccaggagucugaaugugugugcauuaacgggacauguacgguggucaugaccgacggauccgcuagcggcaaagccgauacaaagauccucuuuaucgaggaggggaagauuguucacaccuccacacugucuggaagcgcgcaacacguggaagagugcuccugcuauccucgcuaccccggcgugagaugugucugccgggacaacuggaaagggagcaaucgcccuaucguggauauuaacaucaaggacuacucuauuguuuccagcuauguguguucuggacuugucggcgacacccccagaaagaaugauagcuccucuagcucccauugccuggacccgaacaaugaagagggcgggcacggagugaagggcugggccuucgaugacgggaacgauguuuggaugggacggacgaucagcgaaaaacuccgcucuggcuacgagacauuuaaggugaucgaggggugguccaauccuaacagcaaacugcagauuaauagacaggucaucguggaccggggaaaccgcucuggcuauuccggcauuuucagcgucgaagggaaguccuguaucaauagaugcuuuuacguggagcugauucggggaagaaaccaggaaaccgagguucucuggaccucuaauagcaucguggucuucuguggcacauccgggaccuauggaacaggcucuuggcccgauggggcugacauuaaccugaugccuaucuga

SEQ ID NO: 208781 - RNA, 1410 nt, Artificial Sequence; identical to SEQ ID NO: 206399
  derived and/or modified CDS sequence (opt5) from neuraminidase__InfluenzaA__ACO95207

SEQ ID NO: 208782 - RNA, 1410 nt, Artificial Sequence; identical to SEQ ID NO: 206399
  derived and/or modified CDS sequence (opt5) from neuraminidase__InfluenzaA__ACO95218

SEQ ID NO: 208783 - RNA, 1410 nt, Artificial Sequence; identical to SEQ ID NO: 206402
  derived and/or modified CDS sequence (opt5) from neuraminidase__InfluenzaA__ACO95229

SEQ ID NO: 208784 - RNA, 1410 nt, Artificial Sequence; identical to SEQ ID NO: 206784
  derived and/or modified CDS sequence (opt5) from neuraminidase__InfluenzaA__ACO95240

SEQ ID NO: 208785 - RNA, 1410 nt, Artificial Sequence; identical to SEQ ID NO: 206645
  derived and/or modified CDS sequence (opt5) from neuraminidase__InfluenzaA__ACO95262

SEQ ID NO: 208786 - RNA, 1410 nt, Artificial Sequence; identical to SEQ ID NO: 208583
  derived and/or modified CDS sequence (opt5) from neuraminidase__InfluenzaA__ACO95273

SEQ ID NO: 208787 - RNA, 1410 nt, Artificial Sequence; identical to SEQ ID NO: 208675
  derived and/or modified CDS sequence (opt5) from neuraminidase__InfluenzaA__ACO95306

SEQ ID NO: 208788 - RNA, 1413 nt, Artificial Sequence
  derived and/or modified CDS sequence (opt5) from neuraminidase__InfluenzaA__ACO95385
augaaccccaaucagaagaucauuaccaucggcagcauuuccaucgccauugggaucaucucucugaugcuccaaauuggaaacaucauuagcaucugggcuucccacucuauucagacaggcagccagaauaacacggggaucugcaaucagagaauuaucaccuacgagaacuccacaugggugaaucauaccuaugucaacaucaauaacacaaauguuguggccggagaagacaaaaccucugugacacuggcgggcaacagcucccuuuguagcauuucugggugggcuaucuacaccaaggauaauuccauucggaucggaagcaaaggcgacgucuucgugauucgcgagccuuuuaucucuugcucccaccuggaauguagaacguucuuucucacccaaggcgcccugcuuaacgauaagcauagcaaugggacaguuaaagaccggucuccguaucgcgcccugauguccugcccccucggagaggcuccuagccccuacaacuccaaguucgaaucuguggccuggagcgcuuccgccugucacgauggcaugggguggcugaccaucggaauuagcggcccugacaacggggcggucgccgugcugaaguauaauggaaucauuacaggcaccaucaaaucuuggaagaaacagauucucagaacgcaggaguccgagugcguuuguaugaacggcagcugcuuuacaaucaugaccgaugggcccucugacaaggcugccagcuacaaaaucuucaagauugaaaagggaaaagugacaaaguccaucgagcugaaugcuccuaacuuucauuaugaagaguguucuugcuacccggauaccggcauugucaugugugugugccgggacaauuggcacgggagcaaccgccccuggguguccuucaaucagaaccuugauuaccaaaucggauauauuugcagcggcgucuuuggggacaauccuagacccgaggauggagaaggcucuuguaacccuguuaccguggacggcgccaauggggugaaaggauucuccuacaaguaugacaacggcgucuggaucgggcggacaaaaagcaaucgccugagaaagggauuugagaugauuugggaucccaacggcuggacgaauaccgacucugauuucuccgugaaacaggacguuguggcgaucacagauuggagcggguacuccggcucuuuuguccagcacccggaacucaccggacuggacugcauccggccuuguuucuggguggagcuuguucgcggccugcccagagaaaacacaaccauuuggacgagcggguccucuaucagcuucugcggagugaacuccgauacagccaauuggagcuggccugacggcgcugagcuccccuuuaccauugauaaguga

SEQ ID NO: 208789 - RNA, 1413 nt, Artificial Sequence; identical to SEQ ID NO: 208704
  derived and/or modified CDS sequence (opt5) from neuraminidase__InfluenzaA__ACO95407

SEQ ID NO: 208790 - RNA, 1413 nt, Artificial Sequence; identical to SEQ ID NO: 208704
  derived and/or modified CDS sequence (opt5) from neuraminidase__InfluenzaA__ACO95418

SEQ ID NO: 208791 - RNA, 1410 nt, Artificial Sequence; identical to SEQ ID NO: 206217
  derived and/or modified CDS sequence (opt5) from neuraminidase__InfluenzaA__ACO95429

SEQ ID NO: 208792 - RNA, 1410 nt, Artificial Sequence; identical to SEQ ID NO: 206786
  derived and/or modified CDS sequence (opt5) from neuraminidase__InfluenzaA__ACO95440

SEQ ID NO: 208793 - RNA, 1410 nt, Artificial Sequence
  derived and/or modified CDS sequence (opt5) from neuraminidase__InfluenzaA__ACO95462
augaaccccaaucagaagaucauuaccaucggcagcgugucccugacaauuucuacgaucugcuucuuuaugcaaauugccauccucaucaccacagucacccugcacuucaaacaguacgaguuuaacagcccuccgaauaaccagguuaugcuuugugaacccacaauuaucgagagaaauauuaccgaaaucguguaucugacaaacaccacgauugagaaggaaaucugcccuaaacucgcugaguaccggaauugguccaagccccaguguaacauuaccggguucgccccuuuuucuaaagacaauagcauccgccuguccgcgggaggcgauaucugggugacaagagagcccuaugucucuugcgacccugauaaguguuaccaauucgcucuugggcagggaaccacacugaacaaugugcauagcaacgacaccguucacgaucggacgccguaucgcacacuccugaugaaugaacugggcgugcccuuucaucucgggaccaagcaggucugcauugccugguccucuagcuccugucacgacggaaaagccuggcugcaugugugcguuacaggcgaugacaagaacgcuaccgccagcuucaucuacaauggcagacuuguggauucuauugucuccuggagcaaagagauccugcggacccaggaaucugagugugugugcauuaacgggacauguacgguggucaugaccgacggauccgcuagcggcaaggccgauacaaaaauccucuuuaucgaggaagggaagauuguucacaccuccacacugucuggaagcgcgcaacacguggaggaaugcuccugcuauccucgcuaccccggcgugagaugugucugccgggacaacuggaaggggagcaaucgcccuaucguggauauuaacaucaaagacuacucuauuguuuccagcuauguguguucuggacuugucggcgacacccccagaaagaaugauagcuccucuagcucccauugccuggacccgaacaaugaggaaggcgggcacggagugaaaggcugggccuucgaugacgggaacgauguuuggaugggacggacgaucagcgagaagcuccgcucuggcuacgagacauuuaaagugaucgaagggugguccaauccuaacagcaagcugcagauuaauagacaggucaucguggaccggggaaaccgcucuggcuauuccggcauuuucagcgucgaggggaaauccuguaucaauagaugcuuuuacguggaacugauucggggaagaaaggaggaaaccgagguucucuggaccucuaacagcaucguggucuucuguggcacauccgggaccuauggaacaggcucuuggcccgauggggcugacauuaaucugaugcuuaucuga

SEQ ID NO: 208794 - RNA, 1410 nt, Artificial Sequence; identical to SEQ ID NO: 206784
  derived and/or modified CDS sequence (opt5) from neuraminidase__InfluenzaA__ACO95484

SEQ ID NO: 208795 - RNA, 1410 nt, Artificial Sequence; identical to SEQ ID NO: 206784
  derived and/or modified CDS sequence (opt5) from neuraminidase__InfluenzaA__ACO95495

SEQ ID NO: 208796 - RNA, 1410 nt, Artificial Sequence; identical to SEQ ID NO: 206784
  derived and/or modified CDS sequence (opt5) from neuraminidase__InfluenzaA__ACO95506

SEQ ID NO: 208797 - RNA, 1410 nt, Artificial Sequence
  derived and/or modified CDS sequence (opt5) from neuraminidase__InfluenzaA__ACO95517
augaaccccaaucagaagaucauuaccaucggcagcgugucccugacaauuucuacgaucugcuucuuuaugcaaauugccauccucaucaccacagucacccugcacuucaaacaguacgaguuuaacagcccuccgaauaaccagguuaugcuuugugaacccacaauuaucgagagaaauauuaccgaaaucguguaucugacaaacaccacgauugagaaggaaaucugcccuaaacucgcugaguaccggaauugguccaagccccaguguaacauuaccggguucgccccuuuuucuaaagacaauagcauccgccuguccgcgggaggcgauaucugggugacaagagagcccuaugucucuugcgacccugauaaguguuaccaauucgcucuugggcagggaaccacacugaacaaugugcauagcaacgacaccguucacgaucggacgccguaucgcacacuccugaugaaugaacugggcgugcccuuucaucucgggaccaagcaggucugcauugccugguccucuagcuccugucacgacggaaaagccuggcugcaugugugcguuacaggcgaugacaagaacgcuaccgccagcuucaucuacaauggcagacuuguggauucuauugucuccuggagcaaagagauccugcggacccaggaaucugagugugugugcauuaacgggacauguacgguggucaugaccgacggauccgcuagcggcaaggccgauacaaaaauccucuuuaucgaggaagggaagauuguucacaccuccacacugucuggaagcgcgcaacacguggaggaaugcuccugcuauccucgcuaccccggcgugagaugugucugccgggacaacuggaaggggagcaaucgcccuaucguggauauuaacaucaaagacuacucuauuguuuccagcuauguguguucuggacuugucggcgacacccccagaaagaaugauagcuccucuagcucccauugccuggacccgaacaaugaggaaggcgggcacggagugaaaggcugggccuucgaugacgggaacgauguuuggaugggacggacgaucagcgagaagcuccgccugggcuacgagacauuuaaagugaucgaaggguggucuaauccuaacuccaagcugcagauuaauagacaggucaucguggaccggggaaaccgcagcggcuauucuggcauuuucuccgucgaggggaaaagcuguaucaauagaugcuuuuacguggaacucauucggggaagaaaggaggaaaccgagguucuguggaccuccaacucuaucguggucuucuguggcacaagcgggaccuauggaacaggcuccuggcccgauggggcugacauuaaucuuaugccuaucuga

SEQ ID NO: 208798 - RNA, 1410 nt, Artificial Sequence
  derived and/or modified CDS sequence (opt5) from neuraminidase__InfluenzaA__ACO95539
augaaccccaaucagaagaucauuaccaucggcagcgugucccugacaauuucuacgaucugcuucuuuaugcaaauugccauccucaucaccacagucacccugcacuucaaacaguacgaguuuaacagcccuccgaauaaccagguuaugcuuugugaacccacaauuaucgagagaaauauuaccgaaaucguguaucugacaaacaccacgauugagaaggaaaucugcccuaaacucgcugaguaccggaauugguccaagccccaguguaacauuaccggguucgccccuuuuucuaaagacaauagcauccgccuguccgcgggaggcgauaucugggugacaagagagcccuaugucucuugcgacccugauaaguguuaccaauucgcucuugggcagggaaccacacugaacaaugugcauagcaacgacaccguucacgaucggacgccguaucgcacacuccugaugaaugaacugggcgugcccuuucaucucgggaccaagcaggucugcauugccugguccucuagcuccugucacgacggaaaagccuggcugcaugugugcguuacaggcgaugacaagaacgcuaccgccagcuucaucuacaauggcagacuuguggauucuauugucuccuggagcaaagagauccugcggacccaggaaucugagugugugugcauuaacgggacauguacgguggucaugaccgacggauccgcuagcggcaaggccaacacaaaaauccucuuuaucgaggaagggaagauuguucacaccuccacacugucuggaagcgcgcaacacguggaggaaugcuccugcuauccucgcuaccccggcgugagaugugucugccgggauaauuggaaggggagcaaccgcccuaucguggacauuaauaucaaagauuacucuauuguuuccagcuauguguguucuggacuugucggcgacacccccagaaagaacgacagcuccucuagcucccauugccuggauccgaauaacgaggaaggcgggcacggagugaaaggcugggccuucgacgaugggaaugacguuuggaugggacggacgaucagcgagaagcuccgcucuggcuacgagacauuuaaagugaucgaagggugguccaacccuaauagcaagcugcagauuaacagacaggucaucguggaucggggaaaucgcucuggcuauuccggcauuuucagcgucgaggggaaauccuguaucaacagaugcuuuuacguggaacugauucggggaagaaaggaggaaaccgagguucucuggaccucuaauagcaucguggucuucuguggcacauccgggaccuauggaacaggcucuuggcccgacggggcugauauuaaccugaugccuaucuga

SEQ ID NO: 208799 - RNA, 1413 nt, Artificial Sequence
  derived and/or modified CDS sequence (opt5) from neuraminidase__InfluenzaA__ACP20223
augaaccccaaucagaagaucauuaccaucggcagcauuuccaucgccauugggaucaucucucugaugcuccaaauuggaaacaucauuagcaucugggcuucccacucuauucagacaggcagccagaauaacacggggaucugcaaucagagaauuaucaccuacgagaacuccacaugggugaaucauaccuaugucaacaucaauaacacaaauguuguggccggagaagacaaaaccucugugacacuggcgggcaacagcucccuuuguagcauuucugggugggcuaucuacaccaaggauaauuccauucggaucggaagcaaaggcgacgucuucgugauucgcgagccuuuuaucucuugcucccaccuggaauguagaacguucuuucucacccaaggcgcccugcuuaacgauaagcauagcaaugggacaguuaaagaccggucuccguaucgcgcccugauguccugcccccucggagaggcuccuagccccuacaacuccaaguucgaaucuguggccuggagcgcuuccgccugucacgauggcaugggguggcugaccaucggaauuagcggcccugacaacggggcggucgccgugcugaaguauaauggaaucauuacaggcaccaucaaaucuuggaagaaacagauucucagaacgcaggaguccgagugcguuuguaugaacggcagcugcuuuacaaucaugaccgaugggcccucuaauaaggcugccagcuacaaaaucuucaagauugaaaagggaaaagugacaaaguccaucgagcugaacgcuccuaauuuucauuaugaagaguguucuugcuacccggacaccggcauugucaugugugugugccgggauaacuggcacgggagcaaucgccccuggguguccuucaaccagaaucuugacuaccaaaucggauauauuugcagcggcgucuuuggggauaacccuagacccgaggacggagaaggcucuuguaauccuguuaccguggauggcgccaacggggugaaaggauucuccuacaaguaugacaauggcgucuggaucgggcggacaaaaagcaaccgccugagaaagggauuugagaugauuugggaccccaauggcuggacgaacaccgauucugacuucuccgugaaacaggauguuguggcggucacagacuggagcggguacuccggcucuuuugugcagcacccggaacucaccggacuggauugcauccggccuuguuucuggguugagcuugugcgcggccugcccagagaaaacacaaccaucuggacgagcggguccucuauuagcuucugcggagucaauuccgacacagccaacuggagcuggccugauggcgcugagcuccccuuuaccaucgacaaguga

SEQ ID NO: 208800 - RNA, 1410 nt, Artificial Sequence
  derived and/or modified CDS sequence (opt5) from neuraminidase__InfluenzaA__ACP41952
augaaccccaaucagaagaucauuaccaucggcagcgugugcaugacaauugggauggccaaccugauccuccaaauuggaaauaucaucuccauuuggaucucucacagcauucagcugggcaaccagaaucagaucgagacguguaaccaauccgucauuaccuacgaaaauaacacauggguuaaucagaccuaugugaacaucucuaauacaaacuucgcugccgggcagagcguggucuccgugaaacuugcgggaaauucuagccugugcccuguuuccggcugggcuauuuacagcaaggacaacucugugagaaucggguccaaaggagaugucuuugugauccgggagccguucauuagcuguucuccccucgaaugccgcaccuuuuuccugacacagggcgcccuucugaaugacaagcauuccaacggcaccaucaaagauagaagcccuuaucggacgcucaugucuugucccauuggggagguuccuucccccuacaacagccgcuuugaauccguggccuggucugcuagcgccugccacgacggaaucaauuggcugaccauuggcaucuccgggccugauaacggagcugucgccgugcugaaguauaauggcaucauuacagacaccaucaagagcuggagaaacaauauucuccggacacaagagucugagugugcgugcgugaacggguccuguuucaccgucaugacggauggaccgagcaauggccaggccucuuacaaaaucuuucgcauugaaaagggcaaaaucguuaagagcguggagaugaacgcucccaauuaucauuacgaagagugcuccuguuacccugacucuagcgagaucacaugcgugugcagagauaacuggcacggguccaaucggcccugggucagcuucaaccagaaucuggaauaucagauuggauacaucuguucuggcauuuuuggggacaacccucgccccaaugauaaaaccggauccugcggcccggugagcucuaacggggccaacggaguuaagggcuucuccuuuaaguauggcaaugggguguggaucggaagaacaaaaagcauuuccucucggaacggcuucgagaugaucugggacccuaauggguggaccggaaccgauaacaauuuuagcauuaagcaagacaucgucggcaucaacgaaugguccggguacucuggcagcuucgugcagcaucccgagcuuacaggacuggacuguauucgcccuugcuucuggguugaacucaucagaggccggcccaaagagaauacgauuuggaccuccgggagcucuaucuccuuuuguggagugaacagcgauacagucggcuggucuuggcccgacggggcugagcugccuuucaccauugauaaguga

SEQ ID NO: 208801 - RNA, 1410 nt, Artificial Sequence; identical to SEQ ID NO: 208800
  derived and/or modified CDS sequence (opt5) from neuraminidase__InfluenzaA__ACP44158

SEQ ID NO: 208802 - RNA, 1413 nt, Artificial Sequence
  derived and/or modified CDS sequence (opt5) from neuraminidase__InfluenzaA__ACP44195
augaaccccaaucagaagaucauuaccaucggcagcauuuccaucgccauugggaucaucucucugaugcuccaaauuggaaacaucauuagcaucugggcuucccacucuauucagacaggcagccagaauaacacggggaucugcaaucagagaauuaucaccuacgagaacuccacaugggugaaucauaccuaugugaacaucaauaacacaaauguuguggccggagaagacaaaaccucugugacacuggcgggcaacagcucccuuuguagcauuucugggugggcuaucuacaccaaggauaauuccauucggaucggaagcaaaggcgacgucuucgugauucgcgagccuuuuaucucuugcucccaccuggaauguagaacguucuuucucacccaaggcgcccugcuuaacgauaagcauagcaaugggacaguuaaagaccggucuccguaucgcgcccugauguccugcccccucggagaggcuccuagccccuacaacuccaaguucgaaucuguggccuggagcgcuuccgccugucacgauggcaugggguggcugaccaucggaauuagcggcccugacaacggggcggucgccgugcugaaguauaauggaaucauuacaggcaccaucaaaucuuggaagaaacagauucucagaacgcaggaguccgagugcguuuguaugaacggcagcugcuuuacaaucaugaccgaugggcccucugacaaggcugccagcuacaaaaucuucaagauugaaaagggaaaagugacaaaguccaucgagcugaaugcuccuaacuuucauuaugaagaguguucuugcuacccggauaccggcauugucaugugugugugccgggacaauuggcacgggagcaaccgccccuggguguccuucaaucagaaccuugauuaccaaaucggauauauuugcagcggcgucuuuggggacaauccuagacccgaggauggagaaggcucuuguaacccuguuaccguggacggcgccaauggggugaaaggauucuccuacaaguaugacaacggcgucuggaucgggcggacaaaaagcaaucgccugagaaagggauuugagaugauuugggaucccaacggcuggacgaauaccgacucugauuucuccgugaaacaggacguuguggcgaucacagauuggagcggguacuccggcucuuuuguccagcacccggaacucaccggacugaacugcauccggccuuguuucuggguggagcuuguucgcggccugcccagagaaaacacaaccauuuggacgagcggguccucuaucagcuucugcggagucaauuccgacacagccaacuggagcuggccugauggcgcugagcuccccuuuaccauugacaaguga

SEQ ID NO: 208803 - RNA, 1413 nt, Artificial Sequence; identical to SEQ ID NO: 208704
  derived and/or modified CDS sequence (opt5) from neuraminidase__InfluenzaA__ACP44217

SEQ ID NO: 208804 - RNA, 1413 nt, Artificial Sequence; identical to SEQ ID NO: 208704
  derived and/or modified CDS sequence (opt5) from neuraminidase__InfluenzaA__ACP44228

SEQ ID NO: 208805 - RNA, 1410 nt, Artificial Sequence; identical to SEQ ID NO: 206786
  derived and/or modified CDS sequence (opt5) from neuraminidase__InfluenzaA__ACP44239

SEQ ID NO: 208806 - RNA, 1410 nt, Artificial Sequence
  derived and/or modified CDS sequence (opt5) from neuraminidase__InfluenzaA__ACP44250
augaaccccaaucagaagaucauuaccaucggcagcgugucccugacaauuucuacgaucugcuucuuuaugcaaauugccauccucaugaccacagucacccugcacuucaaacaguacgaguuuaacagcccuccgaauaaccagguuaugcuuugugaacccacaaucauugagagaaauaucaccgaaauuguguaucugacaaacaccacgaucgagaaggaaauuugcccuaaacucgcugaguaccggaauugguccaagccccagugugacaucaccggguucgccccuuuuucuaaagauaacagcauucgccuguccgcgggaggcgacaucugggugacaagagagcccuaugucucuugcgauccugacaaguguuaccaauucgcucuugggcagggaaccacacugaauaacgugcauagcaaugauaccguucacgaccggacgccguaucgcacacuccugaugaacgaacugggcgugcccuuucaucucgggaccaagcaggucugcaucgccugguccucuagcuccugucacgauggaaaagccuggcugcaugugugcguuacaggcgacgauaagaaugcuaccgccagcuucauuuacaacggcagacuuguggacucuaucgucuccuggagcaaagagauucugcggacccaggaaucugagugugugugcaucaaugggacauguacgguggucaugaccgauggauccgcuagcggcaaggccgacacaaaaauucucuuuaucgaggaagggaagaucguucacaccuccacacugucuggaagcgcgcaacacguggaggaaugcuccugcuauccucgcuaccccggcgugagaugugucugccgggauaacuggaaggggagcaaccgcccuauuguggacaucaauauuaaagacuacucuaucguuuccagcuauguguguucuggacuugucggcgauacccccagaaagaacgacagcuccucuagcucccauugccuggauccgaauaacgaggaaggcgggcacggagugaaaggcugggccuucgacgaugggaaugacguuuggaugggacggacgauuagcgagaagcuccgcucuggcuacgagacauuuaaagugaucgaagggugguccaacccuaauagcaagcugcagaucaacagacaggucauuguggaucggggaaaucgcucuggcuauuccggcaucuucagcgucgaggggaaauccuguauuaacagaugcuuuuacguggaacugauccggggaagaaaggaggaaaccgagguucucuggaccucuaauagcauuguggucuucuguggcacauccgggaccuauggaacaggcucuuggcccgacggggcugauaucaaccugaugccuauuuga

SEQ ID NO: 208807 - RNA, 1410 nt, Artificial Sequence
  derived and/or modified CDS sequence (opt5) from neuraminidase__InfluenzaA__ACP44261
augaaccccaaucagaagaucauuaccaucggcagcgugucccugacaauuucuacgaucugcuucuuuaugcaaauugccauccucaucaccacagucacccugcacuucaaacaguacgaguuuaacagcccuccgaauaaccagguuaugcuuugugaacccacaauuaucgagagaaauauuaccgaaaucguguaucugacaaacaccacgauugagaaggaaaucugcccuaaacucgcugaguaccggaauugguccaagccccaguguaacauuaccggguucgccccuuuuucuaaagacaauagcauccgccuguccgcgggaggcgauaucugggugacaagagagcccuaugucucuugcgacccugauaaguguuaccaauucgcucuugggcagggaaccacacugaacaauaugcauagcaacgacaccgugcacgaucggacgccguaucgcacacuccugaugaaugaacugggcguucccuuucaucucgggaccaaacaggugugcauugccugguccucuagcuccugucacgacggaaaggccuggcugcaugucugcgugacaggcgaugacaagaacgcuaccgccagcuucaucuacaauggcagacuuguugauucuauuguguccuggagcaaagagauccugcggacccaggaaucugagugugucugcauuaacgggacauguacgguggugaugaccgacggauccgcuagcggcaaggccgauacaaaaauccucuuuaucgaggaagggaagauuguccacaccuccacacugucuggaagcgcgcaacacguugaggaaugcuccugcuauccucgcuaccccggcgugagaugugugugccgggacaacuggaaggggagcaaucgcccuaucgucgauauuaacaucaaagacuacucuauuguguccagcuauguuuguucuggacuugugggcgacacccccagaaagaaugauagcuccucuagcucccauugccuggacccgaacaaugaggaaggcgggcacggagucaaaggcugggccuucgaugacgggaacgauguguggaugggacggacgaucagcgagaagcuccgcucuggcuacgagacauuuaaaguuaucgaagggugguccaauccuaacagcaagcugcagauuaauagacaggugaucgucgaccggggaaaccgcucuggcuauuccggcauuuucagcguggaggggaaauccuguaucaauagaugcuuuuacgucgaacugauucggggaagaaaggaggaaaccgaggugcucuggaccucuaacagcaucguuguguucuguggcacauccgggaccuauggaacaggcucuuggcccgauggggcugacauuaaucugaugccuaucuga

SEQ ID NO: 208808 - RNA, 1410 nt, Artificial Sequence
  derived and/or modified CDS sequence (opt5) from neuraminidase__InfluenzaA__ACP44272
augaaccccaaucagaagaucauuaccaucggcagcgugucccugacaauuucuacgaucugcuucuuuaugcaaauugccauccucaucaccacagucacccugcacuucaaacaguacgaguuuaacagcccuccgaauaaccagguuaugcuuugugaacccacaauuaucgagagaaauauuaccgaaaucguguaucugacaaacaccacgauugagaaggaaaucugcccuaaacucgcugaguaccggaauugguccaagccccaguguaacauuaccggguucgccccuuuuucuaaagacaauagcauccgccuguccgcgggaggcgauaucugggugacaagagagcccuaugucucuugcgacccugauaaguguuaccaauucgcucuugggcagggaaccacacugaacaaugugcauagcaacgacaccguucacgaucggacgccguaucgcacacuccugaugaaugaacugggcgugcccuuucaucucgggaccaagcaggucugcauugccugguccucuagcuccugucacgacggaaaagccuggcugcaugugugcguuacaggcgaugacaagaacgcuaccgccagcuucaucuacaauggcagacuuguggauucuauugucuccuggagcaaagagauccugcggacccaggaaucugagugugugugcauuaacgggacauguacggugaucaugaccgacggauccgcuagcggcaaggccgauacaaaaauccucuuuauugaggaagggaagaucguccacaccuccacacugucuggaagcgcgcaacacguugaggaaugcuccugcuauccucgcuaccccggcgugagaugugugugccgggacaacuggaaggggagcaaucgcccuauugucgauaucaacauuaaagacuacucuaucguguccagcuauguuuguucuggacuugugggcgacacccccagaaagaaugauagcuccucuagcucccauugccuggacccgaacaaugaggaaggcgggcacggagucaaaggcugggccuucgaugacgggaacgauguguggaugggacggacgaucagcgagaagcuccgcucuggcuacgagacauuuaaaguuauugaagggugguccaauccuaacagcaagcugcagaucaauagacaggugauugucgaccggggaaaccgcucuggcuauuccggcaucuucagcguggaggggaaauccuguauuaauagaugcuuuuacgucgaacugauccggggaagaaaggaggaaaccgaggugcucuggaccucuaacagcauuguuguguucuguggcacauccgggaccuauggaacaggcucuuggcccgauggggcugacaucaaucugaugccuaucuga

SEQ ID NO: 208809 - RNA, 1410 nt, Artificial Sequence; identical to SEQ ID NO: 208800
  derived and/or modified CDS sequence (opt5) from neuraminidase__InfluenzaA__ACQ55360

SEQ ID NO: 208810 - RNA, 1410 nt, Artificial Sequence
  derived and/or modified CDS sequence (opt5) from neuraminidase__InfluenzaA__ACQ63236
augaaccccaaucagaagaucauuaccaucggcagcgugugcaugacaauugggauggccaaccugauccuccaaauuggaaauaucaucuccauuuggaucucucacagcauucagcugggcaaccagaaucagaucgagacguguaaccaauccgucauuaccuacgaaaauaacacauggguuaaucagaccuaugugaacaucucuaauacaaacuucgcugccgggcagagcguggucuccgugaaacuugcgggaaauucuagccugugcccuguuuccggcugggcuauuuacagcaaggacaacucuaucagaaucggguccaaaggagauguguuugucauucgggagccguucaucagcuguucuccccucgaaugccgcaccuuuuuccugacacagggcgcccuucugaaugacaagcauuccaacggcaccauuaaagauagaagcccuuaucggacgcucaugucuugucccaucggggaggugccuucccccuacaacagccgcuuugaauccguugccuggucugcuagcgccugccacgacggaauuaauuggcugaccaucggcaucuccgggccugauaacggagcuguggccguccugaaguauaauggcauuaucacagacaccauuaagagcuggagaaacaauauccuccggacacaagagucugagugugcgugcgugaacggguccuguuucaccgugaugacggauggaccgagcgacggccaggccucuuacaaaauuuuucgcaucgaaaagggcaaaaucgucaagagcguugagaugaaugcucccaacuaucauuacgaagagugcuccuguuacccugauucuagcgagauuacaugcgugugcagagacaauuggcacggguccaaccggcccugggugagcuucaaucagaaccuggaauaucagaucggauacauuuguucuggcaucuuuggggauaauccucgccccaacgacaaaaccggauccugcggcccggucagcucuaauggggccaacggagugaagggcuucuccuuuaaguauggcaacgggguuuggauuggaagaacaaaaagcaucuccucucggaauggcuucgagaugauuugggauccuaacggguggaccggaaccgacaauaacuuuagcaucaagcaagacaucgugggcauuaaugaaugguccggguacucuggcagcuucguccagcaucccgagcuuacaggacuggauuguauccgcccuugcuucuggguggaacucauuagaggccggcccaaagagaacacgaucuggaccuccgggagcucuauuuccuuuuguggaguuaauagcgacacagugggcuggucuuggcccgauggggcugagcugccuuucaccaucgacaaguga

SEQ ID NO: 208811 - RNA, 1410 nt, Artificial Sequence; identical to SEQ ID NO: 208810
  derived and/or modified CDS sequence (opt5) from neuraminidase__InfluenzaA__ACQ63242

SEQ ID NO: 208812 - RNA, 1410 nt, Artificial Sequence; identical to SEQ ID NO: 208810
  derived and/or modified CDS sequence (opt5) from neuraminidase__InfluenzaA__ACQ63253

SEQ ID NO: 208813 - RNA, 1410 nt, Artificial Sequence; identical to SEQ ID NO: 208810
  derived and/or modified CDS sequence (opt5) from neuraminidase__InfluenzaA__ACQ63262

SEQ ID NO: 208814 - RNA, 1410 nt, Artificial Sequence
  derived and/or modified CDS sequence (opt5) from neuraminidase__InfluenzaA__ACQ65694
augaaccccaaucagaagaucauuaccaucggcagcgugucccugacaauuucuacgaucugcuucuuuaugcaaauugccauccucaucaccacagucacccugcacuucaaacaguacgaguuuaacagcccuccgaauaaccagguuaugcuuugugaacccacaauuaucgagagaaauauuaccgaaaucguguaucugacaaacaccacgauugagaaggaaaucugcccuaaacucgcugaguaccggaagugguccaaaccccaguguaauauuaccggguucgccccuuuuucuaaggacaacagcauccgccuguccgcgggaggcgauaucugggugacaagagagcccuaugucucuugcgacccugauaaguguuaccaauucgcucuugggcagggaaccacacugaauaacgugcauagcaaugacaccguucgggaucgcacgccguauagaacacuccugaugaacgaacugggcgugcccuuucaccucgggaccaaacaggucugcauugccugguccucuagcuccugucaugacggaaaggccuggcugcacgugugcguuacaggcgaugacaaaaaugcuaccgccagcuucaucuacaacggccggcuuguggauucuauugucuccuggagcaaggacauccugcgcacccaggagucugaaugugugugcauuaaugggacauguacgguggucaugaccgauggauccgcuagcggcaaagccgacacaaagauccucuuuaucgaggaggggaagauuguucauaccuccacacugucuggaagcgcgcaacacguggaagagugcuccugcuauccuagauaccccggcgugcggugugucugccgcgauaacuggagagggagcaaccggccuaucguggacauuaauaugaaagacuacucuaucguuuccagcuauguguguucuggacuugucggcgauacgccccgcaagaacgacagcuccucuagcggccacugccuggauccgaauaacgaagaagggggacauggcgugaaagggugggccuucgacgauggaaaugacguuuggaugggcagaaccauuuccgagaagcuccggagcggguacgagacauuuaaagugaucgagggauggucuaacccuaauuccaagcugcagaucaaccgccaggucauuguggauagaggcaaucggagcggcuauucugggaucuucuccgucgaaggaaaaagcuguauuaacagaugcuuuuacguggagcugauccgcggccggaaggaagagaccgaaguucucuggaccuccaauucuauuguggucuucugugggacaagcggaaccuauggcacaggguccuggcccgacggcgcugauaucaaccugaugccuauuuga

SEQ ID NO: 208815 - RNA, 1410 nt, Artificial Sequence
  derived and/or modified CDS sequence (opt5) from neuraminidase__InfluenzaA__ACQ65705
augaaccccaaucagaagaucauuaccaucggcagcgugucccugacaauuucuacgaucugcuucuuuaugcaaauugccauccucaucaccacagucacccugcacuucaaacaguacgaguuuaacagcccuccgaauaaccagguuaugcuuugugaacccacaauuaucgagagaaauauuaccgaaaucguguaucugacaaacaccacgauugagaaggaaaucugcccuaaacucgcugaguaccggaagugguccaaaccccaguguaauauuaccggguucgccccuuuuucuaaggacaacagcauccgccuguccgcgggaggcgauaucugggugacaagagagcccuaugucucuugcgacccugauaaguguuaccaauucgcucuugggcagggaaccacacugaauaacgugcauagcaaugacaccguucgggaucgcacgccguauagaacacuccugaugaacgaacugggcgugcccuuucaccucgggaccaaacaggucugcauugccugguccucuagcuccugucaugacggaaaggccuggcugcacgugugcguuacaggcgaugacaaaaaugcuaccgccagcuucaucuacaacggccggcuuguggauucuauugucuccuggagcaaggagauccugcgcacccaggaaucugagugugugugcauuaaugggacauguacgguggucaugaccgacggauccgcuagcggcaaagccgauacaaagauccucuuuaucgaggaagggaagauuguucauaccuccacacugucuggaagcgcgcaacacguggaggaaugcuccugcuauccuagauaccccggcgugcggugugucugccgcgacaacuggagagggagcaaccggccuaucguggauauuaauaugaaagacuacucuaucguuuccagcuauguguguucuggacuugucggcgacacgccccgcaagaacgauagcuccucuagcggccacugccuggacccgaauaacgaggaagggggacauggcgugaaagggugggccuucgaugacggaaaugauguuuggaugggcagaaccauuuccgagaagcuccggagcggguacgagacauuuaaagugaucgaaggauggucuaacccuaauuccaagcugcagaucaaccgccaggucauuguggacagaggcaaucggagcggcuauucugggaucuucuccgucgagggaaaaagcuguauuaacagaugcuuuuacguggaacugauccgcggccggaaggaggaaaccgagguucucuggaccuccaauucuauuguggucuucugugggacaagcggaaccuauggcacaggguccuggcccgauggcgcugacaucaaccugaugccuauuuga

SEQ ID NO: 208816 - RNA, 1410 nt, Artificial Sequence; identical to SEQ ID NO: 208584
  derived and/or modified CDS sequence (opt5) from neuraminidase__InfluenzaA__ACQ65716

SEQ ID NO: 208817 - RNA, 1410 nt, Artificial Sequence; identical to SEQ ID NO: 208584
  derived and/or modified CDS sequence (opt5) from neuraminidase__InfluenzaA__ACQ65727

SEQ ID NO: 208818 - RNA, 1410 nt, Artificial Sequence; identical to SEQ ID NO: 208671
  derived and/or modified CDS sequence (opt5) from neuraminidase__InfluenzaA__ACQ65739

SEQ ID NO: 208819 - RNA, 1410 nt, Artificial Sequence
  derived and/or modified CDS sequence (opt5) from neuraminidase__InfluenzaA__ACQ65750
augaaccccaaucagaagaucauuaccaucggcagcgugucccugacaauuucuacgaucugcuucuuuaugcaaaccgccauucucaucacaaccgucacacugcacuucaaacaguacgaguuuaacagcccuccgaauaaccagguuaugcuuugugaacccaccaucauugagagaaauaucacagaaauuguguaucugaccaacacgaccaucgagaaggaaauuugcccuaaacucgcugaguaccggaauugguccaagccccagugugacaucacaggguucgccccuuuuucuaaagauaacagcauucgccuguccgcgggaggcgacaucugggugaccagagagcccuaugucucuugcgauccugacaaguguuaccaauucgcucuugggcagggaacaacccugaauaacgugcauagcaaugauacgguucggaaccgcacaccguauagaacccuccugaugaaugaacugggcgugcccuuucaccucgggacaaagcaggucugcaucgccugguccucuagcuccugucaugacggaaaagccuggcugcacgugugcauuaccggcgaugacaagaacgcuaccgccagcuucaucuacaauggccggcuuguugauucuauuguguccuggagcaaagagauccugcgcacacaggaaucugagugugucugcauuaacgggacguguaccguggugaugacagacggauccgcuagcggcaaggccgauaccaaaauccucuuuaucgaggaagggaagauuguccauacauccacccugucuggaagcgcgcaacacguugaggaaugcuccugcuauccuagauaccccggcgugcggugugugugccgcgacaacuggaaggggagcaauagaccuaucgucgauauuaacaucaaagaccacucuauuguguccagcuacguuuguucuggacuugugggcgacacgccccggaagaaugauagcuccucuagcucccauugccuggacccgaacaaugaggaaggcgggcacggagucaaaggcugggccuucgaugacgggaacgauguguggaugggacgcacaaucagcgagaagucuagacucggcuaugagaccuuuaaaguuaucgaagggugguccaauccuaagagcaaacugcagauuaaccgccaggugaucgucgaccggggaaauagaucuggcuacuccggcauuuucagcguggaggggaaguccuguaucaaccggugcuuuuaugucgaacugauuagaggacgcaaggaggaaaccgaggugcucuggacaucuaauagcaucguuguguucuguggcaccuccgggacauacggaacgggcucuuggcccgauggggcugacauuaaccugaugccuaucuga

SEQ ID NO: 208820 - RNA, 1413 nt, Artificial Sequence; identical to SEQ ID NO: 208704
  derived and/or modified CDS sequence (opt5) from neuraminidase__InfluenzaA__ACQ65761

SEQ ID NO: 208821 - RNA, 1410 nt, Artificial Sequence; identical to SEQ ID NO: 208800
  derived and/or modified CDS sequence (opt5) from neuraminidase__InfluenzaA__ACQ73394

SEQ ID NO: 208822 - RNA, 1410 nt, Artificial Sequence; identical to SEQ ID NO: 208800
  derived and/or modified CDS sequence (opt5) from neuraminidase__InfluenzaA__ACQ73395

SEQ ID NO: 208823 - RNA, 1410 nt, Artificial Sequence; identical to SEQ ID NO: 208810
  derived and/or modified CDS sequence (opt5) from neuraminidase__InfluenzaA__ACQ73396

SEQ ID NO: 208824 - RNA, 1410 nt, Artificial Sequence; identical to SEQ ID NO: 208810
  derived and/or modified CDS sequence (opt5) from neuraminidase__InfluenzaA__ACQ76291

SEQ ID NO: 208825 - RNA, 1410 nt, Artificial Sequence
  derived and/or modified CDS sequence (opt5) from neuraminidase__InfluenzaA__ACQ76298
augaaccccaaucagaagaucauuaccaucggcagcgugugcaugacaauugggauggccaaccugauccuccaaauuggaaauaucaucuccauuuggaucucucacagcauucagcugggcaaccagaaucagaucgagacguguaaccaauccgucauuaccuacgaaaauaacacauggguuaaucagaccuaugugaacaucucuaauacaaacuucgcugccgggcagagcguggucuccgugaaacuugcgggaaauucuagccugugcccuguuuccggcugggcuauuuacagcaaggacaacucugugagaaucggguccaaaggagaugucuuugugauccgggagccguucauuagcuguucuccccucgaaugccgcaccuuuuuccugacacagggcgcccuucugaaugacaagcauuccaacggcaccaucaaagauagaagcccuuaucggacgcucaugucuugucccauuggggagguuccuucccccuacaacagccgcuuugaauccguggccuggucugcuagcgccugccacgacggaaucaauuggcugaccauuggcaucuccgggccugauaacggagcugucgccgugcugaaguauaauggcaucauuacagacaccaucaagagcuggagaaacaauauucuccggacacaagagucugagugugcgugcgugaacggguccuguuucaccaucaugacggauggaccgagcaauggccaggccucuuacaaaauuuuucgcaucgaaaagggcaaaaucgucaagagcguugagaugaacgcucccaauuaucauuacgaagagugcuccuguuacccugacucuagcgagauuacaugcgugugcagagauaacuggcacggguccaaucggcccugggugagcuucaaccagaaucuggaauaucagaucggauacauuuguucuggcaucuuuggggacaacccucgccccaaugauaaaaccggauccugcggcccggucagcucuaacggggccaacggagugaagggcuucuccuuuaaguauggcaaugggguuuggauuggaagaacaaaaagcaucuccucucggaacggcuucgagaugauuugggacccuaauggguggaccggaaccgauaacaauuuuagcaucaagcaagacaucgugggcauuaacgaaugguccggguacucuggcagcuucguccagcaucccgagcuuacaggacuggacuguauccgcccuugcuucuggguggaacucauuagaggccggcccaaagagaauacgaucuggaccuccgggagcucuauuuccuuuuguggaguuaacagcgauacagugggcuggucuuggcccgacggggcugagcugccuuucaccaucgauaaguga

SEQ ID NO: 208826 - RNA, 1410 nt, Artificial Sequence; identical to SEQ ID NO: 208810
  derived and/or modified CDS sequence (opt5) from neuraminidase__InfluenzaA__ACQ76308

SEQ ID NO: 208827 - RNA, 1410 nt, Artificial Sequence; identical to SEQ ID NO: 208810
  derived and/or modified CDS sequence (opt5) from neuraminidase__InfluenzaA__ACQ76316

SEQ ID NO: 208828 - RNA, 1410 nt, Artificial Sequence; identical to SEQ ID NO: 208800
  derived and/or modified CDS sequence (opt5) from neuraminidase__InfluenzaA__ACQ76322

SEQ ID NO: 208829 - RNA, 1410 nt, Artificial Sequence; identical to SEQ ID NO: 208800
  derived and/or modified CDS sequence (opt5) from neuraminidase__InfluenzaA__ACQ76328

SEQ ID NO: 208830 - RNA, 1410 nt, Artificial Sequence; identical to SEQ ID NO: 208800
  derived and/or modified CDS sequence (opt5) from neuraminidase__InfluenzaA__ACQ76335

SEQ ID NO: 208831 - RNA, 1410 nt, Artificial Sequence; identical to SEQ ID NO: 208800
  derived and/or modified CDS sequence (opt5) from neuraminidase__InfluenzaA__ACQ76342

SEQ ID NO: 208832 - RNA, 1410 nt, Artificial Sequence; identical to SEQ ID NO: 208800
  derived and/or modified CDS sequence (opt5) from neuraminidase__InfluenzaA__ACQ76351

SEQ ID NO: 208833 - RNA, 1410 nt, Artificial Sequence; identical to SEQ ID NO: 208800
  derived and/or modified CDS sequence (opt5) from neuraminidase__InfluenzaA__ACQ76359

SEQ ID NO: 208834 - RNA, 1410 nt, Artificial Sequence; identical to SEQ ID NO: 208810
  derived and/or modified CDS sequence (opt5) from neuraminidase__InfluenzaA__ACQ76364

SEQ ID NO: 208835 - RNA, 1410 nt, Artificial Sequence; identical to SEQ ID NO: 208810
  derived and/or modified CDS sequence (opt5) from neuraminidase__InfluenzaA__ACQ76367

SEQ ID NO: 208836 - RNA, 1410 nt, Artificial Sequence
  derived and/or modified CDS sequence (opt5) from neuraminidase__InfluenzaA__ACQ76379
augaaccccaaucagaagaucauuaccaucggcagcgugugcaugacaauugggauggccaaccugauccuccaaauuggaaauaucaucuccauuuggaucucucacagcauucagcugggcaaccagaaucagaucgagacguguaaccaauccgucauuaccuacaaaaauaacacauggguuaaucagaccuaugugaacaucucuaauacaaacuucgcugccgggcagagcguggucuccgugaaacuugcgggaaauucuagccugugcccuguuuccggcugggcuauuuacagcaaggacaacucugugagaaucggguccaagggagaugucuuugugauccgggaaccguucauuagcuguucuccccucgagugccgcaccuuuuuccugacacagggcgcccuucugaaugacaaacauuccaacggcaccaucaaggauagaagcccuuaucggacgcucaugucuugucccauuggggaaguuccuucccccuacaacagccgcuuugaguccguggccuggucugcuagcgccugccacgacggaaucaauuggcugaccauuggcaucuccgggccugauaacggagcugucgccgugcugaaguauaauggcaucauuacagacaccaucaaaagcuggagaaacaauauucuccggacacaagaaucugagugugcgugcgugaacggguccuguuucaccgucaugacggauggaccgagcaauggccaggccucuuacaagaucuuucgcauugagaaaggcaagaucguuaaaagcguggaaaugaacgcucccaauuaucauuacgaggaaugcuccuguuacccugacucuagcgagaucacaugcgugugcagagauaacuggcacggguccaaucggcccugggucagcuucaaccagaaucuggaguaucagauuggauacaucuguucuggcauuuuuggggacaacccucgccccaaugauaagaccggauccugcggcccggugagcucuaacggggccaacggaguuaagggcuucuccuuuaaauauggcaaugggguguggaucggaagaacaaagagcauuuccucucggaacggcuucgaaaugaucugggacccuaauggguggaccggaaccgauaacaauuuuagcauuaaacaagacaucgucggcaucaacgagugguccggguacucuggcagcuucgugcagcaucccgaacuuacaggacuggacuguauucgcccuugcuucuggguugagcucaucagaggccggcccaaggaaaauacgauuuggaccuccgggagcucuaucuccuuuuguggagugaacagcgauacagucggcuggucuuggcccgacggggcugagcugccuuucaccauugauaaauga

SEQ ID NO: 208837 - RNA, 1410 nt, Artificial Sequence; identical to SEQ ID NO: 208810
  derived and/or modified CDS sequence (opt5) from neuraminidase__InfluenzaA__ACQ76385

SEQ ID NO: 208838 - RNA, 1410 nt, Artificial Sequence; identical to SEQ ID NO: 208810
  derived and/or modified CDS sequence (opt5) from neuraminidase__InfluenzaA__ACQ76388

SEQ ID NO: 208839 - RNA, 1410 nt, Artificial Sequence; identical to SEQ ID NO: 208810
  derived and/or modified CDS sequence (opt5) from neuraminidase__InfluenzaA__ACQ76403

SEQ ID NO: 208840 - RNA, 1410 nt, Artificial Sequence
  derived and/or modified CDS sequence (opt5) from neuraminidase__InfluenzaA__ACQ76407
augaaccccaaucagaagaucauuaccaucggcagcgugugcaugacaauugggauggccaaccugauccuccaaauuggaaauaucaucuccauuuggaucucucacagcauucagcugggcaaccagaaucagaucgagacguguaaccaauccgucauuaccuacgaaaauaacacauggguuaaucagaccuaugugaacaucucuaauacaaacuucgcugccgggcagagcguggucuccgugaaacuugcgggaaauucuagccugugcccuguuggcgggugggcuauuuacuccaaggacaacagcgugagaaucggaucuaaaggcgaugucuuugugauccgggagccguucauuuccuguagcccccucgaaugccgcaccuuuuuccugacacagggcgcccuucugaaugacaagcauucuaacgggaccaucaaagauagauccccuuaucggacgcucaugagcugucccauuggagagguuccuucucccuacaacucccgcuuugaaagcguggccugguccgcuucugccugccacgacggcaucaauuggcugaccauugggaucagcggaccugauaacggcgcugucgccgugcugaaguauaaugggaucauuacagacaccaucaaguccuggagaaacaauauucuccggacacaagagagcgagugugcgugcgugaacggaucuuguuucaccgucaugacggauggcccguccaauggccaggccagcuacaaaaucuuucgcauugaaaaggggaaaaucguuaagucuguggagaugaacgcucccaauuaucauuacgaagagugcagcuguuacccugacuccucugagaucacaugcgugugcagagauaacuggcacggaagcaaucggcccugggucuccuucaaccagaaucuggaauaucagauuggcuacaucuguagcgggauuuuuggagacaacccucgccccaaugauaaaaccggcucuugcgggccgguguccagcaacggagccaacggcguuaagggcuucucuuuuaaguaugggaauggaguguggaucggcagaacaaaauccauuagcucccggaacggguucgagaugaucugggacccuaauggauggaccggcaccgauaacaauuuuucuauuaagcaagacaucgucgggaucaacgaauggagcggcuacuccggaucuuucgugcagcaucccgagcuuacaggccuggacuguauucgcccuugcuucuggguugaacucaucagagggcggcccaaagagaauacgauuuggaccagcggauccagcaucucuuuuuguggcgugaacuccgauacagucggguggagcuggcccgacggagcugagcugccuuucaccauugauaaguga

SEQ ID NO: 208841 - RNA, 1410 nt, Artificial Sequence
  derived and/or modified CDS sequence (opt5) from neuraminidase__InfluenzaA__ACQ77603
augaaccccaaucagaagaucauuaccaucggcagcgugucccugacaauugccacgaucugcuuccucaugcaaauugcuauccuggucaccacaguuacccuucacuuuaaacaguacgaguguaacucuccuccgaauaaccaggugaugcugugcgaacccacaaucauugagagaaauaucaccgaaauuguguaucucacaaacaccacgaucgagaaggaaauuuguccuaaacuggccgaguaccggaauuggagcaagccccagugcaacaucaccggguucgcgccuuuuuccaaagacaauucuauucgccuuagcgcuggaggcgauaucugggucacaagagagcccuauguguccugugacccugauaagugcuaccaauucgcccuggggcagggaaccacacucaacaauggccauucuaacgacaccguucacgaucggacgccguaucgcacacugcugaugaaugaacucggggugcccuuucaucugggaaccaagcaggucuguaucgccuggagcuccagcucuugccacgacggcaaggcuuggcuucauguguguguuacaggcgaugacgagaacgccaccgcuuccuucauuuacaaugggagacugguggauagcaucggaucuugguccaagaaaauucuccggacccaggaaagcgagugcgucuguaucaacggcacaugcacgguggugaugaccgacgggucugccuccggaaaggcggauacaaaaauucuguuuaucgaggaaggcaagaucguccacaccagcccucuuuccgggucugcccaacacguugaggaaugcagcuguuauccccgcuacccuggagugagaugcgugugucgggacaacuggaagggcuccaaucgccccauugucgauaucaacgugaaagacuacagcauuguuucuuccuaugugugcagcggccuggucggggacacaccgagaaagaaugauucuagcuccucuagccauugucucgacccuaacaaugaggaaggaggccacggggugaaaggaugggcuuucgaugacggcaacgauguuuggauggggcggaccaucuccgagaaaagccgcucuggauacgagacguuuaaagugauugaaggcugguccaagcccaauagcaaacugcagaucaacagacaggucaucguggaccggggcaaucgcucuggguauuccggaauuuucagcgucgagggcaaguccugcaucaacagauguuuuuacguggaacugauucgggggagaaagcaggagacagaaguucucuggaccucuaauagcaucguggucuucugcggaaccuccggcacauaugggaccggcucuuggccugauggagccgacauuaaccugaugcccaucuga

SEQ ID NO: 208842 - RNA, 1410 nt, Artificial Sequence; identical to SEQ ID NO: 208800
  derived and/or modified CDS sequence (opt5) from neuraminidase__InfluenzaA__ACQ83309

SEQ ID NO: 208843 - RNA, 1410 nt, Artificial Sequence; identical to SEQ ID NO: 208800
  derived and/or modified CDS sequence (opt5) from neuraminidase__InfluenzaA__ACQ84460

SEQ ID NO: 208844 - RNA, 1410 nt, Artificial Sequence; identical to SEQ ID NO: 208800
  derived and/or modified CDS sequence (opt5) from neuraminidase__InfluenzaA__ACQ84470

SEQ ID NO: 208845 - RNA, 1410 nt, Artificial Sequence
  derived and/or modified CDS sequence (opt5) from neuraminidase__InfluenzaA__ACQ84480
augaacaccaaucagagaaucauuacaaucggcacggugugccugauugucgggaucguuagccuccugcuucaaauuggaaacaucgugucccuguggaucucucacagcauuaagaccggcgagaaaaaucauuccgaaaucuguaaccagaauauuaucacauacgagaacaagaccugggugaaucagacauaugucaacauuucuaauaccaacaucgccgacgggcagggagugacaagcauuauccucgcuggcaauuccucucugugccccaucagcgggugggccauuuacuccaaagauaacagcauccggauuggaucuaagggcgacaucuucguuauucgcgaaccuuuuaucuccuguagccaccuugagugcagaaccuucuuucugacgcaaggcgcgcuccugaaugaucggcauucuaacgggaccgugaaagaccgcuccccguauagaacacugaugagcugucccaccggagaagcuccuucucccuacaauucccgguucgagagcgucgccugguccgccucugcuugccacgauggcaugggguggcucacaaucggaauuagcggcccugacaacggggccguggcuguucugaaguauaacggaaucauuaccgauacgaucaaguccuggcgcaauaaaauucuuagaacacaggagagcgaaugugugugcaucaacggcucuuguuuuaccaucaugacagacggccccuccaaugggcaggccagcuacaagauuuucaaaauggagaagggaaaaaucauuaagucugucgaacuggaugcgccuaacuaucauuacgaggagugcagcuguuacccggacaccggcaagguggugugcgucugccgggauaauuggcacgccuccaaccgccccuggguuucuuuugaccagaaucucgauuaucaaaucggguacauuuguagcggaguguucggcgacaacccuagauccaaugacgggaaaggaaacugcggccccgugcugagcaauggcgcuaacggggucaagggauuuucuuuccgguauggcaaugggguguggaucggacgcaccaaauccauuagcucuagauccggcuuugaaaugaucugggauccuaacggguggacagagacggacagcuccuucucuaucaagcaggauauuaucgcccuuaccgacuggagcggcuacuccggaucuuuuguucagcaccccgaacugacaggcaugaauuguauucggccgugcuucuggguggagcucauccgcgggcagccuaaagaaagcaccauuuggacauccggaagcucuaucuccuucuguggcgucgauagcgagaccgcuucuugguccuggcccgacggggccgaucugccuuuuacgaucgacaaguga

SEQ ID NO: 208846 - RNA, 1410 nt, Artificial Sequence
  derived and/or modified CDS sequence (opt5) from neuraminidase__InfluenzaA__ACQ89891
augaaccccaaucagaagaucauuaccaucggcagcgugugcaugacaauugggauggccaaccugauccuccaaauuggaaauaucaucuccauuuggaucucucacagcauucagcugggcaaccagaaucagaucgagacguguaaccaauccgucauuaccuacgaaaauaacacauggguuaaucagaccuaugugaacaucucuaauacaaacuucgcugccgggcagagcguggucuccgugaaacuugcgggaaauucuagccugugcccuguuuccggcugggcuauuuacagcaaggacaacucuaucagaaucggguccaaaggagauguguuugucauucgggagccguucaucagcuguucuccccucgaaugccgcaccuuuuuccugacacagggcgcccuucugaaugacaagcauuccaacggcaccauuaaagauagaagcccuuaucggacgcucaugucuugucccaucggggaggugccuucccccuacaacagccgcuuugaauccguugccuggucugcuagcgccugccacgacggaauuaauuggcugaccaucggcaucuccgggccugauaacggagcuguggccguccugaaguauaauggcauuaucacagacaccauuaagagcuggagaaacaauauccuccggacacaagagucugagugugcgugcgugaacggguccuguuucaccgugaugacggauggaccgagcaauggccaggccucuuacaaaauuuuucgcaucgaaaagggcaaaaucgucaagagcguugagaugaacgcucccaauuaucauuacgaagagugcuccuguuacccugacucuagcgagauuacaugcgugugcagagauaacuggcacggguccaaucggcccugggugagcuucaaccagaaucuggaauaucagaucggauacauuugucgcggcaucuuuggggacaacccuagacccaaugauaaaaccggaucuugcggcccggucuccagcaacggggccaacggagugaagggcuucucuuuuaaguauggcaaugggguuuggauuggacggacaaaauccaucagcucccgcaacggcuucgagaugauuugggacccuaauggguggaccggaaccgauaacaauuuuucuaucaagcaagacaucgugggcauuaacgaauggagcggguacuccggcucuuucguccagcaucccgagcuuacaggacuggacuguaucagaccuugcuucuggguggaacucauucggggccgccccaaagagaauacgaucuggaccagcggguccagcauuucuuuuuguggaguuaacuccgauacagugggcuggagcuggcccgacggggcugagcugccuuucaccaucgauaaguga

SEQ ID NO: 208847 - RNA, 1410 nt, Artificial Sequence; identical to SEQ ID NO: 208800
  derived and/or modified CDS sequence (opt5) from neuraminidase__InfluenzaA__ACQ89918

SEQ ID NO: 208848 - RNA, 1410 nt, Artificial Sequence
  derived and/or modified CDS sequence (opt5) from neuraminidase__InfluenzaA__ACQ89919
augaaccccaaucagaagaucauuaccaucggcagcgugugcaugacaauugggauggccaaccugauccuccaaauuggaaauaucaucuccauuuggaucucuagaagcauucagcugggcaaccagaaucagaucgagacguguaaccaauccgucauuaccuacgaaaauaacacauggguuaaucagaccuaugugaacaucucuaauacaaacuucgcugccgggcagagcguggucuccgugaaacuugcgggaaauucuagccugugcccuguuuccggcugggcuauuuacagcaaggacaacucugugcggaucggguccaaaggagaugucuuugugauccgcgagccguucauuagcuguucuccccucgaaugcagaaccuuuuuccugacacagggcgcccuucugaaugacaagcacuccaacggcaccaucaaagaucggagcccuuaucgcacgcucaugucuugucccauuggggagguuccuucccccuacaacagcagauuugaauccguggccuggucugcuagcgccugccaugacggaaucaauuggcugaccauuggcaucuccgggccugauaacggagcugucgccgugcugaaguauaauggcaucauuacagacaccaucaagagcuggcggaacaauauucuccgcacacaagagucugagugugcgugcgugaacggguccuguuucaccgucaugacggauggaccgagcaauggccaggccucuuacaaaaucuuuagaauugaaaagggcaaaaucguuaagagcguggagaugaacgcucccaauuaucacuacgaagagugcuccuguuacccugacucuagcgagaucacaugcgugugccgggauaacuggcauggguccaaucgccccugggucagcuucaaccagaaucuggaauaucagauuggauacaucuguucuggcauuuuuggggacaacccuagacccaaugauaaaaccggauccugcggcccggugagcucuaacggggccaacggaguuaagggcuucuccuuuaaguauggcaaugggguguggaucggacggacaaaaagcauuuccucucgcaacggcuucgagaugaucugggacccuaauggguggaccggaaccgauaacaauuuuagcauuaagcaagacaucgucggcaucaacgaaugguccggguacucuggcagcuucgugcagcaccccgagcuuacaggacuggacuguauuagaccuugcuucuggguugaacucauccggggccgccccaaagagaauacgauuuggaccuccgggagcucuaucuccuuuuguggagugaacagcgauacagucggcuggucuuggcccgacggggcugagcugccuuucaccauugauaaguga

SEQ ID NO: 208849 - RNA, 1410 nt, Artificial Sequence; identical to SEQ ID NO: 208810
  derived and/or modified CDS sequence (opt5) from neuraminidase__InfluenzaA__ACQ89920

SEQ ID NO: 208850 - RNA, 1410 nt, Artificial Sequence; identical to SEQ ID NO: 208810
  derived and/or modified CDS sequence (opt5) from neuraminidase__InfluenzaA__ACQ89921

SEQ ID NO: 208851 - RNA, 1410 nt, Artificial Sequence; identical to SEQ ID NO: 208800
  derived and/or modified CDS sequence (opt5) from neuraminidase__InfluenzaA__ACQ89922

SEQ ID NO: 208852 - RNA, 1410 nt, Artificial Sequence; identical to SEQ ID NO: 208810
  derived and/or modified CDS sequence (opt5) from neuraminidase__InfluenzaA__ACQ89923

SEQ ID NO: 208853 - RNA, 1410 nt, Artificial Sequence; identical to SEQ ID NO: 208800
  derived and/or modified CDS sequence (opt5) from neuraminidase__InfluenzaA__ACQ99623

SEQ ID NO: 208854 - RNA, 1410 nt, Artificial Sequence; identical to SEQ ID NO: 208810
  derived and/or modified CDS sequence (opt5) from neuraminidase__InfluenzaA__ACQ99624

SEQ ID NO: 208855 - RNA, 1410 nt, Artificial Sequence; identical to SEQ ID NO: 208800
  derived and/or modified CDS sequence (opt5) from neuraminidase__InfluenzaA__ACQ99626

SEQ ID NO: 208856 - RNA, 1410 nt, Artificial Sequence; identical to SEQ ID NO: 208800
  derived and/or modified CDS sequence (opt5) from neuraminidase__InfluenzaA__ACQ99627

SEQ ID NO: 208857 - RNA, 1410 nt, Artificial Sequence; identical to SEQ ID NO: 208800
  derived and/or modified CDS sequence (opt5) from neuraminidase__InfluenzaA__ACQ99628

SEQ ID NO: 208858 - RNA, 1410 nt, Artificial Sequence; identical to SEQ ID NO: 208800
  derived and/or modified CDS sequence (opt5) from neuraminidase__InfluenzaA__ACQ99629

SEQ ID NO: 208859 - RNA, 1410 nt, Artificial Sequence; identical to SEQ ID NO: 208800
  derived and/or modified CDS sequence (opt5) from neuraminidase__InfluenzaA__ACQ99630

SEQ ID NO: 208860 - RNA, 1410 nt, Artificial Sequence; identical to SEQ ID NO: 208810
  derived and/or modified CDS sequence (opt5) from neuraminidase__InfluenzaA__ACQ99632

SEQ ID NO: 208861 - RNA, 1410 nt, Artificial Sequence; identical to SEQ ID NO: 208810
  derived and/or modified CDS sequence (opt5) from neuraminidase__InfluenzaA__ACQ99633

SEQ ID NO: 208862 - RNA, 1410 nt, Artificial Sequence; identical to SEQ ID NO: 208800
  derived and/or modified CDS sequence (opt5) from neuraminidase__InfluenzaA__ACQ99635

SEQ ID NO: 208863 - RNA, 1410 nt, Artificial Sequence; identical to SEQ ID NO: 208800
  derived and/or modified CDS sequence (opt5) from neuraminidase__InfluenzaA__ACQ99636

SEQ ID NO: 208864 - RNA, 1410 nt, Artificial Sequence
  derived and/or modified CDS sequence (opt5) from neuraminidase__InfluenzaA__ACQ99684
augaaccccaaucagaagaucauuaccaucggcagcgugugcaugacaauugggauggccaaccugauccuccaaauuggaaauaucaucuccauuuggaucucucacagcauucagcugggcaaccagaaucagaucgagacguguaaccaauccgucauuaccuacgaaaauaacacauggguuaaucagaccuaugugaacaucucuaauacaaacuucgcugccgggcagagcguggucuccgugaaacuugcgggaaauucuagccugugcccuguuuccggcugggcuauuuacagcaaggacaacucuaucagaaucggguccaaaggagauguguuugucauucgggagccguucaucagcuguucuccccucgaaugccgcaccuuuuuccugacacagggcgcccuucugaaugacaagcauuccaacggcaccauuaaagauagaagcccuuaucggacgcucaugucuugucccaucggggaggugccuucccccuacaacagccgcuuugaauccguugccuggucugcuagcgccugccacgacggaauuaauuggcugaccaucggcaucuccgggccugauaacggagcuguggccguccugaaguauaauggcauuaucacagacaccauuaagagcuggagaaacaauauccuccggacacaagagucugagugugcgugcgugaacggguccuguuucaccgugaugacggauggaccgagcgacgaacaggccucuuacaaaauuuuucgcaucgagaagggcaaaaucgucaagagcguugaaaugaaugcucccaacuaucauuacgaggagugcuccuguuacccugauucuagcgaaauuacaugcgugugcagagacaauuggcacggcuccaaccggcccugggugagcuucaaucagaaccuggaguaucagaucggguacauuuguucuggaaucuuuggcgauaauccucgccccaacgacaaaaccggguccugcggaccggucagcucuaauggcgccaacggggugaagggauucuccuuuaaguauggcaacggcguuuggauugggagaacaaaaagcaucuccucucggaauggauucgaaaugauuugggauccuaacggcuggaccgggaccgacaauaacuuuagcaucaagcaagacaucgugggaauuaaugagugguccggcuacucugggagcuucguccagcaucccgaacuuacaggccuggauuguauccgcccuugcuucuggguggagcucauuagaggacggcccaaagagaacacgaucuggaccuccggcagcucuauuuccuuuugugggguuaauagcgacacagugggauggucuuggcccgauggcgcugaacugccuuucaccaucgacaaguga

SEQ ID NO: 208865 - RNA, 1410 nt, Artificial Sequence
  derived and/or modified CDS sequence (opt5) from neuraminidase__InfluenzaA__ACQ99824
augaacaccaaucagagaaucauuacaaucggcacgauuugccugaucguggggauuaucagccuccugcuucaaaucggaaacauuauccugcucuggaugucccacucuauucagaccggcgaaaagagccaucccaaagucuguaaucaguccguuaucacauacgagaacaauaccugggugaaccagacauaugugaauauuucuaacaccaauaucgccgcugggcaaggagucacaccuauuauccuggccggcaacagcucccuuugcccgaucucugggugggcgauuuacagcaaggacaauuccauccggauuggaagcaaaggcgauaucuucgugaugcgcgagcccuuuauuucuuguucccaccuggaaugcagaaccuucuuucucacgcagggcgcucugcugaacgaccggcauagcaaugggaccguuaaggaucgcucuccuuauagaacacucauguccugucccaucggagaggccccuagccccuacaacucucgguucgaauccguggccuggagcgcuuccgccugccacgacggcaugggguggcugaccaucggaauuucuggcccugauaauggggcugucgccgugcuuaaauauaacggaaucauuacagacaccaucaagagcuggcgcaacaagauucugagaacgcaggaguccgaguguguuugcaucaauggcagcuguuuuacaaucaugaccgauggcccgucuaacgggcaggcguccuacaaacucuucaagauggaaaaaggaaagauuaucaaaagcauugagcuggacgcccccaauuaucauuacgaagagugcucuuguuacccugauacaggcaagguggucugcgugugccgggacaacuggcacgcuagcaaucgccccuggguguccuuugaucaaaaccuugacuaucagaucggguacauuuguucuggagucuucggcgauaauccuagaagcaacgacgggaagggaaauugcggccccguucuguccaacggcgccaauggggugaaaggauuuagcuuccgguauggcaacgggguguggaucggacgcaccaagucuauuuccagcagaucuggcuuugagaugaucugggacccgaauggguggaccgaaacagauuccagcuucuccaugaaacaggacaucauugcucucacggauuggucuggcuacagcggauccuuuguccagcacccugagcugaccggcaugaacuguauccggcccugcuucuggguggaacugauucgcgggcaaccuaaggagucuacaaucuggaccagcggauccagcauuucuuucuguggcguuaauuccgggacagccagcuggucuuggcccgacggagcggaucuccccuuuaccaucgacaaauga

SEQ ID NO: 208866 - RNA, 1410 nt, Artificial Sequence; identical to SEQ ID NO: 208810
  derived and/or modified CDS sequence (opt5) from neuraminidase__InfluenzaA__ACR01015

SEQ ID NO: 208867 - RNA, 1410 nt, Artificial Sequence; identical to SEQ ID NO: 208810
  derived and/or modified CDS sequence (opt5) from neuraminidase__InfluenzaA__ACR08422

SEQ ID NO: 208868 - RNA, 1410 nt, Artificial Sequence; identical to SEQ ID NO: 208810
  derived and/or modified CDS sequence (opt5) from neuraminidase__InfluenzaA__ACR08432

SEQ ID NO: 208869 - RNA, 1410 nt, Artificial Sequence; identical to SEQ ID NO: 208810
  derived and/or modified CDS sequence (opt5) from neuraminidase__InfluenzaA__ACR08442

SEQ ID NO: 208870 - RNA, 1410 nt, Artificial Sequence; identical to SEQ ID NO: 208810
  derived and/or modified CDS sequence (opt5) from neuraminidase__InfluenzaA__ACR08452

SEQ ID NO: 208871 - RNA, 1410 nt, Artificial Sequence
  derived and/or modified CDS sequence (opt5) from neuraminidase__InfluenzaA__ACR08462
augagccccaaccagaagaucauuaccaucggcuccgugugcaugacaauugggauggccaaucugauccuccaaauuggaaacaucaucucuauuuggaucagccacuccauucagcugggcaaucagaaccagaucgagacguguaaucaaucugucauuaccuacgaaaacaauacauggguuaaccagaccuaugugaauaucagcaacacaaauuucgcugccgggcaguccguggucucugugaaacuugcgggaaacagcucccugugcccuguuagcggcugggcuauuuacucuaaggacaauuccgugagaaucgggagcaaaggagaugucuuugugauccgggagccguucauuucuuguagcccccucgaaugccgcaccuuuuuccugacacagggcgcccuucugaacgacaagcauuccaauggcaccaucaaagauagaucuccuuaucggacgcucauguccugucccauuggggagguuccuagccccuacaacucccgcuuugaaucuguggccuggagcgcuuccgccugccacgacggaaucaacuggcugaccauuggcaucagcgggccugauaauggagcugucgccgugcugaaguauaacggcaucauuacagacaccaucaagucuuggagaaauaacauucuccggacacaagaguccgagugugcgugcgugaaugggagcuguuucaccgucaugacggauggaccgucuaacggccaggccagcuacaaaaucuuucgcauugaaaagggcaaaaucguuaaguccguggagaugaaugcucccaacuaucauuacgaagagugcucuuguuacccugacagcuccgagaucacaugcgugugcagagauaauuggcacgggagcaaccggcccugggucucuuucaaucagaaccuggaauaucagauuggauacaucuguuccggcauuuuuggggacaauccucgccccaacgauaaaaccggaagcugcggcccggugucuuccaauggggccaacggaguuaagggcuucagcuuuaaguauggcaacgggguguggaucggaagaacaaaauccauuucuagccggaauggcuucgagaugaucugggacccuaacggguggaccggaaccgauaauaacuuuuccauuaagcaagacaucgucggcaucaaugaauggucuggguacagcggcuccuucgugcagcaucccgagcuuacaggacuggacuguauucgcccuugcuucuggguugaacucaucagaggccggcccaaagagaacacgauuuggaccagcgggucuuccaucagcuuuuguggagucaauucugauacagugggcugguccuggcccgacggggcugagcugccuuucaccauugauaaguga

SEQ ID NO: 208872 - RNA, 1410 nt, Artificial Sequence
  derived and/or modified CDS sequence (opt5) from neuraminidase__InfluenzaA__ACR08565
augaaccccaaucagaagaucauuaccaucggcagcgugugcaugacaauugggauggccaaccugauccuccaaauuggaaauaucaucuccauuuggaucucucacagcauucagcugggcaaccagaaucagaucgagacguguaaccaauccgucauuaccuacgaaaauaacacauggguuaaucagaccuaugugaacaucucuaauacaaacuucgcugccgggcagagcguggucccugugaaacuugcgggaaauuccucucugugcccgguuagcggcugggcuauuuacuccaaggacaacagcgugagaaucgggucuaaaggagaugucuuugugauccgggagcccuucauuuccuguagcccucucgaaugccgcaccuuuuuccugacacagggcgcccuucugaaugacaagcauucuaacggcaccaucaaagauagaucccccuaucggacgcucaugagcuguccuauuggggagguucccucuccuuacaacucccgcuuugaaagcguggccugguccgcuucugccugccacgacggaaucaauuggcugaccauuggcaucagcgggccggauaacggagcugucgccgugcugaaguauaauggcaucauuacagacaccaucaaguccuggagaaacaauauucuccggacacaagagagcgagugugcgugcgugaacgggucuuguuucaccgucaugacggauggacccuccaauggccaggccagcuacaaaaucuuucgcauugaaaagggcaaaaucguuaagucuguggagaugaacgcuccuaauuaucauuacgaagagugcagcuguuaccccgacuccucugagaucacaugcgugugcagagauaacuggcacgggagcaaucggccuugggucuccuucaaccagaaucuggaauaucagauuggauacaucuguagcggcauuuuuggggacaacccccgcccgaaugauaaaaccggaucuugcggcccuguguccagcaacggggccaacggaguuaagggcuucucuuuuaaguauggcaaugggguguggaucggaagaacaaaauccauuagcucccggaacggcuucgagaugaucugggaccccaauggguggaccggaaccgauaacaauuuuucuauuaagcaagacaucgucggcaucaacgaauggagcggguacuccggcucuuucgugcagcauccugagcuuacaggacuggacuguauucgccccugcuucuggguugaacucaucagaggccggcccaaagagaauacgauuuggaccagcggguccagcaucucuuuuuguggagugaacuccgauacagucggcuggagcuggccugacggggcugagcugccguucaccauugauaaguga

SEQ ID NO: 208873 - RNA, 1410 nt, Artificial Sequence; identical to SEQ ID NO: 208800
  derived and/or modified CDS sequence (opt5) from neuraminidase__InfluenzaA__ACR08566

SEQ ID NO: 208874 - RNA, 1410 nt, Artificial Sequence; identical to SEQ ID NO: 208810
  derived and/or modified CDS sequence (opt5) from neuraminidase__InfluenzaA__ACR08567

SEQ ID NO: 208875 - RNA, 1410 nt, Artificial Sequence; identical to SEQ ID NO: 208800
  derived and/or modified CDS sequence (opt5) from neuraminidase__InfluenzaA__ACR08568

SEQ ID NO: 208876 - RNA, 1410 nt, Artificial Sequence; identical to SEQ ID NO: 208800
  derived and/or modified CDS sequence (opt5) from neuraminidase__InfluenzaA__ACR08569

SEQ ID NO: 208877 - RNA, 1410 nt, Artificial Sequence; identical to SEQ ID NO: 208810
  derived and/or modified CDS sequence (opt5) from neuraminidase__InfluenzaA__ACR08570

SEQ ID NO: 208878 - RNA, 1410 nt, Artificial Sequence; identical to SEQ ID NO: 208800
  derived and/or modified CDS sequence (opt5) from neuraminidase__InfluenzaA__ACR08571

SEQ ID NO: 208879 - RNA, 1410 nt, Artificial Sequence; identical to SEQ ID NO: 208800
  derived and/or modified CDS sequence (opt5) from neuraminidase__InfluenzaA__ACR08572

SEQ ID NO: 208880 - RNA, 1410 nt, Artificial Sequence; identical to SEQ ID NO: 208800
  derived and/or modified CDS sequence (opt5) from neuraminidase__InfluenzaA__ACR08573

SEQ ID NO: 208881 - RNA, 1410 nt, Artificial Sequence; identical to SEQ ID NO: 208800
  derived and/or modified CDS sequence (opt5) from neuraminidase__InfluenzaA__ACR08574

SEQ ID NO: 208882 - RNA, 1410 nt, Artificial Sequence; identical to SEQ ID NO: 208810
  derived and/or modified CDS sequence (opt5) from neuraminidase__InfluenzaA__ACR08576

SEQ ID NO: 208883 - RNA, 1410 nt, Artificial Sequence; identical to SEQ ID NO: 208800
  derived and/or modified CDS sequence (opt5) from neuraminidase__InfluenzaA__ACR08577

SEQ ID NO: 208884 - RNA, 1410 nt, Artificial Sequence; identical to SEQ ID NO: 208800
  derived and/or modified CDS sequence (opt5) from neuraminidase__InfluenzaA__ACR09378

SEQ ID NO: 208885 - RNA, 1410 nt, Artificial Sequence; identical to SEQ ID NO: 208800
  derived and/or modified CDS sequence (opt5) from neuraminidase__InfluenzaA__ACR09379

SEQ ID NO: 208886 - RNA, 1410 nt, Artificial Sequence; identical to SEQ ID NO: 208810
  derived and/or modified CDS sequence (opt5) from neuraminidase__InfluenzaA__ACR09380

SEQ ID NO: 208887 - RNA, 1410 nt, Artificial Sequence; identical to SEQ ID NO: 208800
  derived and/or modified CDS sequence (opt5) from neuraminidase__InfluenzaA__ACR09381

SEQ ID NO: 208888 - RNA, 1410 nt, Artificial Sequence; identical to SEQ ID NO: 208800
  derived and/or modified CDS sequence (opt5) from neuraminidase__InfluenzaA__ACR09382

SEQ ID NO: 208889 - RNA, 1410 nt, Artificial Sequence; identical to SEQ ID NO: 208810
  derived and/or modified CDS sequence (opt5) from neuraminidase__InfluenzaA__ACR09383

SEQ ID NO: 208890 - RNA, 1410 nt, Artificial Sequence; identical to SEQ ID NO: 208800
  derived and/or modified CDS sequence (opt5) from neuraminidase__InfluenzaA__ACR09384

SEQ ID NO: 208891 - RNA, 1410 nt, Artificial Sequence; identical to SEQ ID NO: 208810
  derived and/or modified CDS sequence (opt5) from neuraminidase__InfluenzaA__ACR09385

SEQ ID NO: 208892 - RNA, 1410 nt, Artificial Sequence; identical to SEQ ID NO: 208800
  derived and/or modified CDS sequence (opt5) from neuraminidase__InfluenzaA__ACR09386

SEQ ID NO: 208893 - RNA, 1410 nt, Artificial Sequence; identical to SEQ ID NO: 208810
  derived and/or modified CDS sequence (opt5) from neuraminidase__InfluenzaA__ACR10189

SEQ ID NO: 208894 - RNA, 1410 nt, Artificial Sequence; identical to SEQ ID NO: 208810
  derived and/or modified CDS sequence (opt5) from neuraminidase__InfluenzaA__ACR10226

SEQ ID NO: 208895 - RNA, 1410 nt, Artificial Sequence; identical to SEQ ID NO: 208800
  derived and/or modified CDS sequence (opt5) from neuraminidase__InfluenzaA__ACR10236

SEQ ID NO: 208896 - RNA, 1410 nt, Artificial Sequence; identical to SEQ ID NO: 208800
  derived and/or modified CDS sequence (opt5) from neuraminidase__InfluenzaA__ACR10237

SEQ ID NO: 208897 - RNA, 1410 nt, Artificial Sequence
  derived and/or modified CDS sequence (opt5) from neuraminidase__InfluenzaA__ACR15186
augaaccccaaucagaagaucauuaccaucggcagcgugucccugacaauuucuacgaucugcuucuuuaugcaaauugccauccucaucaccacagucacccugcacuucaaacaguacgaguuuaacagcccuccgaauaaccagguuaugcuuugugaacccacaauuaucgagagaaauauuaccgaaaucguguaucugacaaacaccacgauugagaaggaaaucugcccuaaacucgcugaguaccggaagugguccaaaccccaguguaauauuaccggguucgccccuuuuucuaaggacaacagcauccgccuguccgcgggaggcgauaucugggugacaagagagcccuaugucucuugcgacccugauaaguguuaccaauucgcucuugggcagggaaccacacugaauaacgugcauagcaaugacaccguucgggaucgcacgccguauagaacacuccugaugaacgaacugggcgugcccuuucaccucgggaccaaacaggucugcauugccugguccucuagcuccugucaugacggaaaggccuggcugcacgugugcguuacaggcgaugacaaaaaugcuaccgccagcuucaucuacaacggccggcuuguggauucuauugucuccuggagcaaggagauccugcgcacccaggaaucugagugugugugcauuaaugggacauguacgguggucaugaccgacggauccgcuagcggcaaagccgauacaaagauccucuuuaucgaggaagggaagauuguucauaccuccacacugucuggaagcgcgcaacacguggaggaaugcuccugcuauccuagacaccccggcgugcggugugucugccgcgacaacuggagagggagcaaccggccuaucguggauauuaauaugaaagacuacucuaucguuuccagcuacguguguucuggacuugucggcgacacgccccgcaagaacgauagcuccucuagcggccauugccuggacccgaauaacgaggaagggggacacggcgugaaagggugggccuucgaugacggaaaugauguuuggaugggcagaaccauuuccgagaagcuccggagcggguaugagacauuuaaagugaucgaaggauggucuaacccuaauuccaagcugcagaucaaccgccaggucauuguggacagaggcaaucggagcggcuacucugggaucuucuccgucgagggaaaaagcuguauuaacagaugcuuuuauguggaacugauccgcggccggaaggaggaaaccgagguucucuggaccuccaauucuauuguggucuucugugggacaagcggaaccuacggcacaggguccuggcccgauggcgcugacaucaaccugaugccuauuuga

SEQ ID NO: 208898 - RNA, 1413 nt, Artificial Sequence; identical to SEQ ID NO: 208704
  derived and/or modified CDS sequence (opt5) from neuraminidase__InfluenzaA__ACR15197

SEQ ID NO: 208899 - RNA, 1410 nt, Artificial Sequence
  derived and/or modified CDS sequence (opt5) from neuraminidase__InfluenzaA__ACR15208
augaaccccaaucagaagaucauuaccaucggcagcgugucccugacaauuucuacgaucugcuucuuuaugcaaauugccauccucaucaccacagucacccugcacuucaaacaguacgaguuuaacagcccuccgaauaaccagguuaugcuuugugaacccacaauuaucgagagaaauauuaccgaaaucguguaucugacaaacaccacgauugagaaggaaaucugcccuaaacucgcugaguaccggaauugguccaagccccagugugacauuaccggguucgccccuuuuucuaaagauaacagcauccgccuguccgcgggaggcgacaucugggugacaagagagcccuaugucucuugcgauccugacaaguguuaccaauucgcucuugggcagggaaccacacugaauaacgugcauagcaaugauaccguucgggaccgcacgccguauagaacacuccugaugaacgaacugggcgugcccuuucaccucgggaccaagcaggucugcauugccugguccucuagcuccugucaugauggaaaagccuggcugcacgugugcaucacaggcgacgauaagaaugcuaccgccagcuucauuuacaacggccggcuuguugacucuaucguguccuggagcaaagagauucugcgcacccaggaaucugagugugucugcaucaaugggacauguacgguggugaugaccgauggauccgcuagcggcaaggccgacacaaaaauccucuuuauugaggaagggaagaucguccauaccuccacacugucuggaagcgcgcaacacguugaggaaugcuccugcuauccuagauaccccggcgugcggugugugugccgcgauaacuggaaggggagcaacagaccuauugucgacaucaauauuaaagaccacucuaucguguccagcuacguuuguucuggacuugugggcgauacgccccggaagaacgacagcuccucuagcucccauugccuggauccgaauaacgaggaaggcgggcacggagucaaaggcugggccuucgacgaugggaaugacguguggaugggacgcaccaucagcgagaagucuagacucggcuaugagacauuuaaaguuauugaagggugguccaacccuaagagcaaacugcagaucaaucgccaggugauugucgauaagggaaaccggucuggcuacuccggcaucuucagcguggaggggaaguccuguauuaauagaugcuuuuaugucgaacugauccggggaagaaaagaggaaaccgaggugcucuggaccucuaacagcauuguuguguucuguggcacauccgggaccuacggaacaggcucuuggcccgacggggcugauaucaaucugaugccuaucuga

SEQ ID NO: 208900 - RNA, 1410 nt, Artificial Sequence
  derived and/or modified CDS sequence (opt5) from neuraminidase__InfluenzaA__ACR15230
auggaccccaaccagaagaucauuaccaucggcagcgugucccugacaauuucugccaucugcuucuuuaugcaaauugcuauccucaucacgaccgucacacugcacuucaaacaguacgaguuuaauagcccuccgaacaaucagguuaugcuuugugaacccaccauuaucgagagaaacauuacagaaaucguguaucugaccaauacaaccauugagaaggaaaucugcccuaaacucgccgaguaccggaacugguccaagccccaguguaauauuacgggguucgcgccuuuuucuaaagauaacagcauccgccuguccgcuggaggcgacaucugggugaccagagagcccuaugucucuugcgauccugacaaguguuaccaauucgcccuugggcagggaacaacccugaauaacgugcauagcaaugauacaguucacgaccggaccccguaucgcacgcuccugaugaacgaacugggcgugcccuuucaucucgggacaaagcaggucugcauugccugguccucuagcuccugucacgauggaaaagccuggcugcaugugugcguuaccggcgacgaugagaaugcuacagcuagcuucaucuacaacggcagacuuguggacucugucguguccuggagcaagaaaauucugcggacccaggaaucugagugugugugcaucaaugggaccuguacagucguuaugacggauggauccgccagcggcaaggcggacaccaaaauucucuuuaucgaggaagggaagaucgugcacacauccacccugucuggaagcgcccaacacguggaggaaugcuccugcuauccucgcuaccccggcgucagaugugugugccgggauaacuggaaggggagcaaccgcccuauuguugacaucaauauuaaagacuacucuaucguguccagcuaugucuguucuggacuugugggcgauacacccagaaagaacgacagcuccucuaauagccauugccuggauccgaacaaugaggaaggcgggcacggaguuaaaggcugggcuuucgacgaugggaacgacguguggaugggacggaccauuuccgagaagcuccgcagcggcuacgagacguuuaaagucaucgaaggguggucuaauccuaacuccaagcugcagaucaauagacaggugauugucgaucggggaaaccgcagcggcuauucuggcaucuucuccguggaggggaaaagcuguauuaauagaugcuuuuacguugaacugauccggggaagaaaccaggagacagaagugcucuggaccuccaauucuauugucguguucuguggcaccagcgggacauauggaaccggcuccuggcccgacggggccgauaucaaccugaugccuauuuga

SEQ ID NO: 208901 - RNA, 1413 nt, Artificial Sequence; identical to SEQ ID NO: 208704
  derived and/or modified CDS sequence (opt5) from neuraminidase__InfluenzaA__ACR15241

SEQ ID NO: 208902 - RNA, 1410 nt, Artificial Sequence; identical to SEQ ID NO: 207956
  derived and/or modified CDS sequence (opt5) from neuraminidase__InfluenzaA__ACR15252

SEQ ID NO: 208903 - RNA, 1413 nt, Artificial Sequence
  derived and/or modified CDS sequence (opt5) from neuraminidase__InfluenzaA__ACR15263
augaaccccaaucagaagaucauuaccaucggcagcauuuccaucgccauugggaucaucucucugaugcuccaaauuggaaacaucauuagcaucugggcuucccacucuauucagacaggcagccagaauaacacggggaucugcaaucagagaauuaucaccuacgagaacuccacaugggugaaucauaccuaugucaacaucaauaacacaaauguuguggccggagaagacaaaaccucugugacacuggcgggcaacagcucccuuuguagcauuucugggugggcuaucuacaccaaggauaauuccauucggaucggaagcaaaggcgacgucuucgugauucgcgagccuuuuaucucuugcucccaccuggaauguagaacguucuuucucacccaaggcgcccugcuuaacgauaagcauagcaaugggacaguuaaagaccggucuccguaucgcgcccugauguccugcccccucggagaggcuccuagccccuacaacuccaaguucgaaucuguggccuggagcgcuuccgccugucacgauggcaugggguggcugaccaucggaauuagcggcccugacaacggggcggucgccgugcugaaguauaauggaaucauuacaggcaccaucaaaucuuggaagaaacagauucucagaacgcaggaguccgagugcguuuguaugaacggcagcugcuuuacaaucaugaccgaugggcccucuaauaaggcugccagcuacaaaaucuucaagauugaaaagggaaaagugacaaaguccaucgagcugaacgcuccuaauuuucauuaugaagaguguucuugcuacccggacaccggcauugucaugugugugugccgggauaacuggcacgggagcaaucgccccuggguguccuucaaccagaaucuugacuaccaaaucggauauauuugcagcggcgucuuuggggauaacccuagacccgaggacggagaaggcucuuguaauccuguuaccguggauggcgccaacggggugaaaggauucuccuacaaguaugacaauggcgucuggaucgggcggacaaaaagcaaccgccugagaaagggauuugagaugauuugggaccccaauggcuggacgaacaccgauucugacuucuccgugaaacaggauguuguggcgaucacagacuggagcggguacuccggcucuuuuguccagcacccggaacucaccggacuggauugcauccggccuuguuucuggguggagcuuguucgcggccugcccagagaaaacacaaccauuuggagcuccgggucuagcaucuccuucugcggagugaauagcgacacggccaacuggucuuggccugauggcgcugagcuccccuuuacaauugacaaguga

SEQ ID NO: 208904 - RNA, 1413 nt, Artificial Sequence; identical to SEQ ID NO: 208704
  derived and/or modified CDS sequence (opt5) from neuraminidase__InfluenzaA__ACR15274

SEQ ID NO: 208905 - RNA, 1413 nt, Artificial Sequence
  derived and/or modified CDS sequence (opt5) from neuraminidase__InfluenzaA__ACR15307
augaaccccaaucagaagaucauuaccaucggcagcauuuccaucacaauugggaucaucucucugaugcuccaaauuggaaacaucauuagcaucugggccucccacucuauucagacgggcagccagaaucauaccgggaucugcaaccagagaauuaucacauacgagaauaacaccugggugaaucacacauaugucaacaucaauaacaccaauguuguggcuggaaaagacaagacauccgugacccuggccggcaacucuagccuuuguuccauuagcgggugggcgaucuacacgaaagauaauucuauucggaucggauccaagggcgacgucuucgugauucgcgaaccuuuuaucagcugcucucaucuggaguguagaaccuucuuucucacacaaggcgcucugcuuaacgauaaacacuccaaugggaccguuaaggaccggagcccguaucgcgcccugaugucuugcccccucggagaagccccuucccccuacaacagcaaguucgaguccguggcuuggucugccagcgcuugucaugauggcaugggguggcugacaaucggaauuuccggcccugacaacggggccgucgcggugcugaaauauaauggaaucauuaccgaaacgaucaagagcuggaaaaagcggauucucagaacacaggagucugagugcguuugugugaacggcuccugcuuuaccaucaugacagauggccccagcaauggggccgcuucuuacaaaaucuucaagauugaaaagggaaaagucaccaagagcaucgagcugaacgccccuaauuuucacuaugaagaguguuccugcuacccggacaccggcacagugaugugugugugccgcgauaacuggcacgggucuaauagacccugggucagcuucaaccagaaucuugacuaccagauuggauauaucugcuccggcguuuuuggggauaacccucggcccaaagacggagagggcagcuguaauccugugacgguggauggcgcugacggggucaagggauucucuuacaaauauggcaacgggguguggauuggacgcaccaaguccaauagacugcggaaaggcuuugaaaugaucugggaccccaacggguggacagauaccgacagcgauuucucuguuaagcaagacguggucgccauuacagauugguccggcuacagcggauccuuugugcagcauccggagcucaccggccuggacugcauccgcccuuguuucuggguugaacuugugagagggcugccccgggagaauacgacaaucuggaccucuggaagcuccauuucuuucugcggcgucaacagcgauaccgcgaacugguccuggccugacggggccgaacuccccuuuacaaucgauaaguga

SEQ ID NO: 208906 - RNA, 1413 nt, Artificial Sequence
  derived and/or modified CDS sequence (opt5) from neuraminidase__InfluenzaA__ACR15318
augaaccccaaucagaagaucauuaccaucggcagcauuuccaucgccauugggaucaucucucugaugcuccaaauuggaaacaucauuagcaucugggcuucccacucuauucagacaggcagccagaaucauacgggggugugcaaccagagaaucauuaccuacgaaaauuccacaugggucaaccacaccuauguuaauaucaacaauacaaacgugaucgccggaaaagacaagaccucugugacacuggcgggcaauagcucccuuuguagcauuucugggugggcuaucuacaccaaagauaacuccauucggaucggaagcaagggcgacgucuucgugauucgcgagccuuuuaucucuugcucccaucuggaguguagaacguucuuucucacccaaggcgcccugcuuaaugauaaacacagcaacgggacaguuaaggaccggucuccguaucgcgcccugauguccugcccccucggagaagcuccuagccccuacaauuccaaguucgagucuguggccuggagcgcuuccgccugucaugauggcaugggguggcugaccaucggaauuagcggcccugacaacggggcggucgccgugcugaaauauaacggaaucauuacagaaaccaucaagucuuggaaaagacagauucuccggacgcaggaguccgagugcguuugugugaauggcagcugcuuuacaaucaugaccgauggccccucuaacggggcugccagcuacaagaucuucaaaauugaaaagggaaaggucacaaaauccaucgagcugaaugcuccuaacuuucacuaugaagaguguucuugcuacccggacaccggcaccgugaugugugugugccgcgauaauuggcacgggagcaacagacccugggucuccuucaaucagaaccuugacuaccaaauuggauauaucugcagcggcguuuuuggggauaauccucggcccaaggacggagagggcucuuguaacccugugacaguggauggcgccaauggggucaaaggauucuccuacaaguauggcaacgggguguggauuggacgcacgaaaagcaauagacugcggaagggcuuugaaaugaucugggaccccaacggguggaccgacacagauucugacuucuccguuaaacaggauguggucgcgauuaccgacuggagcggcuacuccggaucuuuugugcagcauccggagcucacaggccuggauugcauccgcccuuguuucuggguugaacuugugagagggcugcccaaggagaauaccacgaucuggacaagcggauccucuauuagcuucugcggcgucaacuccgacaccgccaacuggagcuggccugauggggcugaacuccccuuuaccaucgacaaguga

SEQ ID NO: 208907 - RNA, 1413 nt, Artificial Sequence
  derived and/or modified CDS sequence (opt5) from neuraminidase__InfluenzaA__ACR15329
augaaccccaaucagaagaucauuaccaucggcagcauuuccaucgccauugggaucaucucucugaugcuccaaauuggaaacaucauuagcaucugggcuucccacucuauucagacaagaagccagaaucauacgggcgugugcaaccagcggaucauuaccuacgagaauagcacaugggucaaccacaccuauguuaauaucaacaauacaaacgugaucgccgggaaagacaagaccucugugacacuggcgggaaauagcucccuuuguagcauuucuggcugggcuaucuacaccaaagauaacuccauucgcaucgggagcaagggagacgucuucgugauuagagaaccuuuuaucucuugcucccaucuggagugucggacguucuuucucacccaaggcgcccugcuuaaugauaaacacagcaacggcacaguuaaggaccgcucuccguauagagcccugauguccugcccccucggggaagcuccuagccccuacaauuccaaguucgagucuguggccuggagcgcuuccgccugucaugauggaaugggcuggcugaccaucgggauuagcggaccugacaacggcgcggucgccgugcugaaauauaacgggaucauuacagaaaccaucaagucuuggaaaaagcagauucuccggacgcaggaguccgagugcguuugugugaauggaagcugcuuuacaaucaugaccgauggccccucuaacggcgcugccagcuacaaaaucuucaagauugaaaaggggaaagucacaaaguccaucgagcugaaugcuccuaacuuucacuaugaagaguguucuugcuacccggacaccggaaccgugaugugugugugccgcgauaauuggcacggcagcaacagacccugggucuccuucaaucagaaccuugacuaccaaauuggguauaucugcagcggaguuuuuggcgauaauccucggcccaaagacggggagggaucuuguaacccugugacaguggauggcgccaauggcgucaagggguucuccuacaaauauggaaacggcguguggauugggcgcacgaaguccaauagacugcggaaaggauuugaaaugaucugggaccccaacggcuggaccgacacagauucugacuucuccguuaagcaggauguggucgcgauuaccgacuggagcggguacuccggcucuuuugugcagcauccggagcucacaggacuggauugcauccgcccuuguuucuggguugaacuugugagaggccugcccaaggagaauaccacgaucuggacaagcggguccucuauuagcuucugcggagucaacuccgacaccgccaacuggagcuggccugauggcgcugaacuccccuuuaccaucgacaaauga

SEQ ID NO: 208908 - RNA, 1413 nt, Artificial Sequence; identical to SEQ ID NO: 208704
  derived and/or modified CDS sequence (opt5) from neuraminidase__InfluenzaA__ACR15340

SEQ ID NO: 208909 - RNA, 1413 nt, Artificial Sequence; identical to SEQ ID NO: 208704
  derived and/or modified CDS sequence (opt5) from neuraminidase__InfluenzaA__ACR15362

SEQ ID NO: 208910 - RNA, 1413 nt, Artificial Sequence; identical to SEQ ID NO: 208704
  derived and/or modified CDS sequence (opt5) from neuraminidase__InfluenzaA__ACR15373

SEQ ID NO: 208911 - RNA, 1413 nt, Artificial Sequence
  derived and/or modified CDS sequence (opt5) from neuraminidase__InfluenzaA__ACR15428
augaaccccaaucagaagaucauuaccaucggcagcauuuccaucgccauugggaucaucucucugaugcuccaaauuggaaacaucauuagcaucugggcuucccacucuauucagacaggcagccagaauaacacggggaucugcaaucagagaauuaucaccuacgagaacuccacaugggugaaucauaccuaugucaacaucaauaacacaaauguuguggccggagaagacaaaaccucugugacacuggcgggcaacagcucccuuuguagcgucucugggugggcuauuuacaccaaggauaauuccauccggauuggaagcaaaggcgacguguucguuauccgcgagccuuuuauuucuugcucccaccuggaauguagaacguucuuucucaccaagggcgcccugcuuaacgauaaacauagcaaugggacagugaaggaccggucuccguaucgcgcccugauguccugcccccucggagaggcuccuagccccuacaacuccaaguucgaaucugucgccuggagcgcuuccgccugucacgauggcaugggguggcugaccaucggaaucagcggcccugacaacggggcgguggccguucugaaauauaauggaauuaucacaggcaccauuaagucuuggaaaaagcaaauccucagaacgcaggaguccgagugcguguguaugaacggcagcugcuuuacaauuaugaccgaugggcccucuaauaaagcugccagcuacaagaucuucaagaucgaaaaaggaaaggucacaaaauccauugagcugaacgcuccuaauuuucauuaugaagaguguucuugcuacccggacaccggcaucgugaugugugugugccgggauaacuggcacgggagcaaucgccccugggucuccuucaaccagaaucuugacuaccagauuggauauaucugcagcggcguuuuuggggauaacccuagacccgaggacggagaaggcucuuguaauccugugaccguggauggcgccaacggggucaagggauucuccuacaaauaugacaauggcguguggauugggcggacaaagagcaaccgccugagaaaaggauuugagaugaucugggaccccaauggcuggacgaacaccgauucugacuucuccguuaagcaagauguggucgcgauuacagacuggagcggguacuccggcucuuuugugcagcacccggaacucaccggacuggauugcauccggccuuguuucuggguugagcuugugcgcggccugcccagagaaaacacaaccaucuggacgagcggguccucuauuagcuucugcggagucaauuccgacacagccaacuggagcuggccugauggcgcugagcuccccuuuaccaucgacaaguga

SEQ ID NO: 208912 - RNA, 1413 nt, Artificial Sequence
  derived and/or modified CDS sequence (opt5) from neuraminidase__InfluenzaA__ACR15472
augaaccccaaucagaagaucauuaccaucggcagcauuuccaucgccauugggaucaucucucugaugcuccaaauuggaaacaucauuagcaucugggcuucccacucuauucagacaggcagccagaauaacacggggaucugcaaucagagaauuaucaccuacgagaacuccacaugggugaaucauaccuaugucaacaucaauaacacaaauguuguggccggagaagacaaaaccccugugacacuggcgggcaacucuagccuuuguuccauuagcgggugggcuaucuacaccaaggauaauucuauucggaucggauccaaaggcgacgucuucgugauucgcgagccguuuaucgccugcagccaccuggaauguagaacguucuuucucacccaaggcgcccugcuuaacgauaagcauucuaaugggacaguuaaagaccggucccccuaucgcgcucugaugagcugcccucucggagaggcccccucuccuuacaacuccaaguucgaaagcguggcuugguccgccucugcgugucacgauggcaugggguggcugaccaucggaauuagcggccccgacaacggggccgucgcugugcugaaguauaauggaaucauuacaggcaccaucaaauccuggaagaaacagauucucagaacgcaggagagcgagugcguuuguaugaacggcucuugcuuuacaaucaugaccgaugggccuuccaauaaggccgcuagcuacaaaaucuucaagauugaaaagggaaaagugacaaagucuaucgagcugaacgccccgaauuuucauuaugaagaguguagcugcuaccccgacaccggcauugucaugugugugugccgggauaacuggcacggguccaaucgcccuugggugucuuucaaccagaaucuugacuaccaaaucggauauauuugcagcggcgucuuuggggauaaccccagaccugaggacggagaaggcuccuguaaucccguuaccguggauggcgcgaacggggugaaaggauucagcuacaaguaugacaauggcgucuggaucgggcggacaaaaucuaaccgccugagaaagggauuugaggugauuugggacccgaauggcuggacgaacaccgauuccgacuucagcguuaaacaggauguggucgccaucacagacuggucuggguacuccggcagcuuugugcagcacccugaacucaccggacuggauugcauccggcccuguuucuggguugagcuugugcgcggccugccuagagaaaacacaaccauuuggacguccgggucuagcaucuccuucugcggagucaauucugacacagcuaacuggagcuggcccgauggcgccgagcuccccuuuaccauugacaaguga

SEQ ID NO: 208913 - RNA, 1413 nt, Artificial Sequence; identical to SEQ ID NO: 208704
  derived and/or modified CDS sequence (opt5) from neuraminidase__InfluenzaA__ACR15483

SEQ ID NO: 208914 - RNA, 1413 nt, Artificial Sequence; identical to SEQ ID NO: 208704
  derived and/or modified CDS sequence (opt5) from neuraminidase__InfluenzaA__ACR15505

SEQ ID NO: 208915 - RNA, 1413 nt, Artificial Sequence; identical to SEQ ID NO: 208788
  derived and/or modified CDS sequence (opt5) from neuraminidase__InfluenzaA__ACR15516

SEQ ID NO: 208916 - RNA, 1410 nt, Artificial Sequence; identical to SEQ ID NO: 206786
  derived and/or modified CDS sequence (opt5) from neuraminidase__InfluenzaA__ACR15527

SEQ ID NO: 208917 - RNA, 1410 nt, Artificial Sequence
  derived and/or modified CDS sequence (opt5) from neuraminidase__InfluenzaA__ACR15538
augauccccauucagaagaucauuaccaucggcagcgugucccugacaauuucuacgaucugcuucuuuaugcaaaucgccauucucaucaccacagucacccugcacuucaaacaguacgaguuuaacagcccuccgaauaaccagguuaugcuuugugaacccacaauuaucgagagaaauauuaccgaaaucguguaucugacaaacaccacgauugagaaggaaaucugcccuaaacucgcugaguaccggaauugguccaagccccagugugacaucaccggguucgccccuuuuucuaaagauaacagcauucgccuguccgcgggaggcgacaucugggugacaagagagcccuaugucucuugcgauccugacaaguguuaccaauucgcucuugggcagggaaccacacugaauaacgugcauagcaaugauaccguucacgaccggacgccguaucgcacacuccugaugaacgaacugggcgugcccuuucaucucgggaccaagcaggucugcauugccugguccucuagcuccugucacgauggaaaagccuggcugcaugugugcguuacaggcgacgauaagaaugcuaccgccagcuucaucuacaacggcagacuuguggacucuauugucuccuggagcaaagagauccugcggacccaggaaucugagugugugugcaucaaugggacauguacgguggucaugaccgauggauccgcuagcggcaaggccgacacaaaaauucucuuuaucgaggaagggaagauuguucacaccuccacacugucuggaagcgcgcaacacguggaggaaugcuccugcuauccucgcuaccccggcgugagaugugucugccgggauaacuggaaggggagcaaucgcccuaucguggacauuaacaucaaagacuacucuaucguuuccagcuauguguguucuggacuugucggcgauacccccagaaagaacgacagcuccucuagcucccauugccuggauccgaauaacgaggaaggcgggcacggagugaaaggcugggccuucgacgaugggaaugacguuuggaugggacggacgauuagcgagaagcuccgcucuggcuacgagacauuuaaagugaucgaagggugguccaacccuaauagcaagcugcagauuaacagacaggucaucguggaucggggaaaucgcucuggcuauuccggcauuuucagcgucgaggggaaauccuguaucaacagaugcuuuuacguggaacugauucggggaagaaaggaggaaaccgagguucucuggaccucuaauagcaucguggucuucuguggcacauccgggaccuauggaacaggcucuuggcccgacggggcugauaucaaccugaugccuauuuga

SEQ ID NO: 208918 - RNA, 1410 nt, Artificial Sequence; identical to SEQ ID NO: 206399
  derived and/or modified CDS sequence (opt5) from neuraminidase__InfluenzaA__ACR15549

SEQ ID NO: 208919 - RNA, 1410 nt, Artificial Sequence; identical to SEQ ID NO: 206784
  derived and/or modified CDS sequence (opt5) from neuraminidase__InfluenzaA__ACR15560

SEQ ID NO: 208920 - RNA, 1410 nt, Artificial Sequence; identical to SEQ ID NO: 206784
  derived and/or modified CDS sequence (opt5) from neuraminidase__InfluenzaA__ACR15582

SEQ ID NO: 208921 - RNA, 1410 nt, Artificial Sequence
  derived and/or modified CDS sequence (opt5) from neuraminidase__InfluenzaA__ACR15593
augaaccccaaucagaagaucauuaccaucggcagcgugucccugacaauuucuacgaucugcuucuuuaugcaaauugccauccucaucaccacagucacccugcacuucaaacaguacgaguuuaacagcccuccgaauaaccagguuaugcuuugugaacccacaauuaucgagagaaauauuaccgaaaucguguaucugacaaacaccacgauugagaaggaaaucugcccuaaacaggcugaguaccggaauugguccaagccccaauguaacauuaccggguucgccccuuuuucuaaagacaauagcauccgccucuccgcgggaggcgauaucugggugacaagagagcccuaugucucuugcgacccugauaaguguuaccaguucgcucuggggcagggaaccacacuuaacaaugugcauagcaacgacaccguucacgaucggacgccguaucgcacacugcucaugaaugaacugggcgugcccuuucaucuggggaccaagcaggucugcauugccugguccucuagcuccugucacgacggaaaagccuggcuccaugugugcguuacaggcgaugacaagaacgcuaccgccagcuucaucuacaauggcagacugguggauucuauugucuccuggagcaaagagauccuucggacccaagaaucugagugugugugcauuaacgggacauguacgguggucaugaccgacggauccgcuagcggcaaggccgauacaaaaauccuguuuaucgaggaagggaagauuguucacaccuccacacucucuggaagcgcgcagcacguggaggaaugcuccugcuauccucgcuaccccggcgugagaugugucugccgggacaacuggaaggggagcaaucgcccuaucguggauauuaacaucaaagacuacucuauuguuuccagcuauguguguucuggacuggucggcgacacccccagaaagaaugauagcuccucuagcucccauugccuugacccgaacaaugaggaaggcgggcacggagugaaaggcugggccuucgaugacgggaacgauguuuggaugggacggacgaucagcgagaagcugcgcucuggcuacgagacauuuaaagugaucgaagggugguccaauccuaacagcaagcuccagauuaauagacaggucaucguggaccggggaaaccgcucuggcuauuccggcauuuucagcgucgaggggaaauccuguaucaauagaugcuuuuacguggaacugauucggggaagaaaggaggaaaccgagguucuguggaccucuaacagcaucguggucuucuguggcacauccgggaccuauggaacaggcucuuggcccgauggggcugacauuaaucucaugccuaucuga

SEQ ID NO: 208922 - RNA, 1410 nt, Artificial Sequence
  derived and/or modified CDS sequence (opt5) from neuraminidase__InfluenzaA__ACR15604
augaaccccaaucagaagaucauuaccaucggcagcgugucccugacaauuucuacgaucugcuucuuuaugcaaauugccauccucaucaccacagucacccugcacuucaaacaguacgaguuuaacagcccuccgaauaaccagguuaugcuuugugaacccacaauuaucgagagaaauauuaccgaaaucguguaucugacaaacaccacgauugagaaggaaaucugcccuaaacucgcugaguaccggaauugguccaagccccaguguaacauuaccggguucgccccuuuuucuaaagacaauagcauccgccuguccgcgggaggcgauaucugggugacaagagagcccuaugucucuugcgacccugauaaguguuaccaauucgcucuugggcagggaaccacacugaacaaugugcauagcaacgacaccguucacgaucggacgccguaucgcacacuccugaugaaugaacugggcgugcccuuucaucucgggaccaagcaggucugcauugccugguccucuagcuccugucacgacggaaaagccuggcugcaugugugcguuacaggcgaugacaagaacgcuaccgccagcuucaucuacaauggcagacuuguggauucuauugucuccuggagcaaagagauccugcggacccaggaaucugagugugugugcauuaacgggacauguacgguggucaugaccgacggauccgcuagcggcaaggccgauacaaaaauccucuuuaucgaggaagggaagauuguucacaccuccacacugucuggaagcgcgcaacacguggaggaaugcuccugcuauccucgcuaccccggcgugagaugugucugccgggacaacuggaaggggagcaaucgcccuaucguggauauuaacaucaaagacuacucuauuguuuccagcuauguguguucuggacuugucggcgacacccccagaaagaaugauagcuccucuagcucccauugccuggacccgaacaaugaggaaggcgggcacggagugaaaggcugggccuucgaugacgggaacgauguuuggaugggacggacgaucagcgagaagcuccgcucuggcuacgagacauuuaaagugaucgaagggugguccaauccuaacagcaagcugcagauuaauagacaggucaucguggaccggggagaucgcucuggcuauuccggcauuuucagcgucgaggggaaauccuguaucaacagaugcuuuuacguggaacugauucggggaagaaaggaggaaaccgagguucucuggaccucuaauagcaucguggucuucuguggcacauccgggaccuauggaacaggcucuuggcccgacggggcugauauuaaccugaugccuaucuga

SEQ ID NO: 208923 - RNA, 1410 nt, Artificial Sequence; identical to SEQ ID NO: 208800
  derived and/or modified CDS sequence (opt5) from neuraminidase__InfluenzaA__ACR15618

SEQ ID NO: 208924 - RNA, 1410 nt, Artificial Sequence; identical to SEQ ID NO: 208800
  derived and/or modified CDS sequence (opt5) from neuraminidase__InfluenzaA__ACR18924

SEQ ID NO: 208925 - RNA, 1410 nt, Artificial Sequence; identical to SEQ ID NO: 208800
  derived and/or modified CDS sequence (opt5) from neuraminidase__InfluenzaA__ACR18925

SEQ ID NO: 208926 - RNA, 1410 nt, Artificial Sequence; identical to SEQ ID NO: 208810
  derived and/or modified CDS sequence (opt5) from neuraminidase__InfluenzaA__ACR18926

SEQ ID NO: 208927 - RNA, 1410 nt, Artificial Sequence; identical to SEQ ID NO: 208810
  derived and/or modified CDS sequence (opt5) from neuraminidase__InfluenzaA__ACR18927

SEQ ID NO: 208928 - RNA, 1410 nt, Artificial Sequence; identical to SEQ ID NO: 208810
  derived and/or modified CDS sequence (opt5) from neuraminidase__InfluenzaA__ACR18928

SEQ ID NO: 208929 - RNA, 1410 nt, Artificial Sequence; identical to SEQ ID NO: 208810
  derived and/or modified CDS sequence (opt5) from neuraminidase__InfluenzaA__ACR18929

SEQ ID NO: 208930 - RNA, 1410 nt, Artificial Sequence; identical to SEQ ID NO: 208810
  derived and/or modified CDS sequence (opt5) from neuraminidase__InfluenzaA__ACR18930

SEQ ID NO: 208931 - RNA, 1410 nt, Artificial Sequence; identical to SEQ ID NO: 208810
  derived and/or modified CDS sequence (opt5) from neuraminidase__InfluenzaA__ACR18931

SEQ ID NO: 208932 - RNA, 1410 nt, Artificial Sequence; identical to SEQ ID NO: 208810
  derived and/or modified CDS sequence (opt5) from neuraminidase__InfluenzaA__ACR18933

SEQ ID NO: 208933 - RNA, 1410 nt, Artificial Sequence; identical to SEQ ID NO: 208800
  derived and/or modified CDS sequence (opt5) from neuraminidase__InfluenzaA__ACR18934

SEQ ID NO: 208934 - RNA, 1410 nt, Artificial Sequence; identical to SEQ ID NO: 208810
  derived and/or modified CDS sequence (opt5) from neuraminidase__InfluenzaA__ACR18935

SEQ ID NO: 208935 - RNA, 1410 nt, Artificial Sequence; identical to SEQ ID NO: 208810
  derived and/or modified CDS sequence (opt5) from neuraminidase__InfluenzaA__ACR23301

SEQ ID NO: 208936 - RNA, 1410 nt, Artificial Sequence; identical to SEQ ID NO: 208810
  derived and/or modified CDS sequence (opt5) from neuraminidase__InfluenzaA__ACR32997

SEQ ID NO: 208937 - RNA, 1410 nt, Artificial Sequence
  derived and/or modified CDS sequence (opt5) from neuraminidase__InfluenzaA__ACR33740
augaaccccaaucagaagaucauuaccaucggcagcgugugcaugacaauugggauggccaaccugauccuccaaauuggaaauaucaucuccauuuggaucucucacagcauucagcugggcaaccagaaucagaucgagacguguaaccaauccgucauuaccuacgaaaauaacacauggguuaaucagaccuaugugaacaucucuaauacaaacuucgcugccgggcagagcguggucuccgugaaacuugcgggaaauucuagccugugcccuguuuccggcugggcuauuuacagcaaggacaacucuaucagaaucggguccaaaggagauguguuugucauucgggagccguucaucagcuguucuccccucgaaugccgcaccuuuuuccugacacagggcgcccuucugaaugacaagcauuccaacggcaccauuaaagauagaagcccuuaucggacgcucaugucuugucccaucggggaggugccuucccccuacaacagccgcuuugaauccguugccuggucugcuagcgccugccacgacggaauuaauuggcugaccaucggcaucuccgggccugauaacggagcuguggccguccugaaguauaauggcauuaucacagacaccauuaagagcuggagaaacaauauccuccggacacaagagucugagugugcgugcgugaacggguccuguuucaccgugaugacggauggaccgagcgacggccaggccucuuacaaaauuuuucgcaucgaaaagggcaaaaucgucaagagcguugagaugaaugcucccaacuaucauuacgaagagugcuccuguuacccugauucuagcgagauuacaugcgugugcagagacaauuggcacggguccaaccggcccugggugagcuucaaucagaaccuggaauaucagaucggauacauuuguucuggcaucuuuggggauaauccucgccccaacgacaaaaccggauccugcggcccggucagcucuaauggggccaacggagugaagggcuucuccuuuaaguauggcaacgggguuuggauuggaagaacaaaaagcaucuccucucggaauggcuucgagaugauuugggauccuaacggguggaccggaaccgacaauaacuuuagcaucaagcaagacaucgugggcauuaaugaaugguccggguacucuggcagcuucguccagcaucccgagcuuacaggacuggauuguauccgcccuugcuucuggguggaacucauuagaggccggcccaaagagaacacgaucuggaccuccgggagcucuauuuccuuuuguggaguuaauagcggcacagugggguggucuuggcccgacggagcugagcugccuuucaccaucgauaaguga

SEQ ID NO: 208938 - RNA, 1410 nt, Artificial Sequence; identical to SEQ ID NO: 208800
  derived and/or modified CDS sequence (opt5) from neuraminidase__InfluenzaA__ACR38792

SEQ ID NO: 208939 - RNA, 1410 nt, Artificial Sequence; identical to SEQ ID NO: 208810
  derived and/or modified CDS sequence (opt5) from neuraminidase__InfluenzaA__ACR38793

SEQ ID NO: 208940 - RNA, 1410 nt, Artificial Sequence; identical to SEQ ID NO: 208810
  derived and/or modified CDS sequence (opt5) from neuraminidase__InfluenzaA__ACR38794

SEQ ID NO: 208941 - RNA, 1410 nt, Artificial Sequence; identical to SEQ ID NO: 208810
  derived and/or modified CDS sequence (opt5) from neuraminidase__InfluenzaA__ACR38878

SEQ ID NO: 208942 - RNA, 1410 nt, Artificial Sequence; identical to SEQ ID NO: 208810
  derived and/or modified CDS sequence (opt5) from neuraminidase__InfluenzaA__ACR39357

SEQ ID NO: 208943 - RNA, 1410 nt, Artificial Sequence; identical to SEQ ID NO: 208810
  derived and/or modified CDS sequence (opt5) from neuraminidase__InfluenzaA__ACR39396

SEQ ID NO: 208944 - RNA, 1410 nt, Artificial Sequence; identical to SEQ ID NO: 208810
  derived and/or modified CDS sequence (opt5) from neuraminidase__InfluenzaA__ACR39406

SEQ ID NO: 208945 - RNA, 1410 nt, Artificial Sequence; identical to SEQ ID NO: 208810
  derived and/or modified CDS sequence (opt5) from neuraminidase__InfluenzaA__ACR39416

SEQ ID NO: 208946 - RNA, 1410 nt, Artificial Sequence; identical to SEQ ID NO: 208810
  derived and/or modified CDS sequence (opt5) from neuraminidase__InfluenzaA__ACR39426

SEQ ID NO: 208947 - RNA, 1410 nt, Artificial Sequence; identical to SEQ ID NO: 208810
  derived and/or modified CDS sequence (opt5) from neuraminidase__InfluenzaA__ACR39436

SEQ ID NO: 208948 - RNA, 1410 nt, Artificial Sequence; identical to SEQ ID NO: 208810
  derived and/or modified CDS sequence (opt5) from neuraminidase__InfluenzaA__ACR39446

SEQ ID NO: 208949 - RNA, 1410 nt, Artificial Sequence; identical to SEQ ID NO: 208810
  derived and/or modified CDS sequence (opt5) from neuraminidase__InfluenzaA__ACR39456

SEQ ID NO: 208950 - RNA, 1410 nt, Artificial Sequence; identical to SEQ ID NO: 208810
  derived and/or modified CDS sequence (opt5) from neuraminidase__InfluenzaA__ACR39466

SEQ ID NO: 208951 - RNA, 1410 nt, Artificial Sequence; identical to SEQ ID NO: 208810
  derived and/or modified CDS sequence (opt5) from neuraminidase__InfluenzaA__ACR39476

SEQ ID NO: 208952 - RNA, 1410 nt, Artificial Sequence; identical to SEQ ID NO: 208810
  derived and/or modified CDS sequence (opt5) from neuraminidase__InfluenzaA__ACR39486

SEQ ID NO: 208953 - RNA, 1410 nt, Artificial Sequence; identical to SEQ ID NO: 208810
  derived and/or modified CDS sequence (opt5) from neuraminidase__InfluenzaA__ACR39496

SEQ ID NO: 208954 - RNA, 1410 nt, Artificial Sequence; identical to SEQ ID NO: 208810
  derived and/or modified CDS sequence (opt5) from neuraminidase__InfluenzaA__ACR40291

SEQ ID NO: 208955 - RNA, 1410 nt, Artificial Sequence; identical to SEQ ID NO: 208810
  derived and/or modified CDS sequence (opt5) from neuraminidase__InfluenzaA__ACR40301

SEQ ID NO: 208956 - RNA, 1410 nt, Artificial Sequence
  derived and/or modified CDS sequence (opt5) from neuraminidase__InfluenzaA__ACR40311
augaaccccaaucagaagaucauuaccaucggcagcgugugcaugacaauugggauggccaaccugauccuccaaauuggaaauaucaucuccauuuggaucucucacagcauucagcugggcaaccagaaucagacggagaccuguaaccaauccgucaucacauacgaaaauaacaccuggguuaaucagacauaugugaacauuucuaauaccaacuucgcugccgggcagagcguggucuccgugaaacuugcgggaaauucuagccugugcccuguuuccggcugggcuaucuacagcaaggacaacucugugagaauuggguccaaaggagaugucuuugugauccgggagccguucaucagcuguucuccccucgaaugccgcacauuuuuccugacccagggcgcccuucugaaugacaagcauuccaacggcacgauuaaagauagaagcccuuaucggacccucaugucuugucccaucggggagguuccuucccccuacaacagccgcuuugaauccguggccuggucugcuagcgccugccacgacggaauuaauuggcugacaaucggcauuuccgggccugauaacggagcugucgccgugcugaaguauaauggcaucaucaccgacacaauuaagagcuggagaaacaauauccuccggacccaagagucugagugugcgugcgugaacggguccuguuucacggucaugacagauggaccgagcaauggccaggccucuuacaaaauuuuucgcaucgaaaagggcaaaauuguuaagagcguggagaugaacgcucccaauuaucauuacgaagagugcuccuguuacccugacucuagcgagauuaccugcgugugcagagauaacuggcacggguccaaucggcccugggucagcuucaaccagaaucuggaauaucagaucggauacaucuguucuggcaucuuuggggacaacccucgccccaaugauaaaacaggauccugcggcccggugagcucuaacggggccaacggaguuaagggcuucuccuuuaaguauggcaaugggguguggauuggaagaaccaaaagcaucuccucucggaacggcuucgagaugauuugggacccuaauggguggaccggaacagauaacaauuuuagcaucaagcaagacauugucggcaucaacgaaugguccggguacucuggcagcuucgugcagcaucccgagcuuacgggacuggacuguauccgcccuugcuucuggguugaacucauuagaggccggcccaaagagaauaccaucuggacauccgggagcucuauuuccuuuuguggagugaacagcgauaccgucggcuggucuuggcccgacggggcugagcugccuuucacaaucgauaaguga

SEQ ID NO: 208957 - RNA, 1410 nt, Artificial Sequence
  derived and/or modified CDS sequence (opt5) from neuraminidase__InfluenzaA__ACR40321
augaaccccaaucagaagaucauuaccaucggcagcgugugcaugacaauugggauggccaaccugauccuccaaauuggaaauaucaucuccauuuggaucucucacagcauucagcugggcaaccagaaucagaucgagacguguaaccaauccgucauuaccuacgaaaauaacacauggguuaaucagaccuaugugaacaucucuaauacaaacuucgcugccgggcagagcguggucuccgugaaacuugcgggaaauucuagccugugcccuguuuccggcugggcuauuuacagcaaggacaacucuaucagaaucggguccaaaggagauguguuugucauucgggagccguucaucagcuguucuccccucgaaugccgcaccuuuuuccugacacagggcgcccuucugaaugacaagcauuccaacggcaccauuaaagauagaagcccuuaucggacgcucaugucuugucccaucggggaggugccuucccccuacaacagccgcuuugaauccguugccuggucugcuagcgccugccacgacggaauuaauuggcugaccaucggcaucuccgggccugauaacggagcuguggccguccugaaguauaauggcauuaucacagacaccauuaagagcuggagaaacaauauccuccggacacaagagucugagugugcgugcgugaacggguccuguuucaccgugaugacggauggaccgagcgacggccaggccucuuacaaaauuuuucgcaucgaaaagggcaaaaucgucaagagcguugagaugaaugcucccaacuaucauuacgaagagugcuccuguuacccugauucuagcgagauuacaugcgugugcagagacaauuggcacggguccaaccggcccugggugagcuucaaucagaaccuggaauaucagaucggauacauuuguucuggcaucuuuggggauaauccucgccccaacgacaaaaccggauccugcggcccggucagcucuaauggggccaacggagugaagggcuucuccuuuaaguauggcaacgggguuuggauuggaagaacaaaaagcaucuccucucggaauggcuucgagaugauuugggauccuaacggguggaauggaaccgacaacaauuuuagcaucaagcaagacaucgugggcauuaacgaaugguccggguacucuggcagcuucguccagcaucccgagcuuaccggacuggauuguauccgcccuugcuucuggguggaacucauuagaggccggcccaaagagaauacaaucuggacguccgggagcucuauuuccuuuuguggaguuaacagcgacaccgugggcuggucuuggcccgauggggcugagcugccuuucacaaucgacaaguga

SEQ ID NO: 208958 - RNA, 1410 nt, Artificial Sequence; identical to SEQ ID NO: 208810
  derived and/or modified CDS sequence (opt5) from neuraminidase__InfluenzaA__ACR40341

SEQ ID NO: 208959 - RNA, 1410 nt, Artificial Sequence; identical to SEQ ID NO: 208810
  derived and/or modified CDS sequence (opt5) from neuraminidase__InfluenzaA__ACR40351

SEQ ID NO: 208960 - RNA, 1410 nt, Artificial Sequence; identical to SEQ ID NO: 208810
  derived and/or modified CDS sequence (opt5) from neuraminidase__InfluenzaA__ACR40361

SEQ ID NO: 208961 - RNA, 1410 nt, Artificial Sequence; identical to SEQ ID NO: 208810
  derived and/or modified CDS sequence (opt5) from neuraminidase__InfluenzaA__ACR40371

SEQ ID NO: 208962 - RNA, 1410 nt, Artificial Sequence; identical to SEQ ID NO: 208810
  derived and/or modified CDS sequence (opt5) from neuraminidase__InfluenzaA__ACR40391

SEQ ID NO: 208963 - RNA, 1410 nt, Artificial Sequence; identical to SEQ ID NO: 208800
  derived and/or modified CDS sequence (opt5) from neuraminidase__InfluenzaA__ACR46663

SEQ ID NO: 208964 - RNA, 1410 nt, Artificial Sequence; identical to SEQ ID NO: 208800
  derived and/or modified CDS sequence (opt5) from neuraminidase__InfluenzaA__ACR46673

SEQ ID NO: 208965 - RNA, 1410 nt, Artificial Sequence
  derived and/or modified CDS sequence (opt5) from neuraminidase__InfluenzaA__ACR46996
augaaccccaaucagaagaucauuaccaucggcagcgugugcaugacaauugggauggccaaccugauccuccaaauuggaaauaucaucuccauuuggaucucucacagcauucagcugggcaaccagaaucagaucgagacguguaaccaauccgucauuaccuacgaaaauaacacauggguuaaucagaccuaugugaacaucucuaauacaaacuucgcugccgggcagagcguggucuccgugaaacuugcgggaaauucuagccugugcccuguuuccggcugggcuauuuacagcaaggacaacucuaucagaaucggguccaaaggagauguguuugucauucgggagccguucaucagcuguucuccccucgaaugccgcaccuuuuuccugacacagggcgcccuucugaaugacaagcauuccaacggcaccauuaaagauagaagcccuuaucggacgcucaugucuugucccaucggggaggugccuucccccuacaacagccgcuuugaauccguugccuggucugcuagcgccugccacgacggaauuaauuggcugaccaucggcaucuccgggccugauaacggagcuguggccguccugaaguauaauggcauuaucacagacaccauuaagagcuggagaaacaauauccuccggacacaagagucugagugugcgugcgugaacggguccuguuucaccgugaugacggauggaccgagcaauggccaggccucuuacaaaauuuuucgcaucgaaaagggcaaaaucgucaagagcguugagaugaacgcucccaauuaucauuacgaagagugcuccuguuacccugacucuagcgagauuacaugcgugugcagagauaacuggcacggguccaaucggcccugggugagcuucaaccagaaucuggaauaucagaucggauacauuuguucuggcaucuuuggggacaacccucgccccaaugauaaaaccggauccugcggcccggucagcucuaacggggccaacggagugaagggcuucuccuuuaaguauggcaaugggguuuggauuggaagaacaaaaagcaucuccucucggaacggcuucgagaugauuugggacccuaauggguggaccggaaccgauaacaauuuuagcaucaagcaagacaucgugggcauuaacgaaugguccggguacucuggcagcuucguccagcaucccgagcuuacaggacuggacuguauccgcccuugcuucuggguggaacucauuagaggccggcccaaagagaauacgaucuggaccuccgggagcucuauuuccuuuuguggaguuaacagcgauacagugggcuggucuuggcccgacggggcugagcugccuuucaccaucgauaaguga

SEQ ID NO: 208966 - RNA, 1410 nt, Artificial Sequence; identical to SEQ ID NO: 208965
  derived and/or modified CDS sequence (opt5) from neuraminidase__InfluenzaA__ACR46997

SEQ ID NO: 208967 - RNA, 1410 nt, Artificial Sequence; identical to SEQ ID NO: 208965
  derived and/or modified CDS sequence (opt5) from neuraminidase__InfluenzaA__ACR46998

SEQ ID NO: 208968 - RNA, 1410 nt, Artificial Sequence; identical to SEQ ID NO: 208965
  derived and/or modified CDS sequence (opt5) from neuraminidase__InfluenzaA__ACR46999

SEQ ID NO: 208969 - RNA, 1410 nt, Artificial Sequence; identical to SEQ ID NO: 208965
  derived and/or modified CDS sequence (opt5) from neuraminidase__InfluenzaA__ACR47000

SEQ ID NO: 208970 - RNA, 1410 nt, Artificial Sequence; identical to SEQ ID NO: 208965
  derived and/or modified CDS sequence (opt5) from neuraminidase__InfluenzaA__ACR47001

SEQ ID NO: 208971 - RNA, 1410 nt, Artificial Sequence; identical to SEQ ID NO: 208965
  derived and/or modified CDS sequence (opt5) from neuraminidase__InfluenzaA__ACR47002

SEQ ID NO: 208972 - RNA, 1410 nt, Artificial Sequence; identical to SEQ ID NO: 208965
  derived and/or modified CDS sequence (opt5) from neuraminidase__InfluenzaA__ACR47003

SEQ ID NO: 208973 - RNA, 1410 nt, Artificial Sequence
  derived and/or modified CDS sequence (opt5) from neuraminidase__InfluenzaA__ACR47008
augaaccccaaucagaagaucauuaccaucggcagcgugugcaugacaauugggauggccaaccugauccuccaaauuggaaauaucaucuccauuuggccuguccacucuauccagcugggcaaccagaaucagauugagacguguaaccaaagcguuaucaccuacgaaaauaacacaugggugaaucagaccuaugugaacauuuccaauacaaacuucgcugccgggcagucugucgugagcaugaaacuugcgggaaauuccucucugugcccgguuggcgggugggcuaucuacagcaaggacaacuccgugagaauuggaagcaaaggcgaugucuuugugauccgggagcccuucaucucuuguuccccucucgaaugccgcaccuuuuuccugacacagggcgcccuucugaaugacaagcauagcaacgggaccauuaaagauagaucucccuaucggacgcucauguccuguccuaucggagagguucccagcccuuacaacucucgcuuugaauccguggccuggagcgcuuccgccugccacgacggcauuaauuggcugaccaucgggauuucuggaccggauaacggcgcugucgccgugcugaaguauaaugggaucaucacagacaccauuaagagcuggagaaacaauauccuccggacacaagaguccgagugugcgugcgugaacggaagcuguuucaccgucaugacggauggccccucuaauggccaggccuccuacaaaauuuuucgcaucgaaaaggggaaaauuguuaagagcguggagaugaacgcuccuaauuaucauuacgaagagugcucuuguuaccccgacagcuccgagaucacaugcgugugcagagauaacuggcacggaucuaaucggccuugggucagcuucaaccagaaucuggaauaucagaucggcuacauuuguuccgggaucuuuggagacaacccccgcccgaaugauaaaaccggcagcugcgggccugugucuuccaacggagccaacggcguuaagggcuucagcuuuaaguaugggaauggaguguggauuggcagaacaaaaucuaucuccagccggaacggguucgagaugauuugggaccccaauggauggaccggcaccgauaacaauuuuuccaucaagcaagacauugucgggaucaacgaauggucuggcuacagcggauccuucgugcagcauccugagcuuacaggccuggacuguauccgccccugcuucuggguugaacucauuagagggcggcccaaagagaauacgaucuggaccucuggaagcuccauuagcuuuuguggcgugaacucugauacagucgggugguccuggccugacggagcugagcugccguucaccaucgauaaguga

SEQ ID NO: 208974 - RNA, 1410 nt, Artificial Sequence; identical to SEQ ID NO: 208810
  derived and/or modified CDS sequence (opt5) from neuraminidase__InfluenzaA__ACR49267

SEQ ID NO: 208975 - RNA, 1410 nt, Artificial Sequence; identical to SEQ ID NO: 208800
  derived and/or modified CDS sequence (opt5) from neuraminidase__InfluenzaA__ACR49268

SEQ ID NO: 208976 - RNA, 1410 nt, Artificial Sequence; identical to SEQ ID NO: 208800
  derived and/or modified CDS sequence (opt5) from neuraminidase__InfluenzaA__ACR49269

SEQ ID NO: 208977 - RNA, 1410 nt, Artificial Sequence; identical to SEQ ID NO: 208800
  derived and/or modified CDS sequence (opt5) from neuraminidase__InfluenzaA__ACR49270

SEQ ID NO: 208978 - RNA, 1410 nt, Artificial Sequence; identical to SEQ ID NO: 208840
  derived and/or modified CDS sequence (opt5) from neuraminidase__InfluenzaA__ACR49271

SEQ ID NO: 208979 - RNA, 1410 nt, Artificial Sequence; identical to SEQ ID NO: 208810
  derived and/or modified CDS sequence (opt5) from neuraminidase__InfluenzaA__ACR49272

SEQ ID NO: 208980 - RNA, 1410 nt, Artificial Sequence; identical to SEQ ID NO: 208800
  derived and/or modified CDS sequence (opt5) from neuraminidase__InfluenzaA__ACR49273

SEQ ID NO: 208981 - RNA, 1410 nt, Artificial Sequence; identical to SEQ ID NO: 208800
  derived and/or modified CDS sequence (opt5) from neuraminidase__InfluenzaA__ACR49274

SEQ ID NO: 208982 - RNA, 1410 nt, Artificial Sequence; identical to SEQ ID NO: 208840
  derived and/or modified CDS sequence (opt5) from neuraminidase__InfluenzaA__ACR49275

SEQ ID NO: 208983 - RNA, 1410 nt, Artificial Sequence; identical to SEQ ID NO: 208840
  derived and/or modified CDS sequence (opt5) from neuraminidase__InfluenzaA__ACR49277

SEQ ID NO: 208984 - RNA, 1410 nt, Artificial Sequence; identical to SEQ ID NO: 208840
  derived and/or modified CDS sequence (opt5) from neuraminidase__InfluenzaA__ACR49278

SEQ ID NO: 208985 - RNA, 1410 nt, Artificial Sequence; identical to SEQ ID NO: 208800
  derived and/or modified CDS sequence (opt5) from neuraminidase__InfluenzaA__ACR49279

SEQ ID NO: 208986 - RNA, 1410 nt, Artificial Sequence; identical to SEQ ID NO: 208800
  derived and/or modified CDS sequence (opt5) from neuraminidase__InfluenzaA__ACR50994

SEQ ID NO: 208987 - RNA, 1410 nt, Artificial Sequence; identical to SEQ ID NO: 208810
  derived and/or modified CDS sequence (opt5) from neuraminidase__InfluenzaA__ACR50998

SEQ ID NO: 208988 - RNA, 1410 nt, Artificial Sequence; identical to SEQ ID NO: 208810
  derived and/or modified CDS sequence (opt5) from neuraminidase__InfluenzaA__ACR51008

SEQ ID NO: 208989 - RNA, 1410 nt, Artificial Sequence; identical to SEQ ID NO: 208810
  derived and/or modified CDS sequence (opt5) from neuraminidase__InfluenzaA__ACR51018

SEQ ID NO: 208990 - RNA, 1410 nt, Artificial Sequence; identical to SEQ ID NO: 208810
  derived and/or modified CDS sequence (opt5) from neuraminidase__InfluenzaA__ACR51028

SEQ ID NO: 208991 - RNA, 1410 nt, Artificial Sequence
  derived and/or modified CDS sequence (opt5) from neuraminidase__InfluenzaA__ACR51038
augaaccccaaucagaagaucauuaccaucggcagcgugugcauguccauugggauggccaaccugauccuccaaauuggaaauaucaucucuauuuggaucagccacuccauucagcugggcaaccagaaucagaucgagacauguaaccaaucugucauuacguacgaaaauaacaccuggguuaaucagacauaugugaacaucagcaauaccaacuucgcugccgggcaguccguggucucugugaaacuugcgggaaauagcucccugugcccuguuagcggcugggcuauuuacucuaaggacaacuccaucagaaucgggagcaaaggagauguguuugucauucgggagccguucaucucuuguagcccccucgaaugccgcacauuuuuccugacccagggcgcccuucugaaugacaagcauuccaacggcacaauuaaagauagaucuccuuaucggacccucauguccugucccaucggggaggugccuagccccuacaacucccgcuuugaaucuguugccuggagcgcuuccgccugccacgacggaauuaauuggcugacgaucggcaucagcgggccugauaacggagcuguggccguccugaaguauaauggcauuaucaccgacacaauuaagucuuggagaaacaauauccuccggacccaagaguccgagugugcgugcgugaacgggagcuguuucacagugaugaccgauggaccgucugacggccaggccagcuacaaaauuuuucgcaucgaaaagggcaaaaucgucaaguccguugagaugaaugcucccaacuaucauuacgaagagugcucuuguuacccugauagcuccgagauuacgugcgugugcagagacaauuggcacgggagcaaccggcccugggugucuuucaaucagaaccuggaauaucagaucggauacauuuguuccggcaucuuuggggauaauccucgccccaacgacaaaacaggaagcugcggcccggucucuuccaauggggccaacggagugaagggcuucagcuuuaaguauggcaacgggguuuggauuggaagaaccaaauccaucucuagccggaauggcuucgagaugauuugggauccuaacggguggacaggaaccgacaauaacuuuuccaucaagcaagacaucgugggcauuaaugaauggucuggguacagcggcuccuucguccagcaucccgagcuuaccggacuggauuguauccgcccuugcuucuggguggaacucauuagaggccggcccaaagagaacacaaucuggacgagcgggucuuccauuagcuuuuguggaguuaauucugacaccgugggcugguccuggcccgauggggcugagcugccuuucacaaucgacaaguga

SEQ ID NO: 208992 - RNA, 1410 nt, Artificial Sequence; identical to SEQ ID NO: 208810
  derived and/or modified CDS sequence (opt5) from neuraminidase__InfluenzaA__ACR51048

SEQ ID NO: 208993 - RNA, 1410 nt, Artificial Sequence; identical to SEQ ID NO: 208810
  derived and/or modified CDS sequence (opt5) from neuraminidase__InfluenzaA__ACR51058

SEQ ID NO: 208994 - RNA, 1410 nt, Artificial Sequence; identical to SEQ ID NO: 208800
  derived and/or modified CDS sequence (opt5) from neuraminidase__InfluenzaA__ACR51068

SEQ ID NO: 208995 - RNA, 1410 nt, Artificial Sequence; identical to SEQ ID NO: 208810
  derived and/or modified CDS sequence (opt5) from neuraminidase__InfluenzaA__ACR52371

SEQ ID NO: 208996 - RNA, 1410 nt, Artificial Sequence; identical to SEQ ID NO: 208810
  derived and/or modified CDS sequence (opt5) from neuraminidase__InfluenzaA__ACR52381

SEQ ID NO: 208997 - RNA, 1410 nt, Artificial Sequence; identical to SEQ ID NO: 208810
  derived and/or modified CDS sequence (opt5) from neuraminidase__InfluenzaA__ACR52391

SEQ ID NO: 208998 - RNA, 1410 nt, Artificial Sequence; identical to SEQ ID NO: 208810
  derived and/or modified CDS sequence (opt5) from neuraminidase__InfluenzaA__ACR52401

SEQ ID NO: 208999 - RNA, 1410 nt, Artificial Sequence; identical to SEQ ID NO: 208810
  derived and/or modified CDS sequence (opt5) from neuraminidase__InfluenzaA__ACR52411

SEQ ID NO: 209000 - RNA, 1410 nt, Artificial Sequence; identical to SEQ ID NO: 208810
  derived and/or modified CDS sequence (opt5) from neuraminidase__InfluenzaA__ACR52421

SEQ ID NO: 209001 - RNA, 1410 nt, Artificial Sequence; identical to SEQ ID NO: 208810
  derived and/or modified CDS sequence (opt5) from neuraminidase__InfluenzaA__ACR52431

SEQ ID NO: 209002 - RNA, 1410 nt, Artificial Sequence; identical to SEQ ID NO: 208810
  derived and/or modified CDS sequence (opt5) from neuraminidase__InfluenzaA__ACR52441

SEQ ID NO: 209003 - RNA, 1410 nt, Artificial Sequence; identical to SEQ ID NO: 208810
  derived and/or modified CDS sequence (opt5) from neuraminidase__InfluenzaA__ACR52451

SEQ ID NO: 209004 - RNA, 1410 nt, Artificial Sequence; identical to SEQ ID NO: 208810
  derived and/or modified CDS sequence (opt5) from neuraminidase__InfluenzaA__ACR52471

SEQ ID NO: 209005 - RNA, 1410 nt, Artificial Sequence; identical to SEQ ID NO: 208810
  derived and/or modified CDS sequence (opt5) from neuraminidase__InfluenzaA__ACR52481

SEQ ID NO: 209006 - RNA, 1410 nt, Artificial Sequence; identical to SEQ ID NO: 208810
  derived and/or modified CDS sequence (opt5) from neuraminidase__InfluenzaA__ACR52491

SEQ ID NO: 209007 - RNA, 1410 nt, Artificial Sequence; identical to SEQ ID NO: 208810
  derived and/or modified CDS sequence (opt5) from neuraminidase__InfluenzaA__ACR54046

SEQ ID NO: 209008 - RNA, 1410 nt, Artificial Sequence; identical to SEQ ID NO: 208800
  derived and/or modified CDS sequence (opt5) from neuraminidase__InfluenzaA__ACR54052

SEQ ID NO: 209009 - RNA, 1410 nt, Artificial Sequence; identical to SEQ ID NO: 208810
  derived and/or modified CDS sequence (opt5) from neuraminidase__InfluenzaA__ACR54966

SEQ ID NO: 209010 - RNA, 1410 nt, Artificial Sequence; identical to SEQ ID NO: 208810
  derived and/or modified CDS sequence (opt5) from neuraminidase__InfluenzaA__ACR54976

SEQ ID NO: 209011 - RNA, 1410 nt, Artificial Sequence; identical to SEQ ID NO: 208810
  derived and/or modified CDS sequence (opt5) from neuraminidase__InfluenzaA__ACR54986

SEQ ID NO: 209012 - RNA, 1410 nt, Artificial Sequence; identical to SEQ ID NO: 208800
  derived and/or modified CDS sequence (opt5) from neuraminidase__InfluenzaA__ACR54996

SEQ ID NO: 209013 - RNA, 1410 nt, Artificial Sequence; identical to SEQ ID NO: 208810
  derived and/or modified CDS sequence (opt5) from neuraminidase__InfluenzaA__ACR55006

SEQ ID NO: 209014 - RNA, 1410 nt, Artificial Sequence; identical to SEQ ID NO: 208800
  derived and/or modified CDS sequence (opt5) from neuraminidase__InfluenzaA__ACR56383

SEQ ID NO: 209015 - RNA, 1410 nt, Artificial Sequence; identical to SEQ ID NO: 208800
  derived and/or modified CDS sequence (opt5) from neuraminidase__InfluenzaA__ACR56393

SEQ ID NO: 209016 - RNA, 1410 nt, Artificial Sequence; identical to SEQ ID NO: 208810
  derived and/or modified CDS sequence (opt5) from neuraminidase__InfluenzaA__ACR56403

SEQ ID NO: 209017 - RNA, 1410 nt, Artificial Sequence; identical to SEQ ID NO: 208810
  derived and/or modified CDS sequence (opt5) from neuraminidase__InfluenzaA__ACR56413

SEQ ID NO: 209018 - RNA, 1410 nt, Artificial Sequence; identical to SEQ ID NO: 208810
  derived and/or modified CDS sequence (opt5) from neuraminidase__InfluenzaA__ACR56423

SEQ ID NO: 209019 - RNA, 1410 nt, Artificial Sequence; identical to SEQ ID NO: 208810
  derived and/or modified CDS sequence (opt5) from neuraminidase__InfluenzaA__ACR56433

SEQ ID NO: 209020 - RNA, 1410 nt, Artificial Sequence; identical to SEQ ID NO: 208810
  derived and/or modified CDS sequence (opt5) from neuraminidase__InfluenzaA__ACR56443

SEQ ID NO: 209021 - RNA, 1410 nt, Artificial Sequence; identical to SEQ ID NO: 208810
  derived and/or modified CDS sequence (opt5) from neuraminidase__InfluenzaA__ACR56453

SEQ ID NO: 209022 - RNA, 1413 nt, Artificial Sequence; identical to SEQ ID NO: 208788
  derived and/or modified CDS sequence (opt5) from neuraminidase__InfluenzaA__ACR58555

SEQ ID NO: 209023 - RNA, 1413 nt, Artificial Sequence
  derived and/or modified CDS sequence (opt5) from neuraminidase__InfluenzaA__ACR61658
augaaccccaaucagaagaucauuaccaucggcagcauuuccaucgccauugggaucaucucucugaugcuccaaauuggaaacaucauuagcaucugggcuucccacucuauucagacaggcagccagaaucauacggggaucugcaaccagagaauuaucaccuacgagaauagcacaugggugaaccacaccuaugucucuaucaauaacacaaauguugugaccggaaaagacaagacaagcgugacccuggccggcaacuccagccuuuguucuauuuccgggugggcgaucuacacgaaagauaauagcauucggaucggaucuaagggcgacgucuucgugauucgcgaaccuuuuaucuccugcagccaucuggaguguagaaccuucuuucucacacaaggcgcucugcuuaacgauaaacacucuaaugggaccguuaaggaccgguccccguaucgcgcccugaugagcugcccccucggagaagccccuucccccuacaacucuaaguucgagagcguggcuugguccgccagcgcuugucaugauggcaugggguggcugacaaucggaauuucuggcccugacaauggggccgucgcggugcugaaauauaacggaaucauuaccgaaacgaucaaguccuggaaaaagcggauucucagaacacaggagagcgagugcguuugugugaacggcucuugcuuuaccaucaugacagauggccccagcaauggggccgcuuccuacaaaaucuucaagauugaaaagggaaaagucaccaagucuaucgagcugaacgccccuaauuuucacuaugaagaguguagcugcuacccggacaccggcacagugaugugugugugccgcgauaacuggcacggguccaauagacccugggucagcuucaaccagaaucuugacuaccagauuggauauaucugcucuggcguuuuuggggauaacccucggcccaaagacggaaagggcuccuguaauccugugacgguggauggcgcugacggggucaaaggauucagcuacaaguauggcaacgggguguggauuggacgcaccaaaucuaauagacugcggaagggcuuugagaugaucugggaccccaacggguggacagauaccgacuccgauuucagcguuaagcaagacguggucgccauuacagauugguccggcuacucuggauccuuugugcagcauccggaacucaccggccuggacugcauccgcccuuguuucuggguugagcuugugagagggcugccccgggaaaauacgacaaucuggaccuccggaucuagcauuuccuucugcggcgucgauagcgacaccgcgaacuggucuuggccugauggggccgagcuccccuuuacaaucgacaaauga

SEQ ID NO: 209024 - RNA, 1410 nt, Artificial Sequence
  derived and/or modified CDS sequence (opt5) from neuraminidase__InfluenzaA__ACR61680
augaaccccaaucagaagaucauuaccaucggcagcgugucccugacaauuucuacgaucugcuucuuuaugcaaauugccauccucaucaccacagucacccugcacuucaaacaguacgaguuuaacagcccuccgaauaaccagguuaugcuuugugaacccacaauuaucgagagaaauauuaccgaaaucguguaucugacaaacaccacgauugagaaggaaaucugcccuaaacucgcugaguaccggaauugguccaagccccagugugacauuaccggguucgccccuuuuucuaaagauaacagcauccgccuguccgcgggaggcgacaucugggugacaagagagcccuaugucucuugcgauccugacaaguguuaccaauucgcucuugggcagggaaccacacugaauaacgugcauagcaaugauaccguucgggaccgcacgccguauagaacacuccugaugaacgaacugggcgugcccuuucaccucgggaccaagcaggucugcauugccugguccucuagcuccugucaugauggaaaagccuggcugcacgugugcaucacaggcgacgauaagaaugcuaccgccagcuucauuuacaacggccggcuuguugacucuguggucuccuggagcaaagagauccugcgcacccaggaaucugagugugugugcauuaaugggacauguaucguggucaugacggauggauccgcuagcggcaaggccgacaccaaaauccucuuuauugaggaagggaagaucguucauacauccacccugucuggaagcgcgcaacacguggaggaaugcuccugcuauccuagauaccccggcgugcggugugucugccgcgauaacuggaaggggagcaacagaccuauuguggacaucaauauuaaagaccacucuaucguuuccagcuacguguguucuggacuugucggcgauacaccccggaagaacgacagcuccucuagcucccauugccuggauccgaauaacgaggaaggcgggcacggagugaaaggcugggccuucgacgaugggaaugacguuuggaugggacgcaccaucagcgagaagucuagacucggcuaugagacguuuaaagugauugaagggugguccaacccuaagagcaaacugcagaucaaucggcaggucauuguggaucgcggaaacagaucuggcuacuccggcaucuucagcgucgaggggaaguccuguauuaaucggugcuuuuauguggaacugaucagaggacgcaaggaggaaacagagguucucuggaccucuaacagcauuguggucuucuguggcaccuccgggacauacggaaccggcucuuggcccgacggggcugauaucaaucugaugccuaucuga

SEQ ID NO: 209025 - RNA, 1410 nt, Artificial Sequence
  derived and/or modified CDS sequence (opt5) from neuraminidase__InfluenzaA__ACR61691
augaaccccaaucagaagaucauuaccaucggcagcgugucccugacaauuucuacgaucugcuucuuuaugcaaauugccauccucaucaccacagucacccugcacuucaaacaguacgaguuuaacagcccuccgaauaaccagguuaugcuuugugaacccacaauuaucgagagaaauauuaccgaaaucguguaucugacaaacaccacgauugagaaggaaaucugccauaaacucgcugaguaccggaauugguccaagccucagugugacauuaccggguucgcccccuuuucuaaagauaacagcauccgccuguccgcgggaggcgacaucugggugacaagagagccuuaugucucuugcgaucccgacaaguguuaccaauucgcucuugggcagggaaccacacugaauaacgugcacagcaauaacaccguucgggaucgcacgccuuauagaacacuccugaugaaugaacugggcgugccguuucaucucgggaccaagcaggucugcauugccugguccagcagcuccugucacgacggaaaagccuggcugcaugugugcaucacaggcgaugacaagaacgcuaccgccagcuucauuuacaauggccggcuuguugauucuguggucuccuggagcaaagagauccugcgcacccaggaaucugagugugugugcauuaacgggacauguacgguggucaugaccgacggauccgcuagcggcaaggccgauacaaaaauccucuuuaucgaggaagggaagauuguucacaccuccacacugucuggaagcgcgcaacacguggaggaaugcuccugcuaucccagauacccuggcgugcggugugucugccgcgacaacuggaaggggagcaauagacccaucguggauauuaacaucaaagaccauucuauuguuuccagcuacguguguucuggacuugucggcgacaccccucggaagaaugauagcuccucuagcucccacugccuggaccccaacaaugaggaaggcgggcauggagugaaaggcugggccuucgaugacgggaacgauguuuggaugggacgcacgaucagcgagaagucuagacucggcuaugagacauuuaaagugaucgaagggugguccaauccgaagucuaaacugcagauuaaccggcaggucaucguggaccgcggaaauagaucuggcuacuccggcauuuucagcgucgaggggaaguccuguaucaaccggugcuuuuauguggaacugauuagaggacgcaaggaggaaaccgagguucucuggaccucuaauagcaucguggucuucuguggcacauccgggaccuacggaacaggcucuuggccugauggggcugacauuaaccugaugcccaucuga

SEQ ID NO: 209026 - RNA, 1410 nt, Artificial Sequence
  derived and/or modified CDS sequence (opt5) from neuraminidase__InfluenzaA__ACR61702
augaaccccaaucagaagaucauuaccaucggcagcgugucccugacaauuucuacgaucugcuucuuuaugcaaauugccauccucaucaccacagucacccugcacuucaaacaguacgaguuuaacagcccuccgaauaaccagguuaugcuuugugaacccacaauuaucgagagaaauauuaccgaaaucguguaucugacaaacaccacgauugagaaggaaaucugcccuaaacucgcugaguaccggaauugguccaagccccagugugacauuaccggguucgccccuuuuucuaaagauaacagcauccgccuguccgcgggaggcgacaucugggugacaagagagcccuaugucucuugcgauccugacaaguguuaccaauucgcucuugggcagggaaccacacugaauaacgugcauagcaauaacaccguucgggaucgcacgccguauagaacacuccugaugaaugaacugggcgugcccuuucaccucgggaccaagcaggucugcauugccugguccucuagcuccugucaugacggaaaagccuggcugcacgugugcaucacaggcgaugacaagaacgcuaccgccagcuucauuuacaauggccggcuuguugauucuguggucuccuggagcaaagagauccugcgcacccaggaaucugagugugugugcauuaacgggacauguacgguggucaugaccgacggauccgcuagcggcaaggccgauacaaaaauccucuuuaucgaggaagggaagauuguucauaccuccacacugucuggaagcgcgcaacacguggaggaaugcuccugcuauccuagauaccccggcgugcggugugucugccgcgacaacuggaaggggagcaauagaccuaucguggauauuaacaucaaagaccacucuauuguuuccagcuacguguguucuggacuugucggcgacacgccccggaagaaugauagcuccucuagcuccaacugccuggacccgaauaacgaggaaggcgggcauggagugaaaggcugggccuucgaugacgggaaugauguuuggaugggacgcaccaucagcgagaagucuagacucggcuaugagacauuuaaagugaucgaagggugguccaacccuaagagcaaacugcagauuaaucggcaggucaucguggaccgcggaaacagaucuggcuacuccggcauuuucagcgucgaggggaaguccuguaucaaucggugcuuuuauguggaacugauuagaggacgcaaggaggaaaccgagguucucuggaccucuaacagcaucguggucuucuguggcacauccgggaccuacggaacaggcucuuggcccgauggggcugacauuaaucugaugccuaucuga

SEQ ID NO: 209027 - RNA, 1410 nt, Artificial Sequence; identical to SEQ ID NO: 208800
  derived and/or modified CDS sequence (opt5) from neuraminidase__InfluenzaA__ACR67201

SEQ ID NO: 209028 - RNA, 1410 nt, Artificial Sequence; identical to SEQ ID NO: 208810
  derived and/or modified CDS sequence (opt5) from neuraminidase__InfluenzaA__ACR67202

SEQ ID NO: 209029 - RNA, 1410 nt, Artificial Sequence; identical to SEQ ID NO: 208800
  derived and/or modified CDS sequence (opt5) from neuraminidase__InfluenzaA__ACR67203

SEQ ID NO: 209030 - RNA, 1410 nt, Artificial Sequence; identical to SEQ ID NO: 208810
  derived and/or modified CDS sequence (opt5) from neuraminidase__InfluenzaA__ACR67204

SEQ ID NO: 209031 - RNA, 1410 nt, Artificial Sequence; identical to SEQ ID NO: 208810
  derived and/or modified CDS sequence (opt5) from neuraminidase__InfluenzaA__ACR67246

SEQ ID NO: 209032 - RNA, 1410 nt, Artificial Sequence; identical to SEQ ID NO: 208800
  derived and/or modified CDS sequence (opt5) from neuraminidase__InfluenzaA__ACR67256

SEQ ID NO: 209033 - RNA, 1410 nt, Artificial Sequence; identical to SEQ ID NO: 208810
  derived and/or modified CDS sequence (opt5) from neuraminidase__InfluenzaA__ACR77451

SEQ ID NO: 209034 - RNA, 1410 nt, Artificial Sequence; identical to SEQ ID NO: 208810
  derived and/or modified CDS sequence (opt5) from neuraminidase__InfluenzaA__ACR77461

SEQ ID NO: 209035 - RNA, 1410 nt, Artificial Sequence; identical to SEQ ID NO: 208810
  derived and/or modified CDS sequence (opt5) from neuraminidase__InfluenzaA__ACR77471

SEQ ID NO: 209036 - RNA, 1410 nt, Artificial Sequence; identical to SEQ ID NO: 208810
  derived and/or modified CDS sequence (opt5) from neuraminidase__InfluenzaA__ACR77481

SEQ ID NO: 209037 - RNA, 1410 nt, Artificial Sequence; identical to SEQ ID NO: 208810
  derived and/or modified CDS sequence (opt5) from neuraminidase__InfluenzaA__ACR77491

SEQ ID NO: 209038 - RNA, 1410 nt, Artificial Sequence; identical to SEQ ID NO: 208810
  derived and/or modified CDS sequence (opt5) from neuraminidase__InfluenzaA__ACR77501

SEQ ID NO: 209039 - RNA, 1410 nt, Artificial Sequence; identical to SEQ ID NO: 208810
  derived and/or modified CDS sequence (opt5) from neuraminidase__InfluenzaA__ACR83527

SEQ ID NO: 209040 - RNA, 1410 nt, Artificial Sequence; identical to SEQ ID NO: 208810
  derived and/or modified CDS sequence (opt5) from neuraminidase__InfluenzaA__ACR83539

SEQ ID NO: 209041 - RNA, 1410 nt, Artificial Sequence; identical to SEQ ID NO: 208810
  derived and/or modified CDS sequence (opt5) from neuraminidase__InfluenzaA__ACS14669

SEQ ID NO: 209042 - RNA, 1410 nt, Artificial Sequence; identical to SEQ ID NO: 208810
  derived and/or modified CDS sequence (opt5) from neuraminidase__InfluenzaA__ACS14679

SEQ ID NO: 209043 - RNA, 1410 nt, Artificial Sequence; identical to SEQ ID NO: 208810
  derived and/or modified CDS sequence (opt5) from neuraminidase__InfluenzaA__ACS14689

SEQ ID NO: 209044 - RNA, 1410 nt, Artificial Sequence; identical to SEQ ID NO: 208810
  derived and/or modified CDS sequence (opt5) from neuraminidase__InfluenzaA__ACS14699

SEQ ID NO: 209045 - RNA, 1410 nt, Artificial Sequence; identical to SEQ ID NO: 208810
  derived and/or modified CDS sequence (opt5) from neuraminidase__InfluenzaA__ACS14709

SEQ ID NO: 209046 - RNA, 1410 nt, Artificial Sequence; identical to SEQ ID NO: 208810
  derived and/or modified CDS sequence (opt5) from neuraminidase__InfluenzaA__ACS14719

SEQ ID NO: 209047 - RNA, 1410 nt, Artificial Sequence; identical to SEQ ID NO: 208810
  derived and/or modified CDS sequence (opt5) from neuraminidase__InfluenzaA__ACS14729

SEQ ID NO: 209048 - RNA, 1410 nt, Artificial Sequence; identical to SEQ ID NO: 208810
  derived and/or modified CDS sequence (opt5) from neuraminidase__InfluenzaA__ACS14739

SEQ ID NO: 209049 - RNA, 1410 nt, Artificial Sequence; identical to SEQ ID NO: 208800
  derived and/or modified CDS sequence (opt5) from neuraminidase__InfluenzaA__ACS27192

SEQ ID NO: 209050 - RNA, 1410 nt, Artificial Sequence; identical to SEQ ID NO: 208810
  derived and/or modified CDS sequence (opt5) from neuraminidase__InfluenzaA__ACS27202

SEQ ID NO: 209051 - RNA, 1410 nt, Artificial Sequence; identical to SEQ ID NO: 208810
  derived and/or modified CDS sequence (opt5) from neuraminidase__InfluenzaA__ACS27212

SEQ ID NO: 209052 - RNA, 1410 nt, Artificial Sequence; identical to SEQ ID NO: 208800
  derived and/or modified CDS sequence (opt5) from neuraminidase__InfluenzaA__ACS27222

SEQ ID NO: 209053 - RNA, 1410 nt, Artificial Sequence; identical to SEQ ID NO: 208810
  derived and/or modified CDS sequence (opt5) from neuraminidase__InfluenzaA__ACS27232

SEQ ID NO: 209054 - RNA, 1410 nt, Artificial Sequence; identical to SEQ ID NO: 208800
  derived and/or modified CDS sequence (opt5) from neuraminidase__InfluenzaA__ACS27242

SEQ ID NO: 209055 - RNA, 1410 nt, Artificial Sequence; identical to SEQ ID NO: 208810
  derived and/or modified CDS sequence (opt5) from neuraminidase__InfluenzaA__ACS27252

SEQ ID NO: 209056 - RNA, 1410 nt, Artificial Sequence; identical to SEQ ID NO: 208800
  derived and/or modified CDS sequence (opt5) from neuraminidase__InfluenzaA__ACS27771

SEQ ID NO: 209057 - RNA, 1410 nt, Artificial Sequence; identical to SEQ ID NO: 208965
  derived and/or modified CDS sequence (opt5) from neuraminidase__InfluenzaA__ACS34969

SEQ ID NO: 209058 - RNA, 1410 nt, Artificial Sequence; identical to SEQ ID NO: 208965
  derived and/or modified CDS sequence (opt5) from neuraminidase__InfluenzaA__ACS34970

SEQ ID NO: 209059 - RNA, 1410 nt, Artificial Sequence; identical to SEQ ID NO: 208965
  derived and/or modified CDS sequence (opt5) from neuraminidase__InfluenzaA__ACS34971

SEQ ID NO: 209060 - RNA, 1410 nt, Artificial Sequence; identical to SEQ ID NO: 208810
  derived and/or modified CDS sequence (opt5) from neuraminidase__InfluenzaA__ACS34972

SEQ ID NO: 209061 - RNA, 1410 nt, Artificial Sequence; identical to SEQ ID NO: 208810
  derived and/or modified CDS sequence (opt5) from neuraminidase__InfluenzaA__ACS50081

SEQ ID NO: 209062 - RNA, 1410 nt, Artificial Sequence; identical to SEQ ID NO: 208810
  derived and/or modified CDS sequence (opt5) from neuraminidase__InfluenzaA__ACS50087

SEQ ID NO: 209063 - RNA, 1410 nt, Artificial Sequence; identical to SEQ ID NO: 208810
  derived and/or modified CDS sequence (opt5) from neuraminidase__InfluenzaA__ACS50094

SEQ ID NO: 209064 - RNA, 1410 nt, Artificial Sequence; identical to SEQ ID NO: 208800
  derived and/or modified CDS sequence (opt5) from neuraminidase__InfluenzaA__ACS54264

SEQ ID NO: 209065 - RNA, 1410 nt, Artificial Sequence; identical to SEQ ID NO: 208965
  derived and/or modified CDS sequence (opt5) from neuraminidase__InfluenzaA__ACS54265

SEQ ID NO: 209066 - RNA, 1410 nt, Artificial Sequence; identical to SEQ ID NO: 208810
  derived and/or modified CDS sequence (opt5) from neuraminidase__InfluenzaA__ACS54266

SEQ ID NO: 209067 - RNA, 1410 nt, Artificial Sequence; identical to SEQ ID NO: 208810
  derived and/or modified CDS sequence (opt5) from neuraminidase__InfluenzaA__ACS54267

SEQ ID NO: 209068 - RNA, 1410 nt, Artificial Sequence; identical to SEQ ID NO: 208810
  derived and/or modified CDS sequence (opt5) from neuraminidase__InfluenzaA__ACS54268

SEQ ID NO: 209069 - RNA, 1410 nt, Artificial Sequence; identical to SEQ ID NO: 208810
  derived and/or modified CDS sequence (opt5) from neuraminidase__InfluenzaA__ACS54303

SEQ ID NO: 209070 - RNA, 1410 nt, Artificial Sequence; identical to SEQ ID NO: 208810
  derived and/or modified CDS sequence (opt5) from neuraminidase__InfluenzaA__ACS68823

SEQ ID NO: 209071 - RNA, 1410 nt, Artificial Sequence; identical to SEQ ID NO: 208810
  derived and/or modified CDS sequence (opt5) from neuraminidase__InfluenzaA__ACS75824

SEQ ID NO: 209072 - RNA, 1410 nt, Artificial Sequence; identical to SEQ ID NO: 208810
  derived and/or modified CDS sequence (opt5) from neuraminidase__InfluenzaA__ACS77929

SEQ ID NO: 209073 - RNA, 1410 nt, Artificial Sequence; identical to SEQ ID NO: 208810
  derived and/or modified CDS sequence (opt5) from neuraminidase__InfluenzaA__ACS77939

SEQ ID NO: 209074 - RNA, 1410 nt, Artificial Sequence; identical to SEQ ID NO: 208800
  derived and/or modified CDS sequence (opt5) from neuraminidase__InfluenzaA__ACS77949

SEQ ID NO: 209075 - RNA, 1410 nt, Artificial Sequence; identical to SEQ ID NO: 208810
  derived and/or modified CDS sequence (opt5) from neuraminidase__InfluenzaA__ACS77959

SEQ ID NO: 209076 - RNA, 1410 nt, Artificial Sequence; identical to SEQ ID NO: 208810
  derived and/or modified CDS sequence (opt5) from neuraminidase__InfluenzaA__ACS77969

SEQ ID NO: 209077 - RNA, 1410 nt, Artificial Sequence; identical to SEQ ID NO: 208810
  derived and/or modified CDS sequence (opt5) from neuraminidase__InfluenzaA__ACS77979

SEQ ID NO: 209078 - RNA, 1410 nt, Artificial Sequence; identical to SEQ ID NO: 208810
  derived and/or modified CDS sequence (opt5) from neuraminidase__InfluenzaA__ACS77989

SEQ ID NO: 209079 - RNA, 1410 nt, Artificial Sequence; identical to SEQ ID NO: 208810
  derived and/or modified CDS sequence (opt5) from neuraminidase__InfluenzaA__ACS77999

SEQ ID NO: 209080 - RNA, 1410 nt, Artificial Sequence; identical to SEQ ID NO: 208810
  derived and/or modified CDS sequence (opt5) from neuraminidase__InfluenzaA__ACS78009

SEQ ID NO: 209081 - RNA, 1410 nt, Artificial Sequence; identical to SEQ ID NO: 208810
  derived and/or modified CDS sequence (opt5) from neuraminidase__InfluenzaA__ACS78019

SEQ ID NO: 209082 - RNA, 1410 nt, Artificial Sequence; identical to SEQ ID NO: 208810
  derived and/or modified CDS sequence (opt5) from neuraminidase__InfluenzaA__ACS78039

SEQ ID NO: 209083 - RNA, 1410 nt, Artificial Sequence; identical to SEQ ID NO: 208810
  derived and/or modified CDS sequence (opt5) from neuraminidase__InfluenzaA__ACS78049

SEQ ID NO: 209084 - RNA, 1410 nt, Artificial Sequence; identical to SEQ ID NO: 208810
  derived and/or modified CDS sequence (opt5) from neuraminidase__InfluenzaA__ACS88274

SEQ ID NO: 209085 - RNA, 1410 nt, Artificial Sequence; identical to SEQ ID NO: 208810
  derived and/or modified CDS sequence (opt5) from neuraminidase__InfluenzaA__ACS88275

SEQ ID NO: 209086 - RNA, 1410 nt, Artificial Sequence; identical to SEQ ID NO: 208800
  derived and/or modified CDS sequence (opt5) from neuraminidase__InfluenzaA__ACS92572

SEQ ID NO: 209087 - RNA, 1410 nt, Artificial Sequence; identical to SEQ ID NO: 208800
  derived and/or modified CDS sequence (opt5) from neuraminidase__InfluenzaA__ACS92582

SEQ ID NO: 209088 - RNA, 1410 nt, Artificial Sequence; identical to SEQ ID NO: 208810
  derived and/or modified CDS sequence (opt5) from neuraminidase__InfluenzaA__ACS92592

SEQ ID NO: 209089 - RNA, 1410 nt, Artificial Sequence; identical to SEQ ID NO: 208810
  derived and/or modified CDS sequence (opt5) from neuraminidase__InfluenzaA__ACS92603

SEQ ID NO: 209090 - RNA, 1410 nt, Artificial Sequence; identical to SEQ ID NO: 208800
  derived and/or modified CDS sequence (opt5) from neuraminidase__InfluenzaA__ACS92614

SEQ ID NO: 209091 - RNA, 1410 nt, Artificial Sequence; identical to SEQ ID NO: 208810
  derived and/or modified CDS sequence (opt5) from neuraminidase__InfluenzaA__ACT09115

SEQ ID NO: 209092 - RNA, 1410 nt, Artificial Sequence; identical to SEQ ID NO: 208810
  derived and/or modified CDS sequence (opt5) from neuraminidase__InfluenzaA__ACT10309

SEQ ID NO: 209093 - RNA, 1410 nt, Artificial Sequence; identical to SEQ ID NO: 208810
  derived and/or modified CDS sequence (opt5) from neuraminidase__InfluenzaA__ACT10315

SEQ ID NO: 209094 - RNA, 1410 nt, Artificial Sequence; identical to SEQ ID NO: 208800
  derived and/or modified CDS sequence (opt5) from neuraminidase__InfluenzaA__ACT11059

SEQ ID NO: 209095 - RNA, 1350 nt, Artificial Sequence
  derived and/or modified CDS sequence (opt5) from neuraminidase__InfluenzaA__ACT15313
augaaccccaaucagaagaucauuaccaucggcagcauuugcauggugaucgggauugucucccugaugcuccaaaucggaaacaugaucucuauuuggguuagccacuccauccagacaggcaaucagugucaggacgagccuauuucuaacacgaaauuccugaccgaaaaggccguggcuagcgugacacuugccggaaauuccucucugugcccgaucagcgggugggcggucuacuccaaagauaacagcauuagaaucggcucucgcggggacguguuuguuauucgggagcccuucaucuccuguagccaucucgaaugcagaaccuuuuuccugacacaaggagcccuucugaaugauaagcacucuaacggcaccgugaaagaccgguccccucaucgcacacucaugagcugucccgucggcgaggcuccuucucccuauaauuccagauuugaaagcguggccugguccgcuucugccugccacgaugggaccagcuggcugacgaucggaauuuccggcccugacaacggggcuguugccgugcugaaguacaauggaaucauuaccgauacaaucaagagcuggcggaacaauauuaugcgcacccaggagucugagugugcgugcgucaacggcuccuguuucacagugaugaccgacgggccgagcucuggacaggccagcuauaaaaucuuuaagauggaaaaaggcaagguggucaaauccguugagcucgaugcucccaauuaccauuaugaagagugcucuuguuacccugacgccggcgagaucacgugcgugugcagagauaacuggcacgggagcaaccggcccuggguguccuucaaucagaaccuggaauaucaaauuggauacaucuguagcggcgucuuuggggacaauccucgccccaacgauggaacaggcucuugcgggccgguguucccuaauggagcuuacggcguuaagggcuuuuccuucaaguaugggaacggaguguggauuggcagaaccaaaagcacaaauucucgguccggguuugagaugaucugggaccccaacggauggaccggcaccgacagcuccuucucugucaagcaggauauuguggccaucacagacuggagcggguacuccggcucuuucguucagcacccugaacuuacgggacuggauuguauccgccccugcuuuuggguggagcucauuagaggccggcccaaagaaagcaccaucuggacauccgggagcucuauuuccuucuguggagucaauggcgacaccgugagcuggucuuggccugauggggcggagcugccguuuacaaucgacaaguga

SEQ ID NO: 209096 - RNA, 1350 nt, Artificial Sequence
  derived and/or modified CDS sequence (opt5) from neuraminidase__InfluenzaA__ACT15315
augaaccccaaucagaagaucauuaccaucggcagcauuugcauggugaucgggauugucucccugaugcuccaaaucggaaacaugaucucuauuuggguuagccacuccauccagacaggcaaucagugucaggacgagccuauuucuaacacgaaauuccugaccgaaaaggccguggcuagcgugacacuugccggaaauuccucucugugcccgaucagcgggugggcggucuacuccaaagauaacagcauuagaaucggcucucgcggggacguguuuguuaugcgggagcccuucauuuccuguagccaucucgaaugcagaaccuuuuuccugacacaaggagcccuucugaaugauaagcacucuaacggcaccgugaaagaccgguccccucaucgcacacucaugagcugucccgucggcgaggcuccuucucccuauaauuccagauuugaaagcguggccugguccgcuucugccugccacgaugggaccagcuggcugacgaucggaaucuccggcccugacaacggggcuguugccgugcugaaguacaauggaauuaucaccgauacaauuaagagcuggcggaacaauaucaugcgcacccaggagucugagugugcgugcgucaacggcuccuguuucacagugaugaccgacgggccgagcucuggacaggccagcuauaaaauuuuuaagauggaaaaaggcaagguggucaaauccguugagcucgaugcucccaauuaccauuaugaagagugcucuuguuacccugacgccggcgagaucacgugcgugugcagagauaacuggcacgggagcaaccggcccuggguguccuucaaucagaaccuggaauaucaaaucggauacauuuguagcggcgucuuuggggacaauccucgccccaacgauggaacaggcucuugcgggccgguguucccuaauggagcuuacggcguuaagggcuuuuccuucaaguaugggaacggaguguggaucggcagaaccaaaagcacaaauucucgguccggguuugagaugauuugggaccccaacggauggaccggcaccgacagcuccuucucugucaagcaggauaucguggccauuacagacuggagcggguacuccggcucuuucguucagcacccugaacuuacgggacuggauuguauccgccccugcuuuuggguggagcucaucagaggccggcccaaagaaagcaccauuuggacauccgggagcucuaucuccuucuguggagucaauggcgacaccgugagcuggucuuggccugauggggcggagcugccguuuacaauugacaaguga

SEQ ID NO: 209097 - RNA, 1350 nt, Artificial Sequence; identical to SEQ ID NO: 209095
  derived and/or modified CDS sequence (opt5) from neuraminidase__InfluenzaA__ACT15319

SEQ ID NO: 209098 - RNA, 1350 nt, Artificial Sequence
  derived and/or modified CDS sequence (opt5) from neuraminidase__InfluenzaA__ACT15321
augaaccccaaucagaagaucauuaccaucggcagcauuugcauggugaucgggauugucucccugaugcuccaaaucggaaacaugaucucuauuuggguuagccacuccauccagacaggcaaucagugucaggacgagccuauuucuaacacgaaauuccugaccgaaagagccguggcuagcgugacacuugccggaaauuccucucugugcccgaucagcgggugggcggucuacuccaaggauaacagcauucggaucggcucucgcggggacguguuuguuauuagagagcccuucaucuccuguagccaucucgaaugccggaccuuuuuccugacacaaggagcccuucugaaugauaaacacucuaacggcaccgugaaggaccgcuccccucauagaacacucaugagcugucccgucggcgaggcuccuucucccuauaauucccgguuugaaagcguggccugguccgcuucugccugccacgaugggaccagcuggcugacgaucggaauuuccggcccugacaacggggcuguugccgugcugaaauacaauggaaucauuaccgauacaaucaagagcuggcgcaacaauauuaugagaacccaggagucugagugugcgugcgucaacggcuccuguuucacagugaugaccgacgggccgagcucuggacaggccagcuauaagaucuuuaaaauggaaaagggcaaaguggucaaguccguugagcucgaugcucccaauuaccauuaugaagagugcucuuguuacccugacgccggcgagaucacgugcgugugccgggauaacuggcacgggagcaaccgccccuggguguccuucaaucagaaccuggaauaucaaauuggauacaucuguagcggcgucuuuggggacaauccuagacccaacgauggaacaggcucuugcgggccgguguucccuaauggagcuuacggcguuaaaggcuuuuccuucaaguaugggaacggaguguggauuggccggaccaagagcacaaauucucgcuccggguuugagaugaucugggaccccaacggauggaccggcaccgacagcuccuucucugucaaacaggauauuguggccaucacagacuggagcggguacuccggcucuuucguucagcacccugaacuuacgggacuggauuguaucagacccugcuuuuggguggagcucauucggggccgccccaaggaaagcaccaucuggacauccgggagcucuauuuccuucuguggagucaauggcgacaccgugagcuggucuuggccugauggggcggagcugccguuuacaaucgacaaauga

SEQ ID NO: 209099 - RNA, 1350 nt, Artificial Sequence; identical to SEQ ID NO: 209095
  derived and/or modified CDS sequence (opt5) from neuraminidase__InfluenzaA__ACT15323

SEQ ID NO: 209100 - RNA, 1350 nt, Artificial Sequence; identical to SEQ ID NO: 209095
  derived and/or modified CDS sequence (opt5) from neuraminidase__InfluenzaA__ACT15325

SEQ ID NO: 209101 - RNA, 1350 nt, Artificial Sequence
  derived and/or modified CDS sequence (opt5) from neuraminidase__InfluenzaA__ACT15327
augaaccccaaucagaagaucauuaccaucggcagcauuugcauggugaucgggauugucucccugaugcuccaaaucggaaacaugaucucuauuuggguuagccacuccauccagacaggcaauagaugucaggacgagccuauuucuaacacgaaauuccugaccgaaaaggccguggcuagcgugacacuugccggaaauuccucucugugcccgaucagcgggugggcggucuacuccaaagauaacagcauucggaucggcucucgcggggacguguuuguuauuagagagcccuucaucuccuguagccaucucgaaugccggaccuuuuuccugacacagggagcccuucugaaugauaagcacucuaacggcaccgugaaagaccgcuccccucauagaacacucaugagcugucccgucggcgaggcuccuucucccuauaauucccgguuugaaagcguggccugguccgcuucugccugccacgaugggaccagcuggcugacgaucggaauuuccggcccugacaacggggcuguugccgugcugaaguacaauggaaucauuaccgauacaaucaagagcuggcgcaacaauauuaugagaacccaagagucugagugugcgugcgucaacggcuccuguuucacagugaugaccgacgggccgagcucuggacaggccagcuauaaaaucuuuaagauggaaaaaggcaagguggucaaauccguugagcucgaugcucccaauuaccauuaugaagagugcucuuguuacccugacgccggcgagaucacgugcgugugccgggauaacuggcacgggagcaaccgccccuggguguccuucaaucagaaccuggaauauaagauuggauacaucuguagcggcauuuuuggggacaauccuagacccaacgauggaacaggcucuugcgggccggucuucccuaauggagcuuacggcgugaagggcuuuuccuucaaauaugggaacggaguuuggaucggccggaccaagagcacaaauucucgcuccggguuugagaugauuugggaccccaacggauggaccggcaccgacagcuccuucucugugaaacaggauaucgucgccaucacagacuggagcggguacuccggcucuuucgugcaacacccugaacuuacgggacuggauuguauuagacccugcuuuuggguugagcucauccggggccgccccaaggaaagcaccauuuggacauccgggagcucuaucuccuucuguggagugaauggcgacaccgucagcuggucuuggccugauggggcggagcugccguuuacaauugacaaauga

SEQ ID NO: 209102 - RNA, 1350 nt, Artificial Sequence
  derived and/or modified CDS sequence (opt5) from neuraminidase__InfluenzaA__ACT15331
augaaccccaaucagaagaucauuaccaucggcagcauuugcauggugaucgggauugucucccugaugcuccaaaucggaaacaugaucucuauuuggguuagccacuccauccagacaggcaaucagugucaggacgagccuauuucuaacacgaaauuccugaccgaaaaggccguggcuagcgugacacuugccggaaauuccucucugugcccgaucagcgggugggcggucuacuccaaagauaacagcauuagaaucggcucucgcggggacguguuuguuauucgggagcccuucaucuccuguagccaucucgaaugcagaaccuuuuuccugacacaaggagcccuucugaaugauaagcacucuaacggcaccgugaaagaccgguccccucaucgcacacucaugagcugucccgucggcgaggcuccuucucccuauaauuccagauuugaaagcguggccugguccgcuucugccugccacgaugggaccagcuggcugacgaucggaauuuccggcccugacaacggggcuguugccgugcugaaguacaauggaaucauuaccgauacaaucaagagcuggcggaacaauauuaugcgcacccaggagucugagugugcgugcgucaacggcuccuguuucacagugaugaccgacgggccgagcucuggacaggccagcuauaaaaucuuuaagauggaaaaaggcaagguggucaaauccguugagcucgaugcucccaauuaccauuaugaagagugcucuuguuacccugacgccggcgagaucacgugcgugugcagagauaacuggcacgggagcaaccggcccuggguguccuucaaucagaaccuggaauaucaaauuggauacaucuguagcggcgucuuuggggacaauccucgccccaacgauggaacaggcucuugcgggccgguguucccuaauggagcuuacggcguuaagggcuuuuccuucaaguaugggaacggaguguggauuggcagaaccaaaagcacaaauucucgguccggguuugagaugaucugggaccccaacggauggaccggcaccgacagcuccuucucugucaagcaggauauuguggccaucacagacuggagcggguacuccggcucuuucguucagcacccugaacuuacgggacuggauuguauccgccccugcuuuuggguggagcucauuagaggccggcccaaagaaagcaccaucuggacauccgggagcucuauuuccuucuguggagucaauagcgacaccgugucuugguccuggccugauggcgcggagcugccguuuacaaucgacaaguga

SEQ ID NO: 209103 - RNA, 1350 nt, Artificial Sequence
  derived and/or modified CDS sequence (opt5) from neuraminidase__InfluenzaA__ACT15333
augaaccccaaucagaagaucauuaccaucggcagcauuugcauggugaucgggauugucucccugaugcuccaaaucggaaacaugaucucuauuuggguuagccacuccauccagacaggcaaucagugucagggggagccuauuucuaacacgaaauuccugaccgaaaaggccguggcuagcgugacacuugccggaaauuccucucugugcccgaucagcggcugggcggucuacuccaaagacaacagcauuagaaucgggucucggggagauguguuuguuauucgcgagcccuucaucuccuguagccaucucgaaugcagaaccuuuuuccugacacaaggcgcccuucugaaugacaagcacucuaacggcaccgugaaagaucgguccccucaucgcacacucaugagcugucccgucggggaggcuccuucucccuauaauuccagauuugaaagcguggccugguccgcuucugccugccacgacggaaccagcuggcugacgaucggcauuuccgggccugauaacggagcuguugccgugcugaaguacaauggcaucauuaccgacacaaucaagagcuggcggaacaauauucuccgcacccaggagucugagugugcgugcgucaacggguccuguuucacagugaugaccgauggaccgagcucuggccaggccagcuauaaaaucuuuaagauggaaaaaggcaagguggucaaauccguugagcuggacgcucccaauuaccauuaugaagagugcucuuguuacccugaugccggggagaucacgugcgugugcagagacaacuggcacggaagcaaccggcccuggguguccuucaaucagaaccuugaauaucaaauuggcuacaucuguagcggggucuuuggagauaauccucgccccaacgacggcacagggucuugcggaccggugguuuccaauggcgcuuacggcgugaagggguucagcuuuaaguauggaaacggcgucuggauugggagaaccaaaucuacaaauucccggagcggauucgagaugaucugggauccuaacggcuggaccgggaccgacuccucuuuuagcggcaagcaggacauuguggccaucacagauugguccggauacucuggcagcuucguucagcaccccgaacugacggggcucgacuguauccgcccuugcuucuggguggagcugauuagaggacggcccaaagaauccaccaucuggacaagcgggucuuccauuagcuuuuguggcgucaauucugauaccguguccuggagcuggcccgacggagcggagcuuccuuucacaaucgauaaguga

SEQ ID NO: 209104 - RNA, 1350 nt, Artificial Sequence
  derived and/or modified CDS sequence (opt5) from neuraminidase__InfluenzaA__ACT15335
augaaccccaaucagaagaucauuaccaucggcagcauuugcauggugaucgggauugucucccugaugcuccaaaucggaaacaugaucucuauuuggguuagccacuccauccagacaggcaauagaugucaggacgagccuauuucuaacacgaaauuccugaccgaaaaggccguggcuagcgugacacuugccggaaauuccucucugugcccgaucagcgggugggcggucuacuccaaagauaacagcauucggaucggcucucgcggggacguguuuguuauuagagagcccuucaucuccuguagccaucucgaaugccggaccuuuuuccugacacagggagcccuucugaaugauaagcacucuaacggcaccgugaaagaccgcuccccucauagaacacucaugagcugucccgucggcgaggcuccuucucccuauaauucccgguuugaaagcguggccugguccgcuucugccugccacgaugggaccagcuggcugacgaucggaauuuccggcccugacaacggggcuguugccgugcugaaguacaauggaaucauuaccgauacaaucaagagcuggcgcaacaauauuaugagaacccaagagucugagugugcgugcgucaacggcuccuguuucacagugaugaccgacgggccgagcucuggacaggccagcuauaaaaucuuuaagauggaaaaaggcaagguggucaaauccguugagcucgaugcucccaauuaccauuaugaagagugcucuuguuacccugacgccggcgagaucacgugcgugugccgggauaacuggcacgggagcaaccgccccuggguguccuucaaucagaaccuggaauauaagauuggauacaucuguagcggcauuuuuggggacaauccuagacccaacgauggaacaggcucuugcgggccgguccuuccuaauggagcuuacggcgugaagggcuucuccuuuaaauaugggaacggaguuuggaucggccggaccaagagcacaaauucucgcuccggguucgagaugauuugggaccccaacggauggaccggcaccgacagcuccuuuucugugaaacaggauaucgucgccaucacagacuggagcggguacuccggcucuuucgugcaacacccugaacugacgggacucgauuguauuagacccugcuucuggguugagcugauccggggccgccccaaggaaagcaccauuuggacauccgggagcucuaucuccuuuuguggagugaauggcgacaccgucagcuggucuuggccugauggggcggagcuuccguucacaauugacaaauga

SEQ ID NO: 209105 - RNA, 1350 nt, Artificial Sequence
  derived and/or modified CDS sequence (opt5) from neuraminidase__InfluenzaA__ACT15337
augaaccccaaucagaagaucauuaccaucggcagcauuugcauggugaucgggauugucucccugaugcuccaaaucggaaacaugaucucuauuuggguuagccacuccauccagacaggcaaucagugucaggacgagccuauuucuaacacgaaauuccugaccgaaaaggccguggcuagcgugacacuugccggaaauuccucucugugcccgaucagcgggugggcggucuacuccaaagauaacagcauuagaaucggcucucgcggggacguguuuguuauucgggagcccuucaucuccuguagccaucucgaaugcagaaccuuuuuccugacacaaggagcccuucugaaugauaagcacucuaacggcaccgugaaagaccgguccccucaucgcacacucaugagcugucccgucggcgaggcuccuucucccuauaauuccagauuugaaagcguggccugguccgcuucugccugccacgaugggaccagcuggcugacgaucggaauuuccggcccugacaacggggcuguugccgugcugaaguacaauggaaucauuaccgauacaaucaagagcuggcggaacaauauuaugcgcacccaggagucugagugugcgugcgucaacggcuccuguuucacagugaugaccgacgggccgagcucuggacaggccagcuauaaaaucuuuaagauggaaaaaggcaagguggucaaauccguugagcucgaugcucccaauuaccauuaugaagagugcucuuguuacccugacgccggcgagaucacgugcgugugcagagauaacuggcacgggagcaaccggcccuggguguccuucaaucagaaccuggaauaucaaauuggauacaucuguagcggcgucuuuggggacaauccucgccccaacgauggaacaggcucuugcgggccgguguucccuaauggagcuuacggcguuaagggcuuuuccuucaaguaugggaacggaguguggauuggcagaaccaaaagcacaaauucucgguccggguuugagaugaucugggaccccaacggauggaccggcaccgacagcuccuucucugucaagcaggauauuguggccguuacagacuggagcggguacuccggcucuuucgugcagcacccugaacuuacgggacuggauuguauccgccccugcuuuugggucgagcucaucagaggccggcccaaagaaagcaccauuuggacauccgggagcucuaucuccuucuguggagugaauggcgacaccgucagcuggucuuggccugauggggcggagcugccguuuacaauugacaaguga

SEQ ID NO: 209106 - RNA, 1350 nt, Artificial Sequence; identical to SEQ ID NO: 209095
  derived and/or modified CDS sequence (opt5) from neuraminidase__InfluenzaA__ACT15341

SEQ ID NO: 209107 - RNA, 1350 nt, Artificial Sequence
  derived and/or modified CDS sequence (opt5) from neuraminidase__InfluenzaA__ACT15344
augaaccccaaucagaagaucauuaccaucggcagcauuugcauggugaucgggauugucucccugaugcuccaaaucggaaacaugaucucuauuuggguuagccacuccauccagacaggcaaucagugucaggacgagccuauuucuaacacgaaauuccugaccgaaaaggccguggcuagcgugacacuugccggaaauuccucucugugcccgaucagcgggugggcggucuacuccaaagauaacagcauuagaaucggcucucgcggggacguguuuguuauucgggagcccuucaucuccuguagccaucucgaaugcagaaccuuuuuccugacacaaggagcccuucugaaugauaagcacucuaacggcaccgugaaagaccgguccccucaucgcacacucaugagcugucccgucggcgaggcuccuucucccuauaauuccagauuugaaagcguggccugguccgcuucugccugccacgaugggaccagcuggcugacgaucggaauuuccggcccugacaacggggcuguugccgugcugaaguacaauggaaucauuaccgauacaaucaagagcuggcggucuaacauuaugcgcacccaggaguccgagugugcgugcgucaauggcagcuguuucacagugaugaccgacgggccgucuagcggacaggccuccuauaaaaucuuuaagauggaaaaaggcaagguggucaaaucuguugagcucgaugcucccaacuaccauuaugaagagugcagcuguuacccugacgccggcgagaucacgugcgugugcagagauaauuggcacggguccaaccggcccugggugagcuucaaccagaaucuggaauaucaaauuggauacaucuguucuggcgucuuuggggacaacccucgccccaaugauggaacaggcuccugcgggccgguguucccuaacggagcuuacggcguuaagggcuuuagcuucaaguaugggaauggaguguggauuggcagaaccaaaucuacaaacucccggagcggguuugagaugaucugggaccccaauggauggaccggcaccgacuccucuuucagcgucaagcaggauauuguggccaucacagacugguccggguacucuggcagcuucguucagcacccugaacuuacgggacuggauuguauccgccccugcuuuuggguggagcucauuagaggccggcccaaagaauccaccaucuggacaagcgggucuuccauuagcuucuguggagucaacggcgacaccgugucuugguccuggccugauggggcggagcugccguuuacaaucgacaaguga

SEQ ID NO: 209108 - RNA, 1350 nt, Artificial Sequence
  derived and/or modified CDS sequence (opt5) from neuraminidase__InfluenzaA__ACT15346
augaaccccaaucagaagaucauuaccaucggcagcauuugcauggugaucgggauugucucccugaugcuccaaaucggaaacaugaucucuauuuggguuagccacuccauccagacaggcaaucagugucaggacgagccuauuucuaacacgaaauuccugaccgaaaaggccguggcuagcgugacacuugccggaaauuccucucugugcccgaucagcgggugggcggucuacuccaaagauaacaauauuagaaucggcagccgcggggacguguuuguuauucgggagcccuucaucucuuguucccaucucgaaugcagaaccuuuuuccugacacaaggagcccuucugaacgauaagcacagcaauggcaccgugaaagaccggucuccucaucgcacacucauguccugucccgucggcgaggcuccuagccccuauaacucuagauuugaauccguggccuggagcgcuuccgccugccacgaugggaccucuuggcugacgaucggaauuagcggcccugacaauggggcuguugccgugcugaaguacaacggaaucauuaccgauacaaucaaguccuggcggaauaacauuaugcgcacccaggagagcgagugugcgugcgucaauggcucuuguuucacagugaugaccgacgggccguccagcggacaggccucuuauaaaaucuuuaagauggaaaaaggcaagguggucaaaagcguugagcucgaugcucccaacuaccauuaugaagagugcuccuguuacccugacgccggcgagaucacgugcgugugcagagauaacuggcacgggucuaaucggcccugggugagcuucaaccagaaucuggaauaucaaauuggauacaucuguuccggcgucuuuggggacaacccucgccccaaugauggaacaggcagcugcgggccgguguucccuaacggagcuuacggcguuaagggcuuuucuuucaaguaugggaauggaguguggauuggcagaaccaaauccacaaacagccggucuggguuugagaugaucugggaccccaauggauggaccggcaccgacuccagcuucuccgucaagcaggauauuguggccaucacagacuggucuggguacagcggcuccuucguucagcacccugaacuuacgggacuggauuguauccgccccugcuuuuggguggagcucauuagaggccggcccaaagaaucuaccaucuggacaagcggguccagcauuucuuucuguggagucaacggcgacaccguguccuggagcuggccugauggggcggagcugccguuuacaaucgacaaguga

SEQ ID NO: 209109 - RNA, 1350 nt, Artificial Sequence
  derived and/or modified CDS sequence (opt5) from neuraminidase__InfluenzaA__ACT15348
augaaccccaaucagaagaucauuaccaucggcagcauuugcauggugaucgggacagucucccugaugcuccaaauuggaaacaugaucucuaucuggguuagccacuccauucagacgggcaaucagugucagggggagccuaucucuaacaccaaauuccugacagaaaaggccguggcuagcgugacccuugccggaaauuccucucugugcccgauuagcggcugggcggucuacuccaaagacaacagcaucagaauugggucucggggagauguguuuguuauccgcgagcccuucauuuccuguagccaucucgaaugcagaacauuuuuccugacccaaggcgcccuucugaaugacaagcacucuaacggcacagugaaagaucgguccccucaucgcacccucaugagcugucccgucggggaggcuccuucucccuauaauuccagauuugaaagcguggccugguccgcuucugccugccacgacggaacgagcuggcugaccaucggcaucuccgggccugauaacggagcuguugccgugcugaaguacaauggcauuaucacagacaccauuaagagcuggcggaacaauauccuccgcacacaggagucugagugugcgugcgucaacggguccuguuucaccgugaugacggauggaccgagcucuggccaggccagcuauaaaauuuuuaagauggaaaaaggcaagguggucaaauccguugagcuggacgcucccaauuaccauuaugaagagugcucuuguuacccugaugccggggagaucacaugcgugugcagagacaacuggcacggaagcaaccggcccuggguguccuucaaucagaaccuugaauaucaaaucggcuacauuuguagcggggucuuuggagauaauccucgccccaacgacggcaccgggucuugcggaccggugguuuccaauggcgcuuacggcgugaagggguucagcuuuaaguauggaaacggcgucuggaucgggagaacaaaaucuaccaauucccggagcggauucgagaugauuugggauccuaacggcuggaccgggacagacuccucuuuuagcggcaagcaggacaucguggccauuacggauugguccggauacucuggcagcuucguucagcaccccgaacugaccgggcucgacuguauccgcccuugcuucuggguggagcugaucagaggacggcccaaagaauccacaauuuggaccagcgggucuuccaucagcuuuuguggcgucaauucugauacaguguccuggagcuggcccgacggagcggagcuuccuuucaccauugauaaguga

SEQ ID NO: 209110 - RNA, 1350 nt, Artificial Sequence
  derived and/or modified CDS sequence (opt5) from neuraminidase__InfluenzaA__ACT15350
augaaccccaaucagaagaucauuaccaucggcagcauuugcauggugaucgggauugucucccugaugcuccaaaucggaaacaugaucucuauuuggguuagccacuccauccagacaggcaauagaugucaggacgagccuauuucuaacacgaaauuccugaccgaaaaggccguggcuagcgugacacuugccggaaauuccucucugugcccgaucagcgggugggcggucuacuccaaagauaacagcauucggaucggcucucgcggggacguguuuguuauuagagagcccuucaucuccuguagccaucucgaaugccggaccuuuuuccugacacagggagcccuucugaaugauaagcacucuaacggcaccgugaaagaccgcuccccucauagaacacucaugagcugucccgucggcgaggcuccuucucccuauaauucccgguuugaaagcguggccugguccgcuucugccugccacgaugggaccagcuggcugacgaucggaauuuccggcccugacaacggggcuguugccgugcugaaguacaauggaaucauuaccgauacaaucaagagcuggcgcaacaauauuaugagaacccaagagucugagugugcgugcgucaacggcuccuguuucacagugaugaccgacgggccgagcucuggacaggccagcuauaaaaucuuuaagauggaaaaaggcaagguggucaaauccguugagcucgaugcucccaauuaccauuaugaagagugcucuuguuacccugacgccggcgagaucacgugcgugugccgggauaacuggcacgggagcaaccgccccuggguguccuucaaucagaaccuggaauauaagauuggauacaucuguagcggcauuuuuggggacaauccuagacccaacgauggaacaggcucuugcgggccggucuucccuaauggagcuuacggcgugaagggcuuuuccuucaaauaugggaacggaguuuggaucggccggaccaagagcacaaauucucgcuccggguuugagaugauuugggaccccaacggauggaccggcaccgacagcuccuucucugugaaacaggauaucgucgccaucacagacuggagcggguacuccggcucuuucgugcaacacccugaacuuacgggacuggauuguauuagacccugcuuuuggguugagcucauccggggccgccccaaggaaagaaccauuuggacaagcggguccagcaucucuuucuguggagugaauggcgacaccgucuccuggagcuggccugauggggcggagcugccguuuacaauugacaaauga

SEQ ID NO: 209111 - RNA, 1350 nt, Artificial Sequence
  derived and/or modified CDS sequence (opt5) from neuraminidase__InfluenzaA__ACT15352
augaaccccaaucagaagaucauuaccaucggcagcauuugcauggugaucgggauugucucccugaugcuccaaaucggaaacaugaucucuauuuggguuagccacuccauccagacaggcaaucagugucaggacgagccuauuucuaacacgaaauuccugaccgaaaaggccguggcuagcgugacacuugccggaaauuccucucugugcccgaucagcggaugggcggucuacuccaaagauaacagcauuagaaucggcucucgcggggacguguuuguuauucgggagcccuucaucuccuguagccaucucgaaugcagaaccuuuuuccugacacaaggagcccuucugaaugauaagcacucuaacggcaccgugaaagaccgguccccucaucgcacacucaugagcugucccgucggcgaggcuccuucucccuauaauuccagauuugaaagcguggccugguccgcuucugccugccacgaugggaccagcuggcugacgaucggaauuuccggcccugacaacggggcuguugccgugcugaaguacaauggaaucauuaccgauacaaucaagagcuggcggaacaauauucuccgcacccaggagucugagugugcgugcgucaacggcuccuguuucacagugaugaccgacgggccgagcucuggacaggccagcuauaaaaucuuuaagauggaaaaaggcaagguggucaaauccguugagcuggaugcucccaauuaccauuaugaagagugcucuuguuacccugacgccggcgagaucacgugcgugugcagagauaacuggcacgggagcaaccggcccuggguguccuucaaucagaaccuugaauaucaaauuggauacaucuguagcggcgucuuuggggacaauccucgccccaacgauggaacaggcucuugcgggccggugguuuccaauggagcuuacggcgugaagggcuucagcuuuaaguaugggaacggagucuggauuggcagaaccaaaucuacaaauucccggagcggguucgagaugaucugggacccuaacggauggaccggcaccgacuccucuuuuagcgggaagcaggauauuguggccaucacagacugguccggcuacucugggagcuucguucagcaccccgaacugacgggccucgauuguauccgcccuugcuucuggguggagcugauuagagggcggcccaaagaauccaccaucuggacaagcggaucuuccauuagcuuuuguggcgucaauucugacaccguguccuggagcuggcccgauggggcggagcuuccuuucacaaucgacaaguga

SEQ ID NO: 209112 - RNA, 1350 nt, Artificial Sequence
  derived and/or modified CDS sequence (opt5) from neuraminidase__InfluenzaA__ACT15354
augaaccccagccagaagaucauuaccaucggcuccauuugcauggugaucgggauugucucucugaugcuccaaaucggaaauaugaucagcauuuggaucucccacucuauucagacaggcaaccagugucaggacgagccuaucagcaauacgaaauuccugaccgaaaaggccguugcuuccgugacacuugccgggaacucuagccugugcccgauuuccggaugggcgguguacagcaaagauaauucuaucagaauuggcucccgcggggacgucuuugugauccgggagcccuucaucagcuguucucaucucgaaugcagaaccuuuuuccugacacaaggagcccuucugaacgauaagcacuccaauggcaccguuaaagaccggagcccucaucgcacacucaugucuugucccgugggcgaggcuccuucccccuauaacagcagauuugaauccgucgccuggucugcuagcgccugccacgaugggaccuccuggcugacgauuggaaucagcggcccugacaauggggcuguggccguucugaaguacaacggaauuaucaccgauacaauuaagucuuggcggaauaacaucaugcgcacccaggaguccgagugugcgugcgugaauggcagcuguuucacagucaugaccgacgggccgucuagcggacaggccuccuauaaaaucuuuaagauggaaaaaggcaagguggugaaaucugucgagcucgaugcucccaacuaccauuaugaagagugcagcuguuacccugacgccggcgagauuacgugcguuugcagagauaauuggcacggguccaaccggcccugggugagcuucaaccagaaucuggaauaucaaaucggauacauuuguucuggcguguuuggggacaacccucgccccaaugauggaacaggcuccugcgggccggucuucccuaacggagcuuacggcgugaagggcuuuagcuucaaguaugggaauggaguuuggaucggcagaaccaaaucuacaaacucccggagcggguuugagaugauuugggaccccaauggauggaccggcaccgacuccucuuucagcgugaagcaggauaucgucgccaucacagacugguccggguacucuggcagcuucgugcagcacccugaacuuacgggacuggauuguauucgccccugcuuuuggguugagcucaucagaggccggcccaaagaauccaccauuuggacaagcgggucuuccaucagcuucuguggagugaacggcgacaccgucucuugguccuggccugauggggcggagcugccguuuacaauugacaaguga

SEQ ID NO: 209113 - RNA, 1350 nt, Artificial Sequence
  derived and/or modified CDS sequence (opt5) from neuraminidase__InfluenzaA__ACT15356
augaaccccaaucagaagaucauuaccaucggcagcauuugcauggugaucgggauugucucccugaugcuccaaaucggaaacaugaucucuauuuggguuagccacuccauccagacaggcaaucagugucaggacgagccuauuucuaacacgaaauuccugaccgaaaaggccguggcuagcgugacacuugccggaaauuccucucugugcccgaucagcggaugggcggucuacuccaaagauaacagcauuagaaucggcucucgcggggacguguuuguuauucgggagcccuucaucuccuguagccaucucgaaugcagaaccuuuuuccugacacaaggagcccuucugaaugauaagcacucuaacggcaccgugaaagaccgguccccucaucgcacacucaugagcugucccgucggcgaggcuccuucucccuauaauuccagauuugaaagcguggccugguccgcuucugccugccacgaugggaccagcuggcugacgaucggaauuuccggcccugacaacggggcuguugccgugcugaaguacaauggaaucauuaccgauacaaucaagagcuggcggaacaauauucuccgcacccaggagucugagugugcgugcgucaacggcuccuguuucacagugaugaccgacgggccgagcucuggacaggccagcuauaaaaucuuuaagauggaaaaaggcaagguggucaaauccguugagcuggaugcucccaauuaccauuaugaagagugcucuuguuacccugacgccggcgagaucacgugcgugugcagagauaacuggcacgggagcaaccggcccuggguguccuucaaucagaaccuugaauaucaaauuggauacaucuguagcggcgucuuuggggacaauccucgccccaacgauggaacaggcucuugcgggccgguguucuccaauggagcuuacggcguuaagggcuuuagcuucaaguaugggaacggaguguggauuggcagaaccaaaucuacaaauucccggagcggguuugagaugaucugggacccuaacggauggaccggcaccgacuccucuuucagcgggaagcaggauauugucgccaucacagacugguccggcuacucugggagcuucgugcagcaccccgaacugacgggccucgauuguauccgcccuugcuuuuggguugagcugauuagagggcggcccaaagaauccaccaucuggacaagcggaucuuccauuagcuucuguggcgucaauucugacaccguguccuggagcuggcccgauggggcggagcuuccuuuuacaaucgacaaguga

SEQ ID NO: 209114 - RNA, 1350 nt, Artificial Sequence
  derived and/or modified CDS sequence (opt5) from neuraminidase__InfluenzaA__ACT15358
augaaccccaaucagaagaucauuaccaucggcagcauuugcauggugaucgggauugucucccugaugcuccaaaucggaaacaugaucucuauuuggguuagccacuccauccagacaggcaauagaugucaggacgagccuauuucuaacacgaaauuccugaccgaaaaggccguggcuagcgugacacuugccggaaauuccucucugugcccgaucagcgggugggcggucuacuccaaagauaacagcauucggaucggcucucgcggggacguguuuguuauuagagagcccuucaucuccuguagccaucucgaaugccggaccuuuuuccugacacacggagcccuucugaaugauaagcauucuaacggcaccgugaaagaccgcuccccucacagaacacucaugagcugucccgucggcgaggcuccuucucccuauaauucccgguuugaaagcguggccugguccgcuucugccugccaugaugggaccagcuggcugacgaucggaauuuccggcccugacaacggggcuguugccgugcugaaguacaauggaaucauuaccgauacaaucaagagcuggcgcaacaauauuaugagaacccaggagucugagugugcgugcgucaacggcuccuguuucacagugaugaccgacgggccgagcucuggacaagccagcuauaaaaucuuuaagauggaaaaaggcaagguggucaaauccguugagcucgaugcucccaauuaccacuaugaagagugcucuuguuacccugacgccggcgagaucacgugcgugugccgggauaacuggcacgggagcaaccgccccuggauuuccuucaaucagaaccuggaauauaagaucggauacauuuguagcggcaucuuuggggacaauccuagacccaacgauggaacaggcucuugcgggccggugcuuccuaauggagcuuacggcgucaagggcuucuccuuuaaauaugggaacggaguguggauuggccggaccaagagcacaaauucucgcuccggguucgagaugaucugggaccccaacggauggaccggcaccgacagcuccuuuucuguuaaacaggauaucguggccauuacagacuggagcggguacuccggcucuuucguccagcauccugaacugacgggacucgauuguaucagacccugcuucuggguggagcugauucggggccgccccaaggaaagcaccaucuggacauccgggagcucuauuuccuuuuguggaguuaauggcgacaccgugagcuggucuuggccugauggggcggagcuuccguucacaaucgacaaauga

SEQ ID NO: 209115 - RNA, 1410 nt, Artificial Sequence; identical to SEQ ID NO: 206399
  derived and/or modified CDS sequence (opt5) from neuraminidase__InfluenzaA__ACT21515

SEQ ID NO: 209116 - RNA, 1410 nt, Artificial Sequence
  derived and/or modified CDS sequence (opt5) from neuraminidase__InfluenzaA__ACT21516
augaaccccaaucagaagaucauuaccaucggcagcgugucccugacaauuucuacgaucugcuucuuuaugcaaauugccauccucaucaccacagucacccugcacuucaaacaguacgaguuuaacagcccuccgaauaaccagguuaugcuuugugaacccacaauuaucgagagaaauauuaccgaaaucgcuuaucugacaaacaccacgauugagaaggaaaucugcccuaaacucgccgaguaccggaauugguccaagccccagugugacauuaccggguucgcgccuuuuucuaaagauaacagcauccgccuguccgcuggaggcgacaucugggugacaagagagcccuaugugucuugcgauccugacaaguguuaccaauucgcccuugggcagggaaccacacugaauaacguccauagcaaugauaccgugcacgaccggacgccguaucgcacacuccugaugaacgaacugggcguucccuuucaucucgggaccaaacaggugugcgucgccugguccucuagcuccugucacgauggaaaggcuuggcugcaugugugcguuacaggcgacgagaagaaugccaccgcuagcuucauuuacaacggcagacuuguggauucuaucgucuccuggagcaaagaaauucugcggacccaggagucugagugugugugcaucaaugggacauguacgguggucaugaccgacggauccgccagcggcaaggcggauacaaaaauucucuuuaucgaagaggggaagaucguucacaccuccacacugucuggaagcgcccaacacguggaagagugcuccugcuauccucgcuaccccggcgugagaugugucugccgggacaacuggaaggggagcaaccgcccuauuguggauaucaauauuaaagacuacucuaucguuuccagcuauguguguucuggacuugucggcgacacccccagaaagaacgauagcuccucuagcucccauugccuggacccgaauaacgaagagggcgggcacggagugaaaggcugggcuuucgaugacgggaaugauguuuggaugggacggacgauuagcgagaagcuccgcucuggcuacgaaacauuuaaagugaucgaggggugguccaacccuaauagcaagcugcagaucaacagacaggucauuguggaccggggaaaucgcucuggcuauuccggcaucuucagcgucgaagggaaauccuguauuaacagaugcuuuuacguggagcugauccggggaagaaaggaagagaaugagguucucuggaccucuaacagcauuguggucuucuguggcaccuccgggacauauggaaccggcucuuggcccgauggggccgacaucaaucugaugccuauuuga

SEQ ID NO: 209117 - RNA, 1410 nt, Artificial Sequence
  derived and/or modified CDS sequence (opt5) from neuraminidase__InfluenzaA__ACT21517
augaaccccaaucagaagaucauuaccaucggcagcgugucccugacaauuucuacgaucugcuucuuuaugcaaauugccauccucaucaccacagucacccugcacuucaaacaguacgaguuuaacagcccuccgaauaaccagguuaugcuuugugaacccacaauuaucgagagaaauauuaccgaaaucguguaucugacaaacaccacgauugagaaggaaaucugcccuaaacucgcugaguaccggaauugguccgagccccagugugacauuaccggguucgccccuuuuucuaaggauaacagcauccgccuguccgcgggaggcgacaucugggugacaagagaacccuaugucucuugcgauccugacaaauguuaccaauucgcucuugggcagggaaccacacugaauaacgugcauagcaaugauaccguucacgaccggacgccguaucgcacacucgugaugaacgagcugggcguccccuuucaucuggggaccaaacaggugugcauugccugguccucuagcuccugucacgauggaaaggccuggcuccauguuugcgugacaggcgacgauaaaaaugcuaccgccagcuucaucuacaacggcagacuggucgacucuauuguguccuggagcaaggaaauccuucggacccaggagucugagugugugugcauuaaugggacauguacggucguuaugaccgauggauccgcuagcggcaaagccgacacaaagauccuguuuaucgaagaggggaaaauugugcacaccuccacacucucuggaagcgcgcaacacguggaagagugcuccugcuauccucgcuaccccggcgucagaugugugugccgggauaacuggaaggggagcaaccgcccuaucguugacauuaauaucaaggacuacucuauuguguccagcuaugucuguucuggacuggccggcgauacccccagaaagaacgacagcuccucuagcucccauugccuugauccgaauaacgaagagggcgggcacggagugaagggcugggcuuucgacgaugggaaugacguuuggaugggacggacgaucagcgagaaacugcgcucuggcuacgaaacauuuaaggugaucgaggggugguccaacccuaauagcaaacuccagauuaacagacaggucaucguggaucggggaaaucgcucuggcuauuccggcauuuucagcgucgaagggaaguccuguaucaacagaugcuuuuacguggagcugauucggggaagaaaagaagagaccgagguucuguggaccucuaauagcaucguggucuucuguggcacauccgggaccuauggaacaggcucuuggcccgacggggccgauauuaaccucaugccuaucuga

SEQ ID NO: 209118 - RNA, 1410 nt, Artificial Sequence; identical to SEQ ID NO: 208810
  derived and/or modified CDS sequence (opt5) from neuraminidase__InfluenzaA__ACT21574

SEQ ID NO: 209119 - RNA, 1410 nt, Artificial Sequence; identical to SEQ ID NO: 208810
  derived and/or modified CDS sequence (opt5) from neuraminidase__InfluenzaA__ACT21585

SEQ ID NO: 209120 - RNA, 1410 nt, Artificial Sequence; identical to SEQ ID NO: 208810
  derived and/or modified CDS sequence (opt5) from neuraminidase__InfluenzaA__ACT22011

SEQ ID NO: 209121 - RNA, 1410 nt, Artificial Sequence; identical to SEQ ID NO: 208810
  derived and/or modified CDS sequence (opt5) from neuraminidase__InfluenzaA__ACT22012

SEQ ID NO: 209122 - RNA, 1410 nt, Artificial Sequence; identical to SEQ ID NO: 208810
  derived and/or modified CDS sequence (opt5) from neuraminidase__InfluenzaA__ACT22013

SEQ ID NO: 209123 - RNA, 1410 nt, Artificial Sequence; identical to SEQ ID NO: 208810
  derived and/or modified CDS sequence (opt5) from neuraminidase__InfluenzaA__ACT22014

SEQ ID NO: 209124 - RNA, 1410 nt, Artificial Sequence; identical to SEQ ID NO: 208800
  derived and/or modified CDS sequence (opt5) from neuraminidase__InfluenzaA__ACT22015

SEQ ID NO: 209125 - RNA, 1410 nt, Artificial Sequence
  derived and/or modified CDS sequence (opt5) from neuraminidase__InfluenzaA__ACT22016
augaaccccaaucagaagaucauuaccaucggcagcgugugcaugacaauugggauggccaaccugauccuccaaauuggaaauaucaucuccauuuggaucucucacagcauucagcugggcaaccagaaucagaucgagacguguaaccaauccgucauuaccuacgaaaauaacacauggguuaaucagaccuaugugaacaucucuaauacaaacuucgcugccgggcagagcguggucuccgugaaacuugcgggaaauucuagccugugcccuguuuccggcugggcuauuuacagcaaggacaacucuaucagaaucggguccaaaggagauguguuugucauucgggagccguucaucagcuguucuccccucgaaugccgcaccuuuuuccugacacagggcgcccuucugaaugacaagcauuccaacggcaccauuaaagauagaagcccuuaucggacgcucaugucuugucccaucggggaggugccuucccccuacaacagccgcuuugaauccguugccuggucugcuagcgccugccacgacggaauuaauuggcugaccaucggcaucuccgggccugauaacggagcuguggccguccugaaguauaauggcauuaucacagacaccauuaagagcuggagaaacaauauccuccggacacaagagucugagugugcgugcgugaacggguccuguuucaccgugaugacggauggaccgagcaauggccaggccucuuacaaaauuuuucgcaucgaaaagggcaaaaucgucaagagcguugagaugaacgcucccaauuauuacuacgaagagugcuccuguuauccugacucuagcgagauuacaugcgugugcagagauaacuggcauggguccaaucggcccugggugagcuucaaccagaaucuggaauaccagaucggauauauuuguucuggcaucuuuggggacaacccucgccccaaugauaaaaccggauccugcggcccggucagcucuaacggggccaacggagugaagggcuucuccuuuaaguacggcaaugggguuuggauuggaagaacaaaaagcaucuccucucggaacggcuucgagaugauuugggacccuaauggguggaccggaaccgauaacaauuuuagcaucaagcaagacaucgugggcauuaacgaaugguccggguauucuggcagcuucguccagcaccccgagcuuacaggacuggacuguauccgcccuugcuucuggguggaacucauuagaggccggcccaaagagaauacgaucuggaccuccgggagcucuauuuccuuuuguggaguuaacagcgauacagugggcuggucuuggcccgacggggcugagcugccuuucaccaucgauaaguga

SEQ ID NO: 209126 - RNA, 1410 nt, Artificial Sequence; identical to SEQ ID NO: 208810
  derived and/or modified CDS sequence (opt5) from neuraminidase__InfluenzaA__ACT22017

SEQ ID NO: 209127 - RNA, 1410 nt, Artificial Sequence; identical to SEQ ID NO: 208810
  derived and/or modified CDS sequence (opt5) from neuraminidase__InfluenzaA__ACT22018

SEQ ID NO: 209128 - RNA, 1410 nt, Artificial Sequence; identical to SEQ ID NO: 208800
  derived and/or modified CDS sequence (opt5) from neuraminidase__InfluenzaA__ACT22506

SEQ ID NO: 209129 - RNA, 1410 nt, Artificial Sequence; identical to SEQ ID NO: 208810
  derived and/or modified CDS sequence (opt5) from neuraminidase__InfluenzaA__ACT22511

SEQ ID NO: 209130 - RNA, 1410 nt, Artificial Sequence; identical to SEQ ID NO: 208810
  derived and/or modified CDS sequence (opt5) from neuraminidase__InfluenzaA__ACT33121

SEQ ID NO: 209131 - RNA, 1410 nt, Artificial Sequence; identical to SEQ ID NO: 208810
  derived and/or modified CDS sequence (opt5) from neuraminidase__InfluenzaA__ACT33124

SEQ ID NO: 209132 - RNA, 1410 nt, Artificial Sequence; identical to SEQ ID NO: 208810
  derived and/or modified CDS sequence (opt5) from neuraminidase__InfluenzaA__ACT33126

SEQ ID NO: 209133 - RNA, 1410 nt, Artificial Sequence; identical to SEQ ID NO: 208800
  derived and/or modified CDS sequence (opt5) from neuraminidase__InfluenzaA__ACT35526

SEQ ID NO: 209134 - RNA, 1410 nt, Artificial Sequence; identical to SEQ ID NO: 208810
  derived and/or modified CDS sequence (opt5) from neuraminidase__InfluenzaA__ACT36507

SEQ ID NO: 209135 - RNA, 1410 nt, Artificial Sequence; identical to SEQ ID NO: 208810
  derived and/or modified CDS sequence (opt5) from neuraminidase__InfluenzaA__ACT36672

SEQ ID NO: 209136 - RNA, 1410 nt, Artificial Sequence; identical to SEQ ID NO: 208810
  derived and/or modified CDS sequence (opt5) from neuraminidase__InfluenzaA__ACT36673

SEQ ID NO: 209137 - RNA, 1410 nt, Artificial Sequence; identical to SEQ ID NO: 208810
  derived and/or modified CDS sequence (opt5) from neuraminidase__InfluenzaA__ACT36674

SEQ ID NO: 209138 - RNA, 1410 nt, Artificial Sequence; identical to SEQ ID NO: 208810
  derived and/or modified CDS sequence (opt5) from neuraminidase__InfluenzaA__ACT36675

SEQ ID NO: 209139 - RNA, 1410 nt, Artificial Sequence; identical to SEQ ID NO: 208810
  derived and/or modified CDS sequence (opt5) from neuraminidase__InfluenzaA__ACT36677

SEQ ID NO: 209140 - RNA, 1410 nt, Artificial Sequence
  derived and/or modified CDS sequence (opt5) from neuraminidase__InfluenzaA__ACT36678
augaaccccaaucagaagaucauuaccaucggcagcgugugcaugacaauugggauggccaaccugauccuccaaauuggaaauaucaucuccauuuggaucucucacagcauucagcugggcaaccagaaucagaucgagacguguaaccaauccgucauuaccuacgaaaauaacacauggguuaaucagaccuaugugaacaucucuaauacaaacuucgcugccagacagagcguggucuccgugaaacuugcgggaaauucuagccugugcccuguuuccgggugggcuauuuacagcaaggacaacucugugcggaucggcuccaaaggggaugucuuugugauccgcgagccguucauuagcuguucuccccucgaaugcagaaccuuuuuccugacacagggagcccuucugaaugacaagcauuccaacggcaccaucaaagaucggagcccuuaucgcacgcucaugucuugucccauuggcgagguuccuucccccuacaacagcagauuugaauccguggccuggucugcuagcgccugccacgacgggaucaauuggcugaccauuggaaucuccggcccugauaacggggcugucgccgugcugaaguauaauggaaucauuacagacaccaucaagagcuggcggaacaauauucuccgcacacaagagucugagugugcgugcgugaacggcuccuguuucaccgucaugacggaugggccgagcaauggacaggccucuuacaaaaucuuuagaauugaaaagggcaaaaucguuaagagcguggagaugaacgcucccaauuaucauuacgaagagugcuccuguuacccugacucuagcgagaucacaugcgugugccgggauaacuggcacggcuccaaucgccccugggucagcuucaaccagaaucuggaauaucagauuggguacaucuguucuggaauuuuuggcgacaacccuagacccaaugauaaaaccggguccugcggaccggugagcucuaacggcgccaacgggguuaagggauucuccuuuaaguauggcaauggcguguggaucgggcggacaaaaagcauuuccucucgcaacggauucgagaugaucugggacccuaauggcuggaccgggaccgauaacaauuuuagcauuaagcaagacaucgucggaaucaacgaaugguccggcuacucugggagcuucgugcagcaucccgagcuuacaggccuggacuguauuagaccuugcuucuggguugaacucauccggggacgccccaaagagaauacgauuuggaccuccggcagcucuaucuccuuuuguggggugaacagcgauacagucggauggucuuggcccgacggcgcugagcugccuuucaccauugauaaguga

SEQ ID NO: 209141 - RNA, 1410 nt, Artificial Sequence; identical to SEQ ID NO: 208800
  derived and/or modified CDS sequence (opt5) from neuraminidase__InfluenzaA__ACT36679

SEQ ID NO: 209142 - RNA, 1410 nt, Artificial Sequence; identical to SEQ ID NO: 208810
  derived and/or modified CDS sequence (opt5) from neuraminidase__InfluenzaA__ACT36680

SEQ ID NO: 209143 - RNA, 1410 nt, Artificial Sequence; identical to SEQ ID NO: 208800
  derived and/or modified CDS sequence (opt5) from neuraminidase__InfluenzaA__ACT36682

SEQ ID NO: 209144 - RNA, 1410 nt, Artificial Sequence; identical to SEQ ID NO: 208800
  derived and/or modified CDS sequence (opt5) from neuraminidase__InfluenzaA__ACT36683

SEQ ID NO: 209145 - RNA, 1410 nt, Artificial Sequence; identical to SEQ ID NO: 208810
  derived and/or modified CDS sequence (opt5) from neuraminidase__InfluenzaA__ACT36684

SEQ ID NO: 209146 - RNA, 1410 nt, Artificial Sequence; identical to SEQ ID NO: 208800
  derived and/or modified CDS sequence (opt5) from neuraminidase__InfluenzaA__ACT36685

SEQ ID NO: 209147 - RNA, 1410 nt, Artificial Sequence; identical to SEQ ID NO: 208800
  derived and/or modified CDS sequence (opt5) from neuraminidase__InfluenzaA__ACT36686

SEQ ID NO: 209148 - RNA, 1410 nt, Artificial Sequence; identical to SEQ ID NO: 208800
  derived and/or modified CDS sequence (opt5) from neuraminidase__InfluenzaA__ACT36687

SEQ ID NO: 209149 - RNA, 1410 nt, Artificial Sequence
  derived and/or modified CDS sequence (opt5) from neuraminidase__InfluenzaA__ACT36688
augaaccccaaucagaagaucauuaccaucggcagcgugugcaugacaauugggauggccaaccugauccuccaaauuggaaauaucaucuccauuuggaucucucacagcauucagcugggcaaccagaaucagaucgagacguguaaccaauccgucauuaccuacgaaaauaacacauggguuaaucagaccuaugugaacaucucuaauacaaacuucgcugccgggcagagcguggucuccgugaaacuugcgggaaauucuagccugugcccuguuuccggcugggcuauuuacagcaaggacaacucugugagaaucggguccaaaggagaugucuuugugauccgggagccguucauuagcuguucuccccucgaaugccgcaccuuuuuccugacacagggcgcccuucugaaugacaagcauuccaacggcaccaucaaagauagaagcccuuaucggacgcucaugucuugucccauuggggagguuccuucccccuacaacagccgcuuugaauccguggccuggucugcuagcgccugccacgacggaaucaauuggcugaccauuggcaucuccgggccugauaacggagcugucgccgugcugaaguauaauggcaucauuacagacaccaucaagagcuggagaaacaauauucuccggacacaagagucugagugugcgugcgugaacggguccuguuucaccgucaugacggauggaccgagcaauggccaggccucuuacaaaaucuuucgcauugaaaagggcaaaaucguuaagagcguggagaugaacgcucccaauuaucauuacgaagagugcuccuguuacccugacucuagcgagaucacaugcgugugcagagauaacuggcacggguccaaucggcccugggucagcuucaaccagaaucuggaauaucagauuggauacaucuguucuggcauuuuuggggacaacccucgccccaaugauaaaaccggauccugcggcccggugagcucuaacggggccaacggaguuaagggcuucuccuauaaguacggcaaugggguguggaucggaagaacaaaaagcauuuccucucggaacggcuuugagaugaucugggacccuaauggguggaccggaaccgauaacaauuucagcauuaagcaagacaucgucggcaucaacgaaugguccggguauucuggcagcuuugugcagcaucccgagcuuacaggacuggacuguauucgcccuugcuucuggguugaacucaucagaggccggcccaaagagaauacgauuuggaccuccgggagcucuaucuccuucuguggagugaacagcgauacagucggcuggucuuggcccgacggggcugagcugccuuuuaccauugauaaguga

SEQ ID NO: 209150 - RNA, 1410 nt, Artificial Sequence; identical to SEQ ID NO: 208800
  derived and/or modified CDS sequence (opt5) from neuraminidase__InfluenzaA__ACT36689

SEQ ID NO: 209151 - RNA, 1410 nt, Artificial Sequence; identical to SEQ ID NO: 208840
  derived and/or modified CDS sequence (opt5) from neuraminidase__InfluenzaA__ACT36690

SEQ ID NO: 209152 - RNA, 1410 nt, Artificial Sequence; identical to SEQ ID NO: 208800
  derived and/or modified CDS sequence (opt5) from neuraminidase__InfluenzaA__ACT36691

SEQ ID NO: 209153 - RNA, 1410 nt, Artificial Sequence; identical to SEQ ID NO: 208840
  derived and/or modified CDS sequence (opt5) from neuraminidase__InfluenzaA__ACT36693

SEQ ID NO: 209154 - RNA, 1410 nt, Artificial Sequence; identical to SEQ ID NO: 208810
  derived and/or modified CDS sequence (opt5) from neuraminidase__InfluenzaA__ACT36694

SEQ ID NO: 209155 - RNA, 1410 nt, Artificial Sequence; identical to SEQ ID NO: 208810
  derived and/or modified CDS sequence (opt5) from neuraminidase__InfluenzaA__ACT36695

SEQ ID NO: 209156 - RNA, 1410 nt, Artificial Sequence; identical to SEQ ID NO: 208810
  derived and/or modified CDS sequence (opt5) from neuraminidase__InfluenzaA__ACT52684

SEQ ID NO: 209157 - RNA, 1410 nt, Artificial Sequence; identical to SEQ ID NO: 208800
  derived and/or modified CDS sequence (opt5) from neuraminidase__InfluenzaA__ACT54608

SEQ ID NO: 209158 - RNA, 1410 nt, Artificial Sequence
  derived and/or modified CDS sequence (opt5) from neuraminidase__InfluenzaA__ACT66157
augaaccccaaucagaagaucauuaccaucggcagcgugugcaugacaauugggauggccaaccugauccuccaaauuggaaauaucaucuccauuuggaucucucacagcauucagcugggcaaccagaaucagaucgagacguguaaccaauccgucauuaccuacgaaaauaacacauggguuaaucagaccuaugugaacaucucuaauacaaacuucgcugccgggcagagcguggucuccgugaaacuugcgggaaauucuagccugugcccuguuuccggcugggcuauuuacagcaaggacaacucuaucagaaucggguccaaaggagauguguuugucauucgggagccguucaucagcuguucuccccucgaaugccgcaccuuuuuccugacacagggcgcccuucugaaugacaagcauuccaacggcaccauuaaagauagaagcccuuaucggacgcucaugucuugucccaucggggaggugccuucccccuacaacagccgcuuugaauccguugccuggucugcuagcgccugccacgacggaauuaauuggcugaccaucggcaucuccgggccugauaacggagcuguggccguccugaaguauaauggcauuaucacagacaccauuaagagcuggagaaacaauauccuccggacacaagagucugagugugcgugcgugaacggguccuguuucaccgugaugacggauggaccgagcaauggccaggccucuuacaaaauucugcgcaucgaaaagggcaaaaucgucaagagcguugagaugaacgcucccaauuaucauuacgaagagugcuccuguuacccugacucuagcgagauuacaugcgugugcagagauaacuggcacggguccaaucggcccugggugagcuuuaaccagaaucuugaauaucagaucggauacauuuguucuggcaucuucggggacaacccucgccccaaugauaaaaccggauccugcggcccggucagcucuaacggggccaacggagugaagggcuuuuccuucaaguauggcaaugggguuuggauuggaagaacaaaaagcaucuccucucggaacggcuuugagaugauuugggacccuaauggguggaccggaaccgauaacaauuucagcaucaagcaagacaucgugggcauuaacgaaugguccggguacucuggcagcuuuguccagcaucccgagcugacaggacucgacuguauccgcccuugcuucuggguggaacugauuagaggccggcccaaagagaauacgaucuggaccuccgggagcucuauuuccuucuguggaguuaacagcgauacagugggcuggucuuggcccgacggggcugagcuuccuuuuaccaucgauaaguga

SEQ ID NO: 209159 - RNA, 1410 nt, Artificial Sequence; identical to SEQ ID NO: 208810
  derived and/or modified CDS sequence (opt5) from neuraminidase__InfluenzaA__ACT67117

SEQ ID NO: 209160 - RNA, 1410 nt, Artificial Sequence; identical to SEQ ID NO: 208800
  derived and/or modified CDS sequence (opt5) from neuraminidase__InfluenzaA__ACT67121

SEQ ID NO: 209161 - RNA, 1410 nt, Artificial Sequence; identical to SEQ ID NO: 208810
  derived and/or modified CDS sequence (opt5) from neuraminidase__InfluenzaA__ACT67240

SEQ ID NO: 209162 - RNA, 1410 nt, Artificial Sequence; identical to SEQ ID NO: 208810
  derived and/or modified CDS sequence (opt5) from neuraminidase__InfluenzaA__ACT67241

SEQ ID NO: 209163 - RNA, 1410 nt, Artificial Sequence; identical to SEQ ID NO: 208810
  derived and/or modified CDS sequence (opt5) from neuraminidase__InfluenzaA__ACT67243

SEQ ID NO: 209164 - RNA, 1410 nt, Artificial Sequence
  derived and/or modified CDS sequence (opt5) from neuraminidase__InfluenzaA__ACT67256
augaaccccaaucagaagaucauuaccaucggcagcgugugcaugacaauugggauggccaaccugauccuccaaauuggaaauaucaucuccauuuggaucucucacagcauucagcugggcaaccagaaucagaucgagacguguaaccaauccgucauuaccuacgaaaauaacacauggguuaaucagaccuaugugaacaucucuaauacaaacuucgcugccgggcagagcguggucuccgugaaacuugcgggaaauucuagccugugcccuguuuccggcugggcuauuuacagcaaggacaacucuaucagaaucggguccaaaggagauguguuugucauucgggagccguucaucagcuguucuccccucgaaugccgcaccuuuuuccugacacagggcgcccuucugaaugacaagcauuccaacggcaccauuaaagauagaagcccuuaucggacgcucaugucuugucccaucggggaggugccuucccccuacaacagccgcuuugaauccguugccuggucugcuagcgccugccacgacggaauuaauuggcugaccaucggcaucuccgggccugauaacggagcuguggccguccugaaguauaauggcauuaucacagacaccauuaagagcuggagaaacaauauccuccggacacaagagucugagugugcgugcgugaacggguccuguuucaccgugaugacggauggaccgagcgacggccaggccucuuacaaaauuuuucgcaucgaaaagggcaaaaucgucaagagcguugagaugaaugcucccaacuauuacuacgaagagugcuccuguuauccugauucuagcgagauuacaugcgugugcagagacaauuggcauggguccaaccggcccugggugagcuucaaucagaaccuggaauaccagaucggauauauuuguucuggcaucuuuggggauaauccucgccccaacgacaaaaccggauccugcggcccggucagcucuaauggggccaacggagugaagggcuucuccuuuaaguacggcaacgggguuuggauuggaagaacaaaaagcaucuccucucggaauggcuucgagaugauuugggauccuaacggguggaccggaaccgacaauaacuuuagcaucaagcaagacaucgugggcauuaaugaaugguccggguauucuggcagcuucguccagcaccccgagcuuacaggacuggauuguauccgcccuugcuucuggguggaacucauuagaggccggcccaaagagaacacgaucuggaccuccgggagcucuauuuccuuuuguggaguuaauagcgacacagugggcuggucuuggcccgauggggcugagcugccuuucaccaucgacaaguga

SEQ ID NO: 209165 - RNA, 1410 nt, Artificial Sequence
  derived and/or modified CDS sequence (opt5) from neuraminidase__InfluenzaA__ACT68161
augaaccccaaucagaagaucauuaccaucggcagcgugugcaugacaauugggauggccaaccugauccuccaaauuggaaauaucaucuccauuuggaucucucacagcauucagcugggcaaccagaaucagaucgagacguguaaccaauccgucauuaccuacgaaaauaacacauggguuaaucagaccuaugugaacaucucuaauacaaacuucgcugccgggcagagcguggucuccgugaaacuugcgggaaauucuagccugugcccuguuuccggcugggcuauuuacagcaaggacaacucuaucagaaucggguccaaaggagauguguuugucauucgggagccguucaucagcuguucuccccucgaaugccgcaccuuuuuccugacacagggcgcccuucugaaugacaagcauuccaacggcaccauuaaagauagaagcccuuaucggacgcucaugucuugucccaucggggaggugccuucccccuacaacagccgcuuugaauccguugccuggucugcuagcgccugccacgacggaauuaauuggcugaccaucggcaucuccgggccugauaacggagcuguggccguccugaaguauaauggcauuaucacagacaccauuaagagcuggagaaacaauauccuccggacacaagagucugagugugcgugcgugaacggguccuguuucaccgugaugacggauggaccgagcgacggccaggccucuuacaaaauuuuucgcaucgaaaagggcaaaaucgucaagagcguugagaugaaugcucccaacuaucauuacgaagagugcuccuguuacccugauucuagcgagauuacaugcgugugcagagacaauuggcacggguccaaccggcccugggugagcuucaaucagaaccuggaauaucagaucggauacauuuguucuggcaucuuuggggauaauccucgccccaacgacaaagccggauccugcggcccggucagcucuaauggggcuaacggagugaagggcuucuccuuuaaguauggcaacgggguuuggauuggaagaaccaaaagcaucuccucucggaauggcuucgagaugauuugggauccuaacggguggacaggaaccgacaauaacuuuagcaucaagcaagacaucgugggcauuaaugaaugguccggguacucuggcagcuucguccagcaucccgagcuuaccggacuggauuguauccgcccuugcuucuggguggaacucauuagaggccggcccaaagagaacacaaucuggacguccgggagcucuauuuccuuuuguggaguuaauagcgacaccgugggcuggucuuggcccgauggggccgagcugccuuucacaaucgacaaguga

SEQ ID NO: 209166 - RNA, 1410 nt, Artificial Sequence; identical to SEQ ID NO: 208800
  derived and/or modified CDS sequence (opt5) from neuraminidase__InfluenzaA__ACT68162

SEQ ID NO: 209167 - RNA, 1410 nt, Artificial Sequence; identical to SEQ ID NO: 208800
  derived and/or modified CDS sequence (opt5) from neuraminidase__InfluenzaA__ACT68163

SEQ ID NO: 209168 - RNA, 1410 nt, Artificial Sequence; identical to SEQ ID NO: 208800
  derived and/or modified CDS sequence (opt5) from neuraminidase__InfluenzaA__ACT68164

SEQ ID NO: 209169 - RNA, 1410 nt, Artificial Sequence; identical to SEQ ID NO: 208810
  derived and/or modified CDS sequence (opt5) from neuraminidase__InfluenzaA__ACT68166

SEQ ID NO: 209170 - RNA, 1410 nt, Artificial Sequence; identical to SEQ ID NO: 208810
  derived and/or modified CDS sequence (opt5) from neuraminidase__InfluenzaA__ACT68167

SEQ ID NO: 209171 - RNA, 1410 nt, Artificial Sequence; identical to SEQ ID NO: 208840
  derived and/or modified CDS sequence (opt5) from neuraminidase__InfluenzaA__ACT68168

SEQ ID NO: 209172 - RNA, 1410 nt, Artificial Sequence
  derived and/or modified CDS sequence (opt5) from neuraminidase__InfluenzaA__ACT68169
augaaccccaaucagaagaucauuaccaucggcagcgugugcaugacaauugggauggccaaccugauccuccaaauuggaaauaucaucuccauuuggaucucucacagcauucagcugggcgaccagaaccagaucgagacguguaaucaauccgucauuaccuacgaaaacaauacauggguuaaccagaccuaugugaauaucucuaacacaaauuucgcugccgggcagagcguggucuccgugaaacuugcgggaaacucuagccugugcccuguuuccggcugggcuauuuacagcaaggauaauucuaucagaaucggguccaaaggagacguguuugucauucgggagccguucaucagcuguucuccccucgaaugccgcaccuuuuuccugacacagggcgcccuucugaacgauaagcauuccaaugagaccauuaaagacagaagcccuuaucggacgcucaugucuugucccaucggcgaagugccuucccccuacaacagccgcuuugaguccguugccuggucugcuagcgccugccacgaugggauuaacuggcugaccaucggaaucuccggcccugacaauggggcuguggccguccugaaguauaacggaauuaucacagauaccauuaagagcuggagaaauaacauccuccggacacaagagucugaaugugcgugcgugaauggcuccuguuucaccgugaugacggacgggccgagcgauggacaggccucuuacaaaauuuuucgcaucgagaagggcaaaaucgucaagagcguugaaaugaacgcucccaauuaucauuacgaggagugcuccuguuacccugacucuagcgaaauuacaugcgugugcagagauaacuggcacggcuccaaucggcccugggugagcuucaaccagaaucuggaguaucagaucggguacauuuguucuggaaucuuuggcgacaacccucgccccaaugauaaaaccggguccugcggaccggucagcucuaacggcgccaauggggugaagggauucuccuuuaaguauggcaacggcguuuggauugggagaacaaaaagcaucuccucucggaacggauucgaaaugauuugggacccuaauggcuggaccgggaccgacaacaauuuuagcaucaagcaagauaucgugggaauuuccgaguggucuggcuacagcggguccuucguccagcaucccgaacuuacaggccuggacuguauccgcccuugcuucuggguggagcucauuagaggacggcccaaagagaacacgaucuggaccagcgggucuuccauuagcuuuuguggcguuaauucugauacagugggaugguccuggcccgacggcgcugaacugccuuucaccaucgauaaguga

SEQ ID NO: 209173 - RNA, 1410 nt, Artificial Sequence; identical to SEQ ID NO: 208800
  derived and/or modified CDS sequence (opt5) from neuraminidase__InfluenzaA__ACT68171

SEQ ID NO: 209174 - RNA, 1410 nt, Artificial Sequence; identical to SEQ ID NO: 208800
  derived and/or modified CDS sequence (opt5) from neuraminidase__InfluenzaA__ACT68172

SEQ ID NO: 209175 - RNA, 1410 nt, Artificial Sequence; identical to SEQ ID NO: 208810
  derived and/or modified CDS sequence (opt5) from neuraminidase__InfluenzaA__ACT68173

SEQ ID NO: 209176 - RNA, 1410 nt, Artificial Sequence; identical to SEQ ID NO: 208810
  derived and/or modified CDS sequence (opt5) from neuraminidase__InfluenzaA__ACT68174

SEQ ID NO: 209177 - RNA, 1410 nt, Artificial Sequence
  derived and/or modified CDS sequence (opt5) from neuraminidase__InfluenzaA__ACT68175
augaaccccaaucagaagaucauuaccaucggcagcgugugcaugacaauugggauggccaaccugauccuccaaauuggaaauaucaucuccauuuggaucucucacagcauucagcugggcaaccagaaucagaucgagacguguaaccaauccgucauuaccuacgaaaauaacacauggguuaaucagaccuaugugaacaucucuaauacaaacuucgcugccgggcagagcguggucuccgugaaacuugcgggaaauucuagccugugcccuguuuccggcugggcuauuuacagcaaggacaacucugugagaaucggguccaaaggagaugucuuugugauccgggagccguucauuagcuguucuccccucgaaugccgcaccuuuuuccugacacagggcgcccuucugaaugacaagcauuccaacggcaccaucaaagauagaagcccuuaucggacgcucaugucuugucccauuggggagguuccuucccccuacaacagccgcuuugaauccguggccuggucugcuagcgccugccacgacggaaucaauuggcugaccauuggcaucuccgggccugauaacggagcugucgccgugcugaaguauaauggcaucauuacagacaccaucaagagcuggagaaacaauauucuccggacacaagagucugagugugcgugcgugaacggguccuguuucaccgucaugacggauggaccgagcaauggccaggccucuuacaaaaucuuucgcauugaaaagggcaaaaucguuaagagcguggagaugaacgcucccaauuaucauuacgaagagugcuccuguuacccugacucuggggagaucacaugcgugugcagagauaacuggcacggaagcaaucggcccugggucuccuucaaccagaaucuggaauaucagauuggcuacaucuguagcgggauuuuuggagacaacccucgccccaaugauaaaaccggcucuugcgggccgguguccagcaacggagccaacggcguuaagggcuucucuuuuaaguaugggaauggaguguggaucggcagaacaaaauccauuagcucccggaacggguucgagaugaucugggacccuaauggauggaccggcaccgauaacaauuuuucuauuaagcaagacaucgucgggaucaacgaauggagcggcuacuccggaucuuucgugcagcaucccgagcuuacaggccuggacuguauucgcccuugcuucuggguugaacucaucagagggcggcccaaagagaauacgauuuggaccagcggauccagcaucucuuuuuguggcgugaacuccgauacagucggguggagcuggcccgacggagcugagcugccuuucaccauugauaaguga

SEQ ID NO: 209178 - RNA, 1410 nt, Artificial Sequence; identical to SEQ ID NO: 208810
  derived and/or modified CDS sequence (opt5) from neuraminidase__InfluenzaA__ACT68176

SEQ ID NO: 209179 - RNA, 1410 nt, Artificial Sequence; identical to SEQ ID NO: 208810
  derived and/or modified CDS sequence (opt5) from neuraminidase__InfluenzaA__ACT68177

SEQ ID NO: 209180 - RNA, 1410 nt, Artificial Sequence; identical to SEQ ID NO: 208810
  derived and/or modified CDS sequence (opt5) from neuraminidase__InfluenzaA__ACT68178

SEQ ID NO: 209181 - RNA, 1410 nt, Artificial Sequence; identical to SEQ ID NO: 209177
  derived and/or modified CDS sequence (opt5) from neuraminidase__InfluenzaA__ACT68179

SEQ ID NO: 209182 - RNA, 1410 nt, Artificial Sequence; identical to SEQ ID NO: 208810
  derived and/or modified CDS sequence (opt5) from neuraminidase__InfluenzaA__ACT68180

SEQ ID NO: 209183 - RNA, 1410 nt, Artificial Sequence; identical to SEQ ID NO: 208840
  derived and/or modified CDS sequence (opt5) from neuraminidase__InfluenzaA__ACT79145

SEQ ID NO: 209184 - RNA, 1410 nt, Artificial Sequence
  derived and/or modified CDS sequence (opt5) from neuraminidase__InfluenzaA__ACT79155
augaaccccaaucagaagaucauuaccaucggcagcgugugcaugacaauugggauggccaaccugauccuccaaauuggaaauaucaucuccauuuggaucucucacagcauucagcugggcaaccagaaucagaucgagacguguaaccaauccgucauuaccuacgaaaauaacacauggguuaaucagaccuaugugaacaucucuaauacaaacuucgcugccgggcagagcguggucuccgugaaacuugcgggaaauucuagccugugcccuguuggcgggugggcuauuuacuccaaggacaacagcgugagaaucggaucuaaaggcgaugucuuugugauccgggagccguucauuuccuguagccuccuggaaugccgcaccuuuuuccuuacacagggcgcccugcucaaugacaagcauucuaacgggaccaucaaagauagaucccccuaucggacgcugaugagcuguccuauuggagagguucccucuccuuacaacucccgcuuugaaagcguggccugguccgcuucugccugccacgacggcaucaauuggcugaccauugggaucagcggacccgauaacggcgcugucgccgugcucaaguauaaugggaucauuacagacaccaucaaguccuggagaaacaauauucugcggacacaagagagcgagugugcgugcgugaacggaucuuguuucaccgucaugacggauggcccuuccaauggccaggccagcuacaaaaucuuucgcauugaaaaggggaaaaucguuaagucuguggagaugaacgcuccgaauuaucauuacgaagagugcagcuguuaccccgacuccucugagaucacaugcgugugcagagauaacuggcacggaagcaaucggccuugggucuccuucaaccagaaucuugaauaucagauuggcuacaucuguagcgggauuuuuggagacaacccccgcccuaaugauaaaaccggcucuugcgggcccguguccagcaacggagccaacggcguuaagggcuucucuuuuaaguaugggaauggaguguggaucggcagaacaaaauccauuagcucccggaacggguucgagaugaucugggacccgaauggauggaccggcaccgauaacaauuuuucuauuaagcaagacaucgucgggaucaacgaauggagcggcuacuccggaucuuucgugcagcauccugagcugacaggccucgacuguauucgccccugcuucuggguugaacugaucagagggcggccuaaagagaauacgauuuggaccagcggauccagcaucucuuuuuguggcgugaacuccgauacagucggguggagcuggcccgacggagcugagcuucccuucaccauugauaaguga

SEQ ID NO: 209185 - RNA, 1410 nt, Artificial Sequence; identical to SEQ ID NO: 208800
  derived and/or modified CDS sequence (opt5) from neuraminidase__InfluenzaA__ACT79165

SEQ ID NO: 209186 - RNA, 1410 nt, Artificial Sequence; identical to SEQ ID NO: 208800
  derived and/or modified CDS sequence (opt5) from neuraminidase__InfluenzaA__ACT79175

SEQ ID NO: 209187 - RNA, 1410 nt, Artificial Sequence; identical to SEQ ID NO: 208810
  derived and/or modified CDS sequence (opt5) from neuraminidase__InfluenzaA__ACT79185

SEQ ID NO: 209188 - RNA, 1410 nt, Artificial Sequence; identical to SEQ ID NO: 208810
  derived and/or modified CDS sequence (opt5) from neuraminidase__InfluenzaA__ACT79622

SEQ ID NO: 209189 - RNA, 1410 nt, Artificial Sequence; identical to SEQ ID NO: 209177
  derived and/or modified CDS sequence (opt5) from neuraminidase__InfluenzaA__ACT79630

SEQ ID NO: 209190 - RNA, 1410 nt, Artificial Sequence; identical to SEQ ID NO: 208810
  derived and/or modified CDS sequence (opt5) from neuraminidase__InfluenzaA__ACT83798

SEQ ID NO: 209191 - RNA, 1410 nt, Artificial Sequence; identical to SEQ ID NO: 208810
  derived and/or modified CDS sequence (opt5) from neuraminidase__InfluenzaA__ACT83808

SEQ ID NO: 209192 - RNA, 1410 nt, Artificial Sequence; identical to SEQ ID NO: 208810
  derived and/or modified CDS sequence (opt5) from neuraminidase__InfluenzaA__ACT83818

SEQ ID NO: 209193 - RNA, 1410 nt, Artificial Sequence; identical to SEQ ID NO: 208810
  derived and/or modified CDS sequence (opt5) from neuraminidase__InfluenzaA__ACT83828

SEQ ID NO: 209194 - RNA, 1410 nt, Artificial Sequence; identical to SEQ ID NO: 208810
  derived and/or modified CDS sequence (opt5) from neuraminidase__InfluenzaA__ACT83838

SEQ ID NO: 209195 - RNA, 1410 nt, Artificial Sequence; identical to SEQ ID NO: 208800
  derived and/or modified CDS sequence (opt5) from neuraminidase__InfluenzaA__ACT83848

SEQ ID NO: 209196 - RNA, 1410 nt, Artificial Sequence; identical to SEQ ID NO: 208800
  derived and/or modified CDS sequence (opt5) from neuraminidase__InfluenzaA__ACT83858

SEQ ID NO: 209197 - RNA, 1410 nt, Artificial Sequence; identical to SEQ ID NO: 208810
  derived and/or modified CDS sequence (opt5) from neuraminidase__InfluenzaA__ACT83868

SEQ ID NO: 209198 - RNA, 1410 nt, Artificial Sequence; identical to SEQ ID NO: 208810
  derived and/or modified CDS sequence (opt5) from neuraminidase__InfluenzaA__ACT83878

SEQ ID NO: 209199 - RNA, 1410 nt, Artificial Sequence; identical to SEQ ID NO: 208810
  derived and/or modified CDS sequence (opt5) from neuraminidase__InfluenzaA__ACT86002

SEQ ID NO: 209200 - RNA, 1410 nt, Artificial Sequence; identical to SEQ ID NO: 208810
  derived and/or modified CDS sequence (opt5) from neuraminidase__InfluenzaA__ACT86012

SEQ ID NO: 209201 - RNA, 1410 nt, Artificial Sequence; identical to SEQ ID NO: 208810
  derived and/or modified CDS sequence (opt5) from neuraminidase__InfluenzaA__ACT86022

SEQ ID NO: 209202 - RNA, 1410 nt, Artificial Sequence; identical to SEQ ID NO: 208800
  derived and/or modified CDS sequence (opt5) from neuraminidase__InfluenzaA__ACT86032

SEQ ID NO: 209203 - RNA, 1410 nt, Artificial Sequence; identical to SEQ ID NO: 208810
  derived and/or modified CDS sequence (opt5) from neuraminidase__InfluenzaA__ACT86042

SEQ ID NO: 209204 - RNA, 1410 nt, Artificial Sequence; identical to SEQ ID NO: 208810
  derived and/or modified CDS sequence (opt5) from neuraminidase__InfluenzaA__ACT86052

SEQ ID NO: 209205 - RNA, 1410 nt, Artificial Sequence; identical to SEQ ID NO: 208810
  derived and/or modified CDS sequence (opt5) from neuraminidase__InfluenzaA__ACT86062

SEQ ID NO: 209206 - RNA, 1410 nt, Artificial Sequence; identical to SEQ ID NO: 208810
  derived and/or modified CDS sequence (opt5) from neuraminidase__InfluenzaA__ACT86072

SEQ ID NO: 209207 - RNA, 1410 nt, Artificial Sequence; identical to SEQ ID NO: 208810
  derived and/or modified CDS sequence (opt5) from neuraminidase__InfluenzaA__ACT86082

SEQ ID NO: 209208 - RNA, 1410 nt, Artificial Sequence; identical to SEQ ID NO: 208810
  derived and/or modified CDS sequence (opt5) from neuraminidase__InfluenzaA__ACT86092

SEQ ID NO: 209209 - RNA, 1410 nt, Artificial Sequence; identical to SEQ ID NO: 208810
  derived and/or modified CDS sequence (opt5) from neuraminidase__InfluenzaA__ACT86102

SEQ ID NO: 209210 - RNA, 1410 nt, Artificial Sequence; identical to SEQ ID NO: 208810
  derived and/or modified CDS sequence (opt5) from neuraminidase__InfluenzaA__ACT86112

SEQ ID NO: 209211 - RNA, 1410 nt, Artificial Sequence; identical to SEQ ID NO: 208810
  derived and/or modified CDS sequence (opt5) from neuraminidase__InfluenzaA__ACT86122

SEQ ID NO: 209212 - RNA, 1410 nt, Artificial Sequence; identical to SEQ ID NO: 208810
  derived and/or modified CDS sequence (opt5) from neuraminidase__InfluenzaA__ACT86132

SEQ ID NO: 209213 - RNA, 1410 nt, Artificial Sequence; identical to SEQ ID NO: 208810
  derived and/or modified CDS sequence (opt5) from neuraminidase__InfluenzaA__ACT86142

SEQ ID NO: 209214 - RNA, 1410 nt, Artificial Sequence; identical to SEQ ID NO: 208800
  derived and/or modified CDS sequence (opt5) from neuraminidase__InfluenzaA__ACT97323

SEQ ID NO: 209215 - RNA, 1410 nt, Artificial Sequence; identical to SEQ ID NO: 208810
  derived and/or modified CDS sequence (opt5) from neuraminidase__InfluenzaA__ACU00934

SEQ ID NO: 209216 - RNA, 1410 nt, Artificial Sequence; identical to SEQ ID NO: 208810
  derived and/or modified CDS sequence (opt5) from neuraminidase__InfluenzaA__ACU00944

SEQ ID NO: 209217 - RNA, 1410 nt, Artificial Sequence; identical to SEQ ID NO: 209164
  derived and/or modified CDS sequence (opt5) from neuraminidase__InfluenzaA__ACU00954

SEQ ID NO: 209218 - RNA, 1410 nt, Artificial Sequence
  derived and/or modified CDS sequence (opt5) from neuraminidase__InfluenzaA__ACU12497
augaaccccaaucagaagaucauuaccaucggcagcgugucccugacaauugccacgaucugcuuccucaugcaaauugcuauccuggucaccacaguuacccuucacuuuaaacaguacgaguguaacucuccuccgaauaaccaggugaugcccugcgaaccuacaaucauugagagaaauaucaccgaaauuguguaucugacaaacaccacgaucgagcgggaaauuugucccaagcucgucgaguaccgcaauuggagcaaaccucagugcagagugaccggguucgcccccuuuuccaaggacaacucuauccggcugagcgcgggaggcgauauuuggguuacacgcgagccuuauguguccugugacccggggaaaugcuaccaauucgcucuuggacagggcaccacacugaauaacagacauucuaaugauaccguccacgaccggacgcccuaucgcacacuccugaugaacgaacugggggugccuuuucaucucggaaccaagcagguuuguaucgccuggagcuccagcucuugccacgauggcaaggccuggcugcaugugugugucacaggccacgacgagaaugcuaccgccuccuucaucuacgaugggagacuuguggacagcauugugucuugguccaaaaacauccugcggacccaggaaagcgagugcgucuguauuaauggaacaugcacgguugugaugaccgauggcucugcuuccgagcgcgccgacacaaagauccucuuuauugaagaggggaaaaucgugcacaucagcccccuguccggaucugcgcaacaugucgaagagugcagcuguuauccuagauaccccggcgugcggugcguuugucgcgauaacuggaagggguccaacagaccgauuguggacaucaaugucaaagauuacagcauugugucuuccuauguuugcagcggacuugugggcgacaccccucggaagaacgacucuagcuccucuagcuacugucgcaaucccaacaaugaaaagggcucccacggggucaaaggaugggccuucgaugacggcaacgauguguggauggggagaacaaucggagaggagcugcggagcggcuaugaaaccuuuaaggucauugggggauggucuacgccuaauuccaaacuccagacaaacagacaggugaucguugaccgcggcaaucggagcggcuacucugggaucuucuccguggagggaaagagcugcauuaacagauguuuuuaugucgaacugauccgcggccggaaacaggagaccaaggugugguggaccuccaauucuauuguuguguucugcgggacaagcggaaccuacggcacaggguccuggcccgauggcgcugacaucaaccugaugcccauuuga

SEQ ID NO: 209219 - RNA, 1413 nt, Artificial Sequence; identical to SEQ ID NO: 208704
  derived and/or modified CDS sequence (opt5) from neuraminidase__InfluenzaA__ACU12508

SEQ ID NO: 209220 - RNA, 1410 nt, Artificial Sequence
  derived and/or modified CDS sequence (opt5) from neuraminidase__InfluenzaA__ACU12519
augaaccccaaucagaagaucauuaccaucggcagcgugucccugacaauuucuacgaucugcuucuuuaugcaaauugccauccucaucaccacagucacccugcacuucaaacaguacgaguuuaacagcccuccgaauaaccagguuaugcuuugugaacccacaauuaucgagagaaauauuaccgaaaucguguaucugacaaacaccacgauugagaaggaaaucugcccuaaacucgcugaguaccggaauugguccaagccccaguguaacauuaccggguucgccccuuuuucuaaagacaauagcauccgccuguccgcgggaggcgauaucugggugacaagagagcccuaugucucuugcgacccugauaaguguuaccaauucgcucuugggcagggaaccacacugaacaaugugcauagcaacgacaccguucacgaucggacgccguaucgcacacuccugaugaaugaacugggcgugcccuuucaucucgggaccaagcaggucugcauugccugguccucuagcuccugucacgacggaaaagccuggcugcaugugugcaucacaggcgaugacgagaacgcuaccgccagcuucauuuacaauggcagacuuguugauucuguggucuccuggagcaagaaaauccugcggacccaggaaucugagugugugugcauuaacgggacauguacgguggucaugaccgacggauccgcuagcggcaaggccgauacaaaaauccucuuuaucgaggaagggaagauuguucacaccuccacacugucuggaagcgcgcaacacguggaggaaugcuccugcuauccucgcuaccccggcgugagaugugucugccgggacaacuggaaggggagcaaucgcccuaucguggauauuaacaucaaagacuacucuauuguuuccagcuauguguguucuggacuugucggcgacacccccagaaagaaugauagcuccucuagcggccauugccuggacccgaacaaugaggaagggggacacggcgugaaagggugggccuucgaugacggaaacgauguuuggaugggccggacgaucuccgagaagcuccgcagcggguacgagacauuuaaagugaucgaaggauggucuaauccuaacuccaagcugcagauuaauagacaggucaucguggaccggggcaaccgcagcggcuauucugggauuuucuccgucgagggaaaaagcuguaucaauagaugcuuuuacguggaacugauucggggcagaaaccaggagaccgaaguucucuggaccuccaauucuaucguggucuucugugggacaagcggaaccuauggcacaggguccuggcccgauggcgcugacauuaaccugaugccuaucuga

SEQ ID NO: 209221 - RNA, 1410 nt, Artificial Sequence
  derived and/or modified CDS sequence (opt5) from neuraminidase__InfluenzaA__ACU12530
augaaccccaaucagaagaucauuaccaucggcagcgugucccugacaauuucuacgaucugcuucuuuaugcaaauugccauccucaucaccacagucacccugcacuucaaacaguacgaguuuaacagcccuccgaauaaccagguuaugcuuugugaacccacaauuaucgagagaaauauuaccgaaaucguguaucugacaaacaccacgauugagaaggaaaucugcccuaaacucgcugaguaccggaauugguccaagccccaguguaacauuaccggguucgccccuuuuucuaaagacaauagcauccgccuguccgcgggaggcgauaucugggugacaagagagcccuaugucucuugcgacccugauaaguguuaccaauucgcucuugggcagggaaccacacugaacaaugugcauagcaacgacaccguucacgaucggacgccguaucgcacacuccugaugaaugaacugggcgugcccuuucaucucgggaccaagcaggucugcauugccugguccucuagcuccugucacgacggaaaagccuggcugcaugugugcguuacaggcaacgauaagaaugcuaccgccagcuucaucuacaacggcagacuuguggacucuauugucuccuggagcaaagagauccugcggacccaggaaucugagugugugugcauuaacgggacauguacgguggucaugaccgauggauccgcuagcggcaaggccgacacaaaaauccucuuuaucgaggaagggaagauuguucacaccuccacacugucuggaagcgcgcaacacguggaggaaugcuccugcuauccucgcuaccccggcgugagaugugucugccgggauaauuggaaggggagcaaccgcccuaucguggacauuaauaucaaagauuacucuauuguuuccagcuauguguguucuggacuugucggcgacacccccagaaagaacgacagcuccucuagcucccauugccuggauccgaauaacgaggaaggcgggcacggagugaaaggcugggccuucgacgaugggaaugacguuuggaugggacggacgaucagcgagaagcuccgcucuggcuacgagacauuuaaagugaucgaagggugguccaacccuaauagcaagcugcagauuaacagacaggucaucguggaucggggaaaucgcucuggcuauuccggcauuuucagcgucgaggggaaauccuguaucaacagaugcuuuuacguggaacugauucggggaagaaaggaggaaaccgagguucucuggaccucuaauagcaucguggucuucuguggcacauccgggaccuauggaacaggcucuuggcccgacggggcugauauuaaccugaugccuaucuga

SEQ ID NO: 209222 - RNA, 1410 nt, Artificial Sequence
  derived and/or modified CDS sequence (opt5) from neuraminidase__InfluenzaA__ACU12541
augaaccccaaucagaagaucauuaccaucggcagcgugucccugacaauuucuacgaucugcuucuuuaugcaaauugccauccucaucaccacagucacccugcacuucaaacaguacgaguuuaacagcccuccgaauaaccagguuaugcuuugugaacccacaauuaucgagagaaauauuaccgaaaucguguaucugacaaacaccacgauugagaaggaaaucugcccuaaacucgcugaguaccggaauugguccaagccccaguguaacauuaccggguucgccccuuuuucuaaagacaauagcauccgccuguccgcgggaggcgauaucugggugacaagagagcccuaugucucuugcgacccugauaaguguuaccaauucgcucuugggcagggaaccacacugaacaaugugcauagcaacgacaccguucacgaucggacgccguaucgcacacuccugaugaaugaacugggcgugcccuuucaucucgggaccaagcaggucugcauugccugguccucuagcuccugucacgacggaaaagccuggcugcaugugugcguuacaggcgaugacaagaacgcuaccgccagcuucaucuacaauggcagacuuguggauucuauugucuccuggagcaaagagauccugcggacccaggaaucugagugugugugcauuaacgggacauguacgguggucaugaccgacggauccgcuagcggcaaggccgauacaaaaauccucuuuaucgaggaagggaagauuguucacaccuccacacugucuggaagcgcgcaacacguggaggaaugcuccugcuauccucgcuaccccggcgugagaugugucugccgggacaacuggaaggggagcaaucgcccuaucguggauauuaacaucaaagacuacucuauuguuuccagcuauguguguucuggacuugucggcgacacccccagaaagaaugauagcuccucuagcucccauugccuggacccgaacaaugaggaaggcgggcacggagugaaaggcugggccuucgaugacgggaacgauguuuggaugggacggacgaucagcgagaagcuccgcucuggcuacgagacauuuaaagugaucgaagggugguccaauccuaacagcaaguggcagauuaauagacaggucaucguggaccggggaaaccgcucuggcuauuccggcauuuucagcgucgaggggaaauccuguaucaauagaugcuuuuacguggaacugauucggggaagaaaggaggaaaccgagguucuguggaccucuaacagcaucguggucuucuguggcacauccgggaccuauggaacaggcucuuggcccgauggggcugacauuaaucucaugccuaucuga

SEQ ID NO: 209223 - RNA, 1410 nt, Artificial Sequence
  derived and/or modified CDS sequence (opt5) from neuraminidase__InfluenzaA__ACU12552
augaaccccaaucagaagaucauuaccaucggcagcgugucccugacaauuucuacgaucugcuucuuuaugcaaauugccauccucaucaccacagucacccugcacuucaaacaguacgaguuuaacagcccuccgaauaaccagguuaugcuuugugaacccacaauuaucgagagaaauauuaccgaaaucguguaucugacaaacaccacgauugagaaggaaaucugcccuaaacucgcugaguaccggaauugguccaagccccaguguaacauuaccggguucgccccuuuuucuaaagacaauagcauccgccuguccgcgggaggcgauaucugggugacaagagagcccuaugucucuugcgacccugauaaguguuaccaauucgcucuugggcagggaaccacacugaacaaugugcauagcaacgacaccguucacgaucggacgccguaucgcacacuccugaugaaugaacugggcgugcccuuucaucucgggaccaagcaggucugcauugccugguccucuagcuccugucacgacggaaaagccuggcugcaugugugcguuacaggcgaugacaagaacgcuaccgccagcuucaucuacaauggcagacuuguggauucuauugucuccuggagcaaagagauccugcggacccaggaaucugagugugugugcauuaacgggacauguacgguggucaugaccgacggauccgcuagcggcaaggccgauacaaaaauccucuuuaucgaggaagggaagauuguucacaccuccacacugucuggaagcgcgcaacacguggaggaaugcuccugcuauccucgcuaccccggcgugagaugugucugccgggacaacuggaaggggagcaaucgcccuaucguggauauuaacaucaaagacuacucuauuguuuccggauauguguguagcggccuugucggcgacacccccagaaagaaugauucuagcuccucuagccauugcuccgacccgaacaaugaggaagggggacacggcgugaaagggugggccuucgaugacggaaacgauguuuggaugggccggacgaucagcgagaagcugcgcucuggguacgagacauuuaaagugaucgaaggaugguccaauccuaacagcaagcuccagauuaauagacaggucaucguggaccggggcaaccgcucuggcuauuccgggauuuucagcgucgagggaaaauccuguaucaauagaugcuuuuacguggaacugauucggggcagaaaggaggaaaccgagguucuguggaccucuaacagcaucguggucuucugugggacauccggaaccuauggcacagggucuuggcccgauggcgcugacauuaaucucaugccuaucuga

SEQ ID NO: 209224 - RNA, 1413 nt, Artificial Sequence
  derived and/or modified CDS sequence (opt5) from neuraminidase__InfluenzaA__ACU12574
augaaccccaaucagaagaucauuaccaucggcagcauuuccaucgccauugggaucaucaaccugaugcuccaaauuggaaauaucauuucuaucugggcuagccacuccauucagacaggcucucagaacaauacggggaucugcaaccagagaauuaucaccuacgagaauagcacaugggugaaccauaccuaugucaauaucaacaauacaaacguuguggccggagaagacaaaaccuccgugacacuggcgggcaauucuagccuuuguuccauuagcgggugggcuaucuacaccaaggauaacucuauucggaucggauccaaaggcgacgucuucgugauucgcgagccuuuuaucagcugcucucaccuggaauguagaacguucuuucucacccaaggcgcccugcuuaaugauaagcauuccaacgggacaguuaaagaccggagcccguaucgcgcccugaugucuugcccccucggagaggcuccuucccccuacaacagcaaguucgaauccguggccuggucugcuagcgccugucacgauggcaugggguggcugaccaucggaauuuccggcccugacaauggggcggucgccgugcugaaguauaacggaaucauuacaggcaccaucaaaagcuggaagaaacagauucucagaacgcaggagucugagugcguuuguaugaauggcuccugcuuuacaaucaugaccgaugggcccagcaacaaggcugccucuuacaaaaucuucaagauugaaaagggaaaagugacaaagagcaucgagcugaaugcuccuaacuuuuauuacgaagaguguuccugcuacccggacaccggcauugucaugugugugugccgggauaauuggcaugggucuaaccgccccugggugagcuucaaucagaaccuugacuaucaaaucggauacauuugcuccggcgucuuuggggauaauccuagacccgaggacggagaaggcagcuguaacccuguuaccguggauggcgccaauggggugaaaggauucucuuauaaguacgacaacggcgucuggaucgggcggacaaaauccaaucgccugagaaagggauuugagaugauuugggaccccaacggcuggacgaacaccgauagcgacuucucugugaaacaggauguuguggcgaucacagacugguccggguauagcggcuccuuuguccagcacccggaacucaccggacuggauugcauccggccuuguuucuggguggagcuuguucgcggccugcccagagaaaauacaaccauuuggacgucugggagcuccaucucuuucugcggagugaacagcgacacagccaauugguccuggccugauggcgcugagcuccccuuuaccauugacaaguga

SEQ ID NO: 209225 - RNA, 1413 nt, Artificial Sequence; identical to SEQ ID NO: 208704
  derived and/or modified CDS sequence (opt5) from neuraminidase__InfluenzaA__ACU12585

SEQ ID NO: 209226 - RNA, 1413 nt, Artificial Sequence
  derived and/or modified CDS sequence (opt5) from neuraminidase__InfluenzaA__ACU12596
augaaccccaaucagaagaucauuaccaucggcagcauuuccaucgccauugggaucaucucucugaugcuccaaauuggaagcaucauuuccaucugggcuucucacagcauuagaacaggcucccagaacaauacggggaucugcaaccagcggauuaucaccuacgagaauagcacaugggugaaccauaccuaugucaauaucaacaauacaaacguuguggccggagaagacaaaaagagcgugacccuggcgggcaauuccagccuuuguucuauuuccgggugggcuaucuacacaaaagauaacagcauucgcaucggaucuaagggcgacgucuucgugauuagagagccuuuuaucuccugcagccaccuggaaugucggaccuucuuucucacgcagggcgcccugcuuaaugauaaacauucuaacgggaccguuaaggaccgcuccccguauagagcccugaugagcugcccccucggagaggcuccuucccccuacaauucuaaguucgaaagcguggccugguccgcuagcgccugucacgauggcaugggguggcugacaaucggaauuucuggcccugacaacggggcggucgccgugcugaaauauaacggaaucauuaccggcacaaucaaguccuggaaaaagcaaauucuccggacccaggagagcgagugcguuuguaugaauggcucuugcuuuacgaucaugacagaugggcccagcaacaaagcugccuccuacaagaucuucaagauugaaaaaggaaaggugaccaaaucuaucgagcugaaugcuccuaacuuuuauuacgaagaguguagcugcuacccggacacaggcauugucaugugugugugccgcgauaauuggcauggguccaacagacccugggugagcuucaaucagaaccuugacuaucagaucggauacauuugcucuggcgucuuuggggauaauccucggcccgaggacggagaaggcuccuguaacccuguuaccguggauggcgccaauggggugaagggauucagcuauaaauacggcaacggggucuggaucggacgcaccaagucuaauagacugcggaaaggcuuugagaugauuugggaccccaacggguggacaaauacggacuccgauuucagcgugaagcaagacguuguggcgaucaccgauugguccggcuauucuggaucuuuuguccagcacccggaacucacaggccuggacugcauccgcccuuguuucuggguggagcuuguuagagggcugccccgggaaaacaccacaauuuggaccuccggaucuagcaucuccuucugcggcgugaacagcgauacggccaauuggucuuggccugacggggcugagcuccccuuuacaauugauaaguga

SEQ ID NO: 209227 - RNA, 1410 nt, Artificial Sequence; identical to SEQ ID NO: 208810
  derived and/or modified CDS sequence (opt5) from neuraminidase__InfluenzaA__ACU13077

SEQ ID NO: 209228 - RNA, 1410 nt, Artificial Sequence; identical to SEQ ID NO: 208810
  derived and/or modified CDS sequence (opt5) from neuraminidase__InfluenzaA__ACU13078

SEQ ID NO: 209229 - RNA, 1410 nt, Artificial Sequence; identical to SEQ ID NO: 208810
  derived and/or modified CDS sequence (opt5) from neuraminidase__InfluenzaA__ACU13079

SEQ ID NO: 209230 - RNA, 1410 nt, Artificial Sequence; identical to SEQ ID NO: 208810
  derived and/or modified CDS sequence (opt5) from neuraminidase__InfluenzaA__ACU13080

SEQ ID NO: 209231 - RNA, 1410 nt, Artificial Sequence; identical to SEQ ID NO: 208800
  derived and/or modified CDS sequence (opt5) from neuraminidase__InfluenzaA__ACU13081

SEQ ID NO: 209232 - RNA, 1410 nt, Artificial Sequence; identical to SEQ ID NO: 208810
  derived and/or modified CDS sequence (opt5) from neuraminidase__InfluenzaA__ACU13082

SEQ ID NO: 209233 - RNA, 1410 nt, Artificial Sequence; identical to SEQ ID NO: 208810
  derived and/or modified CDS sequence (opt5) from neuraminidase__InfluenzaA__ACU13083

SEQ ID NO: 209234 - RNA, 1410 nt, Artificial Sequence
  derived and/or modified CDS sequence (opt5) from neuraminidase__InfluenzaA__ACU13084
augaaccccaaucagaagaucauuaccaucggcagcgugugcaugacaauugggauggccaaccugauccuccaaauuggaaauaucaucuccauuuggaucucucacagcauucagcugggcaaccagaaucagaucgagacguguaaccaauccgucauuaccuacgaaaauaacacauggguuaaucagaccuaugugaacaucucuaauacaaacuucgcugccgggcagagcguggucuccaugaaacuugcgggaaauucuagccugugcccugugggcgggugggcuauuuacuccaaggacaacagcguuagaaucggaucuaaaggcgauguguuugucauccgggagccguucauuuccuguagcccccucgaaugccgcaccuuuuuccugacacagggcgcccuucugaaugacaagcauucuaacgggaccaucaaagauagauccccuuaucggacgcucaugagcugucccauuggagaggugccuucucccuacaacucccgcuuugaaagcguugccugguccgcuucugccugccacgacggcaucaauuggcugaccauugggaucagcggaccugauaacggcgcuguggccguccugaaguauaaugggaucauuacagacaccaucaaguccuggagaaacaauauucuccggacacaagagagcgagugugcgugcgugaacggaucuuguuucaccgugaugacggauggcccguccaauggccaggccagcuacaaaaucuuucgcauugaaaaggggaaaaucgucaagucuguugagaugaacgcucccaauuaucauuacgaagagugcagcuguuacccugacuccucugagaucacaugcgugugcagagauaacuggcacggaagcaaucggcccuggguguccuucaaccagaaucuggaauaucagauuggcuacaucuguagcgggauuuuuggagacaacccucgccccaaugauaaaaccggcucuugcgggccggucuccagcaacggagccaacggcgugaagggcuucucuuuuaaguaugggaauggaguuuggaucggcagaacaaaauccauuagcucccggaacggguucgagaugaucugggacccuaauggauggaccggcaccgauaacaauuuuucuauuaagcaagacaucguggggaucaacgaauggagcggcuacuccggaucuuucguccagcaucccgagcuuacaggccuggacuguauucgcccuugcuucuggguggaacucaucagagggcggcccaaagagaauacgauuuggaccagcggauccagcaucucuuuuuguggcguuaacuccgauacagugggguggagcuggcccgacggagcugagcugccuuucaccauugauaaguga

SEQ ID NO: 209235 - RNA, 1410 nt, Artificial Sequence; identical to SEQ ID NO: 208810
  derived and/or modified CDS sequence (opt5) from neuraminidase__InfluenzaA__ACU16799

SEQ ID NO: 209236 - RNA, 1410 nt, Artificial Sequence; identical to SEQ ID NO: 208810
  derived and/or modified CDS sequence (opt5) from neuraminidase__InfluenzaA__ACU16861

SEQ ID NO: 209237 - RNA, 1410 nt, Artificial Sequence; identical to SEQ ID NO: 208810
  derived and/or modified CDS sequence (opt5) from neuraminidase__InfluenzaA__ACU16934

SEQ ID NO: 209238 - RNA, 1410 nt, Artificial Sequence; identical to SEQ ID NO: 208810
  derived and/or modified CDS sequence (opt5) from neuraminidase__InfluenzaA__ACU16997

SEQ ID NO: 209239 - RNA, 1410 nt, Artificial Sequence; identical to SEQ ID NO: 208810
  derived and/or modified CDS sequence (opt5) from neuraminidase__InfluenzaA__ACU17130

SEQ ID NO: 209240 - RNA, 1410 nt, Artificial Sequence; identical to SEQ ID NO: 208810
  derived and/or modified CDS sequence (opt5) from neuraminidase__InfluenzaA__ACU17191

SEQ ID NO: 209241 - RNA, 1410 nt, Artificial Sequence
  derived and/or modified CDS sequence (opt5) from neuraminidase__InfluenzaA__ACU17262
augaaccccaaucagaagaucauuaccaucggcagcgugugcaugacaauugggauggccaaccugauccuccaaauuggaaauaucaucuccauuuggaucucucacagcauucagcugggcaaccagucccagaucgagacguguaaucaaucugucauuaccuacgaaaacaauacauggguuaaccagaccuaugugaauaucagcaacacaaauuucgcugccgggcaguccguggucucugugaaacuugcgggaaacagcucccugugcccuguuagcggcugggcuauuuacucuaaggacaauuccaucagaaucgggagcaaaggagauguguuugucauucgggagccguucaucucuuguagcccccucgaaugccgcaccuuuuuccugacacagggcgcccuucugaacgacaagcauuccaauggcaccauuaaagauagaucuccuuaucggacgcucauguccugucccaucggggaggugccuagccccuacaacucccgcuuugaaucuguugccuggagcgcuuccgccugccacgacggaauuaacuggcugaccaucggcaucagcgggccugauaauggagcuguggccguccugaaguauaacggcauuaucacagacaccauuaagucuuggagaaauaacauccuccggacacaagaguccgagugugcgugcgugaaugggagcuguuucaccgugaugacggauggaccgucugacggccaggccagcuacaaaauuuuucgcaucgaaaagggcaaaaucgucaaguccguugagaugaacgcucccaauuaucauuacgaagagugcucuuguuacccugauagcuccgagauuacaugcgugugcagagacaacuggcacgggagcaaucggcccugggugucuuucaaccagaaucuggaauaucagaucggauacauuuguuccggcaucuuuggggauaacccucgccccaaugacaaaaccggaagcugcggcccggucucuuccaacggggccaauggagugaagggcuucagcuuuaaguauggcaacgggguuuggauuggaagaacaaaauccaucucuagccggaacggcuucgagaugauuugggauccuaauggguggaccggaaccgacaacaauuuuuccaucaagcaagacaucgugggcauuaacgaauggucuggguacagcggcuccuucguccagcaucccgagcuuacaggacuggauuguauccgcccuugcuucuggguggaacucauuagaggccggcccaaagagaauacgaucuggaccagcgggucuuccauuagcuuuuguggaguuaacucugacacagugggcugguccuggcccgauggggcugagcugccuuucaccaucgacaaguga

SEQ ID NO: 209242 - RNA, 1410 nt, Artificial Sequence; identical to SEQ ID NO: 208810
  derived and/or modified CDS sequence (opt5) from neuraminidase__InfluenzaA__ACU17325

SEQ ID NO: 209243 - RNA, 1410 nt, Artificial Sequence; identical to SEQ ID NO: 208810
  derived and/or modified CDS sequence (opt5) from neuraminidase__InfluenzaA__ACU17393

SEQ ID NO: 209244 - RNA, 1410 nt, Artificial Sequence; identical to SEQ ID NO: 208810
  derived and/or modified CDS sequence (opt5) from neuraminidase__InfluenzaA__ACU17454

SEQ ID NO: 209245 - RNA, 1410 nt, Artificial Sequence; identical to SEQ ID NO: 208810
  derived and/or modified CDS sequence (opt5) from neuraminidase__InfluenzaA__ACU17524

SEQ ID NO: 209246 - RNA, 1410 nt, Artificial Sequence; identical to SEQ ID NO: 209164
  derived and/or modified CDS sequence (opt5) from neuraminidase__InfluenzaA__ACU27043

SEQ ID NO: 209247 - RNA, 1413 nt, Artificial Sequence
  derived and/or modified CDS sequence (opt5) from neuraminidase__InfluenzaA__ACU27415
augaaccccaaucagaagaucauuaccaucggcagcauuuccaucgccauugggaucaucucucugaugcuccaaauuggaaacaucauuagcaucugggcuucccacucuauucagacaggcagccagaauaacacggggaucugcaaucagagaauuaucaccuacgagaacuccacaugggugaaucauaccuaugugaacaucaauaacacaaauguuguggccggagaagacaaaaccucugugacauucgcgggcaacagcucccuguguagcauuucugggugggcuaucuacaccaaggauaauuccauucggaucggaagcaaaggcgacgucuuugugauucgcgagccuuucaucucuugcucccaccuugaauguagaacguuuuuccugacccaaggcgcccuccugaacgauaagcauagcaaugggacaguuaaagaccggucuccguaucgcgcccuuauguccugcccccugggagaggcuccuagccccuacaacuccaaguuugaaucuguggccuggagcgcuuccgccugucacgauggcaugggguggcucaccaucggaauuagcggcccugacaacggggcggucgccgugcugaaguauaauggaaucauuacaggcaccaucaaaucuuggaagaaacagauucugagaacgcaggaguccgagugcguuuguaugaacggcagcugcuucacaaucaugaccgaugggcccucuaauaaggcugccagcuacaaaaucuuuaagauugaaaagggaaaagugacaaaguccaucgagcucaacgcuccuaauuucuauuacgaagaguguucuugcuacccggacaccggcauugucaugugugugugccgggauaacuggcaugggagcaaucgccccuggguguccuuuaaccagaaucuggacuaucaaaucggauacauuugcagcggcgucuucggggauaacccuagacccgaggacggagaaggcucuuguaauccuguuaccguggauggcgccaacggggugaaaggauuuuccuauaaguacggcaauggggucuggaucggacggacaaaaagcaaccgccuuagaaagggcuucgagaugauuugggaccccaauggguggacgaacaccgacucugauuuuuccgugaaacaggacguuguggcgaucacagauuggagcggcuauuccggaucuuucguccagcacccggaacugaccggccucgacugcauccggccuuguuucuggguggagcugguucgcgggcuucccagagaaaacacaaccauuuggacgagcggauccucuaucagcuuuugcggcgucaauuccgauacagccaacuggagcuggccugacggggcugagcugcccuucaccauugauaaguga

SEQ ID NO: 209248 - RNA, 1413 nt, Artificial Sequence; identical to SEQ ID NO: 209247
  derived and/or modified CDS sequence (opt5) from neuraminidase__InfluenzaA__ACU27416

SEQ ID NO: 209249 - RNA, 1410 nt, Artificial Sequence; identical to SEQ ID NO: 208800
  derived and/or modified CDS sequence (opt5) from neuraminidase__InfluenzaA__ACU29961

SEQ ID NO: 209250 - RNA, 1410 nt, Artificial Sequence
  derived and/or modified CDS sequence (opt5) from neuraminidase__InfluenzaA__ACU29971
augaaccccaaucagaagaucauuaccaucggcagcgugugcaugacaauugggauggccaaccugauccuccaaauuggaaauaucaucuccauuuggaucucucacagcauucagcugggcaaccagaaucagaucgagacguguaaccaauccgucauuaccuacgaaaauaacacauggguuaaucagaccuaugugaacaucucuaauacaaacuucgcugccgggcagagcguggucuccgugaaacuugcgggaaauucuagccugugcccuguuuccggcugggcuauuuacagcaaggacaacucugugagaaucggguccaaaggagaugucuuugugauccgggagccguucauuagcuguucuccccucgaaugccgcaccuuuuuccugacacagggcgcccuucugaaugacaagcauuccaacggcaccaucaaagauagaagcccuuaucggacgcucaugucuugucccauuggggagguuccuucccccuacaacagccgcuuugaauccguggccuggucugcuagcgccugccacgacggaaucaauuggcugaccauuggcaucuccgggccugauaacggagcugucgccgugcugaaguauaauggcaucauuacagacaccaucaagagcuggagaaacaauauucuccggacacaagagucugagugugcgugcgugaacggguccuguuucaccgucaugacggauggaccgagcaauggccaggccucuuacaaaaucuuucgcauugaaaagggcaaaaucguuaagagcguggagaugaacgcucccaauuaucauuacgaagagugcuccuguuacccugacucuagcgagaucacaugcgugugcagagauaacuggcacggguccaaucggcccugggucagcuucaaccagaaucuggaauaucagauuggauacaucuguucuggcauuuuuggggacaacccucgccccaaugauaaaaccggauccugcggcccggugagcucuaacggggccaacggaguuaagggcuucuccuuuaaguauggcaaugggguguggaucggaagaacaaaaagcauuuccucucggaacggcuucgagaugaucugggacccuaauggguggaccggaaccgauaacaauuuuagcauuaagcaagacaucgucggcaucaacgaaugguccggguacucuggcagcuucgugcagcaucccgagcuuacaggacuggacuguauucgcccuugcuucuggguugaacucaucagaggccggcccaaagagaauacgauuuggaccuccgggagcucuaucuccuuuuguggagugaacagcgauacagucggcuggucuugguccgacggggcugagcugcccuucaccauugauaaguga

SEQ ID NO: 209251 - RNA, 1410 nt, Artificial Sequence; identical to SEQ ID NO: 208810
  derived and/or modified CDS sequence (opt5) from neuraminidase__InfluenzaA__ACU29981

SEQ ID NO: 209252 - RNA, 1410 nt, Artificial Sequence; identical to SEQ ID NO: 208810
  derived and/or modified CDS sequence (opt5) from neuraminidase__InfluenzaA__ACU29991

SEQ ID NO: 209253 - RNA, 1410 nt, Artificial Sequence; identical to SEQ ID NO: 208810
  derived and/or modified CDS sequence (opt5) from neuraminidase__InfluenzaA__ACU30001

SEQ ID NO: 209254 - RNA, 1410 nt, Artificial Sequence; identical to SEQ ID NO: 208810
  derived and/or modified CDS sequence (opt5) from neuraminidase__InfluenzaA__ACU30021

SEQ ID NO: 209255 - RNA, 1410 nt, Artificial Sequence
  derived and/or modified CDS sequence (opt5) from neuraminidase__InfluenzaA__ACU30085
augaaccccaaucagaagaucauuaccaucggcagcgugugcaugacaauugggauggccaaccugauccuccaaauuggaaauaucaucuccauuuggaucucucacagcauucagcugggcaaccagaaucagaucgagacguguaaccaauccgucauuaccuacgaaaauaacacauggguuaaucagaccuaugugaacaucucuaauacaaacuucgcugccgggcagagcguggucuccgugaaacuuaugggaaauucuagccugugcccuguuuccggcugggcgauuuacagcaaggacaacucugugagaaucggguccaaaggagaugucuuugugauccgggagccguucauuagcuguucuccccucgaaugccgcaccuuuuuccugacacagggcgcccuucugaaugacaagcauuccaacggcaccaucaaagauagaagcccuuaucggacgcucaugucuugucccauuggggagguuccuucccccuacaacagccgcuuugaauccguggcuuggucugccagcgcuugccacgacggaaucaauuggcugaccauuggcaucuccgggccugauaacggagccgucgcugugcugaaguauaauggcaucauuacagacaccaucaagagcuggagaaacaauauucuccggacacaagagucugagugugccugcgugaacggguccuguuucaccgucaugacggauggaccgagcaauggccaggcgucuuacaaaaucuuucgcauugaaaagggcaaaaucguuaagagcguggagaugaacgcccccaauuaucauuacgaagagugcuccuguuacccugacucuagcgagaucacaugcgugugcagagauaacuggcacggguccaaucggcccugggucagcuucaaccagaaucuggaauaucagauuggauacaucuguucuggcauuuuuggggacaacccucgccccaaugauaaaaccggauccugcggcccggugagcucuaacggggcuaacggaguuaagggcuucuccuuuaaguauggcaaugggguguggaucggaagaacaaaaagcauuuccucucggaacggcuucgagaugaucugggacccuaauggguggaccggaaccgauaacaauuuuagcauuaagcaagacaucgucggcaucaacgaaugguccggguacucuggcagcuucgugcagcaucccgagcuuacaggacuggacuguauucgcccuugcuucuggguugaacucaucagaggccggcccaaagagaauacgauuuggaccuccgggagcucuaucuccuuuuguggagugaacagcgauacagucggcuggucuuggcccgacggggccgagcugccuuucaccauugauaaguga

SEQ ID NO: 209256 - RNA, 1410 nt, Artificial Sequence; identical to SEQ ID NO: 209234
  derived and/or modified CDS sequence (opt5) from neuraminidase__InfluenzaA__ACU30095

SEQ ID NO: 209257 - RNA, 1410 nt, Artificial Sequence; identical to SEQ ID NO: 208810
  derived and/or modified CDS sequence (opt5) from neuraminidase__InfluenzaA__ACU30105

SEQ ID NO: 209258 - RNA, 1410 nt, Artificial Sequence; identical to SEQ ID NO: 208810
  derived and/or modified CDS sequence (opt5) from neuraminidase__InfluenzaA__ACU30114

SEQ ID NO: 209259 - RNA, 1410 nt, Artificial Sequence; identical to SEQ ID NO: 208810
  derived and/or modified CDS sequence (opt5) from neuraminidase__InfluenzaA__ACU30123

SEQ ID NO: 209260 - RNA, 1410 nt, Artificial Sequence
  derived and/or modified CDS sequence (opt5) from neuraminidase__InfluenzaA__ACU31177
augaaccccaaucagaagaucauuaccaucggcagcgugugcaugacaauugggauggccaaccugauccuccaaauuggaaauaucaucuccauuuggaucucucaccugauucagcuuggcaaccagaaucagaucgagacguguaaccaaagcgucauuaccuacgaaaauaacacauggguuaaucagaccuaugugaacaucuccaauacaaacuucgcugccgggcagucuguggucagcgugaaacuggcgggaaauuccucucucugcccuguuagcggcugggcuauuuacuccaaggacaacagcaucagaaucgggucuaaaggagauguguuugucauucgggagccguucaucuccuguagcccccuggaaugccgcaccuuuuuccuuacacagggcgcccugcucaaugacaagcauucuaacggcaccauuaaagauagauccccuuaucggacgcugaugagcugucccaucggggaggugccuucucccuacaacucccgcuuugaaagcguugccugguccgcuucugccugccacgacggaauuagcuggcugaccaucggcaucuccgggccugauaauggagcuguggccguccucaaguauaacggcauuaucacagacaccauuaagagcuggagaaauaacauccugcggacacaagagucugagugugcgugcgugaauggguccuguuucaccgugaugacggauggaccgagcgacggccaggccucuuacaaaauuuuucgcaucgaaaagggcaaaaucgucaagagcguugagaugaacgcucccaauuaucauuacgaagagugcuccuguuacccugauucuagcgagauuacaugcgugugcagagacaacuggcacggguccaaucggcccugggugagcuucaaccagaaucuugaauaucagaucggauacauuuguucuggcaucuuuggggauaacccucgccccaaugacaaaaccggauccugcggcccggucagcucuaacggggccaauggagugaagggcuucuccuuuaaguauggcaacgggguuuggauuggaagaacaaaaagcaucuccucucggaacggcuucgagaugauuugggauccuaauggguggaccggaaccgacaacaauuuuagcaucaagcaagacaucgugggcauuaacgaaugguccggguacucuggcagcuucguccagcaucccgagcugacaggacucgauuguauccgcccuugcuucuggguggaacugauuagaggccggcccaaagagaauacgaucuggaccuccgggagcucuauuuccuuuuguggaguuaacagcgacacagugggcuggucuuggcccgauggggcugagcuuccuuucaccaucgacaaguga

SEQ ID NO: 209261 - RNA, 1410 nt, Artificial Sequence; identical to SEQ ID NO: 208810
  derived and/or modified CDS sequence (opt5) from neuraminidase__InfluenzaA__ACU31178

SEQ ID NO: 209262 - RNA, 1410 nt, Artificial Sequence; identical to SEQ ID NO: 208800
  derived and/or modified CDS sequence (opt5) from neuraminidase__InfluenzaA__ACU31179

SEQ ID NO: 209263 - RNA, 1410 nt, Artificial Sequence; identical to SEQ ID NO: 208800
  derived and/or modified CDS sequence (opt5) from neuraminidase__InfluenzaA__ACU31180

SEQ ID NO: 209264 - RNA, 1410 nt, Artificial Sequence; identical to SEQ ID NO: 208800
  derived and/or modified CDS sequence (opt5) from neuraminidase__InfluenzaA__ACU31181

SEQ ID NO: 209265 - RNA, 1410 nt, Artificial Sequence; identical to SEQ ID NO: 208810
  derived and/or modified CDS sequence (opt5) from neuraminidase__InfluenzaA__ACU31182

SEQ ID NO: 209266 - RNA, 1410 nt, Artificial Sequence; identical to SEQ ID NO: 208840
  derived and/or modified CDS sequence (opt5) from neuraminidase__InfluenzaA__ACU31183

SEQ ID NO: 209267 - RNA, 1410 nt, Artificial Sequence; identical to SEQ ID NO: 208810
  derived and/or modified CDS sequence (opt5) from neuraminidase__InfluenzaA__ACU31184

SEQ ID NO: 209268 - RNA, 1410 nt, Artificial Sequence; identical to SEQ ID NO: 208800
  derived and/or modified CDS sequence (opt5) from neuraminidase__InfluenzaA__ACU31185

SEQ ID NO: 209269 - RNA, 1410 nt, Artificial Sequence; identical to SEQ ID NO: 208800
  derived and/or modified CDS sequence (opt5) from neuraminidase__InfluenzaA__ACU31186

SEQ ID NO: 209270 - RNA, 1410 nt, Artificial Sequence; identical to SEQ ID NO: 208800
  derived and/or modified CDS sequence (opt5) from neuraminidase__InfluenzaA__ACU31187

SEQ ID NO: 209271 - RNA, 1410 nt, Artificial Sequence; identical to SEQ ID NO: 208800
  derived and/or modified CDS sequence (opt5) from neuraminidase__InfluenzaA__ACU31188

SEQ ID NO: 209272 - RNA, 1350 nt, Artificial Sequence
  derived and/or modified CDS sequence (opt5) from neuraminidase__InfluenzaA__ACU46645
augaaccccaauaagaaaaucauuaccaucggcagcauuugcauggugacagggauggucucccugaugcuccagaucggaaaccugauuucuaucuggguuagccacuccauccauacgggcaaucaacacaaggccgagccuauuucuaacaccaaucuucugacagagaaaaccguggcuagcgugaagcucgccgggaacuccucucuguguccgaucaauggaugggcggucuacagcaaagacaacuccauuagaaucggcagcaagggggauguguucguuauucgggaacccuuuaucucuugcucccaucuugaaugucgcacauucuuucugacccagggagcucuccugaaugacaagcacagcaacggcacagugaaagauagaucuccucaucggacccugauguccggccccgucggggaggccccuagccccuauaauucucgcuucgaauacguggccugguccgcuagcgccugccacgacagaacgucccggcucaccauuggaaucucuggcccugauaacggggcuguugccgugcugaaguauaauggaaucauuacagacaccaucaaaagcuggcgcaacaauauucuuagaacacaggaguccgagugugcgugcgucaacggcagcuguuuuaccgugaugacggaugggccgucuaacggacaggccucccacaagaucuucaaaauggaaaagggcaagguggucaaaagcguugagcuggacgcucccaauuaccauuaugaagagugcucuuguuacccugaugccggcgagauuacaugcgugugucgggacaacuggcacgggagcaaucgccccuggguguccuuuaaccaaaaucucgaauaucagaucggauacaucugcucuggcgucuucggggauaacccuagacccaaugacggagcuggcagcugcgggccgguguccagcaacggagccuacggcguuaagggcuuuucuuucaaauaugggaauggaguguggauuggccggaccaaguccacaaacagccgcucuggguuugagaugaucugggauccuaauggauggaccgaaaccgacuccagcuucuccgucaaacaggacauuguggcgaucacagauuggucuggcuacagcggguccuuuguucagcaucccgagcugacgggccuugacuguauuagaccuugcuucuggguggaacugauccggggacgccccaaggagucuaccaucuggacaagcggcuccagcauuucuuucuguggggucaacuccgauaccgugggauggagcuggcccgacggcgccgagcucccuuuuacaaucgauaaauga

SEQ ID NO: 209273 - RNA, 1410 nt, Artificial Sequence
  derived and/or modified CDS sequence (opt5) from neuraminidase__InfluenzaA__ACU56927
augaaccccaaucagaagaucauuaccaucggcagcgugugcaugacaauugggauggccaaccugauccuccaaauuggaaauaucaucuccauuuggaucucucacagcauucagcugggcaaccagaaucagaucgagacguguaaccaauccgucauuaccuacgaaaauaacacauggguuaaucagaccuaugugaacaucucuaauacaaacuucgcugccgggcagagcguggucuccgugaaacuugcgggaaauucuagccugugcccuguuuccggcugggcuauuuacagcaaggacaacucuaucagaaucggguccaaaggagauguguuugucauucgggagccguucaucagcuguucuccccucgaaugccgcaccuuuuuccugacacagggcgcccuucugaaugacaagcauuccaacggcaccauuaaagauagaagcccuuaucggacgcucaugucuugucccaucggggaggugccuucccccuacaacagccgcuuugaauccguugccuggucugcuagcgccugccacgacggaauuaauuggcugaccaucggcaucuccgggccugauaacggagcuguggccguccugaaguauaauggcauuaucacagacaccauuaagagcuggagaaacaauauccuccggacacaagagucugagugugcgugcgugaacggguccuguuucaccgugaugacggauggaccgagcaauggccaggccucuuacaaaauuuuucgcaucgacaagggcaaaaucgucaagagcguugaaaugaacgcucccaauuaucauuacgaggaaugcuccuguuacccugauucuagcgagauuacaugcgugugcagagacaacuggcacggguccaaucggcccugggugagcuucaaccagaaucuggaguaucagaucggauacauuuguucuggcaucuuuggggauaacccucgccccaaugacaaaaccggauccugcggcccggucagcucuaacggggccaacggagugaagggcuucuccuuuaaguauggcaaugggguuuggauuggaagaacaaaaagcaucuccucucggaacggcuucgaaaugauuugggauccuaauggguggaccggaaccgacaacaauuuuagcaucaagcaagacaucgugggcauuaacgagugguccggguacucuggcagcuucguccagcaucccgaacuuacaggacuggauuguauccgcccuugcuucuggguggagcucauuagaggccggcccaaagaaaauacgaucuggaccuccgggagcucuauuuccuuuuguggaguuaacagcgacacagugggcuggucuuggcccgauggggcugagcugccuuucaccaucgacaaguga

SEQ ID NO: 209274 - RNA, 1410 nt, Artificial Sequence; identical to SEQ ID NO: 208965
  derived and/or modified CDS sequence (opt5) from neuraminidase__InfluenzaA__ACU56934

SEQ ID NO: 209275 - RNA, 1410 nt, Artificial Sequence; identical to SEQ ID NO: 208810
  derived and/or modified CDS sequence (opt5) from neuraminidase__InfluenzaA__ACU64791

SEQ ID NO: 209276 - RNA, 1410 nt, Artificial Sequence
  derived and/or modified CDS sequence (opt5) from neuraminidase__InfluenzaA__ACU64811
augaaccccaaucagaagaucauuaccaucggcagcgugugcaugacaauugggauggccaaccugauccuccaaauuggaaauaucaucuccauuuggaucucucacagcauucagcugggcaaccagaaucagaucgagacguguaaccaauccgucauuaccuacgaaaauaacacauggguuaaucagaccuaugugaacaucucuaauacaaacuucgcugccgggcagagcaugguguccgucaaacuugcgggaaauucuagccugugcccuguguccggcugggcuauuuacagcaaggacaacucuguuagaaucggguccaaaggagauguguuuaucauucgggagccguucaucagcuguucuccccucgaaugccgcaccuuuuuccugacacagggcgcccuucugaaugacaagcauuccaacggcaccauuaaagauagaagcccuuaucggacgcucaugucuugucccaucggggaggucccuucccccuacaacagccgcuuugaauccguggccuggucugcuagcgccugccacgacggaauuaauuggcugaccaucggcaucuccgggccugauaacggagcuguugccgugcugaaguauaauggcauuaucacagacaccauuaagagcuggagaaacaauauccuccggacacaagagucugagugugcgugcgucaacggguccuguuucaccgugaugacggauggaccgagcaauggccaggccucuuacaaaauuuuucgcaucgaaaagggcaaaaucgucaagagcguggagaugaacgcucccaauuaucauuacgaagagugcuccuguuacccugacucuagcgagauuacaugcguuugcagagauaacuggcacggguccaaucggcccugggugagcuucaaccagaaucuggaauaucagaucggauacauuuguucuggcaucuuuggggacaacccucgccccaaugauaaaaccggauccugcggcccggugagcucuaacggggccaacggagucaagggcuucuccuuuaaguauggcaaugggguguggauuggaagaacaaaaagcaucuccucucggaacggcuucgagaugauuugggacccuaauggguggaccggaaccgauaacaauuuuagcaucaagcaagacaucguuggcauuaacgaaugguccggguacucuggcagcuucgugcagcaucccgagcuuacaggacuggacuguauccgcccuugcuucugggucgaacucauuagaggccggcccaaagagaauacgaucuggaccuccgggagcucuauuuccuuuuguggagugaacagcgauacaguuggcuggucuuggcccgacggggcugagcugccuuucaccaucgauaaguga

SEQ ID NO: 209277 - RNA, 1410 nt, Artificial Sequence; identical to SEQ ID NO: 208575
  derived and/or modified CDS sequence (opt5) from neuraminidase__InfluenzaA__ACU79885

SEQ ID NO: 209278 - RNA, 1410 nt, Artificial Sequence; identical to SEQ ID NO: 206167
  derived and/or modified CDS sequence (opt5) from neuraminidase__InfluenzaA__ACU79896

SEQ ID NO: 209279 - RNA, 1410 nt, Artificial Sequence; identical to SEQ ID NO: 206167
  derived and/or modified CDS sequence (opt5) from neuraminidase__InfluenzaA__ACU79918

SEQ ID NO: 209280 - RNA, 1410 nt, Artificial Sequence; identical to SEQ ID NO: 206167
  derived and/or modified CDS sequence (opt5) from neuraminidase__InfluenzaA__ACU79929

SEQ ID NO: 209281 - RNA, 1413 nt, Artificial Sequence
  derived and/or modified CDS sequence (opt5) from neuraminidase__InfluenzaA__ACU79940
augaaccccaaucagaagaucauuaccaucggcagcauuuccaucgugauugggaucaucucucugaugcuccaaauuggaaacaucauuagcaucugggccucccacucuauucagacaggcagccagaaucauacggggaucugcaaccagagaauuaucaccuacgagaauagcacaugggucaaccacaccuauguuaauaucaacaauacaaacgugguggcuggaaaagacaagaccucugucacacuggccggcaauagcucccuuuguagcauuucugggugggcgaucuacaccaaagauaacuccauucggaucggaagcaagggcgacguguucguuauucgcgaaccuuuuaucucuugcucccaucuggaguguagaacguucuuucucacccaaggcgcucugcuuaaugauaaacacagcaacgggacagugaaggaccggucuccguaucgcgcccugauguccugcccccucggagaagccccuagccccuacaauuccaaguucgagucugucgcuuggagcgccuccgcuugucaugauggcaugggguggcugaccaucggaauuagcggcccugacaacggggccguggcgguucugaaauauaacggaaucauuacagaaaccaucaagucuuggaaaaagcggauucucagaacgcaggaguccgagugcgugugugucaauggcagcugcuuuacaaucaugaccgauggccccucuaacggggccgcuagcuacaaaaucuucaagauugaaaagggaaaagugacaaaguccaucgagcugaaugccccuaacucucacuaugaagaguguagcugcuacccggacaccggcaccgugaugugugucugccgcgauaauuggcacggguccaacagacccuggguuagcuuuaaucagaaccuugacuaccagauuggauauaucugcucuggcguguucggggauaauccucggcccaaagacggagagggcuccuguaacccugugacagucgauggcgcugacggggugaagggauuuagcuaccgcuauggcaaugggguuuggauuggaagaacgaaaucuaaccggcugcgcaagggcuucgaaaugaucugggaccccaauggguggaccgauacagacuccgauuuuagcgugaaacaagacgucguggccaugaccgauugguccggcuacucuggauccuucguucagcauccggagcucacaggccuggacugcauuagaccuuguuuuuggguggaacuuguccgggggcgccccagagagaacaccacgaucuggacauccggaucuagcaucuccuucugcggcgugaauagcgauaccgcgaacuggucuuggccugacggggccgaacugcccuucaccauugauaaguga

SEQ ID NO: 209282 - RNA, 1410 nt, Artificial Sequence
  derived and/or modified CDS sequence (opt5) from neuraminidase__InfluenzaA__ACU79951
augaaccccaaucagaagaucauuaccaucggcagcgugucccugacaauugagacggucugcuuccucaugcaaaucgccauucuggcuaccacaguuacccuucacuuuaaacagcaugaaugugacucuccugccagcaaccaggugaugccgugcgagcccaucaucauugaaagaaauaucacagagauuguguaccugaacaauaccacaaucgaaaaggagauuuguccugaggucguggaauaucggaacugguccaaaccccagugccaaaucaccggguucgcgccuuuuucuaaggauaauagcauucgccucuccgcuggaggcgacaucuggguuacgagagagcccuacgugucuugugauccugggaaaugcuaucaguucgcccugggacagggcaccacacuugacaacaagcacagcaaugggaccauccaugaucggauuccgcaccgcacacugcucaugaacgaacugggaguccccuuucaucugggcaccaaacagguguguguugccugguccucuagcuccugccacgacggcaaggcuuggcuccacgugugugucacgggggaugacagaaaugccacagcuagcuucaucuacgauggacggcugguggacucuauuggcuccuggagccaaaacauccuucgcacccaggagucugagugcguguguauuaaugggacaugcaccgucguuaugaccgauggauccgccagcggcagagcggacacacggauccuguuuaucaaggaagggaaaauugugcauaucuccccucucucuggaagcgcccagcacauugaggaaugcuccuguuauccccgcuacccugaugugagaugcaucugucgggacaacuggaagggcagcaaucgccccgucauugacaucaacauggaggauuauucuaucgacuccagcuacgugugcucuggccugguuggggauacgccgagaaacgacgauagcuccucuaauagcaacugucgggacccuaauaacgaacgcggaaaucccggcgugaaagggugggcuuucgauaacggagacgaugucuggaugggcagaaccauuuccaaggacagccggucuggguacgagacauuuaaggugaucggaggcugguccaccccuaauagcaaaucucagguuaacagacaagugauugucggcaauaacaauugguccggguauagcggaaucuucuccguggagggcaagucuugcauuaaccgcuguuuuuacgucgaacuuauccgggggagaccccaggagacacgcgugugguggaccagcaauuccauuguuguguucugcggaacgucuggcacauaugggaccggcagcuggcccgauggagccaacaucaauuuuaugccuaucuga

SEQ ID NO: 209283 - RNA, 1410 nt, Artificial Sequence; identical to SEQ ID NO: 208675
  derived and/or modified CDS sequence (opt5) from neuraminidase__InfluenzaA__ACU79973

SEQ ID NO: 209284 - RNA, 1413 nt, Artificial Sequence; identical to SEQ ID NO: 208704
  derived and/or modified CDS sequence (opt5) from neuraminidase__InfluenzaA__ACU79984

SEQ ID NO: 209285 - RNA, 1410 nt, Artificial Sequence; identical to SEQ ID NO: 208671
  derived and/or modified CDS sequence (opt5) from neuraminidase__InfluenzaA__ACU80006

SEQ ID NO: 209286 - RNA, 1410 nt, Artificial Sequence
  derived and/or modified CDS sequence (opt5) from neuraminidase__InfluenzaA__ACU80017
augaacaccaaucagagaaucauuacaaucggcacgauuugccugaucguggggauuaucagccuccugcuucaaaucggaaacauuauccugcucuggaugucccacucuauucagaccggcgaaaagagccaucccaaagucuguaaucaguccguuaucacauacgagaacaauaccugggugaaccagacauaugugaauauuucuaacaccaauaucgccgcugggcaaggagucacaccuauuauccuggccggcaacagcucccuuugcccgaucucugggugggcgauuuacagcaaggacaauuccauccggauuggaagcaaaggcgauaucuucgugaugcgcgagcccuuuauuucuuguucccaccuggaaugcagaaccuucuuucucacgcagggcgcucugcugaacgaccggcauagcaaugggaccguuaaggaucgcucuccuuauagaacacucauguccugucccaucggagaggccccuagccccuacaacucucgguucgaauccguggccuggagcgcuuccgccugccacgacggcaugggguggcugaccaucggaauuucuggcccugauaauggggcugucgccgugcuuaaauauaacggaaucauuacagacaccaucaagagcuggcgcaacaagauucugagaacgcaggaguccgaguguguuugcaucaauggcagcuguuuuacaaucaugaccgauggcccgucuaacgggcaggcguccuacaaacucuucaagauggaaaaaggaaagauuauccggagcauugagcuggacgcccccaauuaucauuacgaagagugcucuuguuacccugauacaggcaaaguggucugcgugugccgcgacaacuggcacgcuagcaauagacccuggguguccuuugaucaaaaccuugacuaucagaucggguacauuuguucuggagucuucggcgauaauccucggagcaacgacgggaagggaaauugcggccccguucuguccaacggcgccaauggggugaagggauuuagcuuccgcuauggcaacgggguguggaucggaagaaccaaaucuauuuccagccggucuggcuuugagaugaucugggacccgaauggguggaccgaaacagauuccagcuucuccaugaagcaggacaucauugcucucacggauuggucuggcuacagcggauccuuuguccagcacccugagcugaccggcaugaacuguauccgccccugcuucuggguggaacugauuagagggcaaccuaaagagucuacaaucuggaccagcggauccagcauuucuuucuguggcguuaauuccgggacagccagcuggucuuggcccgacggagcggaucuccccuuuaccaucgacaaguga

SEQ ID NO: 209287 - RNA, 1413 nt, Artificial Sequence; identical to SEQ ID NO: 208704
  derived and/or modified CDS sequence (opt5) from neuraminidase__InfluenzaA__ACU80028

SEQ ID NO: 209288 - RNA, 1410 nt, Artificial Sequence; identical to SEQ ID NO: 208671
  derived and/or modified CDS sequence (opt5) from neuraminidase__InfluenzaA__ACU80039

SEQ ID NO: 209289 - RNA, 1413 nt, Artificial Sequence; identical to SEQ ID NO: 208788
  derived and/or modified CDS sequence (opt5) from neuraminidase__InfluenzaA__ACU80050

SEQ ID NO: 209290 - RNA, 1410 nt, Artificial Sequence; identical to SEQ ID NO: 209221
  derived and/or modified CDS sequence (opt5) from neuraminidase__InfluenzaA__ACU80061

SEQ ID NO: 209291 - RNA, 1413 nt, Artificial Sequence; identical to SEQ ID NO: 208704
  derived and/or modified CDS sequence (opt5) from neuraminidase__InfluenzaA__ACU80072

SEQ ID NO: 209292 - RNA, 1413 nt, Artificial Sequence; identical to SEQ ID NO: 208704
  derived and/or modified CDS sequence (opt5) from neuraminidase__InfluenzaA__ACU80094

SEQ ID NO: 209293 - RNA, 1410 nt, Artificial Sequence; identical to SEQ ID NO: 208675
  derived and/or modified CDS sequence (opt5) from neuraminidase__InfluenzaA__ACU80105

SEQ ID NO: 209294 - RNA, 1410 nt, Artificial Sequence; identical to SEQ ID NO: 208675
  derived and/or modified CDS sequence (opt5) from neuraminidase__InfluenzaA__ACU80127

SEQ ID NO: 209295 - RNA, 1410 nt, Artificial Sequence; identical to SEQ ID NO: 208675
  derived and/or modified CDS sequence (opt5) from neuraminidase__InfluenzaA__ACU80138

SEQ ID NO: 209296 - RNA, 1410 nt, Artificial Sequence; identical to SEQ ID NO: 208671
  derived and/or modified CDS sequence (opt5) from neuraminidase__InfluenzaA__ACU80160

SEQ ID NO: 209297 - RNA, 1413 nt, Artificial Sequence; identical to SEQ ID NO: 208704
  derived and/or modified CDS sequence (opt5) from neuraminidase__InfluenzaA__ACU80171

SEQ ID NO: 209298 - RNA, 1410 nt, Artificial Sequence; identical to SEQ ID NO: 208584
  derived and/or modified CDS sequence (opt5) from neuraminidase__InfluenzaA__ACU80182

SEQ ID NO: 209299 - RNA, 1410 nt, Artificial Sequence
  derived and/or modified CDS sequence (opt5) from neuraminidase__InfluenzaA__ACU80193
augaaccccaaucagaagaucauuaccaucggcagcgugucccugacaauuucuacgaucugcuucuuuaugcaaaccgccauucucaucacaaccgucacacugcacuucaaacaguacgaguuuaacagcccuccgaauaaccagguuaugcuuugugaacccaccaucauugagagaaauaucacagaaauuguguaucugaccaacacgaccaucgagaaggaaauuugcccuaaacucgcugaguaccggaauugguccaagccccagugugacaucacaggguucgccccuuuuucuaaagauaacagcauucgccuguccgcgggaggcgacaucugggugaccagagagcccuaugucucuugcgauccugacaaguguuaccaauucgcucuugggcagggaacaacccugaauaacgugcauagcaaugauacgguucgggaccgcacaccguauagaacccuccugaugaacgaacugggcgugcccuuucaccucgggacaaagcaggucugcaucgccugguccucuagcuccugucaugauggaaaagccuggcugcacgugugcauuaccggcgacgauaagaaugcuaccgccagcuucaucuacaacggccggcuuguugacucuauuguguccuggagcaaagagauccugcgcacacaggaaucugagugugucugcauuaaugggacguguaccguggugaugacagauggauccgcuagcggcaaggccgacaccaaaauccucuuuaucgaggaagggaagauuguccauacauccacccugucuggaagcgcgcaacacguugaggaaugcuccugcuauccuagauaccccggcgugcggugugugugccgcgauaacuggaaggggagcaacagaccuaucgucgacauuaauaucaaagaccacucuauuguguccagcuacguuuguucuggacuugugggcgauacgccccggaagaacgacagcuccucuagcucccauugccuggauccgaauaacgaggaaggcgggcacggagucaaaggcugggccuucgacgaugggaaugacguguggaugggacgcacaaucagcgagaagucuagacucggcuaugagaccuuuaaaguuaucgaagggugguccaacccuaagagcaaacugcagauuaaucgccaggugaucgucgaucggggagacagaucuggcuacuccggcauuuucagcguggaggggaaguccuguaucaaccggugcuuuuaugucgaacugauuagaggacgcaaggaggaaaccgaggugcucuggacaucuaauagcaucguuguguucuguggcaccuccgggacauacggaacgggcucuuggcccgauggggcugacauuaaccugaugccuaucuga

SEQ ID NO: 209300 - RNA, 1410 nt, Artificial Sequence; identical to SEQ ID NO: 208584
  derived and/or modified CDS sequence (opt5) from neuraminidase__InfluenzaA__ACU80204

SEQ ID NO: 209301 - RNA, 1413 nt, Artificial Sequence
  derived and/or modified CDS sequence (opt5) from neuraminidase__InfluenzaA__ACU80237
augaaccccaaucagaagaucauuaccaucggcagcauuuccaucgccauugggaucaucucucugaugcuccaaauuggaaacaucauuagcaucugggcuucccacucuauucagacaggcaaucagaacaauacggggaucugcaaccagagaauuaucaccuacgagaauagcacaugggugaaccauaccuaugucaauaucaacaauacaaacguuguggccggagaagacaaaaccuccgugacacuggcgggcaauucuagccuuuguuccauuagcgggugggcuaucuacaccaaggauaacucuauucggaucggauccaaaggcgacgucuucgugauucgcgagccuuuuaucagcugcucucaccuggaauguagaacguucuuucucacccaaggcgcccugcuuaaugauaagcauuccaacgggacaguuaaagaccggagcccguaucgcgcccugaugucuugcccccucggagaggcuccuucccccuacaacagcaaguucgaauccguggccuggucugcuagcgccugucacgauggcaugggguggcugaccaucggaauuuccggcccugacaauggggcggucgccgugcugaaguauaacggaaucauuacaggcaccaucaaaagcuggaagaaacagauucucagaacgcaggagucugagugcguuuguaugaauggcuccugcuuuacaaucaugaccgaugggcccagcaacaaggcugccucuuacaaaaucuucaagauugaaaagggaaaagugacaaagagcaucgagcugaaugcuccuaacuuucauuaugaagaguguuccugcuacccggacaccggcauugucaugugugugugccgggauaauuggcacgggucuaaccgccccugggugagcuucaaucagaaccuugacuaccaaaucggauauauuugcuccggcgucuuuggggauaauccuagacccgaggacggagaaggcagcuguaacccuguuaccguggauggcgccaauggggugaaaggauucucuuacaaguaugacaacggcgucuggaucgggcggacaaaauccaaucgccugagaaagggauuugagaugauuugggaccccaacggcuggacgaacaccgauagcgacuucucugugaaacaggauguuguggcgaucacagacugguccggguacagcggcuccuuuguccagcacccggaacucaccggacuggauugcauccggccuuguuucuggguggagcuuguucgcggccugcccagagaaaauacaaccauuuggacgucugggagcuccaucucuuucugcggagugaacagcgacacagccaauugguccuggccugauggcgcugagcuccccuuuaccauugacaaguga

SEQ ID NO: 209302 - RNA, 1410 nt, Artificial Sequence; identical to SEQ ID NO: 208675
  derived and/or modified CDS sequence (opt5) from neuraminidase__InfluenzaA__ACU80248

SEQ ID NO: 209303 - RNA, 1410 nt, Artificial Sequence; identical to SEQ ID NO: 208675
  derived and/or modified CDS sequence (opt5) from neuraminidase__InfluenzaA__ACU80259

SEQ ID NO: 209304 - RNA, 1413 nt, Artificial Sequence
  derived and/or modified CDS sequence (opt5) from neuraminidase__InfluenzaA__ACU80270
augaaccccaaucagaagaucauuaccaucggcagcauuuccaucgccauugggaucaucucucugaugcuccaaauuggaaacaucauuagcaucugggcuucccacucuauucagacaggcagccagaauaacacggggaucugcaaucagagaauuaucaccuacgagaacuccacaugggugaaucauaccuaugucaacaucaauaacacaaauguuguggccggagaagacaaaaccucugugacacuggcgggcaacagcucccuuuguagcauuucugggugggcuaucuacaccaaggauaauuccauucggaucggaagcaaaggcgacgucuucgugauucgcgagccuuuuaucucuugcucccaccuggaauguagaacguucuuucucacccaaggcgcccugcuuaacgauaagcauagcaaugggacaguuaaagaccggucuccguaucgcgcccugauguccugcccccucggagaggcuccuagccccuacaacuccaaguucgaaucuguggccuggagcgcuuccgccugucacgauggcaugggguggcugaccaucggaauuagcggcccugacaacggggcggucgccgugcugaaguauaauggaaucauuacaggcaccaucaaaucuuggaagaaacagauucucagaacgcaggaguccgagugcguuuguaugaacggcagcugcuuuacaaucaugaccgaugggcccucuaauaaggcugccagcuacaaaaucuucaagauugaaaagggaaaagugacaaaguccaucgagcugaacgcuccuaauuuucauuaugaagaguguucuugcuacccggacaccagcauugucaugugugugugccgggauaacuggcacggcuccaaucgccccugggugagcuucaaccagaaucuugacuaccaaaucggguauauuugcucuggagucuuuggcgauaacccuagacccgaggacggggaaggauccuguaauccuguuaccguggauggcgccaacggcgugaaaggguucagcuacaaguaugacaauggagucuggaucggccggacaaaaucuaaccgccugagaaagggguuugagaugauuugggaccccaauggauggacgaacaccgauuccgacuucagcgugaaacaggauguuguggcgaucacagacugguccggcuacucugggagcuuuguccagcacccggaacucaccggccuggauugcauccggccuuguuucuggguggagcuuguucgcggacugcccagagaaaacacaaccauuuggacguccggcucuagcaucuccuucugcggggugaauagcgacacagccaacuggucuuggccugauggagcugagcuccccuuuaccauugacaaguga

SEQ ID NO: 209305 - RNA, 1413 nt, Artificial Sequence
  derived and/or modified CDS sequence (opt5) from neuraminidase__InfluenzaA__ACU80281
augaaccagaaucaaaagaucauuaccaucggcagcauuuccaucgccauugggaucaucucucugaugcuccagauuggaaacaucauuagcaucugggcuucccacucuauucagacaggcagccagaauaacacggggaucugcaaucaaagaauuaucaccuacgagaacuccacaugggugaaucauaccuaugugaacaucaauaacacaaauguuguggccggagaagacaaaaccucugugacacuggcgggcaacagcucccuuuguagcauuucugggugggcuaucuacaccaaggauaauuccauucggaucggaagcaaaggcgacgucuucgugauucgcgagcccuuuaucucuugcucccaccuggaauguagaacguucuuucucacccagggcgcccugcuuaacgauaagcauagcaaugggacaguuaaagaccggucuccuuaucgcgcccugauguccugcccgcucggagaggcucccagcccuuacaacuccaaguucgaaucuguggccuggagcgcuuccgccugucacgauggcaugggguggcugaccaucggaauuagcggccccgacaacggggcggucgccgugcugaaguauaauggaaucauuacaggcaccaucaaaucuuggaagaaacagauucucagaacgcaggaguccgagugcguuuguaugaacggcagcugcuuuacaaucaugaccgaugggccuucuaauaaggcugccagcuacaaaaucuucaagauugaaaagggaaaagugacaaaguccaucgagcugaacgcucccaauuuucauuaugaagaguguucuugcuacccugacaccggcauugucaugugugugugccgggauaacuggcacgggagcaaucgcccguggguguccuucaaccaaaaucuugacuaccagaucggauauauuugcagcggcgucuuuggggauaaccccagaccugaggacggagaaggcucuuguaaucccguuaccguggauggcgccaacggggugaaaggauucuccuacaaguaugacaauggcgucuggaucgggcggacaaaaagcaaccgccugagaaagggauuugagaugauuugggacccuaauggcuggacgaacaccgauucugacuucuccgugaaacaggauguuguggcgaucacagacuggagcggguacuccggcucuuuuguccagcaccccgaacucaccggacuggauugcauccggccguguuucuggguggagcuuguucgcggccugccuagagaaaacacaaccauuuggacgagcggguccucuaucagcuucugcggagucaauuccgacacagccaacuggagcuggcccgauggcgcugagcucccuuuuaccauugacaaguga

SEQ ID NO: 209306 - RNA, 1410 nt, Artificial Sequence
  derived and/or modified CDS sequence (opt5) from neuraminidase__InfluenzaA__ACU80303
augaaccccaaucagaagaucauuaccaucggcagcgugucccugacaauuucuacgaucugcuucuuuaugcaaauugccauccucaucaccacagucacccugcacuucaaacaguacgaguuuaacagcuccccuaauaaccagguuaugcuuugugaaccgacaauuaucgagagaaauauuaccgaaaucguguaucugacaaacaccacgauugagaaggaaaucugccccaaacucgcugaguaccggaauuggucuaagccucagugugacauuaccggguucgcccccuuuagcaaagauaacuccauccgccugucugcgggaggcgacaucugggugacaagagagccuuaugucagcugcgaucccgacaaguguuaccaauucgcucuugggcagggaaccacacugaauaacgugcauuccaauaacaccguucgggaucgcacgccuuauagaacacuccugaugaaugaacugggcgugccguuucaccucgggaccaagcaggucugcauugccuggucuagcuccagcugucaugacggaaaagccuggcugcacgugugcaucacaggcgaugacaagaacgcuaccgccucuuucauuuacaauggccggcuuguugauuccaucgugagcuggucuaaagagauucugcgcacccaggaauccgagugugucugcaucaacgggacauguacgguggugaugaccgacggaagcgcuuccggcaaggccgauacaaaaauccucuuuauugaggaagggaagaucguccauaccucuacacugagcggauccgcgcaacacguugaggaaugcagcugcuaucccagauacccuggcgugcggugugugugccgcgacaacuggaaggggucuaauagacccauugucgauaucaacauuaaagaccacuccaucgugagcucuuacguuuguagcggacuugugggcgacaccccucggaagaaugauuccucuagcuccagccauugccuggaccccaacaaugaggaaggcgggaacggagucaaaggcugggccuucgaugacgggaaugauguguggaugggacgcacgaucucugagaaguccagacucggcuaugagacauuuaaaguuauugaaggguggagcaacccgaagucuaaacugcagaucaaucgccaggugauugucgaccggggaaacagauccggcuacagcggcaucuucuccguggaggggaagucuuguauuaaucggugcuuuuaugucgaacugaucagaggacgcaaggaggaaaccgaggugcucuggaccagcaacuccauuguuguguucuguggcacaucugggaccuacggaacaggcagcuggccugauggggcugacaucaaucugaugcccaucuga

SEQ ID NO: 209307 - RNA, 1410 nt, Artificial Sequence; identical to SEQ ID NO: 208675
  derived and/or modified CDS sequence (opt5) from neuraminidase__InfluenzaA__ACU80314

SEQ ID NO: 209308 - RNA, 1410 nt, Artificial Sequence; identical to SEQ ID NO: 208675
  derived and/or modified CDS sequence (opt5) from neuraminidase__InfluenzaA__ACU80325

SEQ ID NO: 209309 - RNA, 1410 nt, Artificial Sequence; identical to SEQ ID NO: 208671
  derived and/or modified CDS sequence (opt5) from neuraminidase__InfluenzaA__ACU80336

SEQ ID NO: 209310 - RNA, 1410 nt, Artificial Sequence; identical to SEQ ID NO: 208675
  derived and/or modified CDS sequence (opt5) from neuraminidase__InfluenzaA__ACU80347

SEQ ID NO: 209311 - RNA, 1410 nt, Artificial Sequence; identical to SEQ ID NO: 208675
  derived and/or modified CDS sequence (opt5) from neuraminidase__InfluenzaA__ACU80358

SEQ ID NO: 209312 - RNA, 1410 nt, Artificial Sequence; identical to SEQ ID NO: 208675
  derived and/or modified CDS sequence (opt5) from neuraminidase__InfluenzaA__ACU80369

SEQ ID NO: 209313 - RNA, 1410 nt, Artificial Sequence; identical to SEQ ID NO: 208675
  derived and/or modified CDS sequence (opt5) from neuraminidase__InfluenzaA__ACU80380

SEQ ID NO: 209314 - RNA, 1410 nt, Artificial Sequence
  derived and/or modified CDS sequence (opt5) from neuraminidase__InfluenzaA__ACU80391
augaaccccaaucagaagaucauuaccaucggcagcgugucccugacaauuucuacgaucugcuucuuuaugcaaauugccauccucaucaccacagucacccugcacuucaaacaguacgaguuuaacagcuccccuaauaaccagguuaugcuuugugaaccgacaauuaucgagagaaauauuaccgaaaucguguaucugacaaacaccauuaucgagaaggaaauuugccccaaacucgcugaguaccggaauuggucuaagccucagugugacaucacgggguucgcccccuuuagcaaagauaacuccauccgccugucugcgggaggcgacauuugggugaccagagagccuuaugucagcugcgaucccgacaaguguuaccaauucgcucuugggcagggaacaacccugaauaacgugcauuccaauaacacaguucgggaucgcaccccuuauagaacgcuccugaugaaugaacugggcgugccguuucaccucgggacaaagcaggucugcaucgccuggucuagcuccagcugucaugacggaaaagccuggcugcacgugugcauuaccggcgaugacaagaacgcuacagccucuuucaucuacaauggccggcuuguugauuccauugugagcuggucuaaagagauccugcgcacccaggaauccgagugugucugcaucaacgggaccuguacaguggugaugacggacggaagcgcuuccggcaaggccgauaccaaaauucucuuuaucgaggaagggaagauuguccauacaucuacccugagcggauccgcgcaacacguugaggaaugcagcugcuaucccagauacccuggcgugcggugugugugccgcgacaacuggaaggggucuaauagacccaucgucgauauuaacaucaaagaccacuccaucgugagcucuuacguuuguagcggacuugugggcgacacaccucggaagaaugauuccucuagcuccagccauugccuggaccccaacaaugaggaaggcgggcacggagucaaaggcugggccuucgaugacgggaacgauguguggaugggacgcaccauuucugagaaguccagacucggcuaugagacguuuaaaguuaucgaaggguggagcaauccgaagucuaaacugcagauuaaccgccaggugaucgucgaccggggaaauagauccggcuacagcggcauuuucuccguggaggggaagucuuguaucaaccggugcuuuuaugucgaacugauuagaggacgcaaggaggaaacagaggugcucuggaccagcaauuccaucguuguguucuguggcaccucugggacauacggaaccggcagcuggccugauggggcugacaucaaccugaugcccauuuga

SEQ ID NO: 209315 - RNA, 1410 nt, Artificial Sequence; identical to SEQ ID NO: 208671
  derived and/or modified CDS sequence (opt5) from neuraminidase__InfluenzaA__ACU80402

SEQ ID NO: 209316 - RNA, 1413 nt, Artificial Sequence; identical to SEQ ID NO: 208704
  derived and/or modified CDS sequence (opt5) from neuraminidase__InfluenzaA__ACU80413

SEQ ID NO: 209317 - RNA, 1410 nt, Artificial Sequence; identical to SEQ ID NO: 208675
  derived and/or modified CDS sequence (opt5) from neuraminidase__InfluenzaA__ACU80427

SEQ ID NO: 209318 - RNA, 1410 nt, Artificial Sequence; identical to SEQ ID NO: 208675
  derived and/or modified CDS sequence (opt5) from neuraminidase__InfluenzaA__ACU80438

SEQ ID NO: 209319 - RNA, 1410 nt, Artificial Sequence; identical to SEQ ID NO: 208671
  derived and/or modified CDS sequence (opt5) from neuraminidase__InfluenzaA__ACU80461

SEQ ID NO: 209320 - RNA, 1410 nt, Artificial Sequence; identical to SEQ ID NO: 208675
  derived and/or modified CDS sequence (opt5) from neuraminidase__InfluenzaA__ACU80603

SEQ ID NO: 209321 - RNA, 1410 nt, Artificial Sequence; identical to SEQ ID NO: 208675
  derived and/or modified CDS sequence (opt5) from neuraminidase__InfluenzaA__ACU80614

SEQ ID NO: 209322 - RNA, 1410 nt, Artificial Sequence; identical to SEQ ID NO: 208675
  derived and/or modified CDS sequence (opt5) from neuraminidase__InfluenzaA__ACU80625

SEQ ID NO: 209323 - RNA, 1410 nt, Artificial Sequence; identical to SEQ ID NO: 208671
  derived and/or modified CDS sequence (opt5) from neuraminidase__InfluenzaA__ACU80636

SEQ ID NO: 209324 - RNA, 1410 nt, Artificial Sequence
  derived and/or modified CDS sequence (opt5) from neuraminidase__InfluenzaA__ACU80647
augaaccccaaucagaagaucauuaccaucggcagcgugucccugacaauuucuacgaucugcuucuuuaugcaaaccgccauucucaucacaaccgucacacugcacuucaaacaguacgaguuuaacagcccuccgaauaaccagguuaugcuuugugaacccaccaucauugagagaaauaucacagaaauuguguaucugaccaacacgaccaucgagaaggaaauuugcccuaaacucgcugaguaccggaauugguccaagccccagugugacaucacaggguucgccccuuuuucuaaagauaacagcauucgccuguccgcgggaggcgacaucugggugaccagagagcccuaugucucuugcgauccugacaaguguuaccaauucgcucuugggcagggaacaacccugaauaacgugcauagcaaugauacgguucgggaccgcacaccguauagaacccuccugaugaacgaacugggcgugcccuuucaccucgggacaaagcaggucugcaucgccugguccucuagcuccugucaugauggaaaagccuggcugcacgugugcauuaccggcgacgauaagaaugcuaccgccagcuucaucuacaacggccggcuuguugacucuguggucuccuggagcaaagagauucugcgcacacaggaaucugagugugugugcaucaaugggacguguaccguggucaugacagauggauccgcuagcggcaaggccgacaccaaaauucucuuuaucgaggaagggaagaucguucauacauccacccugucuggaagcgcgcaacacguggaggaaugcuccugcuauccuagauaccccggcgugcggugugucugccgcgauaacuggaaggggagcaacagaccuauuguggacaucaauauuaaagaccacucuaucguuuccagcuacguguguucuggacuugucggcgauacgccccggaagaacgacagcuccucuagcucccauugccuggauccgaauaacgaggaaggcgggcacggagugaaaggcugggccuucgacgaugggaaugacguuuggaugggacgcacaauuagcgagaagucuagacucggcuaugagaccuuuaaagugaucgaagggugguccaacccuaagagcaaacugcagaucaaucggcaggucauuguggaucgcggagacagaucuggcuacuccggcaucuucagcgucgaggggaaguccuguauuaaccggugcuuuuauguggaacugaucagaggacgcaaggaggaaaccgagguucucuggacaucuaauagcauuguggucuucuguggcaccuccgggacauacggaacgggcucuuggcccgauggggcugacaucaaccugaugccuauuuga

SEQ ID NO: 209325 - RNA, 1410 nt, Artificial Sequence
  derived and/or modified CDS sequence (opt5) from neuraminidase__InfluenzaA__ACU80658
augaaccccaaucagaagaucauuaccaucggcagcgugucccugacaauuucuacgaucugcuucuuuaugcaaauugccauccucaucaccacagucacccugcacuucaaacaguacgaguuuaacagcccuccgaauaaccagguuaugcuuugugaacccaagauuaucgagagaaauauuacagaaaucguguaucugaccaacacaaccauugagaaagaaaucugcccuaagcucgcugaguaccggaauugguccaaaccccagugugacauuacgggguucgccccuuuuucuaaggauaacagcauccgccuguccgcgggaggcgacaucugggugaccagagagcccuaugucucuugcgauccugacaaguguuaccaauucgcucuugggcagggaacaacccugaauaacgugcauagcaaugauacaguucgggaccgcaccccguauagaacgcuccugaugaacgaacugggcgugcccuuucaccucgggacaaaacaggucugcauugccugguccucuagcuccugucaugauggaaaggccuggcugcacgugugcaucaccggcgacgauaaaaaugcuacagccagcuucauuuacaacggccggcuuguugacucuguggucuccuggagcaaggagauccugcgcacccaggaaucugagugugugugcauuaaugggaccuguacaguggucaugacggauggauccgcuagcggcaaagccgacaccaagauccucuuuaucgaggaagggaagauuguucauacauccacccugucuggaagcgcgcaacacguggaggaaugcuccugcuauccuagauaccccggcgugcggugugucugccgcgauaacuggaaagggagcaacagaccuaucguggacauuaauaucaaggaccacucuauuguuuccagcuacguguguucuggacuugucggcgauacaccccggaaaaacgacagcuccucuagcucccauugccuggauccgaauaacgaggaaggcgggcacggagugaagggcugggccuucgacgaugggaaugacguuuggaugggacgcaccaucagcgagaaaucuagacucggcuaugagacguuuaaggugaucgaagggugguccaacccuaaaagcaagcugcagauuaaucggcaggucaucguggaucgcggaaacagaucuggcuacuccggcauuuucagcgucgaggggaaguccuguaucaaucggugcuuuuauguggaacugauuagaggacgcaaagaggaaacagagguucucuggaccucuaacagcaucguggucuucuguggcaccuccgggacauacggaaccggcucuuggcccgacggggcugauauuaaucugaugccuaucuga

SEQ ID NO: 209326 - RNA, 1410 nt, Artificial Sequence; identical to SEQ ID NO: 208584
  derived and/or modified CDS sequence (opt5) from neuraminidase__InfluenzaA__ACU80669

SEQ ID NO: 209327 - RNA, 1410 nt, Artificial Sequence; identical to SEQ ID NO: 208671
  derived and/or modified CDS sequence (opt5) from neuraminidase__InfluenzaA__ACU80691

SEQ ID NO: 209328 - RNA, 1410 nt, Artificial Sequence; identical to SEQ ID NO: 208675
  derived and/or modified CDS sequence (opt5) from neuraminidase__InfluenzaA__ACU80702

SEQ ID NO: 209329 - RNA, 1410 nt, Artificial Sequence; identical to SEQ ID NO: 208675
  derived and/or modified CDS sequence (opt5) from neuraminidase__InfluenzaA__ACU80713

SEQ ID NO: 209330 - RNA, 1410 nt, Artificial Sequence; identical to SEQ ID NO: 208671
  derived and/or modified CDS sequence (opt5) from neuraminidase__InfluenzaA__ACU80724

SEQ ID NO: 209331 - RNA, 1410 nt, Artificial Sequence; identical to SEQ ID NO: 208584
  derived and/or modified CDS sequence (opt5) from neuraminidase__InfluenzaA__ACU80735

SEQ ID NO: 209332 - RNA, 1410 nt, Artificial Sequence; identical to SEQ ID NO: 208671
  derived and/or modified CDS sequence (opt5) from neuraminidase__InfluenzaA__ACU80746

SEQ ID NO: 209333 - RNA, 1410 nt, Artificial Sequence
  derived and/or modified CDS sequence (opt5) from neuraminidase__InfluenzaA__ACU80757
augaaccccaaucagaagaucauuaccaucggcagcgugucccugacaauuucuacgaucugcuucuuuaugcaaauugccauccucaucaccacagucacccugcacuucaaacaguacgaguuuaacagcccuccgaauaaccagguuaugcuuugugaacccacaauuaucgagagaaauauuaccgaagugguguaucugacaaacaccacgaucgagaaggaaauuugcccuaaacucgcugaguaccggaauugguccaagccccagugugacaucaccggguucgccccuuuuucuaaagauaacagcauucgccuguccgcgggaggcgacaucugggucacaagagagcccuaugugucuugcgauccugacaaguguuaccaauucgcucuugggcagggaaccacacugaauaacguucauagcaaugauaccgugcgggaccgcacgccguauagaacacuccugaugaacgaacugggcguccccuuucaccucgggaccaaacaggugugcaucgccugguccucuagcuccugucaugauggaaaggccuggcugcacguuugcauuacaggcgacgauaagaaugcuaccgccagcuucaucuacaacggccggcuuguggacucugucguguccuggagcaaagagauucugcgcacccaggaaucugagugugugugcaucaaugggacauguacggucguuaugaccgauggauccgcuagcggcaaggccgacacaaaaauucucuuuaucgaggaagggaagaucgugcauaccuccacacugucuggaagcgcgcaacacguggaggaaugcuccugcuauccuagauaccccggcguccggugugugugccgcgauaacuggaaggggagcaacagaccuauuguugacaucaauauuaaagaccacucuaucguguccagcuacgucuguucuggacuugugggcgauacgccccggaagaacgacagcuccucuagcucccauugccuggauccgaauaacgaggaaggcgggcacggaguuaaaggcugggccuucgacgaugggaaugacguguggaugggacgcaccauuagcgagaagucuagacucggcuaugagacauuuaaagucaucgaagggugguccaacccuaagagcaaacugcagaucaaucgccaggugauugucgaucggggaaacagaucuggcuacuccggcaucuucagcguggaggggaaguccuguauuaaucggugcuuuuauguugaacugaucagaggacgcaaggaggaaaccgaggugcucuggaccucuaacagcauugucguguucuguggcacauccgggaccuacggaacaggcucuuggcccgacggggcugauaucaaucugaugccuauuuga

SEQ ID NO: 209334 - RNA, 1410 nt, Artificial Sequence; identical to SEQ ID NO: 209299
  derived and/or modified CDS sequence (opt5) from neuraminidase__InfluenzaA__ACU80768

SEQ ID NO: 209335 - RNA, 1410 nt, Artificial Sequence; identical to SEQ ID NO: 208671
  derived and/or modified CDS sequence (opt5) from neuraminidase__InfluenzaA__ACU80779

SEQ ID NO: 209336 - RNA, 1410 nt, Artificial Sequence; identical to SEQ ID NO: 208584
  derived and/or modified CDS sequence (opt5) from neuraminidase__InfluenzaA__ACU80790

SEQ ID NO: 209337 - RNA, 1410 nt, Artificial Sequence; identical to SEQ ID NO: 208671
  derived and/or modified CDS sequence (opt5) from neuraminidase__InfluenzaA__ACU80801

SEQ ID NO: 209338 - RNA, 1410 nt, Artificial Sequence
  derived and/or modified CDS sequence (opt5) from neuraminidase__InfluenzaA__ACU81106
augaaccccaaucagaagaucauuaccaucggcagcgugucccugacaauuucuacgaucugcuucuuuaugcaaauugccauccucaucaccacagucacccugcacuucaaacaguacgaguuuaacagcccuccgaauaaccagguuaugcuuugugaacccacaauuaucgagagaaauauuaccgaaaucguguaucugacaaacaccacgauugagaaggaaaucugcccuaaacucgcugaguaccggaauugguccaagccccagugugacauuaccggguucgccccuuuuucuaaagauaacagcauccgccuguccgcgggaggcgacaucugggugacaagagagcccuaugucucuugcgauccugacaaguguuaccaauucgcucuugggcagggaaccacacugaauaacgugcauagcaauaacaccguucgggaucgcacgccguauagaacacuccugaugaaugaacugggcgugcccuuucaccucgggaccaagcaggucugcauugccugguccucuagcuccugucaugacggaaaagccuggcugcacgugugcaucacaggcgaugacaagaacgcuaccgccagcuucauuuacaauggccggcuuguugauucuguggucuccuggagcaaagagauccugcgcacccaggaaucugagugugugugcauuaacgggacauguacgguggucaugaccgacggauccgcuagcggcaaggccgauacaaaaauccucuuuaucgaggaagggaagauuguucauaccuccacacugucuggaagcgcgcaacacguggaggaaugcuccugcuauccuagauaccccggcgugcggugugucugccgcgacaacuggaaggggagcaauagaccuaucguggauauuaacaucaaagaccacucuauuguuuccagcuacguguguucuggacuugucggcgacacgccccggaagaaugauagcuccucuagcucccauugccuggacccgaacaaugaggaaggcgggcacggagugaaaggcugggccuucgaugacgggaacgauguuuggaugggacgcaccaucagcgagaagucuagacucggcuaugagacauuuaaagugaucgaagggugguccaauccuaagagcaaacugcagauuaaccggcaggucaucguggaccgcggaaauucuuccggcuacagcggcauuuucuccgucgaggggaagucuuguaucaacagaugcuuuuauguggaacugauucggggaagaaaggaggaaaccgagguucucuggaccagcaauuccaucguggucuucuguggcacaucugggaccuacggaacaggcagcuggcccgauggggcugacauuaaccugaugccuaucuga

SEQ ID NO: 209339 - RNA, 1410 nt, Artificial Sequence; identical to SEQ ID NO: 208965
  derived and/or modified CDS sequence (opt5) from neuraminidase__InfluenzaA__ACU87265

SEQ ID NO: 209340 - RNA, 1410 nt, Artificial Sequence; identical to SEQ ID NO: 208810
  derived and/or modified CDS sequence (opt5) from neuraminidase__InfluenzaA__ACU87273

SEQ ID NO: 209341 - RNA, 1410 nt, Artificial Sequence; identical to SEQ ID NO: 208810
  derived and/or modified CDS sequence (opt5) from neuraminidase__InfluenzaA__ACV04231

SEQ ID NO: 209342 - RNA, 1410 nt, Artificial Sequence; identical to SEQ ID NO: 208810
  derived and/or modified CDS sequence (opt5) from neuraminidase__InfluenzaA__ACV04241

SEQ ID NO: 209343 - RNA, 1410 nt, Artificial Sequence; identical to SEQ ID NO: 208810
  derived and/or modified CDS sequence (opt5) from neuraminidase__InfluenzaA__ACV04251

SEQ ID NO: 209344 - RNA, 1410 nt, Artificial Sequence; identical to SEQ ID NO: 208810
  derived and/or modified CDS sequence (opt5) from neuraminidase__InfluenzaA__ACV04261

SEQ ID NO: 209345 - RNA, 1410 nt, Artificial Sequence; identical to SEQ ID NO: 208810
  derived and/or modified CDS sequence (opt5) from neuraminidase__InfluenzaA__ACV04271

SEQ ID NO: 209346 - RNA, 1410 nt, Artificial Sequence
  derived and/or modified CDS sequence (opt5) from neuraminidase__InfluenzaA__ACV04281
augaaccccaaucagaagaucauuaccaucggcagcgugugcaugacaauugggauggccaaccugauccuccaaauuggaaauaucaucuccauuuggaucucucacagcauucagcugggcaaccagaaucagaucgagacguguaaccaauccgucauuaccuacgaaaauaacacauggguuaaucagaccuaugugaacaucgggaauacaaacuucgcugccggacagucuguggucagcgugaaacuugcgggcaauuccucucugugcccuguuagcgggugggcuauuuacuccaaggacaacagcaucagaaucggaucuaaaggcgauguguuugucauucgggagccguucaucuccuguagcccccucgaaugccgcaccuuuuuccugacacagggcgcccuucugaaugacaagcauucuaacgggaccauuaaagauagauccccuuaucggacgcucaugagcugucccaucggagaggugccuucucccuacaacucccgcuuugaaagcguugccugguccgcuucugccugccacgacggcauuaauuggcugaccaucgggaucagcggaccugauaacggcgcuguggccguccugaaguauaaugggauuaucacagacaccauuaaguccuggagaaacaauauccuccggacacaagagagcgagugugcgugcgugaacggaucuuguuucaccgugaugacggauggcccguccgacggccaggccagcuacaaaauuuuucgcaucgaaaaggggaaaaucgucaagucuguugagaugaaugcucccaacuaucauuacgaagagugcagcuguuacccugauuccucugagauuacaugcgugugcagagacaauuggcacggaagcaaccggcccuggguguccuucaaucagaaccuggaauaucagaucggcuacauuuguagcgggaucuuuggagauaauccucgccccaacgacaaaaccggcucuugcgggccggucuccagcaauggagccaacggcgugaagggcuucucuuuuaaguaugggaacggaguuuggauuggcagaacaaaauccaucagcucccggaauggguucgagaugauuugggauccuaacggauggaccggcaccgacaauaacuuuucuaucaagcaagacaucguggggauuaaugaauggagcggcuacuccggaucuuucguccagcaucccgagcuuacaggccuggauuguauccgcccuugcuucuggguggaacucauuagagggcggcccaaagagaacacgaucuggaccagcggauccagcauuucuuuuuguggcguuaauuccgacacagugggguggagcuggcccgauggagcugagcugccuuucaccaucgacaaguga

SEQ ID NO: 209347 - RNA, 1410 nt, Artificial Sequence; identical to SEQ ID NO: 208810
  derived and/or modified CDS sequence (opt5) from neuraminidase__InfluenzaA__ACV04291

SEQ ID NO: 209348 - RNA, 1410 nt, Artificial Sequence; identical to SEQ ID NO: 208810
  derived and/or modified CDS sequence (opt5) from neuraminidase__InfluenzaA__ACV04301

SEQ ID NO: 209349 - RNA, 1410 nt, Artificial Sequence; identical to SEQ ID NO: 208810
  derived and/or modified CDS sequence (opt5) from neuraminidase__InfluenzaA__ACV04321

SEQ ID NO: 209350 - RNA, 1410 nt, Artificial Sequence; identical to SEQ ID NO: 208810
  derived and/or modified CDS sequence (opt5) from neuraminidase__InfluenzaA__ACV04331

SEQ ID NO: 209351 - RNA, 1410 nt, Artificial Sequence; identical to SEQ ID NO: 208810
  derived and/or modified CDS sequence (opt5) from neuraminidase__InfluenzaA__ACV04341

SEQ ID NO: 209352 - RNA, 1410 nt, Artificial Sequence; identical to SEQ ID NO: 208810
  derived and/or modified CDS sequence (opt5) from neuraminidase__InfluenzaA__ACV04351

SEQ ID NO: 209353 - RNA, 1410 nt, Artificial Sequence; identical to SEQ ID NO: 208810
  derived and/or modified CDS sequence (opt5) from neuraminidase__InfluenzaA__ACV04361

SEQ ID NO: 209354 - RNA, 1410 nt, Artificial Sequence; identical to SEQ ID NO: 208810
  derived and/or modified CDS sequence (opt5) from neuraminidase__InfluenzaA__ACV04371

SEQ ID NO: 209355 - RNA, 1410 nt, Artificial Sequence; identical to SEQ ID NO: 208810
  derived and/or modified CDS sequence (opt5) from neuraminidase__InfluenzaA__ACV04381

SEQ ID NO: 209356 - RNA, 1410 nt, Artificial Sequence; identical to SEQ ID NO: 208810
  derived and/or modified CDS sequence (opt5) from neuraminidase__InfluenzaA__ACV04391

SEQ ID NO: 209357 - RNA, 1410 nt, Artificial Sequence; identical to SEQ ID NO: 208810
  derived and/or modified CDS sequence (opt5) from neuraminidase__InfluenzaA__ACV04401

SEQ ID NO: 209358 - RNA, 1410 nt, Artificial Sequence; identical to SEQ ID NO: 208800
  derived and/or modified CDS sequence (opt5) from neuraminidase__InfluenzaA__ACV04411

SEQ ID NO: 209359 - RNA, 1410 nt, Artificial Sequence; identical to SEQ ID NO: 208810
  derived and/or modified CDS sequence (opt5) from neuraminidase__InfluenzaA__ACV04492

SEQ ID NO: 209360 - RNA, 1410 nt, Artificial Sequence; identical to SEQ ID NO: 208810
  derived and/or modified CDS sequence (opt5) from neuraminidase__InfluenzaA__ACV04502

SEQ ID NO: 209361 - RNA, 1410 nt, Artificial Sequence; identical to SEQ ID NO: 208800
  derived and/or modified CDS sequence (opt5) from neuraminidase__InfluenzaA__ACV04512

SEQ ID NO: 209362 - RNA, 1410 nt, Artificial Sequence
  derived and/or modified CDS sequence (opt5) from neuraminidase__InfluenzaA__ACV04522
augaaccccaaucagaagaucauuaccaucggcagcgugugcaugacaauugggauggccaaccugauccuccaaauuggaaauaucaucuccauuuggaucucucacagcauucagcugggcaaccagaaucagaucgagacguguaaccaauccgucauuaccuacgaaaauaacacauggguuaaucagaccuaugugaacaucucuaauacaaacuucgcugccgggaaaagcguggucuccgugaaacuugcgggaaauucuagccugugcccuguuuccggcugggcuauuuacagcaaggacaacucuaucagaaucggguccaagggagauguguuugucauucgggagccguucaucagcuguucuccccucgaaugccgcaccuuuuuccugacacagggcgcccuucugaaugacaaacauuccaacggcaccauuaaggauagaagcccuuaucggacgcucaugucuugucccaucggggaggugccuucccccuacaacagccgcuuugaauccguugccuggucugcuagcgccugccacgacggaauuaauuggcugaccaucggcaucuccgggccugauaacggagcuguggccguccugaaguauaauggcauuaucacagacaccauuaaaagcuggagaaacaauauccuccggacacaggagucugagugugcgugcgugaacggguccuguuucaccgugaugacggauggaccgagcgacggccaagccucuuacaagauuuuucgcaucgaaaaaggcaagaucgucaaaagcguugagaugaaugcucccaacuaucauuacgaagagugcuccuguuacccugauucuagcgagauuacaugcgugugcagagacaauuggcacggguccaaccggcccugggugagcuucaaucagaaccuggaauaucagaucggauacauuuguucuggcaucuuuggggauaauccucgccccaacgacaagaccggauccugcggcccggucagcucuaauggggccaacggagugaagggcuucuccuuuaaauauggcaacgggguuuggauuggaagaacaaagagcaucuccucucggaauggcuucgagaugauuugggauccuaacggguggaccggaaccgacaauaacuuuagcaucaaacaggacaucgugggcauuaaugaaugguccggguacucuggcagcuucguccaacaucccgagcuuacaggacuggauuguauccgcccuugcuucuggguggaacucauuagaggccggcccaaggagaacacgaucuggaccuccgggagcucuauuuccuuuuguggaguuaauagcgacacagugggcuggucuuggcccgauggggcugagcugccuuucaccaucgacaaauga

SEQ ID NO: 209363 - RNA, 1410 nt, Artificial Sequence; identical to SEQ ID NO: 208810
  derived and/or modified CDS sequence (opt5) from neuraminidase__InfluenzaA__ACV04532

SEQ ID NO: 209364 - RNA, 1410 nt, Artificial Sequence; identical to SEQ ID NO: 208810
  derived and/or modified CDS sequence (opt5) from neuraminidase__InfluenzaA__ACV04542

SEQ ID NO: 209365 - RNA, 1410 nt, Artificial Sequence; identical to SEQ ID NO: 208810
  derived and/or modified CDS sequence (opt5) from neuraminidase__InfluenzaA__ACV04552

SEQ ID NO: 209366 - RNA, 1410 nt, Artificial Sequence; identical to SEQ ID NO: 208810
  derived and/or modified CDS sequence (opt5) from neuraminidase__InfluenzaA__ACV04562

SEQ ID NO: 209367 - RNA, 1410 nt, Artificial Sequence; identical to SEQ ID NO: 208800
  derived and/or modified CDS sequence (opt5) from neuraminidase__InfluenzaA__ACV04572

SEQ ID NO: 209368 - RNA, 1410 nt, Artificial Sequence; identical to SEQ ID NO: 208810
  derived and/or modified CDS sequence (opt5) from neuraminidase__InfluenzaA__ACV04582

SEQ ID NO: 209369 - RNA, 1410 nt, Artificial Sequence
  derived and/or modified CDS sequence (opt5) from neuraminidase__InfluenzaA__ACV04758
augaaccccaaucagaagaucauuaccaucggcagcgugugcaugacaauugggauggccaaccugauccuccaaauuggaaauaucaucuccauuuggaucucucacagcauucagcugggcaaccagaaucagaucgagacguguaaccaauccgucauuaccuacgaaaauaacacauggguuaaucagaccuaugugaacaucucuaauacaaacuucgcugccgggcagagcguggucuccgugaaacuugcgggaaauucuagccugugcccuguuuccggcugggcuauuuacagcaaggacaacucuaucagaaucggguccaaaggagauguguuugucauucgggagccguucaucagcuguucucccuccgaaugccgcaccuuuuuccucacacagggcgcccugcuuaaugacaagcauagcaacggcaccauuaaagauagaucuccuuaucggacgcugauguccugucccaucggggaggugccuagccccuacaacucccgcuuugaaucuguugccuggagcgcuuccgccugccacgacggaauuaauuggcucaccaucggcaucagcgggccugauaacggagcuguggccguccugaaguauaauggcauuaucacagacaccauuaagucuuggagaaacaauauccugcggacacaagaguccgagugugcgugcgugaacgggagcuguuucaccgugaugacggauggaccgucuaauggccaggccagcuacaaaauuuuucgcaucgaaaagggcaaaaucgucaaguccguugagaugaacgcucccaauuaucauuacgaagagugcucuuguuacccugacagcuccgagauuacaugcgugugcagagauaacuggcacgggagcaaucggcccugggugucuuucaaccagaaucucgaauaucagaucggauacauuuguuccggcaucuuuggggacaacccucgccccaaugauaaaaccggaagcugcggcccggucucuuccaacggggccaacggagugaagggcuucagcuuuaaguauggcaaugggguuuggauuggaagaacaaaauccaucucuagccggaacggcuucgagaugauuugggacccuaauggguggaccggaaccgauaacaauuuuuccaucaagcaagacaucgugggcauuaacgaauggucuggguacagcggcuccuucguccagcaucccgagcugacaggacuugacuguauccgcccuugcuucuggguggaacugauuagaggccggcccaaagagaauacgaucuggaccagcgggucuuccauuagcuuuuguggaguuaacucugauacagugggcugguccuggcccgacggggcugagcucccuuucaccaucgauaaguga

SEQ ID NO: 209370 - RNA, 1410 nt, Artificial Sequence; identical to SEQ ID NO: 208800
  derived and/or modified CDS sequence (opt5) from neuraminidase__InfluenzaA__ACV33087

SEQ ID NO: 209371 - RNA, 1410 nt, Artificial Sequence; identical to SEQ ID NO: 208810
  derived and/or modified CDS sequence (opt5) from neuraminidase__InfluenzaA__ACV33107

SEQ ID NO: 209372 - RNA, 1410 nt, Artificial Sequence; identical to SEQ ID NO: 208810
  derived and/or modified CDS sequence (opt5) from neuraminidase__InfluenzaA__ACV33117

SEQ ID NO: 209373 - RNA, 1410 nt, Artificial Sequence; identical to SEQ ID NO: 208810
  derived and/or modified CDS sequence (opt5) from neuraminidase__InfluenzaA__ACV33127

SEQ ID NO: 209374 - RNA, 1410 nt, Artificial Sequence; identical to SEQ ID NO: 208810
  derived and/or modified CDS sequence (opt5) from neuraminidase__InfluenzaA__ACV33137

SEQ ID NO: 209375 - RNA, 1410 nt, Artificial Sequence; identical to SEQ ID NO: 208810
  derived and/or modified CDS sequence (opt5) from neuraminidase__InfluenzaA__ACV33147

SEQ ID NO: 209376 - RNA, 1410 nt, Artificial Sequence
  derived and/or modified CDS sequence (opt5) from neuraminidase__InfluenzaA__ACV33157
augaaccccaaucagaagaucauuaccaucggcagcgugugcaugacaauugggauggccaaccugauccuccaaauuggaaauaucaucuccauuuggaucucucacagcauucagcugggcaaccagaaucagaucgagacguguaaccaauccgucauuaccuacgaaaauaacacauggguuaaucagaccuaugugaacaucucuaauacaaacuucgcugccgggcagagcguggucuccgugaaacuugcgggaaauucuagccugugcccuguuuccggcugggcuauuuacagcaaggacaacucuaucagaaucggguccaaaggagauguguuugucauucgggagccguucaucagcuguucuccccucgaaugccgcaccuuuuuccugacacagggcgcccuucugaaugacaagcauuccaacggcaccauuaaagauagaagcccuuaucggacgcucaugucuugucccgugggggagguuccuucccccuacaacagccgcuuugaauccguggccuggucugcuagcgccugccacgacggaaucaauuggcugaccauuggcaucuccgggccugauaacggagcugucgccgugcugaaguauaauggcaucauuacagacaccaucaagagcuggagaaacaauauucuccggacacaagagucugagugugcgugcgugaacggguccuguuucaccgucaugacggauggaccgagcgacggccaggccucuuacaaaaucuuucgcauugaaaagggcaaaaucguuaagagcguggagaugaaugcucccaacuaucauuacgaagagugcuccuguuacccugauucuagcgagaucacaugcgugugcagagacaauuggcacggguccaaccggcccugggucagcuucaaucagaaccuggaauaucagauuggauacaucuguucuggcauuuuuggggauaauccucgccccaacgacaaaaccggauccugcggcccggugagcucuaauggggccaacggaguuaagggcuucuccuuuaaguauggcaacgggguguggaucggaagaacaaaaagcauuuccucucggaauggcuucgagaugaucugggauccuaacggguggaccggaaccgacaauaacuuuagcauuaagcaagacaucgucggcaucaaugaaugguccggguacucuggcagcuucgugcagcaucccgagcuuacaggacuggauuguauucgcccuugcuucuggguugaacucaucagaggccggcccaaagagaacacgauuuggaccuccgggagcucuaucuccuuuuguggagugaauagcgacacagucggcuggucuuggcccgauggggcugagcugccuuucaccauugacaaguga

SEQ ID NO: 209377 - RNA, 1410 nt, Artificial Sequence
  derived and/or modified CDS sequence (opt5) from neuraminidase__InfluenzaA__ACV33167
augaaccccaaucagaagaucauuaccaucggcagcgugugcaugacaauugggauggccaaccugauccuccaaauuggaaauaucaucuccauuuggaucucucacagcauucagcugggcaaccagaaucagaucgagacguguaaccaauccgucauuaccuacgaaaauaacacauggguuaaucagaccuaugugaacaucucuaauacaaacuucgcugccgggcagagcguggucuccgugaaacuugcgggaaauucuagccugugcccuguuuccggcugggcuauuuacagcaaggacaacucuaucagaaucggguccaaaggagauguguuugucauucgggagccguucaucagcuguucuccccucgaaugccgcaccuuuuuccugacacagggcgcccuucugaaugacaagcauuccaacggcaccauuaaagauagaagcccuuaucggacgcucaugucuugucccaucggggaggugccuucccccuacaacagccgcuuugaauccguugccuggucugcuagcgccugccacgacggaauuaauuggcugaccaucggcaucuccgggccugauaacggagcuguggccguccugaaguauaauggcauuaucacagacaccauuaagagcuggagaaacaauauccuccggacacaagagucugagugugcgugcgugaacggguccuguuucaccgugaugacggauggaccgagcgacggccaggccucuuacaaaauuuuucgcaucgaaaagggcaaaaucgucaagagcguugagaugaaugcucccaacuaucauuacgaagagugcuccuguuacccugauucuagcgagauuacaugcgugugcagagacaauuggcacggguccaaccggcccugggugagcuucaaucagaaccuggaauaucagaucggauacauuuguucuggcaucuuuggggauaauccucgccccaacgacaaaaccggauccugcggcccggucagcucuaauggggccaacggagugaagggcuucuccuuuaaguauggcaacgggguuuggauuggaagaacaaaaagcaucuccucucggaauggcuucgagaugauuugggauccuaacggguggaccggaaccgacaauaacuuuagcaucaagcaagacaucgugggcauuaaugaaugguccggguacucuggcagcuucguccagcaucccgagcuuacaggacuggauuguauccgcccuugcuucuggguggaacucauuagaggccggcccaaagagaacacgaucuggaccuccgggagcucuauuuccuuuuguggaguuaauagcgacacaguggauuggucuuggcccgacggcgcugagcugccuuucaccaucgauaaguga

SEQ ID NO: 209378 - RNA, 1410 nt, Artificial Sequence; identical to SEQ ID NO: 208810
  derived and/or modified CDS sequence (opt5) from neuraminidase__InfluenzaA__ACV33177

SEQ ID NO: 209379 - RNA, 1410 nt, Artificial Sequence
  derived and/or modified CDS sequence (opt5) from neuraminidase__InfluenzaA__ACV41993
augaaccccaaucagaagaucauuaccaucggcagcgugugcaugacaauugggauggccaaccugauccuccaaauuggaaauaucaucuccauuuggaucucucacagcauucagcugggcaaccagaaucagaucgagauuuguaaccaauccgucaucacguacgaaaauaacaccuggguuaaucagacauaugugaacauuucuaauaccaacuucgcugccgggcagagcguggucuccgugaaacuugcgggaaauucuagccugugcccuguuggcgggugggcuaucuacuccaaggacaacagcgugagaaucggaucuaaaggcgaugucuuugugauucgggagccguucaucuccuguagcccccucgaaugccgcacauuuuuccugacccagggcgcccuucugaaugacaagcauucuaacgggacaauuaaagauagauccccuuaucggacccucaugagcugucccaucggagagguuccuucucccuacaacucccgcuuugaaagcguggccugguccgcuucugccugccacgacggcauuaauuggcugacgaucgggaucagcggaccugauaacggcgcugucgccgugcugaaguauaaugggauuaucaccgacacaauuaaguccuggagaaacaauauccuccggacccaagagagcgagugugcgugcgugaacggaucuuguuucacagucaugaccgauggcccguccaauggccaggccagcuacaaaauuuuucgcaucgaaaaggggaaaaucguuaagucuguggagaugaacgcucccaauuaucauuacgaagagugcagcuguuacccugacuccucugagauuacgugcgugugcagagauaacuggcacggaagcaaucggcccugggucuccuucaaccagaaucuggaauaucagaucggcuacauuuguagcgggaucuuuggagacaacccucgccccaaugauaaaacaggcucuugcgggccgguguccagcaacggagccaacggcguuaagggcuucucuuuuaaguaugggaauggaguguggauuggcagaaccaaauccaucagcucccggaacggguucgagaugauuugggacccuaauggauggacaggcaccgauaacaauuuuucuaucaagcaagacaucgucgggauuaacgaauggagcggcuacuccggaucuuucgugcagcaucccgagcuuaccggccuggacuguauccgcccuugcuucuggguugaacucauuagagggcggcccaaagagaauacaaucuggacgagcggauccagcauuucuuuuuguggcgugaacuccgauaccgucggguggagcuggcccgacggagcugagcugccuuucacaaucgauaaguga

SEQ ID NO: 209380 - RNA, 1410 nt, Artificial Sequence; identical to SEQ ID NO: 208810
  derived and/or modified CDS sequence (opt5) from neuraminidase__InfluenzaA__ACV42010

SEQ ID NO: 209381 - RNA, 1410 nt, Artificial Sequence; identical to SEQ ID NO: 208810
  derived and/or modified CDS sequence (opt5) from neuraminidase__InfluenzaA__ACV42020

SEQ ID NO: 209382 - RNA, 1410 nt, Artificial Sequence; identical to SEQ ID NO: 208575
  derived and/or modified CDS sequence (opt5) from neuraminidase__InfluenzaA__ACV49504

SEQ ID NO: 209383 - RNA, 1362 nt, Artificial Sequence
  derived and/or modified CDS sequence (opt5) from neuraminidase__InfluenzaA__ACV49537
augaaccccaaucagaagaucauuaccaucggcagcauuugcaugguggucgggaucauuucccugauccuccaaaucggaaacauuaucucuauuuggaucagccacuccauucagacaggcaaucagaaccauacggggaucuguaaucagggaauuaucaccuacaacguuguggccggccaagacucuacaagcgugauccugaccggaaauuccucucuuugcccuauuagagggugggcuauccacagcaaagauaacggcauucggaucggcuccaagggggacgucuucgugauucgcgagccguuuaucagcuguucucaucuggaaugcagaacauucuuucucacccagggagcccugcuuaaugauaaacacuccaacggcgcgguuaaggaccggagccccuaucgcgcucugaugucuuguccugugggggaggcccccuccccuuacaauagcagauucgaaucugucgccugguccgcuagcgccugccaugauggaaugggcuggcucacaaucgggauuuccggacccgacaacggcgcuguggccguucugaaauauaauggcaucauuaccgagacgaucaagucuuggcggaagaaaauucugcgcacccaggaaagcgaguguacaugcgugaacggguccuguuuuaccaucaugacagauggaccuagcgacggccucgcgucuuacaagaucuucaaaauugagaaggggaaagucaccaaguccaucgaacugaaugccccgaacagccacuaugaggaaugcucuuguuaccccgauacgggaaaggugaugugcgugugcagagacaacuggcacggcagcaaucggccuugggucuccuuugaucagaaccuugacuaucaaauuggguacaucuguucuggaguuuucggcgauaauccccgcccuaaagacggcacagggagcugcggacccguguccgcugacggcgccaacggggugaagggauuuagcuacagauauggcaauggggucuggauuggccggaccaaaucugauuccagccgccauggauucgagaugaucugggacccgaacggcuggacagagaccgauucuagauuuuccgugcggcaggacguuguggcuaugaccgaucgcagcggguacuccggaucuuucguccagcacccugaacugacaggccucgacuguaugagacccugcuuuuggguggagcugauucgggggagaccugaagagaagacgaucuggaccagcggauccaucauuucuuucuguggcguuaauagcgauacaguggacugguccuggcccgauggggccgaacuucccuucaccaucgacaaauga

SEQ ID NO: 209384 - RNA, 1362 nt, Artificial Sequence
  derived and/or modified CDS sequence (opt5) from neuraminidase__InfluenzaA__ACV49559
augaaccccaaucagaagaucauuaccaucggcagcauuugcaugguggucgggaucauuucccugauccuccaaaucggaaacauuaucucuauuuggaucagccacuccauucaggccggcucuagcacauggguuaaucagacguacgugaacaucuccaauaccaacguggucgcugggcaggacgccacaucugugauucugaccggaaauagcucccuuuguccuaucagaggcugggcgaucuauagcaaagauaacgggauucggaucggaucuaagggcgacauuuucguuauccgcgagccguuuauuuccugcagccaucuggaauguagagcuuucuuucucacacaaggcgcccugcuuaaugauaaacacucuaacgggaccgugaaggaccggucccccuaccgcgcccugaugagcugcccugucggagaggcucccucuccuuauaauuccagauucgaaagcguggccugguccgcuucugccugucaugauggcaugggguggcucacaaucggaaucagcggccccgacaacggggcgguugccgugcugaaauacaauggaauuaucaccgagacgauuaaguccuggcggaagaaaauccugcgcacccaggaaagcgagugcgcuugugucaacggcucuugcuuuacaauuaugaccgauggcccuuccgacgggccggccagcuauaagaucuucaaaaucgagaagggaaaagugacaaagucuauugaacucgaugcucccaauagccacuacgaggaauguuccugcuauccugacaccggcaaggugaugugugucugcagagauaacuggcaugggucuaaccggcccuggguuagcuuugaccagaaucuggauuaccagaucggauacauuugcuccggcguguucggggacacgccucgccccaaagacggaacaggcagcuguggcccggugucugucgauggggccaacggagugaagggcuuuuccuauagauacggggacggaguuuggaucggccggaccaaaagccaaucuucccgccacggguucgagaugauuugggauccuaauggcuggacagagaccgacagcagauuuuccgugcggcaggaugucguggcgaucaccgacuggucuggauauagcggcuccuucguucagcaccccgaacuuacagggcuggauugcaugcgcccuuguuuuuggguggagcucauuagaggacagcccaaggagaaaacgaucuggaccucuggcagcuccaucagcuucugcggggucaacucugacacaguggauugguccuggcccgacggagccgaacugccuuucaccauugauaaguga

SEQ ID NO: 209385 - RNA, 1395 nt, Artificial Sequence
  derived and/or modified CDS sequence (opt5) from neuraminidase__InfluenzaA__ACV49570
augaaccccaaucagaagaucauuaccaucggcagcauuugcaugguggucgggaucauuucccugauccuccaaaucggaaacauuguuucuaucuggauuagccacuccauccagacaggcaaucagaaccauacggggaccugugaccagucuauuaucacauacaaaaauagcaccugggugaaccaaacauaugugaaugucguggccggaaaggauaccacauccguuauucuggcuggcaacucuagccuuugcccuaucagagggugggccaucuacuccaaagacaauggagugcggauuggcagcaagggcgaugucuucgugauccgcgagccguuuauuucuuguucccaccuggaaugcagaaccuucuuucucacgcagggggcgcugcuuaacgacaaacauagcaauggaaccguuaaggaucggucucccuaucgcgcucugauguccuguccugugggcgaggcccccagcccuuacaacucuagauucgaauccgucgccuggagcgcuuccgccugccacgacgggaugggauggcucacaaucggcauuucugggcccgaugacggagcuguggccgugcugaaguauaauggcaucaucaccgagacaauuaaaagcuggcggaaggaaauccugcgcacccaggaguccgagugugucugcguuaacggcagcuguuuuacgauuaugacagaugggccuucuggaggcccggcguccuacaaaaucuucaagauugaaaaagggaaggugaccaagagcaucgagcucgacgcccccaauucucauuaugaagagugcagcuguuacccugauacauccaaagugaugugcgucugcagagacaacuggcacggaucuaaccggcccugggugagcuuugaucagaaucuggacuaccaaaugggcuauaucuguuccgggguuuucggagacaacccucgccccaaggauggcaaaggcagcugcgggccgguguacgucgacggagcuaauggcgugaagggguuuucuuauaaauacggaaacggcguuuggauugggagaaccaaguccaauagcucucggcagggcuucgagaugaucugggauccuaacggauggaccgaaacagacuccaacuuuuucacgaaacaggauguggucgccgugaccgacuggagcggcuauuccgggucuuuuguccagcaccccgagcuuacaggacuggauuguaugcgcccuugcuucuggguggaacucauuagaggccggcccaaggagaauaccaucuggacaagcggguccucuauuagcuucuguggaguuaauuccgacaccguggauuggagcuggcccgacggcgcugaacugccuuuuacgaucgauaaguga

SEQ ID NO: 209386 - RNA, 1410 nt, Artificial Sequence; identical to SEQ ID NO: 208476
  derived and/or modified CDS sequence (opt5) from neuraminidase__InfluenzaA__ACV49581

SEQ ID NO: 209387 - RNA, 1410 nt, Artificial Sequence; identical to SEQ ID NO: 208476
  derived and/or modified CDS sequence (opt5) from neuraminidase__InfluenzaA__ACV49592

SEQ ID NO: 209388 - RNA, 1410 nt, Artificial Sequence
  derived and/or modified CDS sequence (opt5) from neuraminidase__InfluenzaA__ACV49603
augaaccccaaucagaagaucauuaccaucggcagcgugucccugacaauugagacggucugcuuccucaugcaaaucgccauucuggcuaccacaguuacccuucacuuuaaacagcaugaaugugacucuccugccagcaaccaggugaugccgugcgagcccaucaucauugaaagaaauaucacagagauuguguaccugaacaauaccacaaucgaaaaggagauuuguccugaggucguggaauaucggaacugguccaaaccccagugccaaaucaccggguucgcgccuuuuucuaaggauaauagcauucgccucuccgcuggaggcgacaucuggguuacgagagagcccuacgugucuugugauccugggaaaugcuaucaguucgcccugggacagggcaccacacuugacaacaagcacagcaaugggaccauccaugaucggauuccgcaccgcacacugcucaugaacgaacugggaguccccuuucaucugggcaccaaacagguguguguugccugguccucuagcuccugccacgacggcaaggcuuggcuccacgugugugucacgggggaugacagaaaugccacagcuagcuucaucuacgauggacggcugguggacucuauuggcuccuggagccaaaacauccuucgcacccaggagucugagugcguguguauuaaugggacaugcaccgucguuaugaccgauggauccgccagcggcagagcggacacacggauccuguuuaucaaggaagggaaaauugugcauaucuccccucucucuggaagcgcccagcacauugaggaaugcuccuguuauccccgcuacccugaugugagaugcaucugucgggacaacuggaagggcagcaaucgccccgucauugacaucaacauggaggauuauucuaucgacuccagcuacgugugcucuggccugguuggggauacgccgagaaacgacgauagcuccucuaauagcaacugucgggacccuaauaacgaacgcggaaaucccggcgugaaagggugggcuuucgauaacggagacgaugucuggaugggcagaaccauuuccaaggacagccggucuggguacgagacauuuaaggugaucggaggcugguccaccccuaauagcaaaucucagguuaacagacaagugauugucgauaauaacaauugguccggcuauagcgggaucuucuccguggagggaaagucuugcauuaaccgcuguuuuuacgucgaacuuauccggggcagaccccaggagacacgcgugugguggaccagcaauuccauuguuguguucugcgggacgucuggaacauauggcaccgggagcuggcccgacggcgccaacaucaauuuuaugccuaucuga

SEQ ID NO: 209389 - RNA, 1410 nt, Artificial Sequence
  derived and/or modified CDS sequence (opt5) from neuraminidase__InfluenzaA__ACV49625
augaaccccaaucagaagaccaucacaauuggcagcgugucccugacgaucgagaccgucugcuuccucaugcaaauugccauccuggcuacaaccguuacacuucacuuuaaacagcaugaaugugacucuccugccagcaaccaggugaugccgugcgagcccauuaucaucgaaagaaauauuaccgagaucguguaccugaacaauacaaccauugaaaaggagaucuguccugaggucguggaauaucggaacugguccaaaccccagugccaaauuacgggguucgcgccuuuuucuaaggauaauagcauccgccucuccgcuggaggcgacauuuggguuaccagagggcccuacgugucuugugauccuggaaaaugcuaucaguucgcccugggccaggggacaacccuugacaacaagcacagcaauggaacaauccaugaucggaucccgcaccgcacccugcucaugaacgagcugggcguccccuuucaucugggcacgaaacagguguguguugccugguccucuagcuccugccacgacgggaaggcuuggcuccacgugugugucacaggagaugacagaaaugccaccgcuagcuucauuuacgauggccggcugguggacucuaucggguccuggagccaaaacauucuucgcacacaggaaucugagugcguguguaucaauggaaccugcaccgucguuaugacagauggcuccgccagcgggagagcggacacgcggauucuguuuaucaaggagggaaaaaucgugcauauuuccccucucucuggcagcgcccagcacaucgaagagugcuccuguuauccccgcuacccugaugugagaugcauuugucgggacaacuggaagggcagcaaucgccccgucaucgacauuaacauggaagauuauucuaucgacuccagcuacgugugcucugggcugguuggagauaccccgagaaacgacgauagcuccucuaauagcaacugucgggacccuaauaacgagcgcggcaaucccggggugaaaggaugggcuuucgauaacggcgacgaugucuggauggggagaacaaucuccaaggacagccggucuggauacgaaaccuuuaaggugauuggcggcugguccacaccuaauagcaaaucucagguuaacagacaagugaucgucgauaauaacaauugguccggguauagcggaauuuucuccguggagggcaagucuugcaucaaccgcuguuuuuacgucgagcuuauucgggggagaccccaggaaacccgcgugugguggacgagcaauuccaucguuguguucugcggaacaucuggcaccuaugggaccggcagcuggcccgacggagccaacauuaauuuuaugccuaucuga

SEQ ID NO: 209390 - RNA, 1410 nt, Artificial Sequence; identical to SEQ ID NO: 208528
  derived and/or modified CDS sequence (opt5) from neuraminidase__InfluenzaA__ACV49647

SEQ ID NO: 209391 - RNA, 1413 nt, Artificial Sequence
  derived and/or modified CDS sequence (opt5) from neuraminidase__InfluenzaA__ACV49669
augaaccccaaucagaagaucauuaccaucggcagcauuugcauggccaucgggauuaucucccugauccuccaaauuggaaacaucgugucuauuuggaucagccacuccauucagacaggcucucagaauuacacggggaucuguaaccagagaauuaucaccuaugagaauagcacaugggucaaccaaaccuacguuaauaucaacaauacaaacgugguggcuggacaggacaccacauccgucacccuggccggcaauucuagccuuugcccuauuuccgggugggcgaucuauagcaaagauaacucuauucggaucggauccaagggcgacguguucguuauucgcgaaccguuuaucagcuguucucaucuggagugcagaacguucuuucucacccagggcgcucugcuuaaugauaaacacuccaacgggacagugaaggaccggagccccuaccgcgcccugaugucuuguccuaucggagaagcccccuccccuuauaauagcagauucgaguccgucgcuuggucugccagcgcuugccaugauggcaugggguggcucaccauuggaaucuccggccccgacgauggggccguggcgguucugaaauacaacggaauuaucacagaaaccauuaagagcuggcggaagcgcauccugagaacgcaggagucugagugugugugcgucaacggcuccuguuuuacaaucaugaccgacggcccuaauaacgggccggccagcuauaaaauuuucaagaucgaaaaaggaaagauuacaaaaucuaucgagcucgaugcucccaauagccacuacgaagagugcuccuguuacccugacgccggcaccgugaugugcgugugccgggauaacuggcaugggucuaaucgccccugggucagcuuuaaccaaaaucuggacuaucagauuggauacaucuguuccggcguuuucggggauaacccuagacccaaggacggaaagggcagcugcggcccggugaccguggacggggcugauggagucaaaggcuuuucuuaucgguacgggaauggaguguggauuggccgcacaaaguccaacagcucuagacggggguucgagaugaucugggacccuaauggcuggacggauaccgacuccaaauuucuuguuaagcaggauguggucgccaugacagacuggagcggauauuccggcucuuucgugcagcaccccgaacugaccgggcucgauuguaugcgcccuugcuuuuggguugagcugaucagaggacggcccagagaaaacacaaccauuuggacgagcggcuccucuaucagcuucuguggggugaauggagacacagcgaacugguccuggcccgauggcgccgagcuuccuuucaccauugacaaauga

SEQ ID NO: 209392 - RNA, 1413 nt, Artificial Sequence
  derived and/or modified CDS sequence (opt5) from neuraminidase__InfluenzaA__ACV49679
augaaccccaaucagaagaucauuaccaucggcagcauuuccaucgccauugggaucaucucucugaugcuccaaauuggaagcaucauuuccaucugggcuucucacagcauuagaacaggcucccagaacaauacggggaucugcaaccagcggauuaucaccuacgagaauagcacaugggugaaccauaccuaugucaauaucaacaauacaaacguuguggccggagaagacaaaaccagcgugacacuggcgggcaauuccagccuuuguucuauuuccgggugggcuaucuacaccaaggauaacagcauucgcaucggaucuaaaggcgacgucuucgugauuagagagccuuuuaucuccugcagccaccuggaaugucggacguucuuucucacccagggcgcccugcuuaaugauaagcauucuaacgggacaguuaaagaccgcuccccguauagagcccugaugagcugcccccucggagaggcuccuucccccuacaauucuaaguucgaaagcguggccugguccgcuagcgccugucacgauggcaugggguggcugaccaucggaauuucuggcccugacaacggggcggucgccgugcugaaguauaacggaaucauuacaggcaccaucaaauccuggaagaaacaaauucuccggacgcaggagagcgagugcguuuguaugaauggcucuugcuuuacaaucaugaccgaugggcccagcaacaaggcugccuccuacaaaaucuucaagauugaaaagggaaaagugacaaagucuaucgagcugaaugcuccuaacuuuuauuacgaagaguguagcugcuacccggacaccggcauugucaugugugugugccgcgauaauuggcauggguccaacagacccugggugagcuucaaucagaaccuugacuaucagaucggauacauuugcucuggcgucuuuggggauaauccucggcccgaggacggagaaggcuccuguaacccuguuaccguggauggcgccaauggggugaaaggauucagcuauaaguacggcaacggggucuggaucggacgcacaaaaucuaauagacugcggaagggcuuugagaugauuugggaccccaacggguggacgaauaccgacuccgauuucagcgugaaacaagacguuguggcgaucacagauugguccggcuauucuggaucuuuuguccagcacccggaacucaccggccuggacugcauccgcccuuguuucuggguggagcuuguuagagggcugccccgggaaaacacaaccauuuggacguccggaucuagcaucuccuucugcggcgugaacagcgauacagccaauuggucuuggccugacggggcugagcuccccuuuaccauugauaaguga

SEQ ID NO: 209393 - RNA, 1410 nt, Artificial Sequence
  derived and/or modified CDS sequence (opt5) from neuraminidase__InfluenzaA__ACV53442
augaaccccaaucagaagaucauuaccaucggcagcgugugcaugacaauugggauggccaaccugauccuccaaauuggaaauaucaucuccauuuggaucucucacagcauucagcugggcaaccagaaucagaucgagacguguaaccaauccgucauuaccuacgaaaauaacacauggguuaaucagaccuaugugaacaucucuaauacaaacuucgcugccgggcagagcguggucuccgugaaacuugcgggaaauucuagccugugcccuguuuccggcugggcuauuuacagcaaggacaacucugugagaaucggguccaaaggagaugucuuugugauccgggagccguucauuagcuguucuccccucgaaugccgcaccuuuuuccugacacagggcgcccuucugaaugacaagcauuccaacggcaccaucaaagauagaagcccuuaucggacgcucaugucuugucccauuggggagguuccuucccccuacaacagccgcuuugaauccguggccuggucugcuagcgccugccacgacggaaucaauuggcugaccauuggcaucuccgggccugauaacggagcugucgccgugcugaaguauaauggcaucauuacagacaccaucaagagcuggagaaacaauauucuccggacacaagagucugagugugcgugcgugaacggguccuguuucaccgucaugacggauggaccgagcgacggccaggccucuuacaaaaucuuucgcauugaaaagggcaaaaucguuaagagcguggagaugaaugcucccaacuaucauuacgaagagugcuccuguuacccugauucuagcgagaucacaugcgugugcagagacaauuggcacggguccaaccggcccugggucagcuucaaucagaaccuggaauaucagauuggauacaucuguucuggcauuuuuggggauaauccucgccccaacgacaaaaccggauccugcggcccggugagcucuaauggggccaacggaguuaagggcuucuccuuuaaguauggcaacgggguguggaucggaagaacaaaaagcauuuccucucggaauggcuucgagaugaucugggauccuaacggguggaccggaaccgacaauaacuuuagcauuaagcaagacaucgucggcaucaaugaaugguccggguacucuggcagcuucgugcagcaucccgagcuuacaggacuggauuguauucgcccuugcuucuggguugaacucaucagaggccggcccaaagagaacacgauuuggaccuccgggagcucuaucuccuuuuguggagugaauagcgacacagucggcuggucuuggcccgauggggcugagcugccuuucaccauugacaaguga

SEQ ID NO: 209394 - RNA, 1410 nt, Artificial Sequence; identical to SEQ ID NO: 209177
  derived and/or modified CDS sequence (opt5) from neuraminidase__InfluenzaA__ACV53452

SEQ ID NO: 209395 - RNA, 1410 nt, Artificial Sequence; identical to SEQ ID NO: 208800
  derived and/or modified CDS sequence (opt5) from neuraminidase__InfluenzaA__ACV53462

SEQ ID NO: 209396 - RNA, 1410 nt, Artificial Sequence; identical to SEQ ID NO: 208810
  derived and/or modified CDS sequence (opt5) from neuraminidase__InfluenzaA__ACV53472

SEQ ID NO: 209397 - RNA, 1410 nt, Artificial Sequence
  derived and/or modified CDS sequence (opt5) from neuraminidase__InfluenzaA__ACV53482
augaaccccaaucagaagaucauuaccaucggcagcgugugcaugacaauugggauggccaaccugauccuccaaauuggaaauaucaucuccauuuggaucucucacagcauucagcugggcaaccagaaucagaucgagacguguaaccaauccgucauuaccuacgaaaauaacacauggguuaaucagaccuaugugaacaucucuaauacaaacuucgcugccgggcagagcguggucuccgugaaacuugcgggaaauucuagccugugcccuguuuccggcugggcuauuuacagcaaggacaacucugugagaaucggguccaaaggagaugucuuugugauccgggagccguucauuagcuguucuccccucgaaugccgcaccuuuuuccugacacagggcgcccuucugaaugacaagcauuccaacggcaccaucaaagauagaagcccuuaucggacgcucaugucuugucccauuggggagguuccuucccccuacaacagccgcuuugaauccguggccuggucugcuagcgccugccacgacggaaucaauuggcugaccauuggcaucuccgggccugauaacggagcugucgccgugcugaaguauaauggcaucauuacagacaccaucaagagcuggagaaacaauauucuccggacacaagagucugagugugcgugcgugaacggguccuguuucaccgucaugacggauggaccgagcaauggccaggccucuuacaaaaucuuucgcauugaaaagggcaaaaucguuaagagcguggagaugaacgcucccaauuaucauuacgaagagugcuccuguuacccugacucuggggagaucacaugcgugugcagagauaacuggcacggaagcaaucggcccugggucuccuucaaccagaaucuggaauaucagauuggcuacaucuguagcgggauuuuuggagacaacccucgccccaaugauaaaaccggcucuugcgggccgguguccagcaacggagccaacggcguuaagggcuucucuuuuaaguaugggaauggaguguggaucggcagaacaaaauccauuagcucccggaacggguucgagaugaucugggacccuaauggauggaccgcuaccgauaacaauuuuucuauuaagcaagacaucgucggcaucaacgaauggagcggguacuccggcucuuucgugcagcaucccgagcuuacaggacuggacuguauucgcccuugcuucuggguugaacucaucagaggccggcccaaagagaauacgauuuggaccagcggguccagcaucucuuuuuguggagugaacuccgauacagucggcuggagcuggcccgacggggccgagcugccuuucaccauugauaaguga

SEQ ID NO: 209398 - RNA, 1410 nt, Artificial Sequence
  derived and/or modified CDS sequence (opt5) from neuraminidase__InfluenzaA__ACV53492
augaaccccaaucagaagaucauuaccaucggcagcgugugcaugacaauugggauggccaaccugauccuccaaauuggaaauaucaucuccauuuggaucucucacagcauucagcugggcaaccagaaucagaucgagacguguaaccaauccgucauuaccuacgaaaauaacacauggguuaaucagaccuaugugaacaucucuaauacaaacuucgcugccgggcagagcguggucuccgugaaacuugcgggaaauucuagccugugcccuguuuccggcugggcuauuuacagcaaggacaacucuaucagaaucggguccaaaggagauguguuugucauucgggagccguucaucagcuguucuccccucgaaugccgcaccuuuuuccugacacagggcgcccuucugaaugacaagcauuccaacggcaccauuaaagauagaagcccuuaucggacgcucaugucuugucccaucggggaggugccuucccccuacaacagccgcuuugaauccguugccuggucugcuagcgccugccacgacggaauuaauuggcugaccaucggcaucuccgggccugauaacggagcuguggccguccugaaguauaauggcauuaucacagacaccauuaagagcuggagaaacaauauccuccggacacaagagucugagugugcgugcgugaacggguccuguuucaccgugaugacggauggaccgagcgacggccaggccucuuacaaaauuuuucgcaucgaaaagggcaaaaucgucaagagcguugagaugaaugcucccaacuaucauuacgaagagugcuccuguuacccugauucuagcgagauuacaugcgugugcagagacaauuggcacggguccaaccggcccugggugagcuucaaucagaaccuggaauaucagaucggauacauuuguucuggcaucuuuggggauaauccucgccccaacgacaaagccggauccugcggcccggucagcucuaauggggcuaacggagugaagggcuucuccuuuaaguauggcaacgggguuuggauuggaagaaccaaaagcaucuccucucggaauggcuucgagaugauuugggauccuaacggguggacagaaaccgacaauaacuuucuuaucaagcaagacaucgugggaauuaaugaguggagcggcuacuccgggucuuucguccagcaucccgaacugaccggccucgauuguauccgcccuugcuucuggguggagcugauuagaggacggcccaaagagaacacaaucuggacgagcggcuccagcauuucuuuuugugggguuaauuccgacaccgugggauggagcuggcccgauggcgccgaacuuccuuucacaaucgacaaguga

SEQ ID NO: 209399 - RNA, 1410 nt, Artificial Sequence
  derived and/or modified CDS sequence (opt5) from neuraminidase__InfluenzaA__ACV53502
augaaccccaaucagaagaucauuaccaucggcagcgugugcaugacaauugggauggccaaccugauccuccaaauuggaaauaucaucuccauuuggaucucucacagcauucagcugggcaaccagaaucagaucgagacguguaaccaauccgucauuaccuacgaaaauaacacauggguuaaucagaccuaugugaacaucucuaauacaaacuucgcugccgggcagagcguggucuccgugaaacuugcgggaaauucuagccugugcccuguuuccggcugggcuauuuacagcaaggacaacucuaucagaaucggguccaaaggagauguguuugucauucgggagccguucaucagcuguucuccccucgaaugccgcaccuuuuuccugacacagggcgcccuucugaaugacaagcauuccaacggcaccauuaaagauagaagcccuuaucggacgcucaugucuugucccaucggggaggugccuucccccuacaacagccgcuuugaauccguugccuggucugcuagcgccugccacgacggaauuaauuggcugaccaucggcaucuccgggccugauaacggagcuguggccguccugaaguauaauggcauuaucacagacaccauuaagagcuggagaaacaauauccuccggacacaagagucugagugugcgugcgugaacggguccuguuucaccgugaugacggauggaccgagcgacggccaggccucuuacaaaauuuuucgcaucgaaaagggcaaaaucgucaagagcguugagaugaaugcucccaacuaucauuacgaagagugcuccuguuacccugauucuagcgagauuacaugcgugugcagagacaauuggcacggguccaaccggcccugggugagcuucaaucagaaccuggaauaucagaucggauacauuuguucuggcaucuuuggggauaauccucgccccaacgacaaagccggauccugcggcccggucagcucuaauggggcuaacggagugaagggcuucuccuuuaaguauggcaacgggguuuggauuggaagaaccaaaagcaucuccucucggaauggcuucgagaugauuugggauccuaacggguggacaggaaccgacaauaacuuucuuaucaagcaagacaucgugggcauuaaugaauggagcggguacuccggcucuuucguccagcaucccgagcugaccggacucgauuguauccgcccuugcuucuggguggaacugauuagaggccggcccaaagagaacacaaucuggacgagcggguccagcauuucuuuuuguggaguuaauuccgacaccgugggcuggagcuggcccgauggggccgagcuuccuuucacaaucgacaaguga

SEQ ID NO: 209400 - RNA, 1410 nt, Artificial Sequence
  derived and/or modified CDS sequence (opt5) from neuraminidase__InfluenzaA__ACV53891
augaaccccaaucagaagaucauuaccaucggcagcgugugcaugacaauugggauggccaaccugauccuccaaauuggaaauaucaucuccauuuggaucucucacagcauucagcugggcaaccagaaucagaucgagacguguaaccaauccgucauuaccuacgaaaauaacacauggguuaaucagaccuaugugaacaucucuaauacaaacuucgcugccgggcagagcguggucuccgugaaacuugcgggaaauucuagccugugcccuguuuccggcugggcuauuuacagcaaggacaacucuaucagaaucggguccaaaggagauguguuugucauucgggagccguucaucagcuguucuccccucgaaugccgcaccuuuuuccugacacagggcgcccuucugaaugacaagcauuccaacggcaccauuaaagauagaagcccuuaucggacgcucaugucuugucccaucggggaggugccuucccccuacaacagccgcuuugaauccguugccuggucugcuagcgccugccacgacggaauuaauuggcugaccaucggcaucuccgggccugauaacggagcuguggccguccugaaguauaauggcauuaucacagacaccauuaagagcuggagaaacaaaauccuccggacacaagagucugagugugcgugcgugaauggguccuguuucaccgugaugacggauggaccgagcgacggccaggccucuuacaagauuuuucgcaucgaaaaaggcaagaucgucaaaagcguugagaugaacgcucccaauuaucauuacgaagagugcuccuguuacccugauucuagcgagauuacaugcgugugcagagacaacuggcacggguccaaucggcccugggugagcuucaaccagaaucuggaauaucagaucggauacauuuguucuggcaucuuuggggauaacccucgccccaaugacaagaccggauccugcggcccggucagcucuaacggggccaauggagugaagggcuucuccuuuaaauauggcaacgggguuuggauuggaagaacaaagagcaucuccucucggaacggcuucgagaugauuugugauccuaauggguggaccggaaccgacaacaauuuuagcaucaaacaagacaucgugggcauuaacgaaugguccggguacucuggcagcuucguccagcaucccgagcuuacaggacuggauugcauccgcccuuguuucuggguggaacucauuagaggccggcccaaggagaauacgaucuggaccuccgggagcucuauuuccuuuugcggaguuaacagcgacacagugggcuggucuuggcccgauggggcugagcugccuuucaccaucgacaaauga

SEQ ID NO: 209401 - RNA, 1410 nt, Artificial Sequence
  derived and/or modified CDS sequence (opt5) from neuraminidase__InfluenzaA__ACV53901
augaaccccaaucagaagaucauuaccaucggcagcgugugcaugacaauugggauggccaaccugauccuccaaauuggaaauaucaucuccauuuggaucucucacagcauucagcugggcaaccagaaucagaucgagacguguaaccaauccgucauuaccuacgaaaauaacacauggguuaaucagaccuaugugaacaucucuaauacaaacuucgcugccgggcagagcguggucuccgugaaacuugcgggaaauucuagccugugcccuguuuccggcugggcuauuuacagcaaggacaacucuaucagaaucggguccaaaggagauguguuugucauucgggagccguucaucagcuguucuccccucgaaugccgcaccuuuuuccugacacagggcgcccuucugaaugacaagcauuccaacggcaccauuaaagauagaagcccuuaucggacgcucaugucuugucccaucggggaggugccuucccccuacaacagccgcuuugaauccguugccuggucugcuagcgccugccacgacggaauuaauuggcugaccaucggcaucuccgggccugauaacggagcuguggccguccugaaguauaauggcauuaucacagacaccauuaagagcuggagaaacaauauccuccggacacaagagucugagugugcgugcgugaacggguccuguuucaccgugaugacggauggaccgagcgacggccaggccucuuacaaaauuuuucgcaucgaaaagggcaaaaucgucaagagcguugagaugaaugcucccaacuaucauuacgaagagugcuccuguuacccugauucuagcgagauuacaugcgugugcagagacaauuggcacggguccaaccggcccugggugagcuucaaucagaaccuggaauaucagaucggauacauuuguucuggcaucuuuggggauaauccucgccccaacgacaaaaccggauccugcggcccggucagcucuaauggggccaacggagugaagggcuucuccuuuaaguauggcaacgggguuuggauuggaagaacaaaaagcaucuccucucggaauggcuucgagaugauuugggauccuaacggguggaccggaaccgacaauaacuuuagcaucaagcaagacaucgugggcauuaaugaaugguccggguacucucgcagcuucguccagcaucccgagcuuacaggccuggauuguaucagaccuugcuucuggguggaacucauucggggacgccccaaagagaacacgaucuggaccuccggcagcucuauuuccuuuugugggguuaauagcgacacagugggauggucuuggcccgauggcgcugagcugccuuucaccaucgacaaguga

SEQ ID NO: 209402 - RNA, 1410 nt, Artificial Sequence; identical to SEQ ID NO: 208810
  derived and/or modified CDS sequence (opt5) from neuraminidase__InfluenzaA__ACV53911

SEQ ID NO: 209403 - RNA, 1410 nt, Artificial Sequence; identical to SEQ ID NO: 208800
  derived and/or modified CDS sequence (opt5) from neuraminidase__InfluenzaA__ACV67088

SEQ ID NO: 209404 - RNA, 1410 nt, Artificial Sequence; identical to SEQ ID NO: 208810
  derived and/or modified CDS sequence (opt5) from neuraminidase__InfluenzaA__ACV67168

SEQ ID NO: 209405 - RNA, 1410 nt, Artificial Sequence; identical to SEQ ID NO: 208800
  derived and/or modified CDS sequence (opt5) from neuraminidase__InfluenzaA__ACV67169

SEQ ID NO: 209406 - RNA, 1410 nt, Artificial Sequence; identical to SEQ ID NO: 208810
  derived and/or modified CDS sequence (opt5) from neuraminidase__InfluenzaA__ACV67171

SEQ ID NO: 209407 - RNA, 1410 nt, Artificial Sequence; identical to SEQ ID NO: 208810
  derived and/or modified CDS sequence (opt5) from neuraminidase__InfluenzaA__ACV67172

SEQ ID NO: 209408 - RNA, 1410 nt, Artificial Sequence; identical to SEQ ID NO: 208840
  derived and/or modified CDS sequence (opt5) from neuraminidase__InfluenzaA__ACV67173

SEQ ID NO: 209409 - RNA, 1410 nt, Artificial Sequence; identical to SEQ ID NO: 208800
  derived and/or modified CDS sequence (opt5) from neuraminidase__InfluenzaA__ACV67174

SEQ ID NO: 209410 - RNA, 1410 nt, Artificial Sequence
  derived and/or modified CDS sequence (opt5) from neuraminidase__InfluenzaA__ACV67175
augaaccccaaucagaagaucauuaccaucggcagcgugugcaugacaauugggauggccaaccugauccuccaaauuggaaauaucaucuccauuuggaucucucacagcauucagcugggcaaccagaaucagaucgagacguguaaccaauccgucauuaccuacgaaaauaacacauggguuaaucagaccuaugugaacaucucuaauacaaacuucgcugccgggcagagcguggucuccgugaaacuugcgggaaauucuagccugugcccuguuuccggcugggcuauuuacagcaaggacaacucuaucagaaucggguccaaaggagauguguuugucauucgggagccguucaucagcuguucuccccucgaaugccgcaccuuuuuccugacacagggcgcccuucugaaugacaagcauuccaacggcaccauuaaagauagaagcccuuaucggacgcucaugucuugucccaucggggaggugccuucccccuacaacagccgcuuugaauccguugccuggucugcuagcgccugccacgacggaauuaauuggcugaccaucggcaucuccgggccugauaacggagcuguggccguccugaaguauaauggcauuaucacagacaccauuaagagcuggagaaacaauauccuccggacacaagagucugagugugcgugcgugaacggguccuguuucaccgugaugacggauggaccgagcgacggccaggccucuuacaaaauuuuucgcaucgaaaagggcaaaaucgucaagagcguugagaugaaugcucccaacuaucauuacgaagagugcuccuguuacccugauucuagcgagauuacaugcgugugcagagacaauuggcacggguccaaccggcccugggugagcuucaaucagaaccuggaauaucagaucggauacauuuguucuggcaucuuuggggauaauccucgccccaacgacaaaaccggauccugcggcccggucagcucuaauggguccaacggagugaagggcuucagcuuuaaguauggcaacgggguuuggauuggaagaacaaaauccaucucuagccggaauggcuucgagaugauuugggauccuaacggguggaccggaaccgacaauaacuuuuccaucaagcaagacaucgugggcauuaaugaauggucuggguacagcggcuccuucguccagcaucccgagcuuacaggacuggauuguauccgcccuugcuucuggguggaacucauuagaggccggcccaaagagaacacgaucuggaccagcgggucuuccauuagcuuuuguggaguuaauucugacacagugggcugguccuggcccgauggggccgagcugccuuucaccaucgacaaguga

SEQ ID NO: 209411 - RNA, 1410 nt, Artificial Sequence; identical to SEQ ID NO: 208810
  derived and/or modified CDS sequence (opt5) from neuraminidase__InfluenzaA__ACV67176

SEQ ID NO: 209412 - RNA, 1410 nt, Artificial Sequence; identical to SEQ ID NO: 208800
  derived and/or modified CDS sequence (opt5) from neuraminidase__InfluenzaA__ACV67177

SEQ ID NO: 209413 - RNA, 1410 nt, Artificial Sequence; identical to SEQ ID NO: 208810
  derived and/or modified CDS sequence (opt5) from neuraminidase__InfluenzaA__ACV67178

SEQ ID NO: 209414 - RNA, 1410 nt, Artificial Sequence; identical to SEQ ID NO: 208810
  derived and/or modified CDS sequence (opt5) from neuraminidase__InfluenzaA__ACV67179

SEQ ID NO: 209415 - RNA, 1410 nt, Artificial Sequence
  derived and/or modified CDS sequence (opt5) from neuraminidase__InfluenzaA__ACV67180
augaaccccaaucagaagaucauuaccaucggcagcgugugcaugacaauugggauggccaaccugauccuccaaauuggaaauaucaucuccauuuggaucucucacagcauucagcugggcaaccagaaucagaucgagacguguaaccaauccgucauuaccuacgaaaauaacacauggguuaaucagaccuaugugaacaucucuaauacaaacuucgcugccgggcagccuguggucagcgugaaacuugcgggaaauuccucucugugcccgguuagcggcugggcuauuuacuccaaggacaacagcaucagaaucgggucuaaaggagauguguuugucauucgggagcccuucaucuccuguagcccucucgaaugccgcaccuuuuuccugacacagggcgcccuucugaaugacaagcauucuaacggcaccauuaaagauagaucccccuaucggacgcucaugagcuguccuaucggggaggugcccucuccuuacaacucccgcuuugaaagcguugccugguccgcuucugccugccacgacggaauuaauuggcugaccaucggcaucagcgggccggauaacggagcuguggccguccugaaguauaauggcauuaucacagacaccauuaaguccuggagaaacaauauccuccggacacaagagagcgagugugcgugcgugaacgggucuuguuucaccgugaugacggauggacccuccgacggccaggccagcuacaaaauuuuucgcaucgaaaagggcaaaaucgucaagucuguugagaugaaugcuccuaacuaucauuacgaagagugcagcuguuaccccgauuccucugagauuacaugcgugugcagagacaauuggcacgggagcaaccggccuuggguguccuucaaucagaaccuggaauaucagaucggauacauuuguagcggcaucuuuggggauaauccccgcccgaacgacaaaaccggaucuugcggcccugucuccagcaauggggccaacggagugaagggcuucucuuuuaaguauggcaacgggguuuggauuggaagaacaaaauccaucagcucccggaauggcuucgagaugauuugggaucccaacggguggaccggaaccgacaauaacuuuucuaucaagcaagacaucgugggcauuaaugaauggagcggguacuccggcucuuucguccagcauccugagcuuacaggacuggauuguauccgccccugcuucuggguggaacucauuagaggccggcccaaagagaacacgaucuggaccagcggguccagcauuucuuuuuguggaguuaauuccgacacagugggcuggagcuggccugauggggcugagcugccguucaccaucgacaaguga

SEQ ID NO: 209416 - RNA, 1410 nt, Artificial Sequence
  derived and/or modified CDS sequence (opt5) from neuraminidase__InfluenzaA__ACV67181
augaaccccaaucagaagaucauuaccaucggcagcgugugcaugacaauugggauggccaaccugauccuccaaauuggaaauaucaucuccauuuggaucucucacagcauucagcugggcaaccagaaucagaucgagacguguaaccaauccgucauuaccuacgaaaauaacacauggguuaaucagaccuaugugaacaucucuaauacaaacuucgcugccgggcagagcguggucuccgugaaacuugcgggaaauucuagccugugcccuguuuccggcugggcuauuuacagcaaggacaacucuaucagaaucggguccaaaggagauguguuuauuauccgggagccguucauuagcuguucuccccucgaaugccgcaccuuuuuccugacacagggcgcccuucugaaugacaagcauuccaacggcaccaucaaagauagaagcccuuaucggacgcucaugucuugucccauuggggaggucccuucccccuacaacagccgcuuugaauccguggccuggucugcuagcgccugccacgacggaaucaauuggcugaccaucggcauuuccgggccugauaacggagcuguugccgugcugaaguauaauggcaucauuacagacaccaucaagagcuggagaaacaauauucuccggacacaagagucugagugugcgugcgucaacggguccuguuucaccgugaugacggauggaccgagcgacggccaggccucuuacaaaaucuuucgcaucgaaaagggcaaaauuaucaagagcguggagaugaaugcucccaacuaucauuacgaagagugcuccuguuacccugauucuagcgagauuacaugcgucugcagagacaauuggcacggguccaaccggcccuggguuagcuucaaucagaaccuggaauaucagaucggauacauuuguucuggcaucuuuggggauaauccucgccccaacgacaaaaccggauccugcggcccggugagcucuaauggggccaacggagugaagggcuucuccuuuaaguauggcaacggggucuggauuggaagaacaaaaagcaucuccucucggaauggcuucgagaugaucugggauccuaacggguggaccggaaccgacaauaacuuuagcauuaagcaagacaucgugggcauuaaugaaugguccggguacucuggcagcuucguucagcaucccgagcuuacaggacuggauuguauccgcccuugcuucuggguggaacucauuagaggccggcccaaagagaacacgaucuggaccuccgggagcucuaucuccuuuuguggagucaauagcgacacagugggcuggucuuggcccgauggggcugagcugccuuucaccauugacaaguga

SEQ ID NO: 209417 - RNA, 1410 nt, Artificial Sequence; identical to SEQ ID NO: 209234
  derived and/or modified CDS sequence (opt5) from neuraminidase__InfluenzaA__ACV67182

SEQ ID NO: 209418 - RNA, 1410 nt, Artificial Sequence
  derived and/or modified CDS sequence (opt5) from neuraminidase__InfluenzaA__ACV67183
augaaccccaaucagaagaucauuaccaucggcagcgugugcaugacaauugggauggccaaccugauccuccaaauuggaaauaucaucuccauuuggaucucucacagcauucagcugggcaaccagaaucagaucgagacguguaaccaauccgucauuaccuacgaaaauaacacauggguuaaucagaccuaugugaacaucucuaauacaaacuucgcugccgggcagagcguggucuccgugaaacuugcgggaaauucuagccugugcccuguuuccggcugggcuauuuacagcaaggacaacucugugagaaucggguccaaaggagaugucuuugugauccgggagccguucauuagcuguucuccccucgaaugccgcaccuuuuuccugacacagggcgcccuucugaaugacaagcauuccaacggcaccaucaaagauagaagcccuuaucggacgcucaugucuugucccauuggggagguuccuucccccuacaacagccgcuuugaauccguggccuggucugcuagcgccugccacgacggaaucaauuggcugaccauuggcaucuccgggccugauaacggagcugucgccgugcugaaguauaauggcaucauuacagacaccaucaagagcuggagaaacaauauucuccggacacaagagucugagugugcgugcgugaacggguccuguuucaccgucaugacggauggaccgagcaauggccaggccucuuacaaaaucuuucgcauugaaaagggcaaaaucguuaagagcguggagaugaacgcucccaauuaucauuacgaagagugcuccuguuacccugacucuaacgagaucacaugcgugugcagagauaauuggcacgggagcaaccggcccugggucuccuucaaucagaaccuggaauaucagauuggauacaucuguagcggcauuuuuggggacaauccucgccccaacgauaaaaccggaucuugcggcccgguguccagcaacggggccaauggaguuaagggcuucucuuuuaaguauggcaacgggguguggaucggaagaacaaaauccauuaauagccggaacggcuucgagaugaucugggacccuaauggguggaccggaaccgauaacaauuuuuccauuaagcaagacaucgucggcaucaacgaauggucuggguacagcggcuccuucgugcagcaucccgagcuuacaggacuggacuguauucgcccuugcuucuggguugaacucaucagaggccggcccaaagagaauacgauuuggaccucugggagcuccaucagcuuuuguggagugaacucugauacagucggcugguccuggcccgacggggcugagcugccuuucaccauugauaaguga

SEQ ID NO: 209419 - RNA, 1410 nt, Artificial Sequence; identical to SEQ ID NO: 208810
  derived and/or modified CDS sequence (opt5) from neuraminidase__InfluenzaA__ACV67184

SEQ ID NO: 209420 - RNA, 1410 nt, Artificial Sequence; identical to SEQ ID NO: 208800
  derived and/or modified CDS sequence (opt5) from neuraminidase__InfluenzaA__ACV67186

SEQ ID NO: 209421 - RNA, 1410 nt, Artificial Sequence; identical to SEQ ID NO: 208810
  derived and/or modified CDS sequence (opt5) from neuraminidase__InfluenzaA__ACV67187

SEQ ID NO: 209422 - RNA, 1410 nt, Artificial Sequence; identical to SEQ ID NO: 208810
  derived and/or modified CDS sequence (opt5) from neuraminidase__InfluenzaA__ACV67188

SEQ ID NO: 209423 - RNA, 1410 nt, Artificial Sequence; identical to SEQ ID NO: 208840
  derived and/or modified CDS sequence (opt5) from neuraminidase__InfluenzaA__ACV67189

SEQ ID NO: 209424 - RNA, 1410 nt, Artificial Sequence; identical to SEQ ID NO: 208840
  derived and/or modified CDS sequence (opt5) from neuraminidase__InfluenzaA__ACV67190

SEQ ID NO: 209425 - RNA, 1410 nt, Artificial Sequence; identical to SEQ ID NO: 208800
  derived and/or modified CDS sequence (opt5) from neuraminidase__InfluenzaA__ACV67191

SEQ ID NO: 209426 - RNA, 1410 nt, Artificial Sequence; identical to SEQ ID NO: 208840
  derived and/or modified CDS sequence (opt5) from neuraminidase__InfluenzaA__ACV67192

SEQ ID NO: 209427 - RNA, 1410 nt, Artificial Sequence; identical to SEQ ID NO: 208840
  derived and/or modified CDS sequence (opt5) from neuraminidase__InfluenzaA__ACV67193

SEQ ID NO: 209428 - RNA, 1410 nt, Artificial Sequence; identical to SEQ ID NO: 208810
  derived and/or modified CDS sequence (opt5) from neuraminidase__InfluenzaA__ACV67194

SEQ ID NO: 209429 - RNA, 1410 nt, Artificial Sequence; identical to SEQ ID NO: 208810
  derived and/or modified CDS sequence (opt5) from neuraminidase__InfluenzaA__ACV67195

SEQ ID NO: 209430 - RNA, 1410 nt, Artificial Sequence; identical to SEQ ID NO: 208810
  derived and/or modified CDS sequence (opt5) from neuraminidase__InfluenzaA__ACV67196

SEQ ID NO: 209431 - RNA, 1410 nt, Artificial Sequence; identical to SEQ ID NO: 208800
  derived and/or modified CDS sequence (opt5) from neuraminidase__InfluenzaA__ACV67197

SEQ ID NO: 209432 - RNA, 1410 nt, Artificial Sequence; identical to SEQ ID NO: 208800
  derived and/or modified CDS sequence (opt5) from neuraminidase__InfluenzaA__ACV67199

SEQ ID NO: 209433 - RNA, 1410 nt, Artificial Sequence; identical to SEQ ID NO: 208800
  derived and/or modified CDS sequence (opt5) from neuraminidase__InfluenzaA__ACV67200

SEQ ID NO: 209434 - RNA, 1410 nt, Artificial Sequence; identical to SEQ ID NO: 208800
  derived and/or modified CDS sequence (opt5) from neuraminidase__InfluenzaA__ACV67201

SEQ ID NO: 209435 - RNA, 1410 nt, Artificial Sequence; identical to SEQ ID NO: 208800
  derived and/or modified CDS sequence (opt5) from neuraminidase__InfluenzaA__ACV67202

SEQ ID NO: 209436 - RNA, 1410 nt, Artificial Sequence; identical to SEQ ID NO: 208810
  derived and/or modified CDS sequence (opt5) from neuraminidase__InfluenzaA__ACV67203

SEQ ID NO: 209437 - RNA, 1410 nt, Artificial Sequence; identical to SEQ ID NO: 208810
  derived and/or modified CDS sequence (opt5) from neuraminidase__InfluenzaA__ACV67204

SEQ ID NO: 209438 - RNA, 1410 nt, Artificial Sequence; identical to SEQ ID NO: 208810
  derived and/or modified CDS sequence (opt5) from neuraminidase__InfluenzaA__ACV67205

SEQ ID NO: 209439 - RNA, 1410 nt, Artificial Sequence
  derived and/or modified CDS sequence (opt5) from neuraminidase__InfluenzaA__ACV67206
augaaccccaaucagaagaucauuaccaucggcagcgugugcaugacaauugggauggccaaccugauccuccaaauuggaaauaucaucuccauuuggaucucucacagcauucagcugggcaaccagaaucagaucgagacguguaaccaauccgucauuaccuacgaaaauaacacauggguuaaucagaccuaugugaacaucucuaauacaaacuucgcugccgggcagagcaugguguccgucaaacuugcgggaaauucuagccugugcccuguguccggcugggcuauuuacagcaaggacaacucuguuagaaucggguccaaaggagauguguuugucauccgggagccguucauuagcuguucuccccucgaaugccgcaccuuuuuccugacacagggcgcccuucugaaugacaagcauuccaacggcaccaucaaagauagaagcccuuaucggacgcucaugucuugucccauuggggaggugccuucccccuacaacagccgcuuugaauccguugccuggucugcuagcgccugccacgacggaaucaauuggcugaccauuggcaucuccgggccugauaacggagcuguggccguccugaaguauaauggcaucauuacagacaccaucaagagcuggagaaacaauauucuccggacacaagagucugagugugcgugcgugaacggguccuguuucaccgugaugacggauggaccgagcaauggccaggccucuuacaaaaucuuucgcauugaaaagggcaaaaucgucaagagcguugagaugaacgcucccaauuauuacuacgaagagugcuccuguuauccugacucuagcgagaucacaugcgugugcagagauaacuggcauggguccaaucggcccugggugagcuucaaccagaaucuggaauaccagauuggauauaucuguucuggcauuuuuggggacaacccucgccccaaugauaaaaccggauccugcggcccggucagcucuaacggggccaacggagugaagggcuucuccuuuaaguacggcaaugggguuuggaucggaagaacaaaaagcauuuccucucggaacggcuucgagaugaucugggacccuaauggguggaccggaaccgauaacaauuuuagcauuaagcaagacaucgugggcaucaacgaaugguccggguauucuggcagcuucguccagcaccccgagcuuacaggacuggacuguauucgcccuugcuucuggguggaacucaucagaggccggcccaaagagaauacgauuuggaccuccgggagcucuaucuccuuuuguggaguuaacagcgauacagugggcuggucuuggcccgacggggcugagcugccuuucaccauugauaaguga

SEQ ID NO: 209440 - RNA, 1410 nt, Artificial Sequence; identical to SEQ ID NO: 208800
  derived and/or modified CDS sequence (opt5) from neuraminidase__InfluenzaA__ACV67207

SEQ ID NO: 209441 - RNA, 1410 nt, Artificial Sequence; identical to SEQ ID NO: 208810
  derived and/or modified CDS sequence (opt5) from neuraminidase__InfluenzaA__ACV67208

SEQ ID NO: 209442 - RNA, 1410 nt, Artificial Sequence; identical to SEQ ID NO: 208800
  derived and/or modified CDS sequence (opt5) from neuraminidase__InfluenzaA__ACV67210

SEQ ID NO: 209443 - RNA, 1410 nt, Artificial Sequence; identical to SEQ ID NO: 208810
  derived and/or modified CDS sequence (opt5) from neuraminidase__InfluenzaA__ACV67211

SEQ ID NO: 209444 - RNA, 1410 nt, Artificial Sequence; identical to SEQ ID NO: 208810
  derived and/or modified CDS sequence (opt5) from neuraminidase__InfluenzaA__ACV70076

SEQ ID NO: 209445 - RNA, 1410 nt, Artificial Sequence
  derived and/or modified CDS sequence (opt5) from neuraminidase__InfluenzaA__ACV70086
augaaccccaaucagaagaucauuaccaucggcagcgugugcaugacaauugggauggccaaccugauccuccaaauuggaaauaucaucuccauuuggaucucucacagcauucagcugggcaaccagaaucagaucgagacguguaaccaauccauuaucaccuacgaaaauaacacaugggucaaucagaccuauguuaacauuucuaauacaaacuucgcugccgggcagagcgugguguccgucaaacuugcgggaaauucuagccugugcccuguguccggcugggcuaucuacagcaaggacaacucuguuagaaucggguccaaaggagauguguuugucauucgggagccguucaucagcuguucuccccucgaaugccgcaccuuuuuccugacacagggcgcccuucugaaugacaagcauuccaacggcaccauuaaagauagaagcccuuaucggacgcucaugucuugucccaucggggaggugccuucccccuacaacagccgcuuugaauccguugccuggucugcuagcgccugccacgacggaauuaauuggcugaccaucggcaucuccgggccugauaacggagcuguggccguccugaaguauaauggcauuaucacagacaccauuaagagcuggagaaacaauauccuccggacacaagagucugagugugcgugcgugaacggguccuguuucaccgugaugacggauggaccgagcaauggccaggccucuuacaaaauuuuucgcaucgaaaagggcaaaaucgucaagagcguugagaugaacgcucccaauuaucauuacgaagagugcuccuguuacccugacucuagcgagauuacaugcgugugcagagauaacuggcacggguccaaucggcccugggugagcuucaaccagaaucuggaauaucagaucggauacauuuguucuggcaucuuuggggacaacccucgccccaaugauaaaaccggauccugcggcccggucagcucuaacggggccaacggagugaagggcuucuccuuuaaguauggcaaugggguuuggauuggaagaacaaaaagcaucuccucucggaacggcuucgagaugauuugggacccuaauggguggaccggaaccgauaacaauuuuagcaucaagcaagacaucgugggcauuaacgaaugguccggguacucuggcagcuucguccagcaucccgagcuuacaggacuggacuguauccgcccuugcuucuggguggaacucauuagaggccggcccaaagagaauacgaucuggaccuccgggagcucuauuuccuuuuguggaguuaacagcgauacagugggcuggucuuggcccgacggggcugagcugccuuucaccaucgauaaguga

SEQ ID NO: 209446 - RNA, 1410 nt, Artificial Sequence
  derived and/or modified CDS sequence (opt5) from neuraminidase__InfluenzaA__ACV70096
augaaccccaaucagaagaucauuaccaucggcagcgugugcaugacaauugggauggccaaccugauccuccaaauuggaaauaucaucuccauuuggaucucucacagcauucagcugggcaaccagaaucagaucgagacguguaaccaauccgucauuaccuacgaaaauaacacauggguuaaucagaccuaugugaacaucucuaauacaaacuucaccgcugggcagagcguggucuccgugaaacuugccggaaauucuagccugugcccuguuuccggcugggcgauuuacagcaaggacaacucuaucagaaucggguccaaaggagauguguuugucauucgggagccguucaucagcuguucuccccucgaaugccgcacauuuuuccugacccagggcgcccuucugaaugacaagcauuccaacggcacgauuaaagauagaagcccuuaucggacccucaugucuugucccaucggggaggugccuucccccuacaacagccgcuuugaauccguugcuuggucugccagcgcuugccacgacggaauuaauuggcugacaaucggcaucuccgggccugauaacggagccguggcuguccugaaguauaauggcauuaucaccgacacaauuaagagcuggagaaacaauauccuccggacccaagagucugagugugccugcgugaacggguccuguuucacggugaugacagauggaccgagcgacggccaggcgucuuacaaaauuuuucgcaucgaaaagggcaaaaucgucaagagcguugagaugaaugcccccaacuaucauuacgaagagugcuccuguuacccugauucuagcgagauuaccugcgugugcagagacaauuggcacggguccaaccggcccugggugagcuucaaucagaaccuggaauaucagaucggauacauuuguucuggcaucuuuggggauaauccucgccccaacgacaaaacaggauccugcggcccggucagcucuaauggggcuaacggagugaagggcuucuccuuuaaguauggcaacgggguuuggauuggaagaaccaaaagcaucuccucucggaauggcuucgagaugauuugggauccuaacggguggaccggaacagacaauaacuuuagcaucaagcaagacaucgugggcauuaaugaaugguccggguacucuggcagcuucguccagcaucccgagcuuacgggacuggauuguauccgcccuugcuucuggguggaacucauuagaggccggcccaaagagaacaccaucuggacauccgggagcucuauuuccuuuuguggaguuaauagcgacaccgugggcuggucuuggcccgauggggccgagcugccuuucacaaucgacaaguga

SEQ ID NO: 209447 - RNA, 1410 nt, Artificial Sequence; identical to SEQ ID NO: 208810
  derived and/or modified CDS sequence (opt5) from neuraminidase__InfluenzaA__ACV70106

SEQ ID NO: 209448 - RNA, 1410 nt, Artificial Sequence; identical to SEQ ID NO: 208810
  derived and/or modified CDS sequence (opt5) from neuraminidase__InfluenzaA__ACV70116

SEQ ID NO: 209449 - RNA, 1410 nt, Artificial Sequence; identical to SEQ ID NO: 208810
  derived and/or modified CDS sequence (opt5) from neuraminidase__InfluenzaA__ACV70126

SEQ ID NO: 209450 - RNA, 1410 nt, Artificial Sequence; identical to SEQ ID NO: 208810
  derived and/or modified CDS sequence (opt5) from neuraminidase__InfluenzaA__ACV70157

SEQ ID NO: 209451 - RNA, 1410 nt, Artificial Sequence; identical to SEQ ID NO: 208800
  derived and/or modified CDS sequence (opt5) from neuraminidase__InfluenzaA__ACV70167

SEQ ID NO: 209452 - RNA, 1410 nt, Artificial Sequence; identical to SEQ ID NO: 208810
  derived and/or modified CDS sequence (opt5) from neuraminidase__InfluenzaA__ACV70177

SEQ ID NO: 209453 - RNA, 1410 nt, Artificial Sequence; identical to SEQ ID NO: 208810
  derived and/or modified CDS sequence (opt5) from neuraminidase__InfluenzaA__ACV70187

SEQ ID NO: 209454 - RNA, 1410 nt, Artificial Sequence; identical to SEQ ID NO: 208810
  derived and/or modified CDS sequence (opt5) from neuraminidase__InfluenzaA__ACV70197

SEQ ID NO: 209455 - RNA, 1410 nt, Artificial Sequence; identical to SEQ ID NO: 208810
  derived and/or modified CDS sequence (opt5) from neuraminidase__InfluenzaA__ACV70207

SEQ ID NO: 209456 - RNA, 1410 nt, Artificial Sequence
  derived and/or modified CDS sequence (opt5) from neuraminidase__InfluenzaA__ACV70217
augaaccccaaucagaagaucauuaccaucggcagcgugugcaugacaauugggauggccaaccugauccuccaaauuggaaauaucaucuccauuuggaucucucacagcauucagcugggcaaccagaaucagaucgagacguguaaccaauccgucauuaccuacgaaaauaacacauggguuaaucagaccuaugugaacaucucuaauacaaacuucgcugccgggcagagcguggucuccgugaaacuugcgggaaauucuagccugugcccuguuuccggcugggcuauuuacagcaaggacaacucugugagaaucggguccaaaggagaugucuuugugauccgggagccguucauuagcuguucucaucucgaaugccgcaccuuuuuccugacacagggcgcccuucugaaugacaagcacuccaacggcaccaucaaagauagaagccccuaucggacgcucaugucuuguccuauuggggagguucccuccccuuacaacagccgcuuugaauccguggccuggucugcuagcgccugccaugacggaaucaauuggcugaccauuggcaucuccgggcccgauaacggagcugucgccgugcugaaguauaauggcaucauuacagacaccaucaagagcuggagaaacaauauucuccggacacaagagucugagugugcgugcgugaacggguccuguuucaccgucaugacggauggaccuagcaauggccaggccucuuacaaaaucuuucgcauugaaaagggcaaaaucguuaagagcguggagaugaacgcuccgaauuaucacuacgaagagugcuccuguuaccccgacucuagcgagaucacaugcgugugcagagauaacuggcauggguccaaucggccuugggucagcuucaaccagaaucuggaauaucagauuggauacaucuguucuggcauuuuuggggacaacccccgcccuaaugauaaaaccggauccugcggccccgugagcucuaacggggccaacggaguuaagggcuucuccuuuaaguauggcaaugggguguggaucggaagaacaaaaagcauuuccucucggaacggcuucgagaugaucugggacccgaauggguggaccggaaccgauaacaauuuuagcauuaagcaagacaucgucggcaucaacgaaugguccggguacucuggcagcuucgugcagcacccugagcuuacaggacuggacuguauucgccccugcuucuggguugaacucaucagaggccggccuaaagagaauacgauuuggaccuccgggagcucuaucuccuuuuguggagugaacagcgauacagucggcuggucuuggcccgacggggcugagcugcccuucaccauugauaaguga

SEQ ID NO: 209457 - RNA, 1410 nt, Artificial Sequence; identical to SEQ ID NO: 208810
  derived and/or modified CDS sequence (opt5) from neuraminidase__InfluenzaA__ACV70227

SEQ ID NO: 209458 - RNA, 1410 nt, Artificial Sequence; identical to SEQ ID NO: 208810
  derived and/or modified CDS sequence (opt5) from neuraminidase__InfluenzaA__ACV70237

SEQ ID NO: 209459 - RNA, 1410 nt, Artificial Sequence; identical to SEQ ID NO: 208810
  derived and/or modified CDS sequence (opt5) from neuraminidase__InfluenzaA__ACV70247

SEQ ID NO: 209460 - RNA, 1410 nt, Artificial Sequence; identical to SEQ ID NO: 208810
  derived and/or modified CDS sequence (opt5) from neuraminidase__InfluenzaA__ACV70257

SEQ ID NO: 209461 - RNA, 1410 nt, Artificial Sequence; identical to SEQ ID NO: 208810
  derived and/or modified CDS sequence (opt5) from neuraminidase__InfluenzaA__ACV70267

SEQ ID NO: 209462 - RNA, 1410 nt, Artificial Sequence; identical to SEQ ID NO: 208810
  derived and/or modified CDS sequence (opt5) from neuraminidase__InfluenzaA__ACV70277

SEQ ID NO: 209463 - RNA, 1410 nt, Artificial Sequence; identical to SEQ ID NO: 208810
  derived and/or modified CDS sequence (opt5) from neuraminidase__InfluenzaA__ACV70287

SEQ ID NO: 209464 - RNA, 1410 nt, Artificial Sequence; identical to SEQ ID NO: 208810
  derived and/or modified CDS sequence (opt5) from neuraminidase__InfluenzaA__ACV70297

SEQ ID NO: 209465 - RNA, 1410 nt, Artificial Sequence; identical to SEQ ID NO: 208810
  derived and/or modified CDS sequence (opt5) from neuraminidase__InfluenzaA__ACV70307

SEQ ID NO: 209466 - RNA, 1410 nt, Artificial Sequence; identical to SEQ ID NO: 208800
  derived and/or modified CDS sequence (opt5) from neuraminidase__InfluenzaA__ACV70317

SEQ ID NO: 209467 - RNA, 1410 nt, Artificial Sequence; identical to SEQ ID NO: 208810
  derived and/or modified CDS sequence (opt5) from neuraminidase__InfluenzaA__ACV70327

SEQ ID NO: 209468 - RNA, 1410 nt, Artificial Sequence; identical to SEQ ID NO: 208810
  derived and/or modified CDS sequence (opt5) from neuraminidase__InfluenzaA__ACV70337

SEQ ID NO: 209469 - RNA, 1410 nt, Artificial Sequence; identical to SEQ ID NO: 208810
  derived and/or modified CDS sequence (opt5) from neuraminidase__InfluenzaA__ACV70347

SEQ ID NO: 209470 - RNA, 1410 nt, Artificial Sequence; identical to SEQ ID NO: 208810
  derived and/or modified CDS sequence (opt5) from neuraminidase__InfluenzaA__ACV70357

SEQ ID NO: 209471 - RNA, 1410 nt, Artificial Sequence; identical to SEQ ID NO: 208810
  derived and/or modified CDS sequence (opt5) from neuraminidase__InfluenzaA__ACV70367

SEQ ID NO: 209472 - RNA, 1410 nt, Artificial Sequence; identical to SEQ ID NO: 208810
  derived and/or modified CDS sequence (opt5) from neuraminidase__InfluenzaA__ACV70377

SEQ ID NO: 209473 - RNA, 1410 nt, Artificial Sequence; identical to SEQ ID NO: 208810
  derived and/or modified CDS sequence (opt5) from neuraminidase__InfluenzaA__ACV70387

SEQ ID NO: 209474 - RNA, 1410 nt, Artificial Sequence; identical to SEQ ID NO: 208810
  derived and/or modified CDS sequence (opt5) from neuraminidase__InfluenzaA__ACV70397

SEQ ID NO: 209475 - RNA, 1410 nt, Artificial Sequence; identical to SEQ ID NO: 208810
  derived and/or modified CDS sequence (opt5) from neuraminidase__InfluenzaA__ACV70407

SEQ ID NO: 209476 - RNA, 1410 nt, Artificial Sequence; identical to SEQ ID NO: 208800
  derived and/or modified CDS sequence (opt5) from neuraminidase__InfluenzaA__ACV70417

SEQ ID NO: 209477 - RNA, 1410 nt, Artificial Sequence; identical to SEQ ID NO: 208810
  derived and/or modified CDS sequence (opt5) from neuraminidase__InfluenzaA__ACV70427

SEQ ID NO: 209478 - RNA, 1410 nt, Artificial Sequence; identical to SEQ ID NO: 208810
  derived and/or modified CDS sequence (opt5) from neuraminidase__InfluenzaA__ACV70437

SEQ ID NO: 209479 - RNA, 1410 nt, Artificial Sequence; identical to SEQ ID NO: 208810
  derived and/or modified CDS sequence (opt5) from neuraminidase__InfluenzaA__ACV70447

SEQ ID NO: 209480 - RNA, 1410 nt, Artificial Sequence; identical to SEQ ID NO: 208810
  derived and/or modified CDS sequence (opt5) from neuraminidase__InfluenzaA__ACV70457

SEQ ID NO: 209481 - RNA, 1410 nt, Artificial Sequence; identical to SEQ ID NO: 208810
  derived and/or modified CDS sequence (opt5) from neuraminidase__InfluenzaA__ACV70467

SEQ ID NO: 209482 - RNA, 1410 nt, Artificial Sequence; identical to SEQ ID NO: 208810
  derived and/or modified CDS sequence (opt5) from neuraminidase__InfluenzaA__ACV70477

SEQ ID NO: 209483 - RNA, 1410 nt, Artificial Sequence; identical to SEQ ID NO: 208810
  derived and/or modified CDS sequence (opt5) from neuraminidase__InfluenzaA__ACV70487

SEQ ID NO: 209484 - RNA, 1410 nt, Artificial Sequence; identical to SEQ ID NO: 208810
  derived and/or modified CDS sequence (opt5) from neuraminidase__InfluenzaA__ACV70497

SEQ ID NO: 209485 - RNA, 1410 nt, Artificial Sequence; identical to SEQ ID NO: 208810
  derived and/or modified CDS sequence (opt5) from neuraminidase__InfluenzaA__ACV70507

SEQ ID NO: 209486 - RNA, 1410 nt, Artificial Sequence; identical to SEQ ID NO: 208810
  derived and/or modified CDS sequence (opt5) from neuraminidase__InfluenzaA__ACV70517

SEQ ID NO: 209487 - RNA, 1410 nt, Artificial Sequence; identical to SEQ ID NO: 208810
  derived and/or modified CDS sequence (opt5) from neuraminidase__InfluenzaA__ACV70527

SEQ ID NO: 209488 - RNA, 1410 nt, Artificial Sequence; identical to SEQ ID NO: 208810
  derived and/or modified CDS sequence (opt5) from neuraminidase__InfluenzaA__ACV70547

SEQ ID NO: 209489 - RNA, 1410 nt, Artificial Sequence; identical to SEQ ID NO: 208810
  derived and/or modified CDS sequence (opt5) from neuraminidase__InfluenzaA__ACV70557

SEQ ID NO: 209490 - RNA, 1410 nt, Artificial Sequence; identical to SEQ ID NO: 208810
  derived and/or modified CDS sequence (opt5) from neuraminidase__InfluenzaA__ACV70567

SEQ ID NO: 209491 - RNA, 1410 nt, Artificial Sequence; identical to SEQ ID NO: 208810
  derived and/or modified CDS sequence (opt5) from neuraminidase__InfluenzaA__ACV70577

SEQ ID NO: 209492 - RNA, 1410 nt, Artificial Sequence; identical to SEQ ID NO: 208810
  derived and/or modified CDS sequence (opt5) from neuraminidase__InfluenzaA__ACV70587

SEQ ID NO: 209493 - RNA, 1410 nt, Artificial Sequence; identical to SEQ ID NO: 208800
  derived and/or modified CDS sequence (opt5) from neuraminidase__InfluenzaA__ACV70597

SEQ ID NO: 209494 - RNA, 1410 nt, Artificial Sequence; identical to SEQ ID NO: 208810
  derived and/or modified CDS sequence (opt5) from neuraminidase__InfluenzaA__ACV70607

SEQ ID NO: 209495 - RNA, 1410 nt, Artificial Sequence; identical to SEQ ID NO: 209393
  derived and/or modified CDS sequence (opt5) from neuraminidase__InfluenzaA__ACV70617

SEQ ID NO: 209496 - RNA, 1410 nt, Artificial Sequence; identical to SEQ ID NO: 208810
  derived and/or modified CDS sequence (opt5) from neuraminidase__InfluenzaA__ACV70647

SEQ ID NO: 209497 - RNA, 1410 nt, Artificial Sequence; identical to SEQ ID NO: 208810
  derived and/or modified CDS sequence (opt5) from neuraminidase__InfluenzaA__ACV70657

SEQ ID NO: 209498 - RNA, 1410 nt, Artificial Sequence; identical to SEQ ID NO: 208810
  derived and/or modified CDS sequence (opt5) from neuraminidase__InfluenzaA__ACV70667

SEQ ID NO: 209499 - RNA, 1410 nt, Artificial Sequence; identical to SEQ ID NO: 208810
  derived and/or modified CDS sequence (opt5) from neuraminidase__InfluenzaA__ACV70677

SEQ ID NO: 209500 - RNA, 1410 nt, Artificial Sequence; identical to SEQ ID NO: 208810
  derived and/or modified CDS sequence (opt5) from neuraminidase__InfluenzaA__ACV70687

SEQ ID NO: 209501 - RNA, 1410 nt, Artificial Sequence; identical to SEQ ID NO: 208810
  derived and/or modified CDS sequence (opt5) from neuraminidase__InfluenzaA__ACV70697

SEQ ID NO: 209502 - RNA, 1410 nt, Artificial Sequence; identical to SEQ ID NO: 208810
  derived and/or modified CDS sequence (opt5) from neuraminidase__InfluenzaA__ACV70707

SEQ ID NO: 209503 - RNA, 1410 nt, Artificial Sequence; identical to SEQ ID NO: 208810
  derived and/or modified CDS sequence (opt5) from neuraminidase__InfluenzaA__ACV70717

SEQ ID NO: 209504 - RNA, 1410 nt, Artificial Sequence; identical to SEQ ID NO: 208810
  derived and/or modified CDS sequence (opt5) from neuraminidase__InfluenzaA__ACV70727

SEQ ID NO: 209505 - RNA, 1410 nt, Artificial Sequence; identical to SEQ ID NO: 208810
  derived and/or modified CDS sequence (opt5) from neuraminidase__InfluenzaA__ACV70737

SEQ ID NO: 209506 - RNA, 1410 nt, Artificial Sequence; identical to SEQ ID NO: 208810
  derived and/or modified CDS sequence (opt5) from neuraminidase__InfluenzaA__ACV70757

SEQ ID NO: 209507 - RNA, 1410 nt, Artificial Sequence; identical to SEQ ID NO: 208810
  derived and/or modified CDS sequence (opt5) from neuraminidase__InfluenzaA__ACV70767

SEQ ID NO: 209508 - RNA, 1410 nt, Artificial Sequence; identical to SEQ ID NO: 208810
  derived and/or modified CDS sequence (opt5) from neuraminidase__InfluenzaA__ACV70777

SEQ ID NO: 209509 - RNA, 1410 nt, Artificial Sequence; identical to SEQ ID NO: 208810
  derived and/or modified CDS sequence (opt5) from neuraminidase__InfluenzaA__ACV70787

SEQ ID NO: 209510 - RNA, 1410 nt, Artificial Sequence; identical to SEQ ID NO: 208810
  derived and/or modified CDS sequence (opt5) from neuraminidase__InfluenzaA__ACV70797

SEQ ID NO: 209511 - RNA, 1410 nt, Artificial Sequence; identical to SEQ ID NO: 208810
  derived and/or modified CDS sequence (opt5) from neuraminidase__InfluenzaA__ACV70807

SEQ ID NO: 209512 - RNA, 1410 nt, Artificial Sequence; identical to SEQ ID NO: 208810
  derived and/or modified CDS sequence (opt5) from neuraminidase__InfluenzaA__ACV70817

SEQ ID NO: 209513 - RNA, 1410 nt, Artificial Sequence; identical to SEQ ID NO: 208800
  derived and/or modified CDS sequence (opt5) from neuraminidase__InfluenzaA__ACV70827

SEQ ID NO: 209514 - RNA, 1410 nt, Artificial Sequence; identical to SEQ ID NO: 208810
  derived and/or modified CDS sequence (opt5) from neuraminidase__InfluenzaA__ACV70837

SEQ ID NO: 209515 - RNA, 1410 nt, Artificial Sequence
  derived and/or modified CDS sequence (opt5) from neuraminidase__InfluenzaA__ACV70847
augaaccccaaucagaagaucauuaccaucggcagcgugugcaugacaauugggauggccaaccugauccuccaaauuggaaauaucaucuccauuuggaucucucacagcauucagcugggcaaccagaaucagaucgagacguguaaccaauccgucauuaccuacgaaaauaacacauggguuaaucagaccuaugugaacaucucuaauacaaacuucgcugccgggcagagcguggucuccgugaaacuugcgggaaauucuagccugugcccuguuuccggcugggcuauuuacagcaaggacaacucuaucagaaucggguccaaaggagauguguuugucauucgggagccguucaugagcuguucuccccucgaaugccgcaccuuuuuccugacacagggcgcccuucugaaugacaagcauuccaacggcaccaucaaagauagaagcccuuaucggacgcucaugucuugucccauuggggaggugccuucccccuacaacagccgcuuugaauccguugccuggucugcuagcgccugccacgacggaaucaauuggcugaccauuggcaucuccgggccugauaacggagcuguggccguccugaaguauaauggcaucauuacagacaccaucaagagcuggagaaacaauauucuccggacacaagagucugagugugcgugcgugaacggguccuguuucaccgugaugacggauggaccgagcgacggccaggccucuuacaaaaucuuucgcauugaaaagggcaaaaucgucaagagcguugagaugaaugcucccaacuaucauuacgaagagugcuccuguuacccugauucuagcgagaucacaugcgugugcagagacaauuggcacggguccaaccggcccugggugagcuucaaucagaaccuggaauaucagauuggauacaucuguucuggcauuuuuggggauaauccucgccccaacgacaaaaccggauccugcggcccggucagcucuaauggggccaacggagugaagggcuucuccuuuaaguauggcaacgggguuuggaucggaagaacaaaaagcauuuccucucggaauggcuucgagaugaucugggauccuaacggguggaccggaaccgacaauaacuuuagcauuaagcaagacaucgugggcaucaaugaaugguccggguacucuggcagcuucguccagcaucccgagcuuacaggacuggauuguauucgcccuugcuucuggguggaacucaucagaggccggcccaaagagaacacgauuuggaccuccgggagcucuaucuccuuuuguggaguuaauagcgacacagugggcuggucuuggcccgauggggcugagcugccuuucaccauugacaaguga

SEQ ID NO: 209516 - RNA, 1410 nt, Artificial Sequence; identical to SEQ ID NO: 208810
  derived and/or modified CDS sequence (opt5) from neuraminidase__InfluenzaA__ACV70867

SEQ ID NO: 209517 - RNA, 1410 nt, Artificial Sequence; identical to SEQ ID NO: 208810
  derived and/or modified CDS sequence (opt5) from neuraminidase__InfluenzaA__ACV70877

SEQ ID NO: 209518 - RNA, 1410 nt, Artificial Sequence
  derived and/or modified CDS sequence (opt5) from neuraminidase__InfluenzaA__ACV70887
augaaccccaaucagaagaucauuaccaucggcagcgugugcaugacaauugggauggccaaccugauccuccaaauuggaaauaucaucuccauuuggaucucucacagcauucagcugggcaaccagaaucagaucgagacguguaaccaauccgucauuaccuacgaaaauaacacauggguuaaucagaccuaugugaacaucucuaauacaaacuucgcugccgggcagagcaugguguccgucaaacuugcgggaaauucuagccugugcccuguguccggcugggcuauuuacagcaaggacaacucuguuagaaucggguccaaaggagauguguuugucauccgggagccguucauuagcuguucuccccucgaaugccgcaccuuuuuccugacacagggcgcccuucugaaugacaagcauuccaacggcaccaucaaagauagaagcccuuaucggacgcucaugucuugucccauuggggaggugccuucccccuacaacagccgcuuugaauccguugccuggucugcuagcgccugccacgacggaaucaauuggcugaccauuggcaucuccgggccugauaacggagcuguggccguccugaaguauaauggcaucauuacagacaccaucaagagcuggagaaacaauauucuccggacacaagagucugagugugcgugcgugaacggguccuguuucaccgugaugacggauggaccgagcaauggccaggccucuuacaaaaucuuucgcauugaaaagggcaaaaucgucaagagcguugagaugaacgcucccaauuaucauuacgaagagugcuccuguuacccugacucuagcgagaucacaugcgugugcagagauaacuggcacggguccaaucggcccugggugagcuucaaccagaaucuggaauaucagauuggauacaucuguucuggcauuuuuggggacaacccucgccccaaugauaaaaccggauccugcggcccggucagcucuaacggggccaacggagugaagggcuucuccuuuaaguauggcaaugggguuuggaucggaagaacaaaaagcauuuccucucggaacggcuucgagaugaucugggacccuaauggguggaccggaaccgauaacaauuuuagcauuaagcaagacaucgugggcaucaacgaaugguccggguacucuggcagcuucguccagcaucccgagcuuacaggacuggacuguauucgcccuugcuucuggguggaacucaucagaggccggcccaaagagaauacgauuuggaccuccgggagcucuaucuccuuuuguggaguuaacagcgauacagugggcuggucuuggcccgacggggcugagcugccuuucaccauugauaaguga

SEQ ID NO: 209519 - RNA, 1410 nt, Artificial Sequence; identical to SEQ ID NO: 208810
  derived and/or modified CDS sequence (opt5) from neuraminidase__InfluenzaA__ACV70897

SEQ ID NO: 209520 - RNA, 1410 nt, Artificial Sequence; identical to SEQ ID NO: 208810
  derived and/or modified CDS sequence (opt5) from neuraminidase__InfluenzaA__ACV70907

SEQ ID NO: 209521 - RNA, 1410 nt, Artificial Sequence; identical to SEQ ID NO: 208810
  derived and/or modified CDS sequence (opt5) from neuraminidase__InfluenzaA__ACV70917

SEQ ID NO: 209522 - RNA, 1410 nt, Artificial Sequence; identical to SEQ ID NO: 208800
  derived and/or modified CDS sequence (opt5) from neuraminidase__InfluenzaA__ACV70927

SEQ ID NO: 209523 - RNA, 1410 nt, Artificial Sequence; identical to SEQ ID NO: 208810
  derived and/or modified CDS sequence (opt5) from neuraminidase__InfluenzaA__ACV70937

SEQ ID NO: 209524 - RNA, 1410 nt, Artificial Sequence; identical to SEQ ID NO: 208810
  derived and/or modified CDS sequence (opt5) from neuraminidase__InfluenzaA__ACV70947

SEQ ID NO: 209525 - RNA, 1410 nt, Artificial Sequence; identical to SEQ ID NO: 208810
  derived and/or modified CDS sequence (opt5) from neuraminidase__InfluenzaA__ACV70957

SEQ ID NO: 209526 - RNA, 1410 nt, Artificial Sequence; identical to SEQ ID NO: 208810
  derived and/or modified CDS sequence (opt5) from neuraminidase__InfluenzaA__ACV70967

SEQ ID NO: 209527 - RNA, 1410 nt, Artificial Sequence; identical to SEQ ID NO: 208810
  derived and/or modified CDS sequence (opt5) from neuraminidase__InfluenzaA__ACV70977

SEQ ID NO: 209528 - RNA, 1410 nt, Artificial Sequence; identical to SEQ ID NO: 208810
  derived and/or modified CDS sequence (opt5) from neuraminidase__InfluenzaA__ACV70987

SEQ ID NO: 209529 - RNA, 1410 nt, Artificial Sequence; identical to SEQ ID NO: 208810
  derived and/or modified CDS sequence (opt5) from neuraminidase__InfluenzaA__ACV71007

SEQ ID NO: 209530 - RNA, 1410 nt, Artificial Sequence; identical to SEQ ID NO: 208671
  derived and/or modified CDS sequence (opt5) from neuraminidase__InfluenzaA__ACV82218

SEQ ID NO: 209531 - RNA, 1410 nt, Artificial Sequence; identical to SEQ ID NO: 208671
  derived and/or modified CDS sequence (opt5) from neuraminidase__InfluenzaA__ACV82219

SEQ ID NO: 209532 - RNA, 1410 nt, Artificial Sequence
  derived and/or modified CDS sequence (opt5) from neuraminidase__InfluenzaA__ACV82220
augaaccccaaucagaagaucauuaccaucggcagcgugucccugacaauuucuacgaucugcuucuuuaugcaacucgccauucugaucaccacagucacccuucacuucaaacaguacgaguuuaacagcccuccgaauaaccagguuaugcugugugaacccacaaucauugagagaaauaucaccgaaauuguguaucucacaaacaccacgaucgagaaggaaauuugcccuaaacuggcugaguaccggaauugguccaagccccagugugacaucaccggguucgccccuuuuucuaaagauaacagcauucgccuuuccgcgggaggcgacaucugggugacaagagagcccuaugucucuugcgauccugacaaguguuaccaauucgcucuggggcagggaaccacacucaauaacgugcauagcaauaacaccguucgggaucgcacgccguauagaacacugcugaugaaugaacucggcgugcccuuucaccuggggaccaagcaggucugcaucgccugguccagcuacucuugucaugacggaaaagccuggcuucacgugugcauuacaggcgaugacaagaacgcuaccgccuccuucaucuauaauggccggcugguugauagcguggucucuugguccaaagagauucuccgcacccaggaaagcgagugugugugcaucaacgggacauguacgguggucaugaccgacggaucugcuuccggcaaggccgauacaaaaauucuguuuaucgaggaagggaagaucguucauaccagcacacuuuccggaucugcgcaacacguggaggaaugcagcugcuacccuagauaccccggcgugcggugugucugccgcgacaacuggaagggguccaauagaccuauuguggauaucaacauuaaagaccacagcaucguuucuuccuauguguguagcggacuggucggcgacacgccccggaagaaugauucuagcuccucuagccauugccucgacccgaacaaugaggaaggcgggcacggagugaaaggcugggccuucgaugacgggaacgauguuuggaugggacgcaccauuuccgaaaagagcagacugggcuacgagacauuuaaagugaucgagggguggucuaauccuaaguccaaacugcagaucaaccggcaggucauuguggaccgcggaaauagaagcggcuauucuggcaucuucuccgucgagggaaagagcuguauuaaccggugcuuuuacguggaacucaucagagggcgcaaggagaaaaccgaaguucuguggaccuccaauucuauuguggucuucuguggcacaagcgggaccuauggaacaggcuccuggcccgauggggcugacaucaaccuuaugccuauuuga

SEQ ID NO: 209533 - RNA, 1413 nt, Artificial Sequence
  derived and/or modified CDS sequence (opt5) from neuraminidase__InfluenzaA__ACV82221
augaaccccaaucagaagaucauuaccaucggcagcauuuccaucgccauugggaucaucucucugaugcuccaaauuggaaacaucauuagcaucugggcuucccacucuauucagacaggcagccagaauaacacggggaucugcaaucagagaauuaucaccuacgagaacuccacaugggugaaucauaccuaugugaacaucaauaacacaaauguuguggccggagaagacaaaaccucugugacacuggcgggcaacagcucccuuuguagcauuucugggugggcuaucuacaccaaggauaauuccauucggaucggaagcaaaggcgacgucuucgugauucgcgagccuuuuaucucuugcucccaccuggaauguagaacguucuuucucacccaaggcgcccugcuuaacgauaagcauagcaaugggacaguuaaagaccggucuccguaucgcgcccugauguccugcccccucggagaggcuccuagccccuacaacuccaaguucgaaucuguggccuggagcgcuuccgccugucacgauggcaugggguggcugaccaucggaauuagcggcccugacaacggggcggucgccgugcugaaguauaauggaaucauuacaggcaccaucaaaucuuggaagaaacagauucucagaacgcaggaguccgagugcguuuguaugaacggcagcugcuuuacaaucaugaccgaugggcccucuaauaaggcugccagcuacaaaaucuucaagauugaaaagggaaaagugacaaaguccaucgagcugaacgcuccuaauuuuuauuacgaagaguguucuugcuacccggacaccggcauugucaugugugugugccgggauaacuggcaugggagcaaucgccccuggguguccuucaaccagaaucuugacuaucaaaucggauacauuugcagcggcgucuuuggggauaacccuagacccgaggacggagaaggcucuuguaauccuguuaccguggauggcgccaacggggugaaaggauucuccuauaaguacggcaauggggucuggaucggacggacaaaaagcaaccgccugagaaagggcuuugagaugauuugggaccccaauggguggacgaacaccgacucugauuucuccgugaaacaggacguuguggcgaucacagauuggagcggcuauuccggaucuuuuguccagcacccggaacucaccggccuggacugcauccggccuuguuucuggguggagcuuguucgcgggcugcccagagaaaacacaaccauuuggacgagcggauccucuaucagcuucugcggcgucaauuccgauacagccaacuggagcuggccugacggggcugagcuccccuuuaccauugauaaguga

SEQ ID NO: 209534 - RNA, 1410 nt, Artificial Sequence; identical to SEQ ID NO: 208810
  derived and/or modified CDS sequence (opt5) from neuraminidase__InfluenzaA__ACV88402

SEQ ID NO: 209535 - RNA, 1410 nt, Artificial Sequence; identical to SEQ ID NO: 208810
  derived and/or modified CDS sequence (opt5) from neuraminidase__InfluenzaA__ACV88412

SEQ ID NO: 209536 - RNA, 1410 nt, Artificial Sequence; identical to SEQ ID NO: 208800
  derived and/or modified CDS sequence (opt5) from neuraminidase__InfluenzaA__ACV88422

SEQ ID NO: 209537 - RNA, 1365 nt, Artificial Sequence
  derived and/or modified CDS sequence (opt5) from neuraminidase__InfluenzaA__ACV89505
augaaccccaaucagaagaucauuaccaucggcagcauuugccugguggucgggcucaucucccugauucuucaaaucggaaacaucauuucuaucuggauuagccacuccauccagacaggcucucagaaucauacggggauuuguaaccagaauaucauuaccuacaaaaacagcacauggguuaaggacaccacauccgugauccugaccggaaauucuagccucugcccuaucagaggcugggccauuuauuccaaagauaacagcauccggauugggucuaagggagacguguucgucauccgcgagccguuuauuuccuguagccaccuggaaugcagaacauucuuucuuacccaaggcgcucugcucaaugauaaacauucuuccggcacggugaaggaccggagccccuaccgcgcccugaugucuuguccuguuggggaggcgcccuccccuuauaacagcagauucgaauccguggcuuggucugccagcgccugccacgauggaaugggcuggcugaccaucgggaucuccggacccgacaauggcgcugucgccgugcucaaguacaacgggauuaucacagagaccauuaaaagcuggcggaagaaaauccugcgcacacaggaaucugagugugcuugcguuaauggauccuguuuuaccauuaugacggauggcccuagcgacggccuugccucuuauaagaucuucaaaaucgagaaggggaaggugacaaaaagcauugaacugaacgcgcccaauucccauuacgaggaaugcucuuguuauccggauaccggaaaggucaugugcgugugcagagacaacuggcacggcagcaaccggccuuggguguccuuugaucagaaucucgacuaccagaucggguacauuuguagcggagucuucggcgauaacccccgcccugaggacgggacaggaucuugcggccccguuuauguggacggcgccaauggggugaaaggauuuuccuacagauauggcaacggggucuggaucggacggaccaagagccacucuucccgccauggcuucgagaugauuugggauccgaauggguggaccgaaacagacagcaaauuuuccgugagacaagauguuguggcuaugacggacuggucuggcuacagcggauccuucguccagcacccugagcugaccggccuugauuguaugcggcccugcuuuuggguggaacugauccgcgggagaccuaaggagggaacaauuuggaccucugccagcuccaucagcuucuguggcguuaacucugacacaguggauugguccuggcccgacggggcugaacuccccuucagcaucgauaaauga

SEQ ID NO: 209538 - RNA, 1410 nt, Artificial Sequence; identical to SEQ ID NO: 208810
  derived and/or modified CDS sequence (opt5) from neuraminidase__InfluenzaA__ACV91673

SEQ ID NO: 209539 - RNA, 1410 nt, Artificial Sequence; identical to SEQ ID NO: 208810
  derived and/or modified CDS sequence (opt5) from neuraminidase__InfluenzaA__ACV91681

SEQ ID NO: 209540 - RNA, 1410 nt, Artificial Sequence
  derived and/or modified CDS sequence (opt5) from neuraminidase__InfluenzaA__ACX31593
augaaccccaaucagaagaucauuaccaucggcagcgugucccugacaauuucuacgaucugcuucuuuaugcaaauugccauccucaucaccacagucacccugcacuucaaacaguacgaguuuaacagcccuccgaauaaccagguucuucugugugaacccgcuauuaucgagagaaauauuacagaaaucguguaucucaccaacacaaccauugagaaggaaaucugcccuaaacuggccgaguaccggaauugguccaagccccagugugacauuacgggguucgcgccuuuuucuaaagauaacagcauccgccuuuccgcuggaggcgacaucugggugaccagagagcccuaugucucuugcgauccugacaaguguuaccaauucgcccuggggcagggaacaacccucaauaacgugcauagcaauaacacaguucgggaucgcaccccguauagaacgcugcugaugaaugaacucggcgugcccuuucaccuggggacaaagcaggucugcauugccugguccucuagcuccugucaugacggaaaggcuuggcuucacgugugcaucaccggcgaugacaaaaacgccacagcuagcuucauuuacaauggccggcugguugauucuguggucuccuggagcaaagagauccuccgcacccaggaaucugagugugugugcauuaacgggaccuguacaguggucaugacggacggauccgccagcggcaaggcggauaccaaaauccuguuuaucgaggaagggaagauuguucauacauccacccuuucuggaagcgcccaacacguggaggaaugcuccugcuauccuagauaccccggcgugcggugugucugccgcgacaacuggaaggggagcaauagaccuaucguggauauuaacaucaaagaccacucuauuguuuccagcuacguguguucuggacuggucggcgacacaccccggaagaaugauagcuccucuagcucccauugccucgacccgaacaaugaggaaggcgggcacggagugaaaggcugggcuuucgaugacgggaacgauguuuggaugggacgcaccaucagcgagaagucuagacugggcuaugagacguuuaaagugaucgaagggugguccaauccuaagagcaaacugcagauuaaccggcaggucaucguggaccgcggaaauagaucuggcuacuccggcauuuucagcgucgaggggaaguccuguaucaaccggugcuuuuauguggaacucauuagaggacgcaaggaggaaacagagguucuguggaccucuaauagcaucguggucuucuguggcaccuccgggacauacggaaccggcucuuggcccgauggggccgacauuaaccuuaugccuaucuga

SEQ ID NO: 209541 - RNA, 1410 nt, Artificial Sequence; identical to SEQ ID NO: 208810
  derived and/or modified CDS sequence (opt5) from neuraminidase__InfluenzaA__ACX31901

SEQ ID NO: 209542 - RNA, 1410 nt, Artificial Sequence; identical to SEQ ID NO: 208810
  derived and/or modified CDS sequence (opt5) from neuraminidase__InfluenzaA__ACX31902

SEQ ID NO: 209543 - RNA, 1410 nt, Artificial Sequence; identical to SEQ ID NO: 208810
  derived and/or modified CDS sequence (opt5) from neuraminidase__InfluenzaA__ACX31905

SEQ ID NO: 209544 - RNA, 1410 nt, Artificial Sequence; identical to SEQ ID NO: 208810
  derived and/or modified CDS sequence (opt5) from neuraminidase__InfluenzaA__ACX31906

SEQ ID NO: 209545 - RNA, 1410 nt, Artificial Sequence; identical to SEQ ID NO: 208810
  derived and/or modified CDS sequence (opt5) from neuraminidase__InfluenzaA__ACX31907

SEQ ID NO: 209546 - RNA, 1410 nt, Artificial Sequence; identical to SEQ ID NO: 208810
  derived and/or modified CDS sequence (opt5) from neuraminidase__InfluenzaA__ACX31908

SEQ ID NO: 209547 - RNA, 1410 nt, Artificial Sequence; identical to SEQ ID NO: 208965
  derived and/or modified CDS sequence (opt5) from neuraminidase__InfluenzaA__ACX31909

SEQ ID NO: 209548 - RNA, 1410 nt, Artificial Sequence; identical to SEQ ID NO: 208810
  derived and/or modified CDS sequence (opt5) from neuraminidase__InfluenzaA__ACX31911

SEQ ID NO: 209549 - RNA, 1410 nt, Artificial Sequence; identical to SEQ ID NO: 208810
  derived and/or modified CDS sequence (opt5) from neuraminidase__InfluenzaA__ACX31912

SEQ ID NO: 209550 - RNA, 1410 nt, Artificial Sequence; identical to SEQ ID NO: 208810
  derived and/or modified CDS sequence (opt5) from neuraminidase__InfluenzaA__ACX31913

SEQ ID NO: 209551 - RNA, 1410 nt, Artificial Sequence; identical to SEQ ID NO: 208810
  derived and/or modified CDS sequence (opt5) from neuraminidase__InfluenzaA__ACX31914

SEQ ID NO: 209552 - RNA, 1410 nt, Artificial Sequence; identical to SEQ ID NO: 208810
  derived and/or modified CDS sequence (opt5) from neuraminidase__InfluenzaA__ACX31915

SEQ ID NO: 209553 - RNA, 1410 nt, Artificial Sequence; identical to SEQ ID NO: 208810
  derived and/or modified CDS sequence (opt5) from neuraminidase__InfluenzaA__ACX31916

SEQ ID NO: 209554 - RNA, 1410 nt, Artificial Sequence
  derived and/or modified CDS sequence (opt5) from neuraminidase__InfluenzaA__ACX31917
augaaccccaaucagaagaucauuaccaucggcagcgugugcaugacaauugggauggccaaccugauccuccaaauuggaaauaucaucuccauuuggaucucucacagcauucagcugggcaaccagaaucagaucgagacguguaaccaauccgucauuaccuacgaaaauaacacauggguuaaucagaccuaugugaacaucucuaauacaaacuucgcugccgggcagagcguggucuccgugaaacuugcgggaaauucuagccugugcccuguuuccggcugggcuauuuacagcaaggacaacucuaucagaaucggguccaaaggagauguguuugucauucgggagccguucaucagcuguucuccccucgaaugccgcaccuuuuuccugacacagggcgcccuucugaaugacaagcauuccaacggcaccauuacggauagaagcccuuaucggacccucaugucuugucccaucggggaggugccuucccccuacaacagccgcuuugaauccguugccuggucugcuagcgccugccacgacggaauuaauuggcugacaaucggcaucuccgggccugauaacggagcuguggccguccugaaauauaauggcauuaucaccgacacaauuaagagcuggagaaacaauauccuccggacccaagagucugagugugcgugcgugaacggguccuguuucacggugaugacagauggaccgagcgacggccaggccucuuacaagauuuuucgcaucgaaaaaggcaagaucgucaaaagcguugagaugaaugcucccaacuaucauuacgaagagugcuccuguuacccugauucuagcgagauuaccugcgugugcagagacaauuggcacggguccaaccggcccugggugagcuucaaucagaaccuggaauaucagaucggauacauuuguucuggcaucuuuggggauaauccucgccccaacgacaagacaggauccugcggcccggucagcucuaauggggccaacggagugaaaggcuucuccuuuaaguauggcaacgggguuuggauuggaagaaccaagagcaucuccucucggaauggcuucgagaugauuugggauccuaacggguggaccggaacagacaauaacuuuagcaucaaacaagacaucgugggcauuaaugaaugguccggguacucuggcagcuucguccagcaucccgagcuuacgggacuggauuguauccgcccuugcuucuggguggaacucauuagaggccggcccaaggagaacaccaucuggacauccgggagcucuauuuccuuuuguggaguuaauagcgacaccgugggcuggucuuggcccgauggggcugagcugccuuucacaaucgacaaauga

SEQ ID NO: 209555 - RNA, 1410 nt, Artificial Sequence; identical to SEQ ID NO: 208810
  derived and/or modified CDS sequence (opt5) from neuraminidase__InfluenzaA__ACX31918

SEQ ID NO: 209556 - RNA, 1410 nt, Artificial Sequence; identical to SEQ ID NO: 208810
  derived and/or modified CDS sequence (opt5) from neuraminidase__InfluenzaA__ACX31919

SEQ ID NO: 209557 - RNA, 1410 nt, Artificial Sequence; identical to SEQ ID NO: 208810
  derived and/or modified CDS sequence (opt5) from neuraminidase__InfluenzaA__ACX31920

SEQ ID NO: 209558 - RNA, 1410 nt, Artificial Sequence; identical to SEQ ID NO: 209164
  derived and/or modified CDS sequence (opt5) from neuraminidase__InfluenzaA__ACX31922

SEQ ID NO: 209559 - RNA, 1410 nt, Artificial Sequence; identical to SEQ ID NO: 208810
  derived and/or modified CDS sequence (opt5) from neuraminidase__InfluenzaA__ACX31923

SEQ ID NO: 209560 - RNA, 1410 nt, Artificial Sequence; identical to SEQ ID NO: 208800
  derived and/or modified CDS sequence (opt5) from neuraminidase__InfluenzaA__ACX31924

SEQ ID NO: 209561 - RNA, 1410 nt, Artificial Sequence
  derived and/or modified CDS sequence (opt5) from neuraminidase__InfluenzaA__ACX31925
augaaccccaaucagaagaucauuaccaucggcagcgugugcaugacaauugggauggccaaccugauccuccaaauuggaaauaucaucuccauuuggaucucucacagcauucagcugggcaaccagaaucagaucgagacguguaaccaauccgucauuaccuacgaaaauaacacauggguuaaucagaccuaugugaacaucucuaauacaaacuucgcugccgggcagagcguggucuccgugaaacuugcgggaaauucuagccugugcccuguuuccggcugggcuauuuacagcaaggacaacucuaucagaaucggguccaaaggagauguguuugucauucgggagccguucaucagcuguucuccccucgaaugccgcaccuuuuuccugacacagggcgcccuucugaaugacaagcauuccaacggcaccauuaaagauagaagcccuuaucggacgcucaugucuugucccaucggggaggugccuucccccuacaacagccgcuuugaauccguugccuggucugcuagcgccugccacgacggaauuaauuggcugaccaucggcaucuccgggccugauaacggagcuguggccguccugaaguauaauggcauuaucacagacaccauuaagagcuggagaaacaauauccuccggacacaagagucugagugugcgugcgugaacggguccuguuucacccugaugacggauggaccgagcgacggccaggccucuuacaaaauuuuucgcaucgaaaagggcaaaaucgucaagagcguggagaugaaugcucccaacuaucauuacgaagagugcuccuguuacccugauucuagcgagauuacaugcguuugcagagacaauuggcacggguccaaccggcccugggugagcuucaaucagaaccuugaauaucagaucggauacauuuguucuggcaucuuuggggauaauccucgccccaacgacaaaaccggauccugcggcccggugagcucuaauggggccaacggagucaagggcuucuccuuuaaguauggcaacgggguguggauuggaagaacaaaaagcaucuccucucggaauggcuucgagaugauuugggauccuaacggguggaccggaaccgacaauaacuuuagcaucaagcaagacaucguuggcauuaaugaaugguccggguacucuggcagcuucgugcagcaucccgagcugacaggacucgauuguauccgcccuugcuucugggucgaacugauuagaggccggcccaaagagaacacgaucuggaccuccgggagcucuauuuccuuuuguggagugaauagcgacacaguuggcuggucuuggcccgauggggcugagcuuccuuucaucaucgacaaguga

SEQ ID NO: 209562 - RNA, 1410 nt, Artificial Sequence; identical to SEQ ID NO: 208810
  derived and/or modified CDS sequence (opt5) from neuraminidase__InfluenzaA__ACX31926

SEQ ID NO: 209563 - RNA, 1410 nt, Artificial Sequence; identical to SEQ ID NO: 208810
  derived and/or modified CDS sequence (opt5) from neuraminidase__InfluenzaA__ACX31927

SEQ ID NO: 209564 - RNA, 1410 nt, Artificial Sequence
  derived and/or modified CDS sequence (opt5) from neuraminidase__InfluenzaA__ACX31928
augaaccccaaucagaagaucauuaccaucggcagcgugugcaugacaauugggauggccaaccugauccuccaaauuggaaauaucaucuccauuuggaucucucacagcauucagcugggcaaccagaaucagaucgagacguguaaccaauccgucauuaccuacgaaaauaacacauggguuaaucagaccuaugugaacaucucuaauacaaacuucgcugccgggcagagcguggucuccgugaaacuugcgggaaauucuagccugugcccuguuuccggcugggcuauuuacagcaaggacaacucuaucagaaucggguccaaaggagauguguuugucauucgggagccguucaucagcuguucuccccucgaaugccgcaccuuuuuccugacacagggcgcccuucugaaugacaagcauuccaacggcaccauuaaagauagaagcccuuaucggacgcucaugucuugucccaucggggaggugccuucccccuacaacagccgcuuugaauccguugccuggucugcuagcgccugccacgacggaauuaauuggcugaccaucggcaucuccgggccugauaacggagcuguggccguccugaaguauaauggcauuaucacagacaccauuaagagcuggagaaacaauauccuccggacacaagagucugagugugcgugcgugaacggguccuguuucaccgugaugacggauggaccgagcgacggccaggccucuuacaaaauuuuucgcaucgaaaagggcaaaaucgucaagagcguugagaugaaugcucccaacuaucauuacgaagagugcuccuguuacccugauucuagcgagauuacaugcgugugcagagacaauuggcacggguccaaccggcccugggugagcuucaaucagaaccuggaauaucagaucggauacauuuguucuggcaucuuuggggauaauccucgccccaacgacaaaaccggauccugcggcccggucagcucuaauggggagaacggagugaagggcuucuccuuuaaguauggcaacgggguuuggauuggaagaacaaaaagcaucuccucucggaauggcuucgaaaugauuugggauccuaacggguggaccggaaccgacaauaacuuuagcaucaagcaagacaucgugggcauuaaugagugguccggguacucuggcagcuucguccagcaucccgaacuuacaggacuggauuguauccgcccuugcuucuggguggagcucauuagaggccggcccaaagagaacacgaucuggaccuccgggagcucuauuuccuuuuguggaguuaauggcgacacagugggguggagcuggcccgauggagccgaacugccuuucaccaucgacaaguga

SEQ ID NO: 209565 - RNA, 1410 nt, Artificial Sequence; identical to SEQ ID NO: 208840
  derived and/or modified CDS sequence (opt5) from neuraminidase__InfluenzaA__ACX31929

SEQ ID NO: 209566 - RNA, 1410 nt, Artificial Sequence; identical to SEQ ID NO: 209164
  derived and/or modified CDS sequence (opt5) from neuraminidase__InfluenzaA__ACX31930

SEQ ID NO: 209567 - RNA, 1410 nt, Artificial Sequence; identical to SEQ ID NO: 208810
  derived and/or modified CDS sequence (opt5) from neuraminidase__InfluenzaA__ACX31931

SEQ ID NO: 209568 - RNA, 1410 nt, Artificial Sequence; identical to SEQ ID NO: 208810
  derived and/or modified CDS sequence (opt5) from neuraminidase__InfluenzaA__ACX31932

SEQ ID NO: 209569 - RNA, 1410 nt, Artificial Sequence; identical to SEQ ID NO: 208810
  derived and/or modified CDS sequence (opt5) from neuraminidase__InfluenzaA__ACX35250

SEQ ID NO: 209570 - RNA, 1410 nt, Artificial Sequence; identical to SEQ ID NO: 208810
  derived and/or modified CDS sequence (opt5) from neuraminidase__InfluenzaA__ACX35260

SEQ ID NO: 209571 - RNA, 1410 nt, Artificial Sequence; identical to SEQ ID NO: 208810
  derived and/or modified CDS sequence (opt5) from neuraminidase__InfluenzaA__ACX35270

SEQ ID NO: 209572 - RNA, 1410 nt, Artificial Sequence
  derived and/or modified CDS sequence (opt5) from neuraminidase__InfluenzaA__ACX35280
augaaccccaaucagaagaucauuaccaucggcagcgugugcaugacaauugggauggccaaccugauccuccaaauuggaaauaucaucuccauuuggaucucucacagcauucagcugggcaaccagaaucagaucgagacguguaaccaauccgucauuaccuacgaaaauaacacauggguuaaucagaccuaugugaacaucucuaauacaaacuucgcugccgggcagagcguggucuccgugaaacuugcgggaaauucuagccugugcccuguuuccggcugggcuauuuacagcaaggacaacucuaucagaaucggguccaaaggagauguguuugucauucgggagccguucaucagcuguucuccccucgaaugccgcaccuuuuuccugacacagggcgcccuucugaaugacaagcauuccaacggcaccauuaaagauagaagcccuuaucggacgcucaugucuugucccaucggggaggugccuucccccuacaacagccgcuuugaauccguugccuggucugcuagcgccugccacgacggaauuaauuggcugaccaucggcaucuccgggccugauaacggagcuguggccguccugaaguauaauggcauuaucacagacaccauuaagagcuggagaaacaauauccuccggacacaagagucugagugugcgugcgugaacggguccuguuucaccgugaugacggauggaccgagcgacggccaggccucuuacaaaauuuuucgcaucgaaaagggcaaaaucgucaagagcguugauaugaaugcucccaacuaucauuacgaggaaugcuccuguuacccugacucuagcgagauuacaugcgugugcagagauaauuggcacggguccaaccggcccugggugagcuucaaucagaaccuggaguaucagaucggauacauuuguucuggcaucuuuggggacaauccucgccccaacgauaaaaccggauccugcggcccggucagcucuaauggggccaacggagugaagggcuucuccuuuaaguauggcaacgggguuuggauuggaagaacaaaaagcaucuccucucggaauggcuucgaaaugauuugggacccuaacggguggaccggaaccgacaauaacuuuagcaucaagcaagauaucgugggcauuaaugagugguccggguacucuggcagcuucguccagcaucccgaacuuacaggacuggacuguauccgcccuugcuucuggguggagcucauuagaggccggcccaaagaaaacacgaucuggaccuccgggagcucuauuuccuuuuguggaguuaauagcgauacagugggcuggucuuggcccgacggggcugagcugccuuucaccaucgauaaguga

SEQ ID NO: 209573 - RNA, 1410 nt, Artificial Sequence; identical to SEQ ID NO: 208810
  derived and/or modified CDS sequence (opt5) from neuraminidase__InfluenzaA__ACX35290

SEQ ID NO: 209574 - RNA, 1410 nt, Artificial Sequence; identical to SEQ ID NO: 208810
  derived and/or modified CDS sequence (opt5) from neuraminidase__InfluenzaA__ACX35300

SEQ ID NO: 209575 - RNA, 1410 nt, Artificial Sequence
  derived and/or modified CDS sequence (opt5) from neuraminidase__InfluenzaA__ACX35310
augaaccccaaucagaagaucauuaccaucggcagcgugugcaugacaauugggauggccaaccugauccuccaaauuggaaauaucaucuccauuuggaucucucacagcauucagcugggcaaccagaaucagaucgggacguguaaccaauccgucauuaccuacgagaauaacacauggguuaaucagaccuaugugaacaucucuaauacaaacuucgcugccggacagagcguggucuccgugaaacuugcgggcaauucuagccugugcccuguuuccgggugggcuauuuacagcaaggacaacucuaucagaaucggauccaaaggcgauguguuugucauucgggaaccguucaucagcuguucuccccucgagugccgcaccuuuuuccugacacagggcgcccuucugaaugacaagcauuccaacgggaccauuaaagauagaagcccuuaucggacgcucaugucuugucccaucggagaagugccuucccccuacaacagccgcuuugaguccguugccuggucugcuagcgccugccacgacggcauuaauuggcugaccaucgggaucuccggaccugauaacggcgcuguggccguccugaaguauaaugggauuaucacagacaccauuaagagcuggagaaacaauauccuccggacacaagaaucugagugugcgugcgugaacggauccuguuucaccgugaugacggauggcccgagcgacggccaggccucuuacaaaauuuuucgcaucgagaaggggaaaaucgucaagagcguugaaaugaaugcucccaacuaucauuacgaggaaugcuccuguuacccugauucuagcgagauuacaugcgugugcagagacaauuggcacggauccaaccggcccugggugagcuucaaucagaaccuggaguaucagaucggcuacauuuguucugggaucuuuggagauaauccucgccccaacgacaaaaccggcuccugcgggccggucagcucuaauggagccaacggcgugaagggcuucuccuuuaaguaugggaacggaguuuggauuggcagaacaaaaagcaucuccucucggaauggguucgaaaugauuugggauccuaacggauggaccggcaccgacaauaacuuuagcaucaagcaagacaucguggggauuaaugagugguccggcuacucuggcagcuucguccagcaucccgaacuuacaggacuggauuguauccgcccuugcuucuggguggagcucauuagagggcggcccaaagaaaacacgaucuggaccuccggaagcucuauuuccuuuuguggcguuaauagcgacacagugggguggucuuggcccgauggagcugagcugccuuucaccaucgacaaguga

SEQ ID NO: 209576 - RNA, 1410 nt, Artificial Sequence; identical to SEQ ID NO: 208810
  derived and/or modified CDS sequence (opt5) from neuraminidase__InfluenzaA__ACX35320

SEQ ID NO: 209577 - RNA, 1410 nt, Artificial Sequence
  derived and/or modified CDS sequence (opt5) from neuraminidase__InfluenzaA__ACX35330
augaaccccaaucagaagaucauuaccaucggcagcgugugcauuacaaucgggauggccaaccugauucuccaaaucggaaauaucauuuccaucuggauuucucacagcauccagcugggcaaccagaaucagauugagacguguaaccaauccgucaucaccuacgaaaauaacacauggguuaaucagaccuaugugaacauuucuaauacaaacuucgcugccgggcagagcguggucuccgugaaacuugcgggaaauucuagccugugcccuguuuccggcugggcuaucuacagcaaggacaacucuaucagaauuggguccaaaggagauguguuugucauccgggagccguucauuagcuguucuccccucgaaugccgcaccuuuuuccugacacagggcgcccuucugaaugacaagcauuccaacggcaccaucaaagauagaagcccuuaucggacgcucaugucuugucccauuggggaggugccuucccccuacaacagccgcuuugaauccguugccuggucugcuagcgccugccacgacggaaucaauuggcugaccaucggcauuuccgggccugauaacggagcuguggccguccugaaguauaauggcaucauuacagacaccaucaagagcuggagaaacaauauucuccggacacaagagucugagugugcgugcgugaacggguccuguuucaccgugaugacggauggaccgagcgacggccaggccucuuacaaaaucuuucgcaucgaaaagggcaaaauugucaagagcguugagaugaaugcucccaacuaucauuacgaagagugcuccuguuacccugauucuagcgagaucacaugcgugugcagagacaauuggcacggguccaaccggcccugggugagcuucaaucagaaccuggaauaucagauuggauacaucuguucuggcauuuuuggggauaauccucgccccaacgacaaaaccggauccugcggcccggucagcucuaauggggccaacggagugaagggcuucuccuuuaaguauggcaacgggguuuggaucggaagaacaaaaagcauuuccucucggaauggcuucgagaugaucugggauccuaacggguggaccggaaccgacaauaacuuuagcaucaagcaagacauugugggcaucaaugaaugguccggguacucuggcagcuucguccagcaucccgagcuuacaggacuggauuguauucgcccuugcuucuggguggaacucaucagaggccggcccaaagagaacacgauuuggaccuccgggagcucuaucuccuuuuguggaguuaauagcgacacagugggcuggucuuggcccgauggggcugagcugccuuucaccaucgacaaguga

SEQ ID NO: 209578 - RNA, 1410 nt, Artificial Sequence; identical to SEQ ID NO: 208810
  derived and/or modified CDS sequence (opt5) from neuraminidase__InfluenzaA__ACX48479

SEQ ID NO: 209579 - RNA, 1410 nt, Artificial Sequence; identical to SEQ ID NO: 208810
  derived and/or modified CDS sequence (opt5) from neuraminidase__InfluenzaA__ACX48481

SEQ ID NO: 209580 - RNA, 1410 nt, Artificial Sequence; identical to SEQ ID NO: 208810
  derived and/or modified CDS sequence (opt5) from neuraminidase__InfluenzaA__ACX55836

SEQ ID NO: 209581 - RNA, 1410 nt, Artificial Sequence
  derived and/or modified CDS sequence (opt5) from neuraminidase__InfluenzaA__ACX56269
augaaccccaagcagaaaaucauuaccaucggcagcgugugcaugacaauugggauggccaaucugauccuccaaauuggaaacaucaucuccauuuggaucucucacagcauucagcugggcaaucagaaccagaucgagacguguaaucaauccgucauuaccuacgaaaacaauacauggguuaaccagaccuaugugaauaucucuaacacaaauuucgcugccgggcagagcguggucuccgugaaacuugcgggaaacucuagccugugcccuguuuccggcugggcuauuuacagcaaggacaauucuaucagaaucggguccaagggagauguguuugucauucgggagccguucaucagcuguucuccccucgaaugccgcaccuuuuuccugacacagggcgcccuucugaacgacaaacauuccaauggcaccauuaaggauagaagcccuuaucggacgcucaugucuugucccaucggggaggugccuucccccuacaacagccgcuuugaauccguugccuggucugcuagcgccugccacgacggaauuaacuggcugaccaucggcaucuccgggccugauaauggagcuguggccguccugaaguauaacggcauuaucacagacaccauuaaaagcuggagaaauaacauccuccggacacaagagucugagugugcgugcgugaauggguccuguuucaccgugaugacggauggaccgagcgacggccaggccucuuacaagauuuuucgcaucgaaaaaggcaagaucgucaaaagcguugagaugaacgcucccaauuaucauuacgaagagugcuccuguuacccugauucuagcgagauuacaugcgugugcagagacaacuggcacggguccaaucggcccugggugagcuucaaccagaaucuggaauaucagaucggauacauuuguucuggcaucuuuggggauaacccucgccccaaugacaagaccggauccugcggcccggucagcucuaacggggccaauggagugaagggcuucuccuuuaaauauggcaacgggguuuggauuggaagaacaaagagcaucuccucucggaacggcuucgagaugauuugggauccuaauggguggaccggaaccgacaacaauuuuagcaucaaacaagacaucgugggcauuaacgaaugguccggguacucuggcagcuucguccagcaucccgagcuuacaggacuggauuguauccgcccuugcuucuggguggaacucauuagaggccggcccaaggagaauacgaucuggaccuccgggagcucuauuuccuuuuguggaguuaacagcgacacagugggcuggucuuggcccgauggggcugagcugccuuucaccaucgacaaauga

SEQ ID NO: 209582 - RNA, 1410 nt, Artificial Sequence
  derived and/or modified CDS sequence (opt5) from neuraminidase__InfluenzaA__ACX56270
augaaccccaagcagaaaaucauuaccaucggcagcgugugcaugacaauugggauggccaaucugauccuccaaauuggaaacaucaucuccauuuggaucucucacagcauucagcugggcaaucagaaccagaucgagacguguaaucaauccgucauuaccuacgaaaacaauacauggguuaaccagaccuaugugaauaucucuaacacaaauuucgcugccgggcagagcguggucuccgugaaacuugcgggaaacucuagccugugcccuguuuccggcugggcuauuuacagcaaggacaauucuaucagaaucggguccaagggagauguguuugucauucgggagccguucaucagcuguucuccccucgaaugccgcaccuuuuuccugacacagggcgcccuucugaacgacaaacauuccaauggcaccauuaaggauagaagcccuuaucggacgcucaugucuugucccaucggggaggugccuucccccuacaacagccgcuuugaauccguugccuggucugcuagcgccugccacgacggaauuaacuggcugaccaucggcaucuccgggccugauaauggagcuguggccguccugaaguauaacggcauuaucacagacaccauuaaaagcuggagaaauaacauccuccggacacaagagucugagugugcgugcgugaauggguccuguuucaccgugaugacggauggaccgagcgacggccaggccucuuacaagauuuuucgcaucgaaaaaggcaagaucgucaaaagcguugagaugaacgcucccaauuaucauuacgaagagugcuccuguuacccugauucuagcgagauuacaugcgugugcagagacaacuggcacggguccaaucggcccugggugagcuucaaccagaaucuggaauaucagaucggauacauuuguucuggcaucuuuggggauaacccucgccccaaugacaagaccggauccugcggcccggucagcucuaacggggccaauggagugaagggcuucuccuuuaaauauggcaacgggguuuggauuggaagaacaaagagcaucuccucucggaacggcuucgagaugauuugggauccuaauggguggaccggaaccgacaacaauuuuagcaucaaacaagacaucgugggcauuaacgaaugguccggguacucuggcagcuucguccagcaucccgagcuuacaggacuggauuguauccgcccuugcuucuggguggaacucauuagaggccggcccaaggagaauacgaucuggaccuccgggagcucuauuuccuuuuguggaguuaacagcgacucuguguccuggagcuggcccgauggcgcugagcugccuuucacaaucgacaaauga

SEQ ID NO: 209583 - RNA, 1410 nt, Artificial Sequence
  derived and/or modified CDS sequence (opt5) from neuraminidase__InfluenzaA__ACX56271
augaaccccaagcagaaaaucauuaccaucggcagcgugugcaugacaauugggauggccaaucugauccuccaaauuggaaacaucaucuccauuuggaucucucacagcauucagcugggcaaucagaaccagaucgagacguguaaucaauccgucauuaccuacgaaaacaauacauggguuaaccagaccuaugugaauaucucuaacacaaaucuugcugccgggcagagcgugggauccgucaagcuggcgggcaacucuagccucugcccuguguccgggugggcuauuuacagcaaagacaauucuaucagaaucggauccaagggcgauguuuucgugauucgggagccguuuaucagcuguucuccccuggaaugccgcaccuucuuucuuacacagggcgcccugcucaacgacaaacauuccaaugggaccauuaaggauagaagcccuuaucggacgcugaugucuugucccaucggagaggucccuucccccuacaacagccgcuucgaauccguggccuggucugcuagcgccugccacgacggcauuaacuggcugaccaucgggaucuccggaccugauaauggcgcuguugccgugcucaaguauaacgggauuaucacagacaccauuaaaagcuggagaaauaacauccugcggacacaagagucugagugugcgugcgucaauggauccuguuuuaccgugaugacggauggcccgagcgacggccaggccucuuacaagauuuuccgcaucgaaaaagggaagaucgugaaaagcgucgagaugaacgcucccaauuaucauuacgaagagugcuccuguuacccugauucuagcgagauuacaugcguuugcagagacaacuggcacggauccaaucggcccugggugagcuuuaaccagaaucuugaauaucagaucggcuacauuuguucugggaucuucggagauaacccucgccccaaugacaagaccggcuccugcgggccggugagcucuaacggagccaauggcgucaagggcuuuuccuucaaauaugggaacggaguguggauuggcagaacaaagagcaucuccucucggaacggguuugagaugauuugggauccuaauggauggaccggcaccgacaacaauuucagcaucaaacaagacaucguugggauuaacgaaugguccggcuacucuggcagcuuugugcagcaucccgagcugacaggacucgauuguauccgcccuugcuucugggucgaacugauuagagggcggcccaaggagaauacgaucuggaccuccggaagcucuauuuccuucuguggcgugaacagcgacacaguuggguggucuuggcccgauggagcugagcuuccuuuuaccaucgacaaauga

SEQ ID NO: 209584 - RNA, 1410 nt, Artificial Sequence; identical to SEQ ID NO: 208810
  derived and/or modified CDS sequence (opt5) from neuraminidase__InfluenzaA__ACX83579

SEQ ID NO: 209585 - RNA, 1410 nt, Artificial Sequence; identical to SEQ ID NO: 208810
  derived and/or modified CDS sequence (opt5) from neuraminidase__InfluenzaA__ACX85425

SEQ ID NO: 209586 - RNA, 1410 nt, Artificial Sequence; identical to SEQ ID NO: 208810
  derived and/or modified CDS sequence (opt5) from neuraminidase__InfluenzaA__ACX85426

SEQ ID NO: 209587 - RNA, 1410 nt, Artificial Sequence
  derived and/or modified CDS sequence (opt5) from neuraminidase__InfluenzaA__ACY02998
augaaccccaaucagaagaucauuaccaucggcagcgugugcaugacaauugggauggccaaccugauccuccaaauuggaaauaucaucuccauuuggaucucucacagcauucagcugggcaaccagaaucagaucgagacguguaaccaauccgucauuaccuacgaaaauaacacauggguuaaucagaccuaugugaacaucucuaauacaaacuucgcugccgggcagagcguggucuccgugaaacuugcgggaaauucuagccugugcccuguuuccggcugggcuauuuacagcaaggacaacucuaucagaaucggguccaaaggagauguguuugucauucgggagccguucaucagcuguucuccccucgaaugccgcaccuuuuuccugacacagggcgcccuucugaaugacaagcauuccaacggcaccauuaaagauagaagcccuuaucggacgcucaugucuugucccaucggggaggugccuucccccuacaacagccgcuuugaauccguugccuggucugcuagcgccugccacgacggaauuaauuggcugaccaucggcaucuccgggccugauaacggagcuguggccguccugaaguauaauggcauuaucacagacaccauuaagagcuggagaaacaauauccuccggacacaagagucugagugugcgugcgugaacggguccuguuucaccgugaugacggauggaccgagcaauggccaggccucuuacaaaauuuuucgcaucgaaaagggcaaaaucgucaagagcguugagaugaacgcucccaauuaucauuacgaagagugcuccuguuacccugacucuggggagauuacaugcgugugcagagauaacuggcacggaagcaaucggcccuggguguccuucaaccagaaucuggaauaucagaucggcuacauuuguagcgggaucuuuggagacaacccucgccccaaugauaaaaccggcucuugcgggccggucuccagcaacggagccaacggcgugaagggcuucucuuuuaaguaugggaauggaguuuggauuggcagaacaaaauccaucagcucccggaacggguucgagaugauuugggacccuaauggauggaccggcaccgauaacaauuuuucuaucaagcaagacaucguggggauuaacgaauggagcggcuacuccggaucuuucguccagcaucccgagcuuacaggccuggacuguauccgcccuugcuucuggguggaacucauuagagggcggcccaaagagaauacgaucuggaccagcggauccagcauuucuuuuuguggcguuaacuccgauacagugggguggagcuggcccgacggagcugagcugccuuucaccaucgauaaguga

SEQ ID NO: 209588 - RNA, 1410 nt, Artificial Sequence; identical to SEQ ID NO: 208810
  derived and/or modified CDS sequence (opt5) from neuraminidase__InfluenzaA__ACY03005

SEQ ID NO: 209589 - RNA, 1410 nt, Artificial Sequence; identical to SEQ ID NO: 208810
  derived and/or modified CDS sequence (opt5) from neuraminidase__InfluenzaA__ACY03008

SEQ ID NO: 209590 - RNA, 1410 nt, Artificial Sequence; identical to SEQ ID NO: 208810
  derived and/or modified CDS sequence (opt5) from neuraminidase__InfluenzaA__ACY03011

SEQ ID NO: 209591 - RNA, 1410 nt, Artificial Sequence; identical to SEQ ID NO: 208810
  derived and/or modified CDS sequence (opt5) from neuraminidase__InfluenzaA__ACY03012

SEQ ID NO: 209592 - RNA, 1410 nt, Artificial Sequence; identical to SEQ ID NO: 208810
  derived and/or modified CDS sequence (opt5) from neuraminidase__InfluenzaA__ACY03016

SEQ ID NO: 209593 - RNA, 1410 nt, Artificial Sequence; identical to SEQ ID NO: 208810
  derived and/or modified CDS sequence (opt5) from neuraminidase__InfluenzaA__ACY26194

SEQ ID NO: 209594 - RNA, 1410 nt, Artificial Sequence; identical to SEQ ID NO: 208810
  derived and/or modified CDS sequence (opt5) from neuraminidase__InfluenzaA__ACY26204

SEQ ID NO: 209595 - RNA, 1410 nt, Artificial Sequence; identical to SEQ ID NO: 208810
  derived and/or modified CDS sequence (opt5) from neuraminidase__InfluenzaA__ACY30123

SEQ ID NO: 209596 - RNA, 1410 nt, Artificial Sequence; identical to SEQ ID NO: 208810
  derived and/or modified CDS sequence (opt5) from neuraminidase__InfluenzaA__ACY30124

SEQ ID NO: 209597 - RNA, 1410 nt, Artificial Sequence; identical to SEQ ID NO: 208810
  derived and/or modified CDS sequence (opt5) from neuraminidase__InfluenzaA__ACY30125

SEQ ID NO: 209598 - RNA, 1410 nt, Artificial Sequence; identical to SEQ ID NO: 208810
  derived and/or modified CDS sequence (opt5) from neuraminidase__InfluenzaA__ACY30127

SEQ ID NO: 209599 - RNA, 1410 nt, Artificial Sequence; identical to SEQ ID NO: 208810
  derived and/or modified CDS sequence (opt5) from neuraminidase__InfluenzaA__ACY30128

SEQ ID NO: 209600 - RNA, 1410 nt, Artificial Sequence; identical to SEQ ID NO: 208810
  derived and/or modified CDS sequence (opt5) from neuraminidase__InfluenzaA__ACY46105

SEQ ID NO: 209601 - RNA, 1410 nt, Artificial Sequence; identical to SEQ ID NO: 208810
  derived and/or modified CDS sequence (opt5) from neuraminidase__InfluenzaA__ACY46165

SEQ ID NO: 209602 - RNA, 1410 nt, Artificial Sequence; identical to SEQ ID NO: 208810
  derived and/or modified CDS sequence (opt5) from neuraminidase__InfluenzaA__ACY46175

SEQ ID NO: 209603 - RNA, 1410 nt, Artificial Sequence; identical to SEQ ID NO: 208810
  derived and/or modified CDS sequence (opt5) from neuraminidase__InfluenzaA__ACY46345

SEQ ID NO: 209604 - RNA, 1410 nt, Artificial Sequence; identical to SEQ ID NO: 208810
  derived and/or modified CDS sequence (opt5) from neuraminidase__InfluenzaA__ACY46385

SEQ ID NO: 209605 - RNA, 1410 nt, Artificial Sequence; identical to SEQ ID NO: 208810
  derived and/or modified CDS sequence (opt5) from neuraminidase__InfluenzaA__ACY46485

SEQ ID NO: 209606 - RNA, 1410 nt, Artificial Sequence; identical to SEQ ID NO: 208840
  derived and/or modified CDS sequence (opt5) from neuraminidase__InfluenzaA__ACY77536

SEQ ID NO: 209607 - RNA, 1410 nt, Artificial Sequence; identical to SEQ ID NO: 208800
  derived and/or modified CDS sequence (opt5) from neuraminidase__InfluenzaA__ACY77546

SEQ ID NO: 209608 - RNA, 1410 nt, Artificial Sequence; identical to SEQ ID NO: 208840
  derived and/or modified CDS sequence (opt5) from neuraminidase__InfluenzaA__ACY77565

SEQ ID NO: 209609 - RNA, 1410 nt, Artificial Sequence
  derived and/or modified CDS sequence (opt5) from neuraminidase__InfluenzaA__ACY77575
augaaccccaaucagaagaucauuaccaucggcagcgugugcaugacaauugggauggccaaccugauccuccaaauuggaaauaucaucuccauuuggaucucucacagcauucagcugggcaaccagaaucagaucgagacguguaaccaauccgucauuaccuacgaaaauaacacauggguuaaucagaccuaugugaacaucucuaauacaaacuucgcugccgggcagagcguggucuccgugaaacuugcgggaaauucuagccugugcccuguuuccggcugggcuauuuacagcaaggacaacucuaucagaaucggguccaaaggagauguguuugucauucgggagccguucaucagcuguucuccccucgaaugccgcaccuuuuuccugacacagggcgcccuucugaaugacaagcauuccaacggcaccauuaaagauagaagcccuuaucggacgcucaugucuugucccaucggggaggugccuucccccuacaacagccgcuuugaauccguugccuggucugcuagcgccugccacgacggaauuaauuggcugaccaucggcaucuccgggccugauaacggagcuguggccguccugaaguauaauggcauuaucacagacaccauuaagagcuggagaaacaauauccuccggacacaagagucugagugugcgugcgugaacggguccuguuucaccgugaugacggauggaccgagcgacggccaggccucuuacaaaauuuuucgcaucgaaaagggcaaaaucgucaagagcguugagaugaaugcucccaacuaucauuacgaagagugcuccuguuacccugauucuagcgagauuacaugcgugugcagagacaauuggcacggguccaaccggcccugggugagcuucaaucagaaccuggaauaucagaucggauacauuuguucuggcaucuuuggggauaauccucgccccuccgacaaaaccggaagcugcggcccggucucuuccaacggggccaauggagugaagggcuucagcuuuaaguauggcaacgggguuuggauuggaagaacaaaauccaucucuagccggaacggcuucgagaugauuugggauccuaauggguggaccggaaccgacaacaauuuuuccaucaagcaagacaucgugggcauuaacgaauggucuggguacagcggcuccuucguccagcaucccgagcuuacaggacuggauuguauccgcccuugcuucuggguggaacucauuagaggccggcccaaagagaauacgaucuggaccagcgggucuuccauuagcuuuuguggaguuaacucugacacagugggcugguccuggcccgauggggcugagcugccuuucaccaucgacaaguga

SEQ ID NO: 209610 - RNA, 1410 nt, Artificial Sequence; identical to SEQ ID NO: 208810
  derived and/or modified CDS sequence (opt5) from neuraminidase__InfluenzaA__ACY77585

SEQ ID NO: 209611 - RNA, 1410 nt, Artificial Sequence; identical to SEQ ID NO: 208840
  derived and/or modified CDS sequence (opt5) from neuraminidase__InfluenzaA__ACY77595

SEQ ID NO: 209612 - RNA, 1410 nt, Artificial Sequence; identical to SEQ ID NO: 208840
  derived and/or modified CDS sequence (opt5) from neuraminidase__InfluenzaA__ACY77605

SEQ ID NO: 209613 - RNA, 1410 nt, Artificial Sequence; identical to SEQ ID NO: 208810
  derived and/or modified CDS sequence (opt5) from neuraminidase__InfluenzaA__ACY77625

SEQ ID NO: 209614 - RNA, 1410 nt, Artificial Sequence
  derived and/or modified CDS sequence (opt5) from neuraminidase__InfluenzaA__ACY77655
augaaccccaaucagaagaucauuaccaucggcagcgugugcaugacaauugggauggccaaccugauccuccaaauuggaaauaucaucuccauuuggaucucucacagcauucagcugggcaaccagaaucagaucgagacguguaaccaauccgucauuaccuacgaaaauaacacauggguuaaucagaccuaugugaacaucucuaauacaaacuucgcugccgggcagagcguggucuccgugaaacuugcgggaaauucuagccugugcccuguuuccggcugggcuauuuacagcaaggacaacucugugagaaucggguccaaaggagaugucuuugugauccgggagccguucauuagcuguucuccccucgaaugccgcaccuuuuuccugacacagggcgcccuucugaaugacaagcauuccaacggcaccaucaaagauagaagcccuuaucggacgcucaugucuugucccauuggggagguuccuucccccuacaacagccgcuuugaauccguggccuggucugcuagcgccugccacgacggaaucaauuggcugaccauuggcaucuccgggccugauaacggagcugucgccgugcugaaguauaauggcaucauuacagacaccaucaagagcuggagaaacaauauucuccggacacaagagucugagugugcgugcgugaacggguccuguuucaccgucaugacggauggaccgagcaauggccaggccucuuacaaaaucuuucgcauugaaaagggcaaaaucguuaagagcguggagaugaacgcucccaauuaucauuacgaagagugcuccuguuacccugacucuagcgagaucacaugcgugugcagagauaacuggcacggguccaaucggcccugggucagcuucaaccagaaucuggaauaucagauuggauacaucuguucuggcauuuuuggggacaacccucgccccaaugauaaaaccggauccugcggcccggugagcuucaacggggccaacggaguuaagggcuuuucuuucaaguauggcaaugggguguggaucggaagaacaaaauccauuagcucccggaacggcuuugagaugaucugggacccuaauggguggaccggaaccgauaacaauuucucuauuaagcaagacaucgucggcaucaacgaauggagcggguacuccggcucuuucgugcagcaucccgagcuuacaggacuggacuguauucgcccuugcuuuuggguugaacucaucagaggccggcccaaagagaauacgauuuggaccagcggguccagcaucucuuucuguggagugaacuccgauacagucggcuggagcuggcccgacggggcugagcugccuuuuaccauugauaaguga

SEQ ID NO: 209615 - RNA, 1410 nt, Artificial Sequence; identical to SEQ ID NO: 208810
  derived and/or modified CDS sequence (opt5) from neuraminidase__InfluenzaA__ACY77665

SEQ ID NO: 209616 - RNA, 1410 nt, Artificial Sequence; identical to SEQ ID NO: 208810
  derived and/or modified CDS sequence (opt5) from neuraminidase__InfluenzaA__ACY77675

SEQ ID NO: 209617 - RNA, 1410 nt, Artificial Sequence; identical to SEQ ID NO: 208800
  derived and/or modified CDS sequence (opt5) from neuraminidase__InfluenzaA__ACY77685

SEQ ID NO: 209618 - RNA, 1410 nt, Artificial Sequence; identical to SEQ ID NO: 208800
  derived and/or modified CDS sequence (opt5) from neuraminidase__InfluenzaA__ACY77695

SEQ ID NO: 209619 - RNA, 1410 nt, Artificial Sequence; identical to SEQ ID NO: 208800
  derived and/or modified CDS sequence (opt5) from neuraminidase__InfluenzaA__ACY77705

SEQ ID NO: 209620 - RNA, 1410 nt, Artificial Sequence; identical to SEQ ID NO: 208800
  derived and/or modified CDS sequence (opt5) from neuraminidase__InfluenzaA__ACY77725

SEQ ID NO: 209621 - RNA, 1410 nt, Artificial Sequence; identical to SEQ ID NO: 208800
  derived and/or modified CDS sequence (opt5) from neuraminidase__InfluenzaA__ACY77735

SEQ ID NO: 209622 - RNA, 1410 nt, Artificial Sequence; identical to SEQ ID NO: 208810
  derived and/or modified CDS sequence (opt5) from neuraminidase__InfluenzaA__ACY77745

SEQ ID NO: 209623 - RNA, 1410 nt, Artificial Sequence; identical to SEQ ID NO: 208810
  derived and/or modified CDS sequence (opt5) from neuraminidase__InfluenzaA__ACY77755

SEQ ID NO: 209624 - RNA, 1410 nt, Artificial Sequence; identical to SEQ ID NO: 208810
  derived and/or modified CDS sequence (opt5) from neuraminidase__InfluenzaA__ACY77775

SEQ ID NO: 209625 - RNA, 1410 nt, Artificial Sequence; identical to SEQ ID NO: 208810
  derived and/or modified CDS sequence (opt5) from neuraminidase__InfluenzaA__ACY77785

SEQ ID NO: 209626 - RNA, 1410 nt, Artificial Sequence; identical to SEQ ID NO: 208810
  derived and/or modified CDS sequence (opt5) from neuraminidase__InfluenzaA__ACY77795

SEQ ID NO: 209627 - RNA, 1410 nt, Artificial Sequence
  derived and/or modified CDS sequence (opt5) from neuraminidase__InfluenzaA__ACY77825
augaaccccaaucagaagaucauuaccaucggcagcgugugcaugacaauugggauggccaaccugauccuccaaauuggaaauaucaucuccauuuggaucucucacagcauucagcugggcaaccagaaucagaucgagacguguaaccaauccgucauuaccuacgaaaauaacacauggguuaaucagaccuaugugaacaucucuaauacaaacuucgcugccgggcagagcguggucuccgcgaaacuugcuggaaauucuagccugugcccuguguccggcugggccauuuacagcaaggacaacucuaucagaaucggguccaaaggagauguuuuugugauucgggagccguucaucagcuguucuccccucgaaugccgcaccuuuuuccugacacagggcgcccuucugaaugacaagcauuccaacggcaccauuaaagauagaagcccuuaucggacgcucaugucuugucccaucggggaggucccuucccccuacaacagccgcuuugaauccguggcuuggucugccagcgcuugccacgacggaauuaauuggcugaccaucggcaucuccgggccugauaacggagccguugcggugcugaaguauaauggcauuaucacagacaccauuaagagcuggagaaacaauauccuccggacacaagagucugagugugccugcgucaacggguccuguuucaccgugaugacggauggaccgagcgacggccaggcuucuuacaaaauuuuucgcaucgaaaagggcaaaaucgucaagagcguggagaugaaugcccccaacuaucauuacgaagagugcuccuguuacccugauucuagcgagauuacaugcguuugcagagacaauuggcacggguccaaccggcccugggugagcuucaaucagaaccuggaauaucagaucggauacauuuguucuggcaucuuuggggauaauccucgccccaacgacaaaaccggauccugcggcccggugagcucuaauggggcuaacggagucaagggcuucuccuuuaaguauggcaacgggguguggauuggaagaacaaaaagcaucaauucccggaacggcuucgagaugauuugggauccuaauggguggaccggaaccgacaacaauuuuucuaucaagcaagacaucguuggcauuaacgaauggagcggguacuccggcucuuucgugcagcaucccgagcuuacaggacuggauuguauccgcccuugcuucugggucgaacucauuagaggccggcccaaagagaauacgaucuggaccagcggguccagcauuucuuuuuguggagugaacuccgacacaguuggcuggagcuggcccgauggggccgagcugccuuucaccaucgacaaguga

SEQ ID NO: 209628 - RNA, 1410 nt, Artificial Sequence; identical to SEQ ID NO: 209627
  derived and/or modified CDS sequence (opt5) from neuraminidase__InfluenzaA__ACY77835

SEQ ID NO: 209629 - RNA, 1410 nt, Artificial Sequence; identical to SEQ ID NO: 208840
  derived and/or modified CDS sequence (opt5) from neuraminidase__InfluenzaA__ACY77845

SEQ ID NO: 209630 - RNA, 1410 nt, Artificial Sequence; identical to SEQ ID NO: 208810
  derived and/or modified CDS sequence (opt5) from neuraminidase__InfluenzaA__ACY77865

SEQ ID NO: 209631 - RNA, 1410 nt, Artificial Sequence
  derived and/or modified CDS sequence (opt5) from neuraminidase__InfluenzaA__ACY77870
augaaccccaaucagaagaucauuaccaucggcagcgugugcaugacaauugggauggccaaccugauccuccaaauuggaaauaucaucuccauuuggaucucucacagcauucagcugggcaaccagaaucagaucgagacguguaaccaauccgucauuaccuacgaaaauaacacauggguuaaucagaccuaugugaacaucucuaauacaaaccuugcugccgggcagagcguggucuccgugaaacuggcgggaaauucuagccucugcccuguuuccggcugggcuauuuacagcaaggacaacucuaucagaaucggguccaaaggagauguguucgucauucgggagccguuuaucagcuguucuccccuggaaugccgcaccuucuuucuuacacagggcgcccugcucaaugacaagcauuccaacggcaccauuaaagauagaagcccuuaucggacgcugaugucuugucccaucggggaggugccuucccccuacaacagccgcuucgaauccguugccuggucugcuagcgccugccacgacggaauuaauuggcugaccaucggcaucuccgggccugauaacggagcuguggccguccucaaguauaauggcauuaucacagacaccauuaagagcuggagaaacaauauccugcggacacaagagucugagugugcgugcgugaacggguccuguuuuaccgugaugacggauggaccgagcgacggccaggccucuuacaaaauuuuccgcaucgaaaagggcaaaaucgucaagagcguugagaugaaugcucccaacuaucauuacgaagagugcuccuguuacccugauucuagcgagauuacaugcgugugcagagacaauuggcacggguccaaccggcccugggugagcuuuaaucagaaccuugaauaucagaucggauacauuuguucuggcaucuucggggauaauccucgccccaacgacaaaaccggauccugcggcccggucagcucuaauggggccaacggagugaagggcuuuuccuucaaguauggcaacgggguuuggauuggaagaacaaaaagcaucuccucucggaauggcuuugagaugauuugggauccuaacggguggaccggaaccgacaauaacuucagcaucaagcaagacaucgugggcauuaaugaaugguccggguacucuggcagcuuuguccagcaucccgagcugacaggacucgauuguauccgcccuugcuucuggguggaacugauuagaggccggcccaaagagaacacgaucuggaccuccgggagcucuauuuccuucuguggaguuaauagcgacacagugggcuggucuuggcccgauggggcugagcuuccuuuuaccaucgacaaguga

SEQ ID NO: 209632 - RNA, 1410 nt, Artificial Sequence; identical to SEQ ID NO: 208810
  derived and/or modified CDS sequence (opt5) from neuraminidase__InfluenzaA__ACY77877

SEQ ID NO: 209633 - RNA, 1410 nt, Artificial Sequence; identical to SEQ ID NO: 208810
  derived and/or modified CDS sequence (opt5) from neuraminidase__InfluenzaA__ACY77887

SEQ ID NO: 209634 - RNA, 1410 nt, Artificial Sequence; identical to SEQ ID NO: 208810
  derived and/or modified CDS sequence (opt5) from neuraminidase__InfluenzaA__ACY77907

SEQ ID NO: 209635 - RNA, 1410 nt, Artificial Sequence; identical to SEQ ID NO: 208840
  derived and/or modified CDS sequence (opt5) from neuraminidase__InfluenzaA__ACY77917

SEQ ID NO: 209636 - RNA, 1410 nt, Artificial Sequence
  derived and/or modified CDS sequence (opt5) from neuraminidase__InfluenzaA__ACY77927
augaaccccaaucagaagaucauuaccaucggcagcgugugcaugacaauugggauggccaaccugauccuccaaauuggaaauaucaucuccauuuggaucucucacagcauucagcugggcaaccagaaucagaucgagacguguaaccaauccgucauuaccuacgaaaauaacacauggguuaaucagaccuaugugaacaucucuaauacaaacuucgcugccgggcagagcguggucuccgugaaacuugcgggaaauucuagccugugcccuguuuccggcugggcuauuuacagcaaggacaacucuaucagaaucggguccaaaggagauguguuugucauucgggagccguucaucagcuguucuccccucgaaugccgcaccuuuuuccugacacagggcgcccuucugaaugacaagcauuccaacggcaccauuaaagauagaagcccuuaucggacgcucaugucuugucccaucggggaggugccuucccccuacaacagccgcuuugaauccguugccuggucugcuagcgccugccacgacggaauuaauuggcugaccaucggcaucuccgggccuaacaauggagcuguggccguccugaaguauaacggcauuaucacagauaccauuaagagcuggagaaauaacauccuccggacacaagagucugagugugcgugcgugaauggguccuguuucaccgugaugacggacggaccgagcgauggccaggccucuuacaaaauuuuucgcaucgaaaagggcaaaaucgucaagagcguugagaugaacgcucccaauuaucauuacgaagagugcuccuguuacccugacucuagcgagauuacaugcgugugcagagauaacuggcacggguccaaucggcccugggugagcuucaaccagaaucuggaauaucagaucggauacauuuguucuggcaucuuuggggacaacccucgccccaaugauaaaaccggauccugcggcccggucagcucuaacggggccaacggagugaagggcuucuccuuuaaguauggcaaugggguuuggauuggaagaacaaaaagcaucuccucucggaacggcuucgagaugauuugggacccuaauggguggaccggaaccgauaacaauuuuagcaucaagcaagacaucgugggcauuaacgaaugguccggguacucuggcagcuucguccagcaucccgagcuuacaggacuggacuguauccgcccuugcuucuggguggaacucauuagaggccggcccaaagagaauacgaucuggaccuccgggagcucuauuuccuuuuguggaguuaacagcgauacagugggcuggucuuggcccgacggggcugagcugccuuucaccaucgauaaguga

SEQ ID NO: 209637 - RNA, 1410 nt, Artificial Sequence; identical to SEQ ID NO: 208810
  derived and/or modified CDS sequence (opt5) from neuraminidase__InfluenzaA__ACY77937

SEQ ID NO: 209638 - RNA, 1410 nt, Artificial Sequence; identical to SEQ ID NO: 208810
  derived and/or modified CDS sequence (opt5) from neuraminidase__InfluenzaA__ACY77947

SEQ ID NO: 209639 - RNA, 1410 nt, Artificial Sequence; identical to SEQ ID NO: 208810
  derived and/or modified CDS sequence (opt5) from neuraminidase__InfluenzaA__ACY77967

SEQ ID NO: 209640 - RNA, 1410 nt, Artificial Sequence; identical to SEQ ID NO: 208800
  derived and/or modified CDS sequence (opt5) from neuraminidase__InfluenzaA__ACY77977

SEQ ID NO: 209641 - RNA, 1410 nt, Artificial Sequence; identical to SEQ ID NO: 208810
  derived and/or modified CDS sequence (opt5) from neuraminidase__InfluenzaA__ACY77987

SEQ ID NO: 209642 - RNA, 1410 nt, Artificial Sequence
  derived and/or modified CDS sequence (opt5) from neuraminidase__InfluenzaA__ACY77997
augaaccccaaucagaagaucauuaccaucggcagcgugugcaugacaauugggauggccaaccugauccuccaaauuggaaauaucaucuccauuuggaucucucacagcauucagcugggcaaccagaaucagaucgagacguguaaccaauccgucauuaccuacgaaaauaacacauggguuaaucagaccuaugugaacaucucuaauacaaacuucgcugccgggcagagcguggucuccgugacccuugcgggaaauucuagccugugcccuguuuccggcugggcuauuuacagcaaagacaacucuaucagaaucggguccaagggagauguguuugucauucgggagccguucaucagcuguucuccccucgaaugccgcacauuuuuccugacccagggcgcccuucugaaugacaaacauuccaacggcacgauuaaggauagaagcccuuaucggacccucaugucuugucccaucggggaggugccuucccccuacaacagccgcuuugaauccguugccuggucugcuagcgccugccacgacggaauuaauuggcugacaaucggcaucuccgggccugauaacggagcuguggccguccugaaauauaauggcauuaucaccgacacaauuaagagcuggagaaacaauauccuccggacccaagagucugagugugcgugcgugaacggguccuguuucacggugaugacagauggaccgagcgacggccaggccucuuacaagauuuuucgcaucgaaaaaggcaagaucgucaaaagcguugagaugaaugcucccaacuaucauuacgaagagugcuccuguuacccugauucuagcgagauuaccugcgugugcagagacaauuggcacggguccaaccggcccugggugagcuucaaucagaaccuggaauaucagaucggauacauuuguucuggcaucuuuggggauaauccucgccccaacgacaagacaggauccugcggcccggucagcucuaauggggccaacggagugaaaggcuucuccuuuaaguauggcaacgggguuuggauuggaagaaccaagagcaucuccucucggaauggcuucgagaugauuugggauccuaacggguggaccggaacagacaauaacuuuagcaucaaacaagacaucgugggcauuaaugaaugguccggguacucuggcagcuucguccagcaucccgagcuuacgggacuggauuguauccgcccuugcuucuggguggaacucauuagaggccggcccaaggagaacaccaucuggacauccgggagcucuauuuccuuuuguggaguuaauagcgacaccgugggcuggucuuggcccgauggggcugagcugccuuucacaaucgacaaauga

SEQ ID NO: 209643 - RNA, 1410 nt, Artificial Sequence; identical to SEQ ID NO: 208810
  derived and/or modified CDS sequence (opt5) from neuraminidase__InfluenzaA__ACY78017

SEQ ID NO: 209644 - RNA, 1410 nt, Artificial Sequence
  derived and/or modified CDS sequence (opt5) from neuraminidase__InfluenzaA__ACZ01955
augaaccccaaucagaagaucauuaccaucggcagcgugugcaugacaauugggauggccaaccugauccuccaaauuggaaauaucaucuccauuuggaucucucacagcauucagcugggcaaccagaaucagaucgagacguguaaccaauccgucauuaccuacgaaaauaacacauggguuaaucagaccuaugugaacaucucuaauacaaacuucgcugccgggcagagcguggucuccgugaaacuugcgggaaauucuagccugugcccuguuuccggcugggcuauuuacagcaaggacaacucuaucagaaucggguccaaaggagauguguuugucauucgggagccguucaucagcuguucuccccucgaaugccgcaccuuuuuccugacacagggcgcccuucugaaugacaagcauuccaacggcaccauuaaagauagaagcccuuaucggacgcucaugucuugucccaucggggaggugccuucccccuacaacagccgcuuugaauccguugccuggucugcuagcgccugccacgacggaauuaauuggcugaccaucggcaucuccgggccuggaaacggcgcuguggccguccugaaguauaaugggauuaucacagauaccauuaagagcuggagaaacaauauccuccggacacaagagucugagugugcgugcgugaacggauccuguuucaccgugaugacggacggcccgagcgauggccaggccucuuacaaaauuuuucgcaucgaaaaggggaaaaucgucaagagcguugagaugaaugcucccaacuaucauuacgaagagugcuccuguuacccugacucuagcgagauuacaugcgugugcagagauaauuggcacggauccaaccggcccugggugagcuucaaucagaaccuggaauaucagaucggcuacauuuguucugggaucuuuggagacaauccucgccccaacgauaaaaccggcuccugcgggccggucagcucuaauggagccaacggcgugaagggcuucuccuuuaaguaugggaacggaguuuggauuggcagaacaaaaagcaucuccucucggaauggguucgagaugauuugggacccuaacggauggaccggcaccgauaauaacuuuagcaucaagcaagacaucguggggauuaaugaaugguccggcuacucuggcagcuucguccagcaucccgagcuuacaggacuggacuguauccgcccuugcuucuggguggaacucauuagagggcggcccaaagagaacacgaucuggaccuccggaagcucuauuuccuuuuguggcguuaauagcgauacagugggguggucuuggcccgacggagcugagcugccuuucaccaucgauaaguga

SEQ ID NO: 209645 - RNA, 1410 nt, Artificial Sequence; identical to SEQ ID NO: 208810
  derived and/or modified CDS sequence (opt5) from neuraminidase__InfluenzaA__ACZ05053

SEQ ID NO: 209646 - RNA, 1410 nt, Artificial Sequence; identical to SEQ ID NO: 208800
  derived and/or modified CDS sequence (opt5) from neuraminidase__InfluenzaA__ACZ05064

SEQ ID NO: 209647 - RNA, 1410 nt, Artificial Sequence; identical to SEQ ID NO: 208810
  derived and/or modified CDS sequence (opt5) from neuraminidase__InfluenzaA__ACZ05074

SEQ ID NO: 209648 - RNA, 1410 nt, Artificial Sequence; identical to SEQ ID NO: 208810
  derived and/or modified CDS sequence (opt5) from neuraminidase__InfluenzaA__ACZ05084

SEQ ID NO: 209649 - RNA, 1410 nt, Artificial Sequence; identical to SEQ ID NO: 208810
  derived and/or modified CDS sequence (opt5) from neuraminidase__InfluenzaA__ACZ05094

SEQ ID NO: 209650 - RNA, 1410 nt, Artificial Sequence; identical to SEQ ID NO: 208810
  derived and/or modified CDS sequence (opt5) from neuraminidase__InfluenzaA__ACZ05104

SEQ ID NO: 209651 - RNA, 1410 nt, Artificial Sequence; identical to SEQ ID NO: 208810
  derived and/or modified CDS sequence (opt5) from neuraminidase__InfluenzaA__ACZ05114

SEQ ID NO: 209652 - RNA, 1410 nt, Artificial Sequence; identical to SEQ ID NO: 208810
  derived and/or modified CDS sequence (opt5) from neuraminidase__InfluenzaA__ACZ05124

SEQ ID NO: 209653 - RNA, 1410 nt, Artificial Sequence; identical to SEQ ID NO: 208810
  derived and/or modified CDS sequence (opt5) from neuraminidase__InfluenzaA__ACZ05144

SEQ ID NO: 209654 - RNA, 1410 nt, Artificial Sequence; identical to SEQ ID NO: 208810
  derived and/or modified CDS sequence (opt5) from neuraminidase__InfluenzaA__ACZ05154

SEQ ID NO: 209655 - RNA, 1410 nt, Artificial Sequence; identical to SEQ ID NO: 208671
  derived and/or modified CDS sequence (opt5) from neuraminidase__InfluenzaA__ACZ05164

SEQ ID NO: 209656 - RNA, 1410 nt, Artificial Sequence; identical to SEQ ID NO: 208671
  derived and/or modified CDS sequence (opt5) from neuraminidase__InfluenzaA__ACZ05175

SEQ ID NO: 209657 - RNA, 1413 nt, Artificial Sequence
  derived and/or modified CDS sequence (opt5) from neuraminidase__InfluenzaA__ACZ05197
augaaccccaaucagaagaucaugaccauuggcagcaucuccauugccaucgggauuaucucucugaugcuccaaaucggaaacauuaucagcauuugggcuucccacucuauccagacaggcagccagaauaacacggggauuugcaaucagagaaucauuaccuacgagaacuccacaugggugaaucauaccuaugugaacaucaauaacacaaauguuguggccggagaagacaaaaccucugugacacuggcgggcaacagcucccuuuguagcaucucugggugggcuauuuacaccaaggauaauuccauccggauuggaagcaaaggcgacgucuucgugauccgcgagccuuuuauuucuugcucccaccuggaauguagaacguucuuucucacccaaggcgcccugcuuaacgauaagcauagcaaugggacaguuaaagaccggucuccguaucgcgcccugauguccugcccccucggagaggcuccuagccccuacaacuccaaguucgaaucuguggccuggagcgcuuccgccugucacgauggcaugggguggcugaccaucggaaucagcggcccugacaacggggcggucgccgugcugaaguauaauggaauuaucacaggcaccauuaaaucuuggaagaaacagauccucagaacgcaggaguccgagugcguuuguaugaacggcagcugcuuuacaauuaugaccgaugggcccucuaauaaggcugccagcuacaaaaucuucaagaucgaaaagggaaaagugacaaaguccauugagcugaacgcuccuaauuuuuauuacgaagaguguucuugcuacccggacaccggcaucgucaugugugugugccgggauaacuggcaugggagcaaucgccccuggguguccuucaaccagaaucuugacuaucaaauuggauacaucugcagcggcgucuuuggggauaacccuagacccgaggacggagaaggcucuuguaauccuguuaccguggauggcgccaacggggugaaaggauucuccuauaaguacggcaauggggucuggauuggacggacaaaaagcaaccgccugagaaagggcuuugagaugaucugggaccccaauggguggacgaacaccgacucugauuucuccgugaaacaggacguuguggcgauuacagauuggagcggcuauuccggaucuuuuguccagcacccggaacucaccggccuggacugcauccggccuuguuucuggguggagcuuguucgcgggcugcccagagaaaacacaaccaucuggacgagcggauccucuauuagcuucugcggcgucaauuccgauacagccaacuggagcuggccugacggggcugagcuccccuuuaccaucgauaaguga

SEQ ID NO: 209658 - RNA, 1410 nt, Artificial Sequence
  derived and/or modified CDS sequence (opt5) from neuraminidase__InfluenzaA__ACZ05208
augaaccccaaucagaagaucauuaccaucggcagcgugucccugacaauuucuacgaucugcuucuuuaugcaaauugccauccucaucaccacagucacccugcacuucaaacaguacgaguuuaacagcccuccgaauaaccagguuaugcuuugugaacccacaauuaucgagagaaauauuaccgaaaucguguaucugacaaacaccacgauugagaaggaaaucugcccuaaacucgcugaguaccggaauugguccaagccccagugugacauuaccggguucgccccuuuuucuaaagauaacagcauccgccuguccgcgggaggcgacaucugggugacaagagagcccuaugucucuugcgauccugacaaguguuaccaauucgcucuugggcagggaaccacacugaauaacgugcauagcaauaacaccguucgggaucgcacgccguauagaacacuccugaugaaugaacugggcgugcccuuucaccucgggaccaagcaggucugcauugccugguccagcagcuccugucaugacggaaaagccuggcugcacgugugcaucacaggcgaugacaagaacgcuaccgccagcuucauuuacaauggccggcuuguugauucuguggucuccuggagcaaagagauccugcgcacccaggaaucugagugugugugcauuaacgggacauguacgguggucaugaccgacggauccgcuagcggcaaggccgauacaaaaauccucuuuaucgaggaagggaagauuguucauaccuccacacugucuggaagcgcgcaacacguggaggaaugcuccugcuauccuagauaccccggcgugcggugugucugccgcgacaacuggaaggggagcaauagaccuaucguggauauuaacaucaaagaccacucuauuguuuccagcuacguguguucuggacuugucggcgacacgccccggaagaaugauagcuccucuagcucccauugcagcgacccgaacaaugaggaaggcgggcacggagugaaaggcugggccuucgauucugggaacgacguuuggaugggacgcaccaucuccgagaagucuagacugggcuaugagacauuuaaagugaucgaaggguggucuaauccuaaguccaaacuccagauuaaccggcaggucaucguggaucgcggaaauagaagcggcuacuccggcauuuucucugucgagggaaagagcuguaucaaccggugcuuuuauguggaacugauuagagggcgcaaggaggaaaccgagguucuguggaccuccaauucuaucguggucuucuguggcacaagcgggaccuacggaacaggcuccuggcccgacggggcugauauuaaccucaugccuaucuga

SEQ ID NO: 209659 - RNA, 1410 nt, Artificial Sequence
  derived and/or modified CDS sequence (opt5) from neuraminidase__InfluenzaA__ACZ05219
augaaccccaaucagaagaucauuaccaucggcagcgugucccugacaauuucuacgaucugcuucuuuaugcaaauugccauccucaucaccacagucacccugcacuucaaacaguacgaguuuaacagcccuccgaauaaccagguuaugcuuugugaacccacaauuaucgagagaaauauuaccgaaaucguguaucugacaaacaccacgauugagaaggaaaucugcccuaaacucgcugaguaccggaauugguccaagccccagugugggauuaccggauucgccccuuuuucuaaagacaacagcauccgccuguccgcgggcggggauaucugggugacaagagagcccuaugucucuugcgacccugauaaguguuaccaauucgcucuuggacagggcaccacacugaauaacgugcauagcaauaacaccguucgggaccgcacgccguauagaacacuccugaugaaugaacugggggugcccuuucaccucggaaccaagcaggucugcauugccugguccucuagcuccugucaugauggcaaagccuggcugcacgugugcaucacaggcgacgauaagaacgcuaccgccagcuucauuuacaaugggcggcuuguugacucuguggucuccuggagcaaagagauccugcgcacccaggaaucugagugugugugcauuaacggaacauguacgguggucaugaccgauggcuccgcuagcgggaaggccgacacaaaaauccucuuuaucgaggaaggaaagauuguucauaccuccacacugucuggcagcgcgcaacacguggaggaaugcuccugcuauccuagauaccccggggugcggugugucugccgcgauaacuggaagggaagcaauagaccuaucguggacauuaacaucaaagaucacucuauuguuuccagcuacguguguucuggccuugucggcgacacgccccggaagaaugacagcuccucuagcucccauugccuggauccgaacaaugaggaagggggacacggcgugaaagggugggccuucgacgauggaaacgacguuuggaugggccgcaccaucagcgagaagucuagacucggguaugagacauuuaaagugaucgaaggaugguccaauccuaagagcaaacugcagauuaaccggcaggucaucguggaucgcggcaauagaucuggcuacuccgggauuuucagcgucgagggaaaguccuguaucaaccggugcuuuuauguggaacugauuagaggccgcaaggaggaaaccgagguucucuggaccucuaauagcaucguggucuucugugggacauccggaaccuacggcacagggucuuggcccgacggcgcugauauuaaccugaugccuaucuga

SEQ ID NO: 209660 - RNA, 1410 nt, Artificial Sequence; identical to SEQ ID NO: 208671
  derived and/or modified CDS sequence (opt5) from neuraminidase__InfluenzaA__ACZ05230

SEQ ID NO: 209661 - RNA, 1410 nt, Artificial Sequence
  derived and/or modified CDS sequence (opt5) from neuraminidase__InfluenzaA__ACZ05241
augaaccccaaucagaagaucauuaccaucggcagcgugucccugacaauuucuacgaucugcuucuuuaugcaaauugccauccucaucaccacagucacccugcacuucaaacaguacgaguuuaacagcccuccgaauaaccagguuaugcuuugugaacccacaauuaucgagagaaauauuaccgaaaucguguaucugacaaacaccacgauugagaaggaaaucugcccuaaacucgcugaguaccggaauugguccaagccccagugugacauuaccggguucgccccuuuuucuaaagauaacagcauccgccuguccgcgggaggcgacaucugggugacaagagagcccuaugucucuugcgauccugacaaguguuaccaauucgcucuugggcagggaaccacacugaauaacgugcauagcaauaacaccguucgggaucgcacgccguauagaacacuccugaugaaugaacugggcgugcccuuucaccucgggaccaagcaggucugcauugccugguccucuagcuccugucaugacggaaaagccuggcugcacgugugcaucacaggcgaugacaagaacgcuaccgccagcuucauuuacaauggccggcuuguugauucuguggucuccuggagcaaagagauccugcgcacccaggaaucugagugugugugcauuaacgggacauguacgguggucaugaccgacggauccgcuagcggcaaggccgauacaaaaauccucuuuaucgaggaagggaagauuguucauaccuccaagcugucuggaagcgcgcaacacguggaggaaugcuccugcuauccuagauaccccggcgugcggugugucugccgcgacaacuggaaagggagcaauagaccuaucguggauauuaacaucaaggaccacucuauuguuuccagcuacguguguucuggacuugucggcgacacaccccggaaaaaugauagcuccucuagcucccauugccuggacccgaacaaugaggaaggcgggcacggagugaagggcugggccuucgaugacgggaacgauguuuggaugggacgcaccaucagcgagaaaucuagacucggcuaugagacguuuaaggugaucgaagggugguccaauccuaaaagcaagcugcagauuaaccggcaggucaucguggaccgcggaaauagaucuggcuacuccggcauuuucagcgucgaggggaaguccuguaucaaccggugcuuuuauguggaacugauuagaggacgcaaagaggaaacagagguucucuggaccucuaauagcaucguggucuucuguggcaccuccgggacauacggaaccggcucuuggcccgauggggcugacauuaaccugaugccuaucuga

SEQ ID NO: 209662 - RNA, 1413 nt, Artificial Sequence
  derived and/or modified CDS sequence (opt5) from neuraminidase__InfluenzaA__ACZ05296
augaaccccaaucagaagaucauuaccaucggcagcauuuccaucgccauugggaucaucucucugaugcuccaaauuggaaacaucauuagcaucugggcuucccacucuauucagacaggcagccagaauaacacggggaucugcaaucagagaauuaucaccuacgagaacuccacaugggugaaucauaccuaugugaacaucaauaacacaaauguuguggccggagaagacaaaaccucugugacacuggcgggcaacagcucccuuuguagcauuucugggugggcuaucuacaccaaggauaauuccauucggaucggaagcaaaggcgacgucuucgugauucgcgagccuuuuaucucuugcucccaccuggaauguagaacguucuuucucacccaaggcgcccugcuuaacgauaagcauagcaaugggacaguuaaagaccggucuccguaucgcgcccugauguccugcccccucggagaggcuccuagccccuacaacuccaaguucgaaucuguggccuggagcgcuuccgccugucacgauggcaugggguggcugaccaucggaauuagcggcccugacaacggggcggucgccgugcugaaguauaauggaaucauuacaggcaccaucaaaucuuggaagaaacagauucucagaacgcaggaguccgagugcguuuguaugaacggcagcugcuuuacaaucaugaccgaugggcccucuaauaaggcugccagcuacaaaaucuucaagauugaaaagggaaaagugacaaaguccaucgagcugaacgcuccuaauuuuuauuacgaagaguguucuugcuacccggacaccggcauugucaugugugugugccgggauaacuggcaugggagcaaucgccccuggguguccuucaaccagaaucuugacuaucaaaucggauacauuugcagcggcgucuuuggggauaacccuagacccgaggacggagaaggcucuuguaauccuguugccguggauggcgcgaacggggugaaaggauucuccuauaaguacggcaauggggucuggaucggacggaccaaaagcaaccgccugagaaagggcuuugagaugauuugggaccccaauggguggacaaacacggacucugauuucuccgugaaacaggacguuguggccaucaccgauuggagcggcuauuccggaucuuuuguccagcacccggaacucacaggccuggacugcauccggccuuguuucuggguggagcuuguucgcgggcugcccagagaaaacaccacaauuuggaccagcggauccucuaucagcuucugcggcgucaauuccgauacggcuaacuggagcuggccugacggggccgagcuccccuuuacaauugauaaguga

SEQ ID NO: 209663 - RNA, 1410 nt, Artificial Sequence; identical to SEQ ID NO: 208671
  derived and/or modified CDS sequence (opt5) from neuraminidase__InfluenzaA__ACZ05307

SEQ ID NO: 209664 - RNA, 1410 nt, Artificial Sequence
  derived and/or modified CDS sequence (opt5) from neuraminidase__InfluenzaA__ACZ05318
augaaccccaaucagaagaucauuaccaucggcagcgugucccugacaauuucuacgaucugcuucuuuaugcaaaccgccauucucaucacaaccgucacacugcacuucaaacagugugaguuuaacagcccuccgaauaaccagguuaugcuuugcgaacccaccaucauugagagaaauaucacagaaauuguguaccugaccaacacgaccaucgagaaggaaauuuguccuaaacucgcugaguaucggaauugguccaagccccagugcgacaucacaggguucgccccuuuuucuaaagauaacagcauucgccuguccgcgggaggcgacaucugggugaccagagagcccuacgucucuugugauccugacaagugcuaucaauucgcucuugggcagggaacaacccugaauaacgugcauagcaauaacacgguucgggaucgcacaccguacagaacccuccugaugaaugaacugggcgugcccuuucaccucgggacaaagcaggucuguaucgccugguccucuagcuccugccaugacggaaaagccuggcugcacguguguauuaccggcgaugacaagaacgcuaccgccagcuucaucuauaauggccggcuuguugauucuguggucuccuggagcaaagagauucugcgcacacaggaaucugagugcguguguaucaacgggacgugcaccguggucaugacagacggauccgcuagcggcaaggccgauaccaaaauucucuuuaucgaggaagggaagaucguucauacauccacccugucuggaagcgcgcaacacguggaggaaugcuccuguuacccuagauaucccggcgugcggugcgucugucgcgacaacuggaaggggagcaauagaccuauuguggauaucaacauuaaagaccacucuaucguuuccagcuacgugugcucuggacuugucggcgacacgccccggaagaaugauagcuccucuagcucccauugucuggacccgaacaaugaggaaggcgggcacggagugaaaggcugggccuucgaugacgggaacgauguuuggaugggacgcacaauuagcgagaagucuagacucggcuacgagaccuuuaaagugaucgaagggugguccaauccuaagagcaaacugcagaucaaccggcaggucauuguggaccgcggaaauagaucuggcuauuccggcaucuucagcgucgaggggaaguccugcauuaaccgguguuuuuacguggaacugaucagaggacgcaaggaggaaaccgagguucucuggacaucuaauagcauuguggucuucugcggcaccuccgggacauauggaacgggcucuuggcccgauggggcugacaucaaccugaugccuauuuga

SEQ ID NO: 209665 - RNA, 1410 nt, Artificial Sequence; identical to SEQ ID NO: 208671
  derived and/or modified CDS sequence (opt5) from neuraminidase__InfluenzaA__ACZ05329

SEQ ID NO: 209666 - RNA, 1410 nt, Artificial Sequence; identical to SEQ ID NO: 208584
  derived and/or modified CDS sequence (opt5) from neuraminidase__InfluenzaA__ACZ05340

SEQ ID NO: 209667 - RNA, 1410 nt, Artificial Sequence; identical to SEQ ID NO: 209661
  derived and/or modified CDS sequence (opt5) from neuraminidase__InfluenzaA__ACZ05362

SEQ ID NO: 209668 - RNA, 1410 nt, Artificial Sequence; identical to SEQ ID NO: 208671
  derived and/or modified CDS sequence (opt5) from neuraminidase__InfluenzaA__ACZ05373

SEQ ID NO: 209669 - RNA, 1410 nt, Artificial Sequence; identical to SEQ ID NO: 208671
  derived and/or modified CDS sequence (opt5) from neuraminidase__InfluenzaA__ACZ05395

SEQ ID NO: 209670 - RNA, 1410 nt, Artificial Sequence; identical to SEQ ID NO: 208671
  derived and/or modified CDS sequence (opt5) from neuraminidase__InfluenzaA__ACZ05406

SEQ ID NO: 209671 - RNA, 1413 nt, Artificial Sequence
  derived and/or modified CDS sequence (opt5) from neuraminidase__InfluenzaA__ACZ05450
augaaccccaaucagaagaucauuaccaucggcagcauuuccaucgccauugggaucaucucucugaugcuccaaauuggaagcaucauuuccaucugggcuucucacagcauucagacaggcucccagaacaauacggggaucugcaaccagagaauuaucaccuacgagaauagcacaugggugaaccauaccuaugucaauaucaacaauacaaacguuguggccggagaagacaaaaccagcgugacacuggcgggcaauuccagccuuuguucuauuuccgggugggcuaucuacaccaaggauaacagcguccggauuggaucuaaaggcgacguguucguuauccgcgagccuuuuauuuccugcagccaccuggaauguagaacguucuuucucacccaaggcgcccugcuuaaugauaagcauucuaacgggacagugaaagaccgguccccguaucgcgcccugaugagcugcccccucggagaggcuccuucccccuacaauucuaaguucgaaagcgucgccugguccgcuagcgccugucacgauggcaugggguggcugaccaucggaaucucuggcccugacaacggggcgguggccguucugaaguauaacggaauuaucacaggcaccauuaaauccuggaagaaacagauccucagaacgcaggagagcgagugcguguguaugaauggcucuugcuuuacaauuaugaccgaugggcccagcaacaaggcugccuccuacaaaaucuucaagaucgaaaagggaaaagucacaaagucuauugagcugaaugcuccuaacuuuuauuacgaagaguguagcugcuacccggacaccggcaucgugaugugugugugccgggauaauuggcauggguccaaccgccccugggucagcuucaaucagaaccuugacuaucaaauuggauacaucugcucuggcguuuuuggggauaauccuagacccgaggacggagaaggcuccuguaacccugugaccguggauggcgccaauggggucaaaggauucagcuauaaguacggcaacgggguguggauuggacggacaaaaucuaaucgccugagaaagggcuuugagaugaucugggaccccaacggguggacgaauaccgacuccgauuucagcguuaaacaggacguggucgcgauuacagauugguccggcuauucuggaucuuuugugcagcacccggaacucaccggccuggacugcauccggccuuguuucuggguugagcuugugcgcgggcugcccagagaaaacacaaccaucuggacguccggaucuagcauuuccuucugcggcgucaacagcgauacagccaauuggucuuggccugacggggcugagcuccccuuuaccaucgauaaguga

SEQ ID NO: 209672 - RNA, 1410 nt, Artificial Sequence; identical to SEQ ID NO: 208671
  derived and/or modified CDS sequence (opt5) from neuraminidase__InfluenzaA__ACZ05461

SEQ ID NO: 209673 - RNA, 1410 nt, Artificial Sequence; identical to SEQ ID NO: 208671
  derived and/or modified CDS sequence (opt5) from neuraminidase__InfluenzaA__ACZ05472

SEQ ID NO: 209674 - RNA, 1410 nt, Artificial Sequence
  derived and/or modified CDS sequence (opt5) from neuraminidase__InfluenzaA__ACZ05483
augaaccccaaucagaagaucauuaccaucggcagcgugucccugacaauuucuacgaucugcuucuuuaugcaaauugccauccucaucaccacagucacccugcacuucaaacaguacgaguuuaacagcccuccgaauaaccagguuaugcuuugugaacccacaauuaucgagagaaauauuaccgaaaucguguaucugacaaacaccacgguggagaaggaaauuugcccuaaacucgcugaguaccggaauugguccaagccccagugugacaucaccggguucgccccuuuuucuaaagauaacagcauucgccuguccgcgggaggcgacaucugggucacaagagagcccuaugugucuugcgauccugacaaguguuaccaauucgcucuugggcagggaaccacacugaauaacguucauagcaauaacaccgugcgggaucgcacgccguauagaacacuccugaugaaugaacugggcguccccuuucaccucgggaccaaacaggugugcaucgccugguccucuagcuccugucaugacggaaaggccuggcugcacguuugcauuacaggcgaugacaagaacgcuaccgccagcuucaucuacaauggccggcuuguggauucugucguguccuggagcaaagagauucugcgcacccaggaaucugagugugugugcaucaacgggacauguacggucguuaugaccgacggauccgcuagcggcaaggccgauacaaaaauucucuuuaucgaggaagggaagaucgugcauaccuccacacugucuggaagcgcgcaacacguggaggaaugcuccugcuauccuagauaccccggcguccggugugugugccgcgacaacuggaaggggagcaauagaccuauuguugauaucaacauuaaagaccacucuaucguguccagcuacgucuguucuggacuugugggcgacacgccccggaagaaugauagcuccucuagcucccauugccuggacccgaacaaugaggaaggcgggcacggaguuaaaggcugggccuucgaugacgggaacgauguguggaugggacgcaccauuagcgagaagucuagacucggcuaugagacauuuaaagucaucgaagggugguccaauccuaagagcaaacugcagaucaaccgccaggugauugucgaccggggaaauagaucuggcuacuccggcaucuucagcguggaggggaaguccuguauuaaccggugcuuuuauguugaacugaucagaggacgcaaggaggaaaccgaggugcucuggaccucuaauagcauugucguguucuguggcacauccgggaccuacggaacaggcucuuggcccgauggggcugacaucaaccugaugccuauuuga

SEQ ID NO: 209675 - RNA, 1410 nt, Artificial Sequence; identical to SEQ ID NO: 208671
  derived and/or modified CDS sequence (opt5) from neuraminidase__InfluenzaA__ACZ05494

SEQ ID NO: 209676 - RNA, 1410 nt, Artificial Sequence; identical to SEQ ID NO: 209664
  derived and/or modified CDS sequence (opt5) from neuraminidase__InfluenzaA__ACZ05516

SEQ ID NO: 209677 - RNA, 1410 nt, Artificial Sequence
  derived and/or modified CDS sequence (opt5) from neuraminidase__InfluenzaA__ACZ05527
augaaccccaaucagaagaucauuaccaucggcagcgugucccugacaauuucuacgaucugcuucuuuaugcaaauugccauccucaucaccacagucacccugcacuucaaacaguacgaguuuaacagcccuccgaauaaccagguuaugcuuugugaacccacaauuaucgagagaaauauuaccgaaaucguguaucugacaaacaccacgauugagaaggaaaucugcccuaaacucgcugaguaccggaauugguccaagccccagugugacauuaccggguucgccccuuuuucuaaagauaacagcauccgccuguccgcgggaggcgacaucugggugacaagagagcccuaugucucuugcgauccugacaaguguuaccaauucgcucuugggcagggaaccacacugaauaacgugcauagcaauaacaccguucgggaucgcacgccguauagaacacuccugaugaaugaacugggcgugcccuuucaccucgggaccaagcaggucugcauugccugguccucuagcuccugucaugacggaaaagccuggcugcacgugugcaucacaggcgaugacaagaacgcuaccgccagcuucauuuacaauggccggcuuguugauucuguggucuccuggagcaaagagauccugcgcacccaggaaucugagugugugugcauuaacgggacauguacgguggucaugaccgacggauccgcuagcggcaaggccgauacaaaaauccucuuuaucgaggaagggaagauuguucauaccuccacacugucuggaagcgcgcaacacguggaggaaugcuccugcuauccuagauaccccggcgugcggugugucugccgcgacaacuggaaggggagcaauagaccuaucguggauauuaacaucaaagaccacucuauuguuuccagcuacguguguucuggacuugucggcgacacgccccggaagaaugauagcuccucuagcucccauugcagcgacccgaacaaugaggaaggcgggcacggagugaaaggcugggccuucgaugacgggaacgauguuuggaugggacgcaccaucucugagaaguccagacugggcuaugagacauuuaaagugaucgaaggguggagcaauccuaagucuaaacuccagauuaaccggcaggucaucguggaccgcggaaauagauccggcuacagcggcauuuucuccgucgaggggaagucuuguaucaaccggugcuuuuauguggaacugauuagaggacgcaaggaggaaaccgagguucuguggaccagcaauuccaucguggucuucuguggcacaucugggaccuacggaacaggcagcuggcccgauggggcugacauuaaccucaugccuaucuga

SEQ ID NO: 209678 - RNA, 1410 nt, Artificial Sequence; identical to SEQ ID NO: 209661
  derived and/or modified CDS sequence (opt5) from neuraminidase__InfluenzaA__ACZ05538

SEQ ID NO: 209679 - RNA, 1413 nt, Artificial Sequence; identical to SEQ ID NO: 209533
  derived and/or modified CDS sequence (opt5) from neuraminidase__InfluenzaA__ACZ05593

SEQ ID NO: 209680 - RNA, 1413 nt, Artificial Sequence
  derived and/or modified CDS sequence (opt5) from neuraminidase__InfluenzaA__ACZ05604
augaaccccaaucagaagaucauuaccaucggcagcauuuccaucgccauugggaucaucucucugaugcuccaaauuggaaacaucauuagcaucugggcuucccacucuauucagacaggcagccagaauaacacggggaucugcaaucagagaauuaucaccuacgagaacuccacaugggugaaucauaccuaugucaacaucaauaacacaaauguuguggccggagaagacaaaaccucugugacacuggcgggcaacagcucccuuuguagcauucgggggugggcuaucuacaccaaggauaauucuauucgcaucggauccaaaggcgacgucuucgugauuagagagccuuuuaucagcugcucucaccuggaaugucggacguucuuucucacccaaggcgcccugcuuaacgauaagcauuccaaugggacaguuaaagaccgcagcccguauagagcccugaugucuugcccccucggagaggcuccuucccccuacaacagcaaguucgaauccguggccuggucugcuagcgccugucacgauggcaugggguggcugaccaucggaauuuccggcccugacaacggggcggucgccgugcugaaguauaauggaaucauuacaggcaccaucaaaagcuggaagaaacagauucuccggacgcaggagucugagugcguuuguaugaacggcuccugcuuuacaaucaugaccgaugggcccagcaauaaggcugccucuuacaaaaucuucaagauugaaaagggaaaagugacaaagagcaucgagcugaacgcuccuaauuuuuauuacgaagaguguuccugcuacccggacaccggcauugucaugugugugugccgcgauaacuggcaugggucuaauagacccugggugagcuucaaccagaaucuugacuaucaaaucggauacauuugcuccggcgucuuuggggauaacccucggcccgaggacggagaaggcagcuguaauccuguuaccguggauggcgccaacggggugaaaggauucucuuauaaguacggcaauggggucuggaucggacgcacaaaauccaacagacugcggaagggcuuugagaugauuugggaccccaauggguggacgaacaccgacagcgauuucucugugaaacaggacguuguggcgaucacagauugguccggcuauagcggauccuuuguccagcacccggaacucaccggccuggacugcauccgcccuuguuucuggguggagcuuguuagagggcugccccgggaaaacacaaccauuuggacgucuggaagcuccaucucuuucugcggcgugaauagcgauacagccaacugguccuggccugacggggcugagcuccccuuuaccauugauaaguga

SEQ ID NO: 209681 - RNA, 1410 nt, Artificial Sequence; identical to SEQ ID NO: 208671
  derived and/or modified CDS sequence (opt5) from neuraminidase__InfluenzaA__ACZ05953

SEQ ID NO: 209682 - RNA, 1410 nt, Artificial Sequence; identical to SEQ ID NO: 209677
  derived and/or modified CDS sequence (opt5) from neuraminidase__InfluenzaA__ACZ05964

SEQ ID NO: 209683 - RNA, 1410 nt, Artificial Sequence; identical to SEQ ID NO: 208671
  derived and/or modified CDS sequence (opt5) from neuraminidase__InfluenzaA__ACZ05997

SEQ ID NO: 209684 - RNA, 1410 nt, Artificial Sequence; identical to SEQ ID NO: 209677
  derived and/or modified CDS sequence (opt5) from neuraminidase__InfluenzaA__ACZ06008

SEQ ID NO: 209685 - RNA, 1410 nt, Artificial Sequence; identical to SEQ ID NO: 209677
  derived and/or modified CDS sequence (opt5) from neuraminidase__InfluenzaA__ACZ06019

SEQ ID NO: 209686 - RNA, 1413 nt, Artificial Sequence
  derived and/or modified CDS sequence (opt5) from neuraminidase__InfluenzaA__ACZ16015
augaaccccaaucagaagaucauuaccaucggcagcauuuccaucgccauugggaucaucucucugaugcuccaaauuggaaacaucauuagcaucugggcuucccacucuauucagacaggcagccagaauaacacggggaucugcaaucagagaauuaucaccuacgagaacuccacaugggugaaucauaccuaugucaacaucaauaacacaaauguuguggccggagaagacaaaaccucugugacacuggcgggcaacagcucccuuuguagcauuucugggugggcuaucuacaccaaggauaauuccauucggaucggaagcaaaggcgacgucuucgugauucgcgagccuuuuaucucuugcucccaccuggaauguagaacguucuuucucacccaaggcgcccugcuuaacgauaagcauagcaaugggacaguuaaagaccggucuccguaucgcgcccugauguccugcccccucggagaggcuccuagccccuacaacuccaaguucgaaucuguggccuggagcgcuuccgccugucacgauggcaugggguggcugaccaucggaauuagcggcccugacaacggggcggucgccgugcugaaguauaauggaaucauuacaggcaccaucaaaucuuggaagaaacagauucucagaacgcaggaguccgagugcguuuguaugaacggcagcugcuuuacaaucaugaccgaugggcccucuaauaaggcugccagcuacaaaaucuucaagauugaaaagggaaaaguguccaagucuaucgagcugaacgcuccuaauuuuuauuacgaagaguguagcugcuacccggacacaggcauugucaugugugugugccgggauaacuggcauggguccaaucgccccugggugagcuucaaccagaaucuugacuaucaaaucggauacauuugcucuggcgucuuuggggauaacccuagacccgaggacggagaaggcuccuguaauccuguuaccguggauggcgccaacggggugaaaggauucagcuauaaguacggcaauggggucuggaucggacggaccaaaucuaaccgccugagaaagggcuuugagaugauuugggaccccaauggguggacaaacacggacuccgauuucagcgugaaacaggacguuguggcgaucaccgauugguccggcuauucuggcagcuuuguccagcacccggaacucacaggacuggacugcauccggccuuguuucuggguggagcuuguucgcgggcugcccagagaaaacaccacaauuuggaccuccggaucuagcaucuccuucugcggcgugaauagcgauacggccaacuggucuuggccugacggggcugagcuccccuuuacaauugauaaguga

SEQ ID NO: 209687 - RNA, 1413 nt, Artificial Sequence
  derived and/or modified CDS sequence (opt5) from neuraminidase__InfluenzaA__ACZ16025
augaaccccaaucagaagaucauuaccaucggcagcauuuccaucgccauugggaucaucucucugaugcuccaaauuggaaacaucauuagcaucugggcuucccacucuauucagacaggcagccagaauaacacggggaucugcaaucagagaauuaucaccuacgagaacuccacaugggugaaucauaccuaugucaacaucaauaacacaaauguuguggccggagaagacaaaaccucugugacacuggcgggcaacagcucccuuuguagcauuucugggugggcuaucuacaccaaggauaauuccauucggaucggaagcaaaggcgacgucuucgugauucgcgagccuuuuaucucuugcucccaccuggaauguagaacguucuuucucacccaaggcgcccugcuuaacgauaagcauagcaaugggacaaucaaagaccggucuccguaucgcgcccugauguccugcccccucggagaggcuccuagccccuacaacuccaaguucgaaucuguugccuggagcgcuuccgccugucacgauggcaugggguggcugaccauuggaaucagcggcccugacaacggggcgguggccguccugaaguauaauggaauuaucacaggcaccauuaaaucuuggaagaaacagauccucagaacgcaggaguccgagugcguguguaugaacggcagcugcuuuacaaucaugaccgaugggcccucuaauaaggcugccagcuacaaaauuuucaagaucgaaaagggaaaaguuacaaaguccauugagcugaacgcuccuaauuuuuauuacgaagaguguucuugcuacccggacaccggcaucgugaugugugucugccgggauaacuggcaugggagcaaucgccccuggguguccuucaaccagaaucuugacuaucaaauuggauacaucugcagcggcguguuuggggauaacccuagacccgaggacggagaaggcucuuguaauccugucaccguugauggcgccaacggggugaaaggauucuccuauaaguacggcaaugggguguggauuggacggacaaaaagcaaccgccugagaaagggcuuugagaugaucugggaccccaauggguggacgaacaccgacucugauuucuccgucaaacaggacgugguugcgaucacagauuggagcggcuauuccggaucuuuugugcagcacccggaacucaccggccuggacugcauucggccuuguuucugggucgagcuugugcgcgggcugcccagagaaaacacaaccaucuggacgagcggauccucuauuagcuucugcggcguuaauuccgauacagccaacuggagcuggccugacggggcugagcuccccuuuaccaucgauaaguga

SEQ ID NO: 209688 - RNA, 1413 nt, Artificial Sequence; identical to SEQ ID NO: 209533
  derived and/or modified CDS sequence (opt5) from neuraminidase__InfluenzaA__ACZ16035

SEQ ID NO: 209689 - RNA, 1410 nt, Artificial Sequence
  derived and/or modified CDS sequence (opt5) from neuraminidase__InfluenzaA__ACZ16043
augaaccccaaucagaagaucauuaccaucggcagcgugugcaugacaauugggauggccaaccugauccuccaaauuggaaauaucaucuccauuuggaucucucacagcauucagcugggcaaccagaaucagaucgagacguguaaccaauccgucauuaccuacgaaaauaacacauggguuaaucagaccuaugugaacaucucuaauacaaacuucgcugccgggcagagcguggucuccgugaaacuugcgggaaauucuagccugugcccuguuuccggcugggcuauuuacagcaaggacaacaauaucagaaucgggucuaaaggagauguguuugucauucgggagccguucaucuccuguagcccccucgaaugccgcaccuuuuuccugacacagggcgcccuucugaacgacaagcauucuaacggcaccauuaaagauagauccccuuaucggacgcucaugagcugucccaucggggaggugccuucucccuacaauucccgcuuugaaagcguugccugguccgcuucugccugccacgacggaauuaacuggcugaccaucggcaucagcgggccugauaauggagcuguggccguccugaaguauaacggcauuaucacagacaccauuaaguccuggagaaauaacauccuccggacacaagagagcgagugugcgugcgugaaugggucuuguuucaccgugaugacggauggaccguccgacggccaggccagcuacaaaauuuuucgcaucgaaaagggcaaaaucgucaagucuguugagaugaacgcucccaauuaucauuacgaagagugcagcuguuacccugauuccucugagauuacaugcgugugcagagacaacuggcacgggagcaaucggcccuggguguccuucaaccagaaucuggaauaucagaucggauacauuuguagcggcaucuuuggggauaacccucgccccaaugacaaaaccggaucuugcggcccggucuccagcaacggggccaacggagugaagggcuucucuuuuaaguauggcaaugggguuuggauuggaagaacaaaauccaucagcucccggaacggcuucgagaugauuugggauccuaauggguggaccggaaccgacaacaauuuuucuaucaagcaagacaucgugggcauuaacgaauggagcggguacuccggcucuuucguccagcaucccgagcuuacaggacuggauuguauccgcccuugcuucuggguggaacucauuagaggccggcccaaagagaauacgaucuggaccagcggguccagcauuucuuuuuguggaguuaacuccgacacagugggcuggagcuggcccgauggggcugagcugccuuucaccaucgacaaguga

SEQ ID NO: 209690 - RNA, 1410 nt, Artificial Sequence
  derived and/or modified CDS sequence (opt5) from neuraminidase__InfluenzaA__ACZ16053
augaaccccaaucagaagaucauuaccaucggcagcgugugcaugacaauugggauggccaaccugauccuccaaauuggaaauaucaucuccauuuggaucucucacagcauucagcugggcaaccagaaucagaucgagacguguaaccaauccgucauuaccuacgaaaauaacacauggguuaaucagaccuaugugaacaucucuaauacaaacuucgcugccgggcagagcguggucuccgugaaacuugcgggaaauucuagccugugcccuguuuccggcugggcuauuuacagcaaggacaacucugugagaaucggguccaaaggagaugucuuugugauccgggagccguucauuagcuguucuccccucgaaugccgcaccuuuuuccugacacagggcgcccuucugaaugacaagcauuccaacggcaccaucaaagauagaagcccuuaucggacgcucaugucuugucccauuggggagguuccuucccccuacaacagccgcuuugaauccguggccuggucugcuagcgccugccacgacggaaucaauuggcugaccauuggcaucuccgggccugauaacggagcugucgccgugcugaaguauaauggcaucauuacagacaccaucaagagcuggagaaacaauauucuccggacacaagagucugagugugcgugcgugaacggguccuguuucaccgucaugacggauggaccgagcaauggccaggccucuuacaaaaucuuucgcauugaaaagggcaaaaucguuaagagcguggagaugaacgcucccaauuaucauuacgaagagugcuccuguuacccugacucuagcgagaucacaugcgugugcagagauaacuggcacggguccaaucggcccugggucagcuucaaccagaaucuggaauaucagauuggauacaucuguucuggcauuuuuggggacaacccucgccccaaugauaaaaccggauccugcggcccggugagcucuaacggggccaacggaguuaagggcuucuccuuuaaguauggcaaugggguguggaucggaagaacaaaaagcauuuccucucggaacggcuucgagaugaucugggacccuaauggguggaccggaaccgauaacaauuuuagcacaaagcaagacauugucggcaucaacgaaugguccggguacucuggcagcuucgugcagcaucccgagcuuacgggacuggacuguauccgcccuugcuucuggguugaacucauuagaggccggcccaaagagaauaccaucuggacauccgggagcucuauuuccuuuuguggagugaacagcgauaccgucggcuggucuuggcccgacggggcugagcugccuuucacaaucgauaaguga

SEQ ID NO: 209691 - RNA, 1410 nt, Artificial Sequence; identical to SEQ ID NO: 208800
  derived and/or modified CDS sequence (opt5) from neuraminidase__InfluenzaA__ACZ16073

SEQ ID NO: 209692 - RNA, 1410 nt, Artificial Sequence
  derived and/or modified CDS sequence (opt5) from neuraminidase__InfluenzaA__ACZ16083
augaaccccaaucagaagaucauuaccaucggcagcgugugcaugacaauugggauggccaaccugauccuccaaauuggaaauaucaucuccauuuggaucucucacagcauucagcugggcaaccagaaucagaucgagacguguaaccaauccgucauuaccuacgaaaauaacacauggguuaaucagaccuaugugaacaucucuaauacaaacuucgcugccagacagagcguggucuccgugaaacuugcgggaaauucuagccugugcccuguuuccgggugggcuauuuacagcaaggacaacucugugcggaucggcuccaaaggggaugucuuugugauccgcgagccguucauuagcuguucuccccucggaugcagaaccuuuuuccugacacagggcgcccuucugaaugacaagcauuccaacggcaccaucaaagaucggagcccuuaucgcacgcucaugucuugucccauuggggaaguuccuucccccuacaacagcagauuugaguccguggccuggucugcuagcgccugccacgacggaaucaauuggcugaccauuggcaucuccgggccugauaacggagcugucgccgugcugaaguauaauggcaucauuacagacaccaucaagagcuggcggaacaauauucuccgcacacaagaaucugagugugcgugcgugaacggguccuguuucaccgucaugacggauggaccgagcaauggccaggccucuuacaaaaucuuuagaauugagaagggcaaaaucguuaagagcguggaaaugaacgcucccaauuaucauuacgaggaaugcuccuguuacccugacucuagcgagaucacaugcgugugccgggauaacuggcacggguccaaucgccccugggucagcuucaaccagaaucuggaguaucagauuggauacaucuguucuggcauuuuuggggacaacccuagacccaaugauaaaaccggauccugcggcccggugagcucuaacggggccaacggaguuaagggcuucuccuuuaaguauggcaaugggguguggaucggacggacaaaaagcauuuccucucgcaacggcuucgaaaugaucugggacccuaauggguggaccggaaccgauaacaauuuuagcauuaagcaagacaucgucggcaucaacgagugguccggguacucuggcagcuucgugcagcaucccgaacuuacaggacuggacuguauuagaccuugcuucuggaucgagcucauucggggccgccccaaagaaaauacgaucuggaccuccgggagcucuauuuccuuuuguggaguuaacagcgauacagugggcuggucuuggcccgacggggcugagcugccuuucaccaucgauaaguga

SEQ ID NO: 209693 - RNA, 1410 nt, Artificial Sequence; identical to SEQ ID NO: 208800
  derived and/or modified CDS sequence (opt5) from neuraminidase__InfluenzaA__ACZ16093

SEQ ID NO: 209694 - RNA, 1410 nt, Artificial Sequence; identical to SEQ ID NO: 208810
  derived and/or modified CDS sequence (opt5) from neuraminidase__InfluenzaA__ACZ16103

SEQ ID NO: 209695 - RNA, 1410 nt, Artificial Sequence; identical to SEQ ID NO: 208810
  derived and/or modified CDS sequence (opt5) from neuraminidase__InfluenzaA__ACZ16113

SEQ ID NO: 209696 - RNA, 1410 nt, Artificial Sequence; identical to SEQ ID NO: 208810
  derived and/or modified CDS sequence (opt5) from neuraminidase__InfluenzaA__ACZ16123

SEQ ID NO: 209697 - RNA, 1410 nt, Artificial Sequence
  derived and/or modified CDS sequence (opt5) from neuraminidase__InfluenzaA__ACZ16133
augaaccccaaucagaagaucauuaccaucggcagcgugugcaugacaauugggauggccaaccugauccuccaaauuggaaauaucaucuccauuuggaucucucacagcauucagcugggcaaccagaaucagaucgagacguguaaccaauccgucauuaccuacgaaaauaacacauggguuaaucagaccuaugugaacaucucuaauacaaacuucgcugccgggcagagcguggucuccgugaaacuugcgggaaauucuagccugugcccuguuuccggcugggcuauuuacagcaaggacaacucuaucagaaucggguccaaaggagauguguuugucauucgggagccguucaucagcuguucuccccucgaaugccgcaccuuuuuccugacacagggcgcccuucugaaugacaagcauuccaacggcaccauuaaagauagaagcccuuaucggacgcucaugucuugucccaucggggaggugccuucccccuacaacagccgcuuugaauccguugccuggucugcuagcgccugccacgacggaauuaauuggcugaccaucggcaucuccgggccugauaacggagcuguggccguccugaaguauaauggcauuaucacagacaccauuaagagcuggagaaacaauauccuccggacacaagagucugagugugcgugcgugaacggguccuguuucaccauuaugacggauggaccgagcgacggccaggccucuuacaaaaucuuucgcaucgaaaagggcaaaauugucaagagcguggagaugaaugcucccaacuaucauuacgaagagugcuccuguuacccugauucuagcgagaucacaugcguuugcagagacaauuggcacggguccaaccggcccugggugagcuucaaucagaaccuggaauaucagauuggauacaucuguucuggcauuuuuggggauaauccucgccccaacgacaaaaccggauccugcggcccggugagcucuaauggggccaacggagucaagggcuucuccuuuaaguauggcaacgggguguggaucggaagaacaaaaagcauuuccucucggaauggcuucgagaugaucugggauccuaacggguggaccggaaccgacaauaacuuuagcaucaagcaagacauuguuggcaucaaugaaugguccggguacucuggcagcuucgugcagcaucccgagcuuacaggacuggauuguauucgcccuugcuucugggucgaacucaucagaggccggcccaaagagaacacgauuuggaccuccgggagcucuaucuccuuuuguggagugaauagcgacacaguuggcuggucuuggcccgauggggcugagcugccuuucaccaucgacaaguga

SEQ ID NO: 209698 - RNA, 1410 nt, Artificial Sequence
  derived and/or modified CDS sequence (opt5) from neuraminidase__InfluenzaA__ACZ16143
augaaccccaaucagaagaucauuaccaucggcagcgugugcaugacaauugggauggccaaccugauccuccaaauuggaaauaucaucuccauuuggaucucucacagcauucagcugggcaaccagaaucagaucgagacguguaaccaauccgucauuaccuacgaaaauaacacauggguuaaucagaccuaugugaacaucucuaauacaaacuucgcugccgggcagagcguggucuccgugaaacuugcgggaaauucuagccugugcccuguuuccggcugggcuauuuacagcaaggacaacucuaucagaaucggguccaaaggagauguguuugucauucgggagccguucaucagcuguucuccccucgaaugccgcaccuuuuuccugacacagggcgcccuucugaaugacaagcauuccaacggcaccauuaaagauagaagcccuuaucggacgcucaugucuugucccaucggggaggugccuucccccuacaacagccgcuuugaauccguugccuggucugcuagcgccugccacgacggaauuaauuggcugaccaucggcaucuccgggccugauaacggagcuguggccguccugaaguauaauggcauuaucacagacaccauuaagagcuggagaaacaauauccuccggacacaagagucugagugugcgugcgugaacggguccuguuucaccgugaugacggauggaccgagcgacggccaggccucuuacaaaauuuuucgcaucgaaaagggcaaaaucgucaagagcguugagaugaaugcucccaacuaucauuacgaagagugcuccuguuacccugauucuagcgagauuacaugcgugugcagagacaauuggcacggguccaaccggcccugggugagcuucaaucagaaccuggaauaucagaucggauacauuuguucuggcaucuuuggggauaauccucgccccaacgacaaaaccggauccugcggcccgcuuagcucuaauggggccaacggagucaagggcuucuccuuuaaguauggcaacgggguguggauuggaagaacaaaaagcaucuccucucggaauggcuucgagaugauuugggauccuaacggguggaccggaaccgacaauaacuuuagcaucaagcaagacaucguuggcauuaaugaaugguccggguacucuggcagcuucgugcagcaucccgagcugacaggacucgauuguauccgcccuugcuucugggucgaacugauuagaggccggcccaaagagaacacgaucuggaccuccgggagcucuauuuccuuuuguggagugaauagcgacacaguuggcuggucuuggcccgauggggcugagcuuccuuucaccaucgacaaguga

SEQ ID NO: 209699 - RNA, 1410 nt, Artificial Sequence; identical to SEQ ID NO: 208810
  derived and/or modified CDS sequence (opt5) from neuraminidase__InfluenzaA__ACZ16153

SEQ ID NO: 209700 - RNA, 1410 nt, Artificial Sequence; identical to SEQ ID NO: 208810
  derived and/or modified CDS sequence (opt5) from neuraminidase__InfluenzaA__ACZ16163

SEQ ID NO: 209701 - RNA, 1410 nt, Artificial Sequence; identical to SEQ ID NO: 208800
  derived and/or modified CDS sequence (opt5) from neuraminidase__InfluenzaA__ACZ16173

SEQ ID NO: 209702 - RNA, 1410 nt, Artificial Sequence; identical to SEQ ID NO: 208810
  derived and/or modified CDS sequence (opt5) from neuraminidase__InfluenzaA__ACZ16193

SEQ ID NO: 209703 - RNA, 1410 nt, Artificial Sequence; identical to SEQ ID NO: 208810
  derived and/or modified CDS sequence (opt5) from neuraminidase__InfluenzaA__ACZ16203

SEQ ID NO: 209704 - RNA, 1410 nt, Artificial Sequence; identical to SEQ ID NO: 208810
  derived and/or modified CDS sequence (opt5) from neuraminidase__InfluenzaA__ACZ16213

SEQ ID NO: 209705 - RNA, 1410 nt, Artificial Sequence
  derived and/or modified CDS sequence (opt5) from neuraminidase__InfluenzaA__ACZ16223
augaaccccaaucagaagaucauuaccaucggcagcgugugcaugacaauugggauggccaaccugauccuccaaauuggaaauaucaucuccauuuggaucucucacagcauucagcugggcaaccagaaucagaucgagacguguaaccaauccgucauuaccuacgaaaauaacacauggguuaaucagaccuaugugaacaucucuaauacaaacuucgcugccgggcagagcguggucuccgugaaacuugcgggaaauucuagccugugcccuguuuccggcugggcuauuuacagcaaggacaacucuaucagaaucggguccaaaggagauguguuugucauucgggagccguucaucagcuguucuccccucgaaugccgcaccuuuuuccugacacagggcgcccuucugaaugacaagcauuccaacgagaccauuaaagauagaagcccuuaucggacgcucaugucuugucccaucggcgaagugccuucccccuacaacagccgcuuugaguccguugccuggucugcuagcgccugccacgacgggauuaauuggcugaccaucggaaucuccggcccugauaacggggcuguggccguccugaaguauaauggaauuaucacagacaccauuaagagcuggagaaacaauauccuccggacacaagagucugaaugugcgugcgugaacggcuccuguuucaccgugaugacggaugggccgagcgacggacaggccucuuacaaaauuuuucgcaucgagaagggcaaaaucgucaagagcguugaaaugaaugcucccaacuaucauuacgaggagugcuccuguuacccugauucuagcgaaauuacaugcgugugcagagacaauuggcacggcuccaaccggcccugggugagcuucaaucagaaccuggaguaucagaucggguacauuuguucuggaaucuuuggcgauaauccucgccccaacgacaaaaccggguccugcggaccggucagcucuaauggcgccaacggggugaagggauucuccuuuaaguauggcaacggcguuuggauugggagaacaaaaagcaucuccucucggaauggauucgaaaugauuugggauccuaacggcuggaccgggaccgacaauaacuuuagcaucaagcaagacaucauuggaaucaaugagugguccggcuacucugggagcuucgugcagcaucccgaacuuacaggccuggauuguauucgcccuugcuucugggucgagcucaucagaggacggcccaaagagaacacgauuuggaccuccggcagcucuaucuccuuuuguggggugaauagcgacacaguuggauggucuuggcccgauggcgcugaacugccuuucaccaucgacaaguga

SEQ ID NO: 209706 - RNA, 1410 nt, Artificial Sequence; identical to SEQ ID NO: 208810
  derived and/or modified CDS sequence (opt5) from neuraminidase__InfluenzaA__ACZ16233

SEQ ID NO: 209707 - RNA, 1410 nt, Artificial Sequence; identical to SEQ ID NO: 209518
  derived and/or modified CDS sequence (opt5) from neuraminidase__InfluenzaA__ACZ16243

SEQ ID NO: 209708 - RNA, 1410 nt, Artificial Sequence
  derived and/or modified CDS sequence (opt5) from neuraminidase__InfluenzaA__ACZ16253
augaaccccaaucagaagaucauuaccaucggcagcgugugcaugacaauugggauggccaaccugauccuccaaauuggaaauaucaucuccauuuggaucucucacagcauucagcugggcaaccagaaucagaucgagacguguaaccaauccgucauuaccuacgaaaauaacacauggguuaaucagaccuaugugaacaucucuaauacaaacuucgcugccgggcagagcguggucuccgugaaacuugcgggaaauucuagccugugcccuguuuccggcugggcuauuuacagcaaggacaacucuaucagaaucggguccaaaggagauguguuugucauucgggagccguucaucagcuguucuccccucgaaugccgcaccuuuuuccugacacagggcgcccuucugaaugacaagcauuccaacggcaccauuaaagauagaagcccuuaucggacgcucaugucuugucccaucggggaggugccuucccccuacaacagccgcuuugaauccguugccuggucugcuagcgccugccacgacggaauuaauuggcugaccaucggcaucuccgggccugauaacggagcuguggccguccugaaguauaauggcauuaucacagacaccauuaagagcuggagaaacaauauccuccggacacaagagucugagugugcgugcgugaacggguccuguuucaccgugaugacggauggaccgagcgacggccaggccucuuacaaaauuuuucgcaucgaaaagggcaaaaucgucaagagcguugagaugaaugcucccaacuaucauuacgaagagugcuccuguuacccugauucuagcgagauuacaugcgugugcagagacaauuggcacggguccaaccggcccugggugagcuucaaucagaaccuggaauaucagaucggauacauuuguucuggcaucuuuggggauaauccucgccccaacgacaaaaccggauccugcggcccggucagcucuaauggggccaacggagugaagggcuucuccuuuaaguauggcaacgggguuuggauuggaagaacaaaaagcaucuccucucggaauggcuucgagaugauuugggauccuaacggguggaccggaaccgacaauaacuuuagcaucaagcaagacaucgugggcauuaaugaaugguccggguacucuggcagcuucguccagcaucccgagcuuacaggacuggauuguauccgcccuugcuucuggguggaacucauuagaggccggcccaaagagaacacgaucuggaccuccgggagcucuauuuccuuuuguggaguuaauagcgacacagugggcuggucuuggcccgauggggcugagcugccuuucaacaucgacaaguga

SEQ ID NO: 209709 - RNA, 1410 nt, Artificial Sequence; identical to SEQ ID NO: 208810
  derived and/or modified CDS sequence (opt5) from neuraminidase__InfluenzaA__ACZ16263

SEQ ID NO: 209710 - RNA, 1410 nt, Artificial Sequence; identical to SEQ ID NO: 208800
  derived and/or modified CDS sequence (opt5) from neuraminidase__InfluenzaA__ACZ16283

SEQ ID NO: 209711 - RNA, 1410 nt, Artificial Sequence; identical to SEQ ID NO: 208810
  derived and/or modified CDS sequence (opt5) from neuraminidase__InfluenzaA__ACZ16293

SEQ ID NO: 209712 - RNA, 1410 nt, Artificial Sequence; identical to SEQ ID NO: 208810
  derived and/or modified CDS sequence (opt5) from neuraminidase__InfluenzaA__ACZ16303

SEQ ID NO: 209713 - RNA, 1410 nt, Artificial Sequence; identical to SEQ ID NO: 208810
  derived and/or modified CDS sequence (opt5) from neuraminidase__InfluenzaA__ACZ16313

SEQ ID NO: 209714 - RNA, 1410 nt, Artificial Sequence; identical to SEQ ID NO: 208810
  derived and/or modified CDS sequence (opt5) from neuraminidase__InfluenzaA__ACZ16323

SEQ ID NO: 209715 - RNA, 1410 nt, Artificial Sequence; identical to SEQ ID NO: 208810
  derived and/or modified CDS sequence (opt5) from neuraminidase__InfluenzaA__ACZ16333

SEQ ID NO: 209716 - RNA, 1410 nt, Artificial Sequence; identical to SEQ ID NO: 209518
  derived and/or modified CDS sequence (opt5) from neuraminidase__InfluenzaA__ACZ16343

SEQ ID NO: 209717 - RNA, 1410 nt, Artificial Sequence; identical to SEQ ID NO: 208810
  derived and/or modified CDS sequence (opt5) from neuraminidase__InfluenzaA__ACZ16353

SEQ ID NO: 209718 - RNA, 1410 nt, Artificial Sequence; identical to SEQ ID NO: 208810
  derived and/or modified CDS sequence (opt5) from neuraminidase__InfluenzaA__ACZ16363

SEQ ID NO: 209719 - RNA, 1410 nt, Artificial Sequence; identical to SEQ ID NO: 208800
  derived and/or modified CDS sequence (opt5) from neuraminidase__InfluenzaA__ACZ16373

SEQ ID NO: 209720 - RNA, 1410 nt, Artificial Sequence; identical to SEQ ID NO: 208810
  derived and/or modified CDS sequence (opt5) from neuraminidase__InfluenzaA__ACZ16383

SEQ ID NO: 209721 - RNA, 1410 nt, Artificial Sequence; identical to SEQ ID NO: 208810
  derived and/or modified CDS sequence (opt5) from neuraminidase__InfluenzaA__ACZ16393

SEQ ID NO: 209722 - RNA, 1410 nt, Artificial Sequence; identical to SEQ ID NO: 208810
  derived and/or modified CDS sequence (opt5) from neuraminidase__InfluenzaA__ACZ16403

SEQ ID NO: 209723 - RNA, 1410 nt, Artificial Sequence; identical to SEQ ID NO: 208810
  derived and/or modified CDS sequence (opt5) from neuraminidase__InfluenzaA__ACZ16423

SEQ ID NO: 209724 - RNA, 1410 nt, Artificial Sequence; identical to SEQ ID NO: 208810
  derived and/or modified CDS sequence (opt5) from neuraminidase__InfluenzaA__ACZ16433

SEQ ID NO: 209725 - RNA, 1410 nt, Artificial Sequence; identical to SEQ ID NO: 208810
  derived and/or modified CDS sequence (opt5) from neuraminidase__InfluenzaA__ACZ16443

SEQ ID NO: 209726 - RNA, 1410 nt, Artificial Sequence; identical to SEQ ID NO: 208810
  derived and/or modified CDS sequence (opt5) from neuraminidase__InfluenzaA__ACZ16453

SEQ ID NO: 209727 - RNA, 1410 nt, Artificial Sequence; identical to SEQ ID NO: 209518
  derived and/or modified CDS sequence (opt5) from neuraminidase__InfluenzaA__ACZ16463

SEQ ID NO: 209728 - RNA, 1410 nt, Artificial Sequence; identical to SEQ ID NO: 208810
  derived and/or modified CDS sequence (opt5) from neuraminidase__InfluenzaA__ACZ16483

SEQ ID NO: 209729 - RNA, 1410 nt, Artificial Sequence; identical to SEQ ID NO: 208810
  derived and/or modified CDS sequence (opt5) from neuraminidase__InfluenzaA__ACZ16493

SEQ ID NO: 209730 - RNA, 1410 nt, Artificial Sequence
  derived and/or modified CDS sequence (opt5) from neuraminidase__InfluenzaA__ACZ16503
augaaccccaaucagaagaucauuaccaucggcagcgugugcaugacaauugggauggccaaccugauccuccaaauuggaaauaucaucuccauuuggaucucucacagcauucagcugggcaaccagaaucagaucgagacguguaaccaauccgucauuaccuacgaaaauaacacauggguuaaucagaccuaugugaacaucucuaauacaaacuucgcugccgggcagagcguggucuccgugaaacuugcgggaaauucuagccugugcccuguuuccggcugggcuauuuacagcaaggacaacucuaucagaaucggguccaaaggagauguguuugucauucgggagccguucaucagcuguucuccccucgaaugccgcaccuuuuuccugacacagggcgcccuucugaaugacaagcauuccaacggcaccauuaaagauagaagcccuuaucggacgcucaugucuugucccaucggggaggugccuucccccuacaacagccgcuuugaauccguugccuggucugcuagcgccugccacgacggaauuaauuggcugaccaucggcaucuccgggccugauaacggagcuguggccguccugaaguauaauggcauuaucacagacaccauuaagagcuggagaaacaauauccuccggacacaagagucugagugugcgugcgugaacggguccuguuucaccgugaugacggauggaccgagcgacggccaggccucuuacaaaauuuuucgcaucgaaaagggcaaaaucgucaagagcguugagauggaugcucccaauuaucauuacgaagagugcuccuguuacccugacucuagcgagauuacaugcgugugcagagauaacuggcacggguccaaucggcccugggugagcuucaaccagaaucuggaauaucagaucggauacauuuguucuggcaucuuuggggacaacccucgccccaaugauaaaaccggauccugcggcccggucagcucuaacggggccaauggagugaagggcuucuccuuuaaguauggcaacgggguuuggauuggaagaacaaaaagcaucuccucucggaacggcuucgagaugauuugggacccuaauggguggaccggaaccgacaacaauuuuagcaucaagcaagauaucgugggcauuaacgaaugguccggguacucuggcagcuucguccagcaucccgagcuuacaggacuggacuguauccgcccuugcuucuggguggaacucauuagaggccggcccaaagagaauacgaucuggaccuccgggagcucuauuuccuuuuguggaguuaacagcgauacagugggcuggucuuggcccgacggggcugagcugccuuucaccaucgauaaguga

SEQ ID NO: 209731 - RNA, 1410 nt, Artificial Sequence; identical to SEQ ID NO: 209518
  derived and/or modified CDS sequence (opt5) from neuraminidase__InfluenzaA__ACZ16513

SEQ ID NO: 209732 - RNA, 1410 nt, Artificial Sequence; identical to SEQ ID NO: 208810
  derived and/or modified CDS sequence (opt5) from neuraminidase__InfluenzaA__ACZ16523

SEQ ID NO: 209733 - RNA, 1410 nt, Artificial Sequence; identical to SEQ ID NO: 208810
  derived and/or modified CDS sequence (opt5) from neuraminidase__InfluenzaA__ACZ16533

SEQ ID NO: 209734 - RNA, 1410 nt, Artificial Sequence; identical to SEQ ID NO: 208800
  derived and/or modified CDS sequence (opt5) from neuraminidase__InfluenzaA__ACZ16543

SEQ ID NO: 209735 - RNA, 1410 nt, Artificial Sequence; identical to SEQ ID NO: 208810
  derived and/or modified CDS sequence (opt5) from neuraminidase__InfluenzaA__ACZ16553

SEQ ID NO: 209736 - RNA, 1410 nt, Artificial Sequence; identical to SEQ ID NO: 208810
  derived and/or modified CDS sequence (opt5) from neuraminidase__InfluenzaA__ACZ16586

SEQ ID NO: 209737 - RNA, 1410 nt, Artificial Sequence; identical to SEQ ID NO: 208810
  derived and/or modified CDS sequence (opt5) from neuraminidase__InfluenzaA__ACZ16596

SEQ ID NO: 209738 - RNA, 1410 nt, Artificial Sequence; identical to SEQ ID NO: 208810
  derived and/or modified CDS sequence (opt5) from neuraminidase__InfluenzaA__ACZ16606

SEQ ID NO: 209739 - RNA, 1410 nt, Artificial Sequence; identical to SEQ ID NO: 208810
  derived and/or modified CDS sequence (opt5) from neuraminidase__InfluenzaA__ACZ16633

SEQ ID NO: 209740 - RNA, 1410 nt, Artificial Sequence
  derived and/or modified CDS sequence (opt5) from neuraminidase__InfluenzaA__ACZ16643
augaaccccaaucagaagaucauuaccaucggcagcgugugcaugacaauugggauggccaaccugauccuccaaauuggaaauaucaucuccauuuggaucucucacagcauucagcugggcaaccagaaucagaucgagacguguaaccaauccgucauuaccuacgaaaauaacacauggguuaaucagaccuaugugaacaucucuaauacaaacuucgcugccgggcagagcguggucuccgugaaacuugcgggaaauucuagccugugcccuguuuccggcugggcuauuuacagcaaggacaacucuaucagaaucggguccaaaggagauguguuugucauucgggagccguucaucagcuguucuccccucgaaugccgcaccuuuuuccugacacagggcgcccuucugaaugacaagcauuccaacggcaccauuaaagauagaagcccuuaucggacgcucaugucuugucccaucggggaggugccuucccccuacaacagccgcuuugaauccguugccuggucugcuagcgccugccacgacggaauuaauuggcugaccaucggcaucuccgggccugauaacggagcuguggccguccugagauauaauggcauuaucacagacaccauuaagagcuggcggaacaauauccuccgcacacaagagucugagugugcgugcgugaacggguccuguuucaccgugaugacggauggaccgagcgacggccaggccucuuacaagauuuuuagaaucgaaaaaggcaagaucgucaaaagcguugagaugaaugcucccaacuaucauuacgaagagugcuccuguuacccugauucuagcgagauuacaugcgugugccgggacaauuggcacggguccaaccgccccugggugagcuucaaucagaaccuggaauaucagaucggauacauuuguucuggcaucuuuggggauaauccuagacccaacgacaagaccggauccugcggcccggucagcucuaauggggccaacggagugaaaggcuucuccuuuaaguauggcaacgggguuuggauuggacggacaaagagcaucuccucucgcaauggcuucgagaugauuugggauccuaacggguggaccggaaccgacaauaacuuuagcaucaaacaagacaucgugggcauuaaugaaugguccggguacucuggcagcuucguccagcaucccgagcuuacaggacuggauuguaucagaccuugcuucuggguggaacucauucggggccgccccaaggagaacacgaucuggaccuccgggagcucuauuuccuuuuguggaguuaauagcgacacagugggcuggucuuggcccgauggggcugagcugccuuucaccaucgacaaauga

SEQ ID NO: 209741 - RNA, 1410 nt, Artificial Sequence; identical to SEQ ID NO: 208810
  derived and/or modified CDS sequence (opt5) from neuraminidase__InfluenzaA__ACZ16653

SEQ ID NO: 209742 - RNA, 1410 nt, Artificial Sequence; identical to SEQ ID NO: 208810
  derived and/or modified CDS sequence (opt5) from neuraminidase__InfluenzaA__ACZ16663

SEQ ID NO: 209743 - RNA, 1410 nt, Artificial Sequence; identical to SEQ ID NO: 208810
  derived and/or modified CDS sequence (opt5) from neuraminidase__InfluenzaA__ACZ16673

SEQ ID NO: 209744 - RNA, 1410 nt, Artificial Sequence; identical to SEQ ID NO: 208810
  derived and/or modified CDS sequence (opt5) from neuraminidase__InfluenzaA__ACZ16683

SEQ ID NO: 209745 - RNA, 1410 nt, Artificial Sequence; identical to SEQ ID NO: 208810
  derived and/or modified CDS sequence (opt5) from neuraminidase__InfluenzaA__ACZ16693

SEQ ID NO: 209746 - RNA, 1410 nt, Artificial Sequence; identical to SEQ ID NO: 208810
  derived and/or modified CDS sequence (opt5) from neuraminidase__InfluenzaA__ACZ16703

SEQ ID NO: 209747 - RNA, 1410 nt, Artificial Sequence; identical to SEQ ID NO: 208810
  derived and/or modified CDS sequence (opt5) from neuraminidase__InfluenzaA__ACZ16713

SEQ ID NO: 209748 - RNA, 1410 nt, Artificial Sequence; identical to SEQ ID NO: 208810
  derived and/or modified CDS sequence (opt5) from neuraminidase__InfluenzaA__ACZ16723

SEQ ID NO: 209749 - RNA, 1410 nt, Artificial Sequence; identical to SEQ ID NO: 208810
  derived and/or modified CDS sequence (opt5) from neuraminidase__InfluenzaA__ACZ16733

SEQ ID NO: 209750 - RNA, 1410 nt, Artificial Sequence; identical to SEQ ID NO: 208810
  derived and/or modified CDS sequence (opt5) from neuraminidase__InfluenzaA__ACZ16743

SEQ ID NO: 209751 - RNA, 1410 nt, Artificial Sequence; identical to SEQ ID NO: 208810
  derived and/or modified CDS sequence (opt5) from neuraminidase__InfluenzaA__ACZ16753

SEQ ID NO: 209752 - RNA, 1410 nt, Artificial Sequence; identical to SEQ ID NO: 208810
  derived and/or modified CDS sequence (opt5) from neuraminidase__InfluenzaA__ACZ16763

SEQ ID NO: 209753 - RNA, 1410 nt, Artificial Sequence; identical to SEQ ID NO: 208800
  derived and/or modified CDS sequence (opt5) from neuraminidase__InfluenzaA__ACZ16773

SEQ ID NO: 209754 - RNA, 1410 nt, Artificial Sequence; identical to SEQ ID NO: 208810
  derived and/or modified CDS sequence (opt5) from neuraminidase__InfluenzaA__ACZ16783

SEQ ID NO: 209755 - RNA, 1410 nt, Artificial Sequence; identical to SEQ ID NO: 208810
  derived and/or modified CDS sequence (opt5) from neuraminidase__InfluenzaA__ACZ16793

SEQ ID NO: 209756 - RNA, 1410 nt, Artificial Sequence; identical to SEQ ID NO: 208810
  derived and/or modified CDS sequence (opt5) from neuraminidase__InfluenzaA__ACZ16803

SEQ ID NO: 209757 - RNA, 1410 nt, Artificial Sequence; identical to SEQ ID NO: 208810
  derived and/or modified CDS sequence (opt5) from neuraminidase__InfluenzaA__ACZ16813

SEQ ID NO: 209758 - RNA, 1410 nt, Artificial Sequence; identical to SEQ ID NO: 208800
  derived and/or modified CDS sequence (opt5) from neuraminidase__InfluenzaA__ACZ16823

SEQ ID NO: 209759 - RNA, 1410 nt, Artificial Sequence; identical to SEQ ID NO: 208810
  derived and/or modified CDS sequence (opt5) from neuraminidase__InfluenzaA__ACZ16833

SEQ ID NO: 209760 - RNA, 1410 nt, Artificial Sequence; identical to SEQ ID NO: 208810
  derived and/or modified CDS sequence (opt5) from neuraminidase__InfluenzaA__ACZ16843

SEQ ID NO: 209761 - RNA, 1410 nt, Artificial Sequence; identical to SEQ ID NO: 209730
  derived and/or modified CDS sequence (opt5) from neuraminidase__InfluenzaA__ACZ16853

SEQ ID NO: 209762 - RNA, 1410 nt, Artificial Sequence; identical to SEQ ID NO: 208810
  derived and/or modified CDS sequence (opt5) from neuraminidase__InfluenzaA__ACZ16863

SEQ ID NO: 209763 - RNA, 1410 nt, Artificial Sequence; identical to SEQ ID NO: 208810
  derived and/or modified CDS sequence (opt5) from neuraminidase__InfluenzaA__ACZ16873

SEQ ID NO: 209764 - RNA, 1410 nt, Artificial Sequence; identical to SEQ ID NO: 208810
  derived and/or modified CDS sequence (opt5) from neuraminidase__InfluenzaA__ACZ16883

SEQ ID NO: 209765 - RNA, 1410 nt, Artificial Sequence; identical to SEQ ID NO: 208810
  derived and/or modified CDS sequence (opt5) from neuraminidase__InfluenzaA__ACZ16893

SEQ ID NO: 209766 - RNA, 1410 nt, Artificial Sequence; identical to SEQ ID NO: 208810
  derived and/or modified CDS sequence (opt5) from neuraminidase__InfluenzaA__ACZ16903

SEQ ID NO: 209767 - RNA, 1410 nt, Artificial Sequence; identical to SEQ ID NO: 208810
  derived and/or modified CDS sequence (opt5) from neuraminidase__InfluenzaA__ACZ16913

SEQ ID NO: 209768 - RNA, 1410 nt, Artificial Sequence; identical to SEQ ID NO: 208810
  derived and/or modified CDS sequence (opt5) from neuraminidase__InfluenzaA__ACZ16923

SEQ ID NO: 209769 - RNA, 1410 nt, Artificial Sequence; identical to SEQ ID NO: 208810
  derived and/or modified CDS sequence (opt5) from neuraminidase__InfluenzaA__ACZ16933

SEQ ID NO: 209770 - RNA, 1410 nt, Artificial Sequence; identical to SEQ ID NO: 208810
  derived and/or modified CDS sequence (opt5) from neuraminidase__InfluenzaA__ACZ16943

SEQ ID NO: 209771 - RNA, 1410 nt, Artificial Sequence; identical to SEQ ID NO: 208800
  derived and/or modified CDS sequence (opt5) from neuraminidase__InfluenzaA__ACZ16953

SEQ ID NO: 209772 - RNA, 1410 nt, Artificial Sequence; identical to SEQ ID NO: 208810
  derived and/or modified CDS sequence (opt5) from neuraminidase__InfluenzaA__ACZ16963

SEQ ID NO: 209773 - RNA, 1410 nt, Artificial Sequence; identical to SEQ ID NO: 208810
  derived and/or modified CDS sequence (opt5) from neuraminidase__InfluenzaA__ACZ16973

SEQ ID NO: 209774 - RNA, 1410 nt, Artificial Sequence; identical to SEQ ID NO: 208810
  derived and/or modified CDS sequence (opt5) from neuraminidase__InfluenzaA__ACZ16983

SEQ ID NO: 209775 - RNA, 1410 nt, Artificial Sequence; identical to SEQ ID NO: 208810
  derived and/or modified CDS sequence (opt5) from neuraminidase__InfluenzaA__ACZ16993

SEQ ID NO: 209776 - RNA, 1410 nt, Artificial Sequence; identical to SEQ ID NO: 208810
  derived and/or modified CDS sequence (opt5) from neuraminidase__InfluenzaA__ACZ17003

SEQ ID NO: 209777 - RNA, 1410 nt, Artificial Sequence; identical to SEQ ID NO: 208810
  derived and/or modified CDS sequence (opt5) from neuraminidase__InfluenzaA__ACZ17023

SEQ ID NO: 209778 - RNA, 1410 nt, Artificial Sequence; identical to SEQ ID NO: 208810
  derived and/or modified CDS sequence (opt5) from neuraminidase__InfluenzaA__ACZ17043

SEQ ID NO: 209779 - RNA, 1410 nt, Artificial Sequence; identical to SEQ ID NO: 208810
  derived and/or modified CDS sequence (opt5) from neuraminidase__InfluenzaA__ACZ17053

SEQ ID NO: 209780 - RNA, 1410 nt, Artificial Sequence
  derived and/or modified CDS sequence (opt5) from neuraminidase__InfluenzaA__ACZ17063
augaaccccaaucagaagaucauuaccaucggcagcgugugcaugacaauugggauggccaaccugauccuccaaauuggaaauaucaucuccauuuggaucucucacagcauucagcugggcgaccagaaccagaucgagacguguaaucaauccgucauuaccuacgaaaacaauacauggguuaaccagaccuaugugaauaucucuaacacaaauuucgcugccgggcagagcguggucuccgugaaacuugcgggaaacucuagccugugcccuguuuccggcugggcuauuuacagcaaggauaauucuaucagaaucggguccaaaggagacguguuugucauucgggagccguucaucagcuguucuccccucgaaugccgcaccuuuuuccugacacagggcgcccuucugaacgauaagcauuccaauggcaccauuaaagacagaagcccuuaucggacgcucaugucuugucccaucggggaggugccuucccccuacaacagccgcuuugaauccguugccuggucugcuagcgccugccacgauggaauuaacuggcugaccaucggcaucuccgggccugacaauggagcuguggccguccugaaguauaacggcauuaucacagauaccauuaagagcuggagaaauaacauccuccggacacaagagucugagugugcgugcgugaauggguccuguuucaccgugaugacggacggaccgagcgauggccaggccucuuacaaaauuuuucgcaucgaaaagggcaaaaucgucaagagcguugagaugaacgcucccaauuaucauuacgaagagugcuccuguuacccugacucuagcgagauuacaugcgugugcagagauaacuggcacggguccaaucggcccugggugagcuucaaccagaaucuggaauaucagaucggauacauuuguucuggcaucuuuggggacaacccucgccccaaugauaaaaccggauccugcggcccggucagcucuaacggggccaauggagugaagggcuucuccuuuaaguauggcaacgggguuuggauuggaagaacaaaaagcaucuccucucggaacggcuucgagaugauuugggacccuaauggguggaccggaaccgacaacaauuuuagcaucaagcaagauaucgugggcauuaacgaaugguccggguacucuggcagcuucguccagcaucccgagcuuacaggacuggacuguauccgcccuugcuucuggguggaacucauuagaggccggcccaaagagaauacgaucuggaccuccgggagcucuauuuccuuuuguggaguuaacagcgauacagugggcuggucuuggcccgacggggcugagcugccuuucaccaucgauaaguga

SEQ ID NO: 209781 - RNA, 1410 nt, Artificial Sequence; identical to SEQ ID NO: 208810
  derived and/or modified CDS sequence (opt5) from neuraminidase__InfluenzaA__ACZ17073

SEQ ID NO: 209782 - RNA, 1410 nt, Artificial Sequence; identical to SEQ ID NO: 209518
  derived and/or modified CDS sequence (opt5) from neuraminidase__InfluenzaA__ACZ17083

SEQ ID NO: 209783 - RNA, 1410 nt, Artificial Sequence
  derived and/or modified CDS sequence (opt5) from neuraminidase__InfluenzaA__ACZ17093
augaaccccaaucagaagaucauuaccaucggcagcgugugcaugacaauugggauggccaaccugauccuccaaauuggaaauaucaucuccauuuggaucucucacagcauucagcugggcaaccagaaucagaucgagacguguaaccaauccgucauuaccuacgaaaauaacacauggguuaaucagaccuaugugaacaucucuaauacaaacuucgcugccgggcagagcguggucuccgugaaacuugcgggaaauucuagccugugcccuguuuccggcugggcuauuuacagcaaggacaacucuaucagaaucggguccaaaggagauguguuugucauucgggagccguucaucagcuguucucccuuugaaugccgcaccuucuuucucacacagggcgcccugcuuaaugacaagcauuccaacggcaccauuaaagauagaagcccuuaucggacgcugaugucuugucccaucggggaggugccuucccccuacaacagccgcuucgaauccguugccuggucugcuagcgccugccacgacggaauuaauuggcucaccaucggcaucuccgggccugauaacggagcuguggccguccugaaguauaauggcauuaucacagacaccauuaagagcuggagaaacaauauccugcggacacaagagucugagugugcgugcgugaacggguccuguuuuaccgugaugacggauggaccgagcgacggccaggccucuuacaaaauuuuccgcaucgaaaagggcaaaaucgucaagagcguugagaugaaugcucccaacuaucauuacgaagagugcuccuguuacccugauucuagcgagauuacaugcgugugcagagacaauuggcacggguccaaccggcccugggugagcuuuaaucagaaccucgaauaucagaucggauacauuuguucuggcaucuucggggauaauccucgccccaacgacaaaaccggauccugcggcccggucagcucuaauggggccaacggagugaagggcuuuuccuucaaguauggcaacgggguuuggauuggaagaacaaaaagcaucuccucucggaauggcuuugagaugauuugggauccuaacggguggaccggaaccgacaauaacuucagcaucaagcaagacaucgugggcauuaaugaaugguccggguacucuggcagcuucguccagcaucccgagcugacaggacuugauuguauccgcccuugcuuuuggguggaacugauuagaggccggcccaaagagaacacgaucuggaccuccgggagcucuauuuccuucuguggaguuaauagcgacacagugggcuggucuuggcccgauggggcugagcucccuuuuaccaucgacaaguga

SEQ ID NO: 209784 - RNA, 1410 nt, Artificial Sequence
  derived and/or modified CDS sequence (opt5) from neuraminidase__InfluenzaA__ACZ17113
augaaccccaaucagaagaucauuaccaucggcagcgugugcaugacaauugggauggccaaccugauccuccaaauuggaaauaucaucuccauuuggaucucucacagcauucagcugggcaaccagaaucagaucgagacguguaaccaauccgucauuaccuacgaaaauaacacauggguuaaucagaccuaugugaacaucucuaauacaaacuucgcugccgggcagagcguggucuccgugaaacuugcgggaaauucuagccugugcccuguuaacggcugggcuauuuacuccaaggacaauagcaucagaaucgggucuaaaggagauguguuugucauucgggagccguucaucuccuguagcccccucgaaugccgcaccuuuuuccugacacagggcgcccuucugaacgacaagcauucuaacggcaccauuaaagauagauccccuuaucggacgcucaugagcugucccaucggggaggugccuucucccuacaauucccgcuuugaaagcguugccugguccgcuucugccugccacgacggaauuaacuggcugaccaucggcaucagcgggccugauaauggagcuguggccguccugaaguauaacggcauuaucacagacaccauuaaguccuggagaaauaacauccuccggacacaagagagcgagugugcgugcgugaaugggucuuguuucaccgugaugacggauggaccguccgacggccaggccagcuacaaaauuuuucgcaucgaaaagggcaaaaucgucaagucuguugagaugaacgcucccaauuaucauuacgaagagugcagcuguuacccugauuccucugagauuacaugcgugugcagagacaacuggcacgggagcaaucggcccuggguguccuucaaccagaaucuggaauaucagaucggauacauuuguagcggcaucuuuggggauaacccucgccccaaugacaaaaccggaucuugcggcccggucuccagcaacggggccaacggagugaagggcuucucuuuuaaguauggcaaugggguuuggauuggaagaacaaaauccaucagcucccggaacggcuucgagaugauuugggauccuaauggguggaccggaaccgacaacaauuuuucuaucaagcaagacaucgugggcauuaacgaauggagcggguacuccggcucuuucguccagcaucccgagcuuacaggacuggauuguauccgcccuugcuucuggguggaacucauuagaggccggcccaaagagaauacgaucuggaccagcggguccagcauuucuuuuuguggaguuaacuccgacacagugggcuggagcuggcccgauggggcugagcugccuuucaccaucgacaaguga

SEQ ID NO: 209785 - RNA, 1410 nt, Artificial Sequence; identical to SEQ ID NO: 208810
  derived and/or modified CDS sequence (opt5) from neuraminidase__InfluenzaA__ACZ17123

SEQ ID NO: 209786 - RNA, 1410 nt, Artificial Sequence; identical to SEQ ID NO: 208810
  derived and/or modified CDS sequence (opt5) from neuraminidase__InfluenzaA__ACZ17133

SEQ ID NO: 209787 - RNA, 1410 nt, Artificial Sequence
  derived and/or modified CDS sequence (opt5) from neuraminidase__InfluenzaA__ACZ17163
augaaccccaaucagaagaucauuaccaucggcagcgugugcaugacaauugggauggccaaccugauccuccaaauuggaaauaucaucuccauuuggaucucucacagcauucagcugggcaaccagaaucagaucgagacguguaaccaauccgucauuaccuacgaaaauaacacauggguuaaucagaccuaugugaacaucucuaauacaaacuucgcugccgggcagagcguggucuccgugaaacuugcgggaaauucuagccugugcccuguuuccggcugggcuauuuacagcaaggacaacucuaucagaaucggguccaaaggagauguguuugucauucgggagccguucaucagcuguucuccccucgaaugccgcaccuuuuuccugacacagggcgcccuucugaaugacaagcauuccaacggcaccauuaaagauagaagcccuuaucggacgcucaugucuugucccaucggggaggugccuucccccuacaacagccgcuuugaauccguugccuggucugcuagcgccugccacgacggaauuaauuggcugaccaucggcaucuccgggccugauaacggagcuguggccguccugaaguauaauggcauuaucacagacaccauuaagagcuggagaaacaauauccuccggacacaagagucugagugugcgugcgugaacggguccuguuucaccgugaugacggauggaccgagcgacggccaggccucuuacaaaauuuuucgcaucgaaaagggcaaaaucgucaagagcguugagaugaaugcucccaacuaucauuacgaagagugcuccuguuacccugauucuagcgagauuacaugcgugugcagagacaauuggcacggguccaaccggcccugggugagcuucaaucgcaaccuggaauaucagaucggauacauuuguucuggcaucuuuggggauaauccuagacccaacgacaaaaccggauccugcggcccggucagcucuaauggggccaacggagugaagggcuucuccuuuaaguauggcaacgggguuuggauuggacggacaaaaagcaucuccucucgcaauggcuucgagaugauuugggauccuaacggguggaccggaaccgacaauaacuuuagcaucaagcaggacaucgugggcauuaaugaaugguccggguacucuggcagcuucguccaacaucccgagcuuacaggacuggauuguaucagaccuugcuucuggguggaacucauucggggccgccccaaagagaacacgaucuggaccuccgggagcucuauuuccuuuuguggaguuaauagcgacacagugggcuggucuuggcccgauggggcugagcugccuuucaccaucgacaaguga

SEQ ID NO: 209788 - RNA, 1410 nt, Artificial Sequence; identical to SEQ ID NO: 209787
  derived and/or modified CDS sequence (opt5) from neuraminidase__InfluenzaA__ACZ17173

SEQ ID NO: 209789 - RNA, 1410 nt, Artificial Sequence; identical to SEQ ID NO: 209787
  derived and/or modified CDS sequence (opt5) from neuraminidase__InfluenzaA__ACZ17183

SEQ ID NO: 209790 - RNA, 1410 nt, Artificial Sequence; identical to SEQ ID NO: 209787
  derived and/or modified CDS sequence (opt5) from neuraminidase__InfluenzaA__ACZ17193

SEQ ID NO: 209791 - RNA, 1410 nt, Artificial Sequence; identical to SEQ ID NO: 209787
  derived and/or modified CDS sequence (opt5) from neuraminidase__InfluenzaA__ACZ17203

SEQ ID NO: 209792 - RNA, 1410 nt, Artificial Sequence; identical to SEQ ID NO: 208810
  derived and/or modified CDS sequence (opt5) from neuraminidase__InfluenzaA__ACZ17213

SEQ ID NO: 209793 - RNA, 1410 nt, Artificial Sequence; identical to SEQ ID NO: 208810
  derived and/or modified CDS sequence (opt5) from neuraminidase__InfluenzaA__ACZ17223

SEQ ID NO: 209794 - RNA, 1410 nt, Artificial Sequence; identical to SEQ ID NO: 208810
  derived and/or modified CDS sequence (opt5) from neuraminidase__InfluenzaA__ACZ17233

SEQ ID NO: 209795 - RNA, 1410 nt, Artificial Sequence; identical to SEQ ID NO: 208810
  derived and/or modified CDS sequence (opt5) from neuraminidase__InfluenzaA__ACZ17243

SEQ ID NO: 209796 - RNA, 1410 nt, Artificial Sequence; identical to SEQ ID NO: 208810
  derived and/or modified CDS sequence (opt5) from neuraminidase__InfluenzaA__ACZ17263

SEQ ID NO: 209797 - RNA, 1410 nt, Artificial Sequence
  derived and/or modified CDS sequence (opt5) from neuraminidase__InfluenzaA__ACZ17273
augaaccccaaucagaagaucauuaccaucggcagcgugugcaugacaauugggauggccaaccugauccuccaaauuggaaauaucaucuccauuuggaucucucacagcauucagcugggcaaccagaaucagaucgagacguguaaccaauccgucauuaccuacgaaaauaacacauggguuaaucagaccuaugugaacaucucuaauacaaacuucgcugccgggcagagcguggucuccgugaaacuugcgggaaauucuagccugugcccuguuuccggcugggcuauuuacagcaaggacaacucuaucagaaucggguccaaaggagauguguuugucauucgggagccguucaucagcuguucuccccucgaaugccgcaccuuuuuccugacacagggcgcccuucugaaugacaagcauuccaacggcaccauuaaagauagaagcccuuaucggacgcucaugucuugucccaucggggaggugccuucccccuacaacagccgcuuugaauccguugccuggucugcuagcgccugccacgacggauucaauuggcugaccauuggcaucuccgggccugauaacggagcuguggccguccugaaguauaauggcaucauuacagacaccaucaagagcuggagaaacaauauucuccggacacaagagucugagugugcgugcgugaacggguccuguuuuaccgugaugacggauggaccgagcgacggccaggccucuuacaaaaucuuccgcauugaaaagggcaaaaucgucaagagcguugagaugaaugcucccaacuaucauuacgaagagugcuccuguuacccugauucuagcgagaucacaugcgugugcagagacaauuggcacggguccaaccggcccugggugagcuuuaaucagaaccuggaauaucagauuggauacaucuguucuggcauuuucggggauaauccucgccccaacgacaaaaccggauccugcggcccgguccuuagcaauggggccaacggagugaagggcuuuucuuucaaguauggcaacgggguuuggaucggaagaacaaaauccauuagcucccggaauggcuuugagaugaucugggauccuaacggguggaccggaaccgacaauaacuucucuauuaagcaagacaucgugggcaucaaugaauggagcggguacuccggcucuuucguccagcaucccgagcugacaggacucgauuguauucgcccuugcuuuuggguggaacugaucagaggccggcccaaagagaacacgauuuggaccagcggguccagcaucucuuucuguggaguuaauuccgacacagugggcuggagcuggcccgauggggcugagcuuccuuuuaccauugacaaguga

SEQ ID NO: 209798 - RNA, 1410 nt, Artificial Sequence; identical to SEQ ID NO: 208810
  derived and/or modified CDS sequence (opt5) from neuraminidase__InfluenzaA__ACZ17283

SEQ ID NO: 209799 - RNA, 1410 nt, Artificial Sequence; identical to SEQ ID NO: 208840
  derived and/or modified CDS sequence (opt5) from neuraminidase__InfluenzaA__ACZ17293

SEQ ID NO: 209800 - RNA, 1410 nt, Artificial Sequence; identical to SEQ ID NO: 208840
  derived and/or modified CDS sequence (opt5) from neuraminidase__InfluenzaA__ACZ17303

SEQ ID NO: 209801 - RNA, 1410 nt, Artificial Sequence; identical to SEQ ID NO: 208840
  derived and/or modified CDS sequence (opt5) from neuraminidase__InfluenzaA__ACZ17313

SEQ ID NO: 209802 - RNA, 1410 nt, Artificial Sequence; identical to SEQ ID NO: 208810
  derived and/or modified CDS sequence (opt5) from neuraminidase__InfluenzaA__ACZ17401

SEQ ID NO: 209803 - RNA, 1410 nt, Artificial Sequence; identical to SEQ ID NO: 208810
  derived and/or modified CDS sequence (opt5) from neuraminidase__InfluenzaA__ACZ17411

SEQ ID NO: 209804 - RNA, 1410 nt, Artificial Sequence; identical to SEQ ID NO: 208810
  derived and/or modified CDS sequence (opt5) from neuraminidase__InfluenzaA__ACZ17421

SEQ ID NO: 209805 - RNA, 1410 nt, Artificial Sequence
  derived and/or modified CDS sequence (opt5) from neuraminidase__InfluenzaA__ACZ17431
augaaccccaaucagaagaucauuaccaucggcagcgugugcaugacaauugggauggccaaccugauccuccaaauuggaaauaucaucuccauuuggaucucucacagcauucagcugggcaaccagaaucagaucgagacguguaaccaauccgucauuaccuacgaaaauaacacauggguuaaucagaccuaugugaacaucucuaauacaaacuucgcugccgggcagagcguggucuccgugaaacuugcgggaaauucuagccugugcccuguuuccggcugggcuauuuacagcaaggacaacucugugagaaucggguccaaaggagaugucuuugugauccgggagccguucauuagcuguucuccccucgaaugccgcaccuuuuuccugacacagggcgcccuucugaaugacaagcauuccaacggcaccaucaaagauagaagcccuuaucggacgcucaugucuugucccauuggggagguuccuucccccuacaacagccgcuuugaauccguggccuggucugcuagcgccugccacgacggaaucaauuggcugaccauuggcaucuccgggccugauaacggagcugucgccgugcugaaguauaauggcaucauuacagacaccaucaagagcuggagaaacaauauucuccggacacaagagucugagugugcgugcgugaacggguccuguuucaccgucaugacggauggaccgagcaauggccaggccucuuacaaaaucuuucgcauugaaaagggcaaaaucguuaagagcguggagaugaacgcucccaauuaucauuacgaagagugcuccuguuacccugacucuagcgagaucacaugcgugugcagagauaacuggcacggguccaaucggcccugggucagcuucaaccagaaucuggaauaucagauuggauacaucuguucuggcauuuuuggggacaacccucgccccaaugauaaaaccggauccugcggcccggugagcucuaacggggccaacggaguuaagggcuucuccuuuaaguauggcaaugggguguggaucggaagaacaaaaagcauuaacucccggaauggcuucgagaugaucugggacccuaacggguggaccggaaccgauaauaacuuuucuauuaagcaagacaucgucggcaucaaugaauggagcggguacuccggcucuuucgugcagcaucccgagcuuacaggacuggacuguauucgcccuugcuucuggguugaacucaucagaggccggcccaaagagaacacgauuuggaccagcggguccagcaucucuuuuuguggagucaauuccgauacagugggcuggagcuggcccgacggggcugagcugccuuucaccauugauaaguga

SEQ ID NO: 209806 - RNA, 1410 nt, Artificial Sequence; identical to SEQ ID NO: 209805
  derived and/or modified CDS sequence (opt5) from neuraminidase__InfluenzaA__ACZ17441

SEQ ID NO: 209807 - RNA, 1410 nt, Artificial Sequence; identical to SEQ ID NO: 208800
  derived and/or modified CDS sequence (opt5) from neuraminidase__InfluenzaA__ACZ17451

SEQ ID NO: 209808 - RNA, 1410 nt, Artificial Sequence; identical to SEQ ID NO: 208810
  derived and/or modified CDS sequence (opt5) from neuraminidase__InfluenzaA__ACZ17461

SEQ ID NO: 209809 - RNA, 1410 nt, Artificial Sequence; identical to SEQ ID NO: 208810
  derived and/or modified CDS sequence (opt5) from neuraminidase__InfluenzaA__ACZ17471

SEQ ID NO: 209810 - RNA, 1410 nt, Artificial Sequence; identical to SEQ ID NO: 208840
  derived and/or modified CDS sequence (opt5) from neuraminidase__InfluenzaA__ACZ17481

SEQ ID NO: 209811 - RNA, 1410 nt, Artificial Sequence; identical to SEQ ID NO: 208810
  derived and/or modified CDS sequence (opt5) from neuraminidase__InfluenzaA__ACZ17491

SEQ ID NO: 209812 - RNA, 1410 nt, Artificial Sequence; identical to SEQ ID NO: 209276
  derived and/or modified CDS sequence (opt5) from neuraminidase__InfluenzaA__ACZ27803

SEQ ID NO: 209813 - RNA, 1410 nt, Artificial Sequence; identical to SEQ ID NO: 208800
  derived and/or modified CDS sequence (opt5) from neuraminidase__InfluenzaA__ACZ27813

SEQ ID NO: 209814 - RNA, 1410 nt, Artificial Sequence; identical to SEQ ID NO: 208810
  derived and/or modified CDS sequence (opt5) from neuraminidase__InfluenzaA__ACZ27823

SEQ ID NO: 209815 - RNA, 1410 nt, Artificial Sequence; identical to SEQ ID NO: 208800
  derived and/or modified CDS sequence (opt5) from neuraminidase__InfluenzaA__ACZ27833

SEQ ID NO: 209816 - RNA, 1410 nt, Artificial Sequence; identical to SEQ ID NO: 208810
  derived and/or modified CDS sequence (opt5) from neuraminidase__InfluenzaA__ACZ45022

SEQ ID NO: 209817 - RNA, 1410 nt, Artificial Sequence
  derived and/or modified CDS sequence (opt5) from neuraminidase__InfluenzaA__ACZ53958
augaaccccaaucagaagaucauuaccaucggcagcgugucccugacaauugccacgaucugcuuccucaugcaaauugcuauccuggucaccacaguuacccuucacuuuaaacaguacgaguguaacucuccuccgaauaaccaggugaugcugugcgaacccacaaucauugagagaaauaucaccgaaauuguguaucucacaaacaccacgaucgagaaggaaauuuguccuaaacuggccgaguaccggaauuggagcaagccccagugcaacaucaccggguucgcgccuuuuuccaaagacaauucuauucgccuuagcgcuggaggcgauaucugggucacaagagagcccuauguguccugugacccugauaagugcuaccaauucgcccuggggcagggaaccacacucaacaauggccauucuaacgacaccguucacgaucggacgccguaucgcacacugcugaugaaugaacucggggugcccuuucaucugggaaccaagcaggucuguaucgccuggagcuccagcucuugccacgacggcaaagccuggcuucauguguguguuacaggcgaugacgagaacgcuaccgcuuccuucauuuacaaugggagacugguggauagcaucggaucuugguccaagaaaauucuccggacccaggaaagcgagugcgucuguaucaacggcacaugcacgguggugaugaccgacgggucugccuccggaaaggcggauacaaaaauucuguuuaucgaggaaggcaagaucguccacaccagcucccuuucugggagcgcccaacacguugaggaaugcuccuguuauccucgcuaccccggagugagaugcgugugucgggacaacuggaagggcagcaaucgcccuauugucgauaucaacgugaaagacuacucuauuguuuccagcuaugugugcucuggccuggucggggacacacccagaaagaaugauagcuccucuagcucccauugucucgacccgaacaaugaggaaggaggccacggggugaaaggaugggcuuucgaugacggcaacgauguuuggauggggcggaccaucagcgagaagcugcgcucuggauacgagacguuuaaagugauugaaggcugguccaagccuaauagcaaacugcagaucaacagacaggucaucguggaccggggcaaucgcucuggguauuccggaauuuucagcgucgagggcaaguccugcaucaacagauguuuuuacguggaacucauucgggggagaaagcaggagacagaaguucuguggaccucuaauagcaucguggucuucugcggaaccuccggcacauaugggaccggcucuugucccgauggaagcgugcuuaaccugaugccuauuuga

SEQ ID NO: 209818 - RNA, 1410 nt, Artificial Sequence
  derived and/or modified CDS sequence (opt5) from neuraminidase__InfluenzaA__ACZ53969
augaaccccaaucagaagaucauuaccaucggcagcgugucccugacaauugccacgaucugcuuccucaugcaaauugcuauccuggucaccacaguuacccuucacuuuaaacaguacgaguguaacucuccuccgaauaaccaggugaugcugugcgaacccacaaucauugagagaaauaucaccgaaauuguguaucucacaaacaccacgaucgagaaggaaauuuguccuaaacuggccgaguaccggaauuggagcaagccccagugcaacaucaccggguucgcgccuuuuuccaaagacaauucuauucgccuuagcgcuggaggcgauaucugggucacaagagagcccuauguguccugugacccugauaagugcuaccaauucgcccuggggcagggaaccacacucaacaauggccauucuaacgacaccguucacgaucggacgccguaucgcacacugcugaugaaugaacucggggugcccuuucaucugggaaccaagcaggucuguaucgccuggagcuccagcucuugccacgacggcaaagccuggcuucauguguguguuacaggcgaugacgagaacgcuaccgcuuccuucauuuacaaugggagacugguggauagcaucggaucuugguccaagaaaauucuccggacccaggaaagcgagugcgucuguaucaacggcacaugcacgguggugaugaccgacgggucugccuccggaaaggcggauacaaaaauucuguuuaucgaggaaggcgagaucguccacaccagcccucuuuccgggucugcccaacacguugaagagugcagcuguuauccccgcuacccuggagugagaugcgugugucgggacaacuggaagggcuccaaucgccccauugucgauaucaacgugaaggacuacagcauuguuucuuccuaugugugcagcggccuggucggggacacaccgcggaaaaaugauucuagcuccucuagccauugucucgacccuaacaaugaagagggaggccacggggugaagggaugggcuuucgaugacggcaacgauguuuggauggggagaaccaucuccgagaaaagccgcucuggauacgaaacguuuaaggugauugagggcugguccaaacccaauagcaagcugcagaucaacagacaggucaucguggaccggggcaaucgcucuggguauuccggaauuuucagcgucgaaggcaaauccugcaucaacagauguuuuuacguggagcugauucgggggagaaagcaggaaacagagguucucuggaccucuaauagcaucguggucuucugcggaaccuccggcacauaugggaccggcucuuggccugauggaagcgugcugaaccuuaugcccauuuga

SEQ ID NO: 209819 - RNA, 1410 nt, Artificial Sequence
  derived and/or modified CDS sequence (opt5) from neuraminidase__InfluenzaA__ACZ53980
augaaccccaaucagaacaagcugccuaucggcagcgugucccucaccauugccacaaucugcuuccugaugcaaauugcuauccuuaaaacgaccgucacacugcacuuuaagcaguacgaguguaauucuccgcccaacaaucagguuaugcucugcgaaccuaccauuaucgagagaaaccugacaaaaaucguguaucuuaccaauacaaccauuaagaaagaaaucugucccaagcagccuaaguaccggaacuggagcaaacccaagugcaaaauuacggagcuggccccuuucuccaaggacaauucuauccgccucagcgcugggggagauauuugggugaccagagaaccguaugucuccugugaccccgauaaaugcuaccaauuugcgcugggccaggggacaacccugaacaauggacauucuaacgacacagugcacgaucggaccccuuaucgcacgcuccugaugaaugagcuuggcguucccuuccaucuggggacaaaacagguguguaucgccuggagcuccagcucuugccacgacggaaaggccuggcuccaugucuguauuaccggcgaugacaaaaacgcuacagccuccuuuaucuacaauggcagacugguggauagcaucguuucuugguccaaggagauucuucggacccaggaaagcgagugcguguguaucaacgggaccugcacagucgugaugacggacggaucugcuuccggcaaagccgauaccaagauucuguucaucgaagaggggaaaauugugcacaucagcccucucuccggaucugcgcaacacgucgaggaaugcagcuguuauccccgcuacccgggcguuagaugcaucugucgggacaacuggaagggguccaaucgcccugugguggauauuaacauggaggacuacagcaucgacucuuccuaugucugcagcggacuggugggcgauacacccagaaagaaugacucuagcuccucuagccauugucuggauccuaacaaugaagagggcgggcacggaguuaagggcugggccuuugacgaugggaacgacguguggaugggacggaccauuuccgaaaagcuccgcagcggcuacgagacauucaaagucaucgggggauggucuaagcccaauuccaaacugcagauuaacagacaggugaucguugaucggggcaaucgcagcggcuauucugggaucuuuuccguggagggaaagagcugcauuaacagauguuucuacgucgaacuuauccggggcagaaaacaggagaccgaagugcuguggacguccaauucuauugucguguuuugcgggacaagcggaaccuauggcaccggguccuggcccgacggcucuguucucaaccugaugccuaucuga

SEQ ID NO: 209820 - RNA, 1410 nt, Artificial Sequence; identical to SEQ ID NO: 208810
  derived and/or modified CDS sequence (opt5) from neuraminidase__InfluenzaA__ACZ56082

SEQ ID NO: 209821 - RNA, 1410 nt, Artificial Sequence; identical to SEQ ID NO: 209393
  derived and/or modified CDS sequence (opt5) from neuraminidase__InfluenzaA__ACZ57183

SEQ ID NO: 209822 - RNA, 1413 nt, Artificial Sequence
  derived and/or modified CDS sequence (opt5) from neuraminidase__InfluenzaA__ACZ81542
augaaccccaaucagaaggugaucaccauuggcagcaucuccauugccaucgggauuaucucucugaugcuccaaaucggaaacauuaucagcauuugggcuucccacucuauccagacaggcagccagaauaacacggggauuugcaaucagagaaucauuaccuacgagaacuccacaugggucaaucauaccuauguuaacaucaauaacacaaaugugguggccggagaagacaaaaccucugucacacuggcgggcaacagcucccuuuguagcaucucugggugggcuauuuacaccaaggauaauuccauccggauuggaagcaaaggcgacguguucguuauccgcgagccuuuuauuucuugcucccaccuggaauguagaacguucuuucucacccaaggcgcccugcuuaacgauaagcauagcaaugggacagugaaagaccggucuccguaucgcgcccugauguccugcccccucggagaggcuccuagccccuacaacuccaaguucgaaucugucgccuggagcgcuuccgccugucacgauggcaugggguggcugaccaucggaaucagcggcccugacaacggggcgguggccguucugaaguauaauggaauuaucacaggcaccauuaaaucuuggaagaaacagauccucagaacgcaggaguccgagugcguguguaugaacggcagcugcuuuacaauuaugaccgaugggcccucuaauaaggcugccagcuacaaaaucuucaagaucgaaaagggaaaagucacaaaguccauugagcugaacgcuccuaauuuuuauuacgaagaguguucuugcuacccggacaccggcaucgugaugugugugugccgggauaacuggcaugggagcaaucgccccugggucuccuucaaccagaaucuugacuaucaaauuggauacaucugcagcggcguuuuuggggauaacccuagacccgaggacggagaaggcucuuguaauccugugaccguggauggcgccaacggggucaaaggauucuccuauaaguacggcaaugggguguggauuggacggacaaaaagcaaccgccugagaaagggcuuugagaugaucugggaccccaauggguggacgaacaccgacucugauuucuccguuaaacaggacguggucgcgauuacagauuggagcggcuauuccggaucuuuugugcagcacccggaacucaccggccuggacugcauccggccuuguuucuggguugagcuugugcgcgggcugcccagagaaaacacaaccaucuggacgagcggauccucuauuagcuucugcggcgucaauuccgauacagccaacuggagcuggccugacggggcugagcuccccuuuaccaucgauaaguga

SEQ ID NO: 209823 - RNA, 1413 nt, Artificial Sequence
  derived and/or modified CDS sequence (opt5) from neuraminidase__InfluenzaA__ACZ81543
augaaccccaaucagaagaucauuaccaucggcagcauuuccaucgccauugggaucaucucucugaugcuccaaauuggaaacaucauuagcaucugggcuucccacucuauucagacaggcagccagaauaacacggggaucugcaaucagagaauuaucaccuacgagaacaauacaugggugaaccauaccuaugucaauaucaacaauacaaacguuguggccggagaagacaaaaccuccgugacacuggcgggcaauucuagccuuuguuccauuagcgggugggcuaucuacaccaaggauaacucuauucggaucggauccaaaggcgacgucuucgugauucgcgagccuuuuaucagcugcucucaccuggaauguagaacguucuuucucacccaaggcgcccugcuuaaugauaagcauuccaacgggacaguuaaagaccggagcccguaucgcgcccugaugucuugcccccucggagaggcuccuucccccuacaacagcaaguucgaauccguggccuggucugcuagcgccugucacgauggcaugggguggcugaccaucggaauuuccggcccugacaauggggcggucgccgugcugaaguauaacggaaucauuacaggcaccaucaaaagcuggaaggagcagauucucagaacgcaggagucugaaugcguuuguaugaauggcuccugcuuuacaaucaugaccgaugggcccagcaacaaagcugccucuuacaagaucuucaaaauugagaagggaaaggugacaaaaagcaucgaacugaaugcuccuaacuuuuauuacgaggaguguuccugcuacccggacaccggcauugucaugugugugugccgggauaauuggcaugggucuaaccgccccugggugagcuucaaucagaaccuugacuaucaaaccggauacaucugcuccggcgucuuuggggauaauccuagacccgaagacggagagggcagcuguaacccuguuacaguggauggcgccaauggggugaagggauucucuuauaaauacggcaacggggucuggauuggacggacgaaguccaaucgccugagaaaaggcuuugaaaugaucugggaccccaacggguggaccaacacagacagcgauuucucugugaagcaggacguuguggcgauuaccgauugguccggcuauagcggauccuuuguccagcacccggagcucacaggccuggacugcauccggccuuguuucuggguggaacuuguucgcgggcugcccagagagaauaccacgaucuggacaucuggaagcuccauuucuuucugcggcgugaacagcgauaccgccaauugguccuggccugacggggcugagcuccccuuuaccaucgauaaauga

SEQ ID NO: 209824 - RNA, 1410 nt, Artificial Sequence
  derived and/or modified CDS sequence (opt5) from neuraminidase__InfluenzaA__ACZ81546
augaaccccaaucagaagaucauuaccaucggcagcgugucccugacaauuucuacgaucugcuucuuuaugcaaauugccauccucaucaccacagucacccugcacuucaaacaguacgaguuuaacagcccuccgaauaaccagguuaugcuuugugaacccacaauuaucgagagaaauauuaccgaaaucguguaucugacaaacaccacgauugagaaggaaaucugcccuaaacucgcugaguaccggaauugguccaagccccagugugacauuaccgggucugccccuuucagcaaagauaacuccauccgccugucugcgggaggcgacaucugggugacaagagagcccuaugucagcugcgauccugacaaguguuaccaauuugcucuugggcagggaaccacacugaauaacgugcauuccaauaacaccguucacgaucggacgccguaucgcacacuccugaugaaugaacugggcgugcccuuccaucucgggaccaagcaggucugcauugccugguccucuuccagcugucacgacggaaaagccuggcugcaugugugcaucacaggcgaugacaagaacgcuaccgccucuuuuauuuacaauggcagacuuguugauuccguggucagcuggucuaaagagauccugcggacccaggaauccgagugugugugcauuaacgggacauguacgguggucaugaccgacggaagcgcuuccggcaaggccgauacaaaaauccucuucaucgaggaagggaagauuguucacaccucuacacugagcggauccgcgcaacacguggaggaaugcagcugcuauccucgcuaccccggcgugagaugugucugccgggacaacuggaaggggucuaaucgcccuaucguggauauuaacaucaaagaccauuccauuguuagcucuuacguguguagcggacuugucggcgacacccccagaaagaaugauuccucuagcuccagccacugccuggacccgaacaaugaggaaggcgggcauggagugaaaggcugggccuuugaugacgggaacgauguuuggaugggacggacgaucucugagaagucccgccucggcuaugagacauucaaagugaucgaaggguggagcaauccuaagucuaaacugcagauuaacagacaggucaucguggaccggggaaaucgcuccggcuacagcggcauuuuuagcgucgaggggaagucuuguaucaacagaugcuucuauguggaacugauucggggaagaaaggaggaaaccgagguucucuggaccagcaauuccaucguggucuuuuguggcacaucugggaccuacggaacaggcagcuggcccgauggggcugacauuaaccugaugccuaucuga

SEQ ID NO: 209825 - RNA, 1410 nt, Artificial Sequence
  derived and/or modified CDS sequence (opt5) from neuraminidase__InfluenzaA__ACZ81547
augaaccccaaucagaagaucauuaccaucggcagcgugucccugacaauuucuacgaucugcuucuuuaugcaaauugccauccucaucaccacagucacccugcacuucaaacaguacgaguuuaacagcccuccgaauaaccagguuaugcuuugugaacccacaauuaucgagagaaauauuaccgaaaucguguaucugacaaacaccacgauugagaaggaaaucugcccuaaacucgcugaguaccggaauugguccaagccccagugugacauuaccggguucgccccuuuuucuaaagauaacagcauccgccuguccgcgggaggcgacaucugggugacaagagagcccuaugucucuugcgauccugacaaguguuaccaauucgcucuugggcagggaaccacacugaauaacgugcauagcaauaacaccguucgggaucgcacgccguauagaacacuccugaugaaugaacugggcgugcccuuucaccucgggaccaagcaggucugcauugccugguccucuagcuccugucaugacggaaaagccuggcugcacgugugcaucacaggcgaugacaagaacgcuaccgccagcuucauuuacaauggccggcuuguugauucuguggucuccuggagcaaagagauccugcgcacccaggaaucugagugugugugcauuaacgggacauguacgguggucaugaccgacggauccgcuagcggcaaggccgauacaaaaauccucuuuaucgaggaagggaagauuguucauaccuccacacugucuggaagcgcgcaacacguggaggaaugcuccugcuauccuagauaccccggcgugcggugugucugccgcgacaacuggaaggggagcaauagaccuaucguggauauuaacaccaaagaccacucuaucguuuccagcuacguguguucuggacuugucggcgacacgccccggaagaaugauagcuccucuagcucccauugccuggacccgaacaaugaggaaggcgggcacggagugaaaggcugggccuucgaugacgggaacgauguuuggaugggacgcacaauuagcgagaagucuagacucggcuaugagaccuuuaaagugaucgaagggugguccaauccuaagagcaaacugcagaucaaccggcaggucauuguggacaagggaaaucgcucuggcuacuccggcaucuucagcgucgaggggaaguccuguauuaacagaugcuuuuauguggaacugauccggggaagaaaagaggaaaccgagguucucuggacaucuaauagcauuguggucuucuguggcaccuccgggacauacggaacgggcucuuggcccgauggggcugacaucaaccugaugccuauuuga

SEQ ID NO: 209826 - RNA, 1410 nt, Artificial Sequence; identical to SEQ ID NO: 208810
  derived and/or modified CDS sequence (opt5) from neuraminidase__InfluenzaA__ACZ81634

SEQ ID NO: 209827 - RNA, 1410 nt, Artificial Sequence
  derived and/or modified CDS sequence (opt5) from neuraminidase__InfluenzaA__ACZ81644
augaaccccaaucagaagaucauuaccaucggcagcgugugcaugacaauugggauggccaaccugauccuccaaauuggaaauaucaucuccauuuggaucucucacagcauucagcugggcaaccagaaucagaucgagacguguaaccaauccgucauuaccuacgaaaauaacacauggguuaaucagaccuaugugaacaucucuaauacaaacuucgcugccgggcagagcguggucuccgugaaacuugcgggaaauucuagccugugcccuguuuccggcugggcuauuuacagcaaggacaacucuaucagaaucggguccaaaggagauguguuugucauucgggagccguucaucagcuguucuccccucgaaugccgcaccuuuuuccugacacagggcgcccuucugaaugacaagcauuccaacggcaccauuaaagauagaagcccuuaucggacgcucaugucuugucccaucggggaggugccuucccccuacaacagccgcuuugaauccguugccuggucugcuagcgccugccacgacggaauuaauuggcugaccaucggcaucuccgggccugauaacggagcuguggccguccugaaguauaauggcauuaucacagacaccauuaagagcuggagaaacaauauccuccggacacaagagucugagugugcgugcgugaacggguccuguuucaccgugaugacggauggaccgagcgacggccaggccucuuacaaaauuuuucgcaucgaaaagggcaaaaucgucaagagcguugagaugaaugcucccaacuaucauuacgaagagugcuccuguuacccugauucuagcgagauuacaugcgugugcagagacaauuggcacggguccaaccggcccugggugagcuucaaucagaaccuggaauaucagaucggauacauuuguucuggcaucuuuggggauaauccucgccccaacgacaaaaccggauccugcggcccggucagcucuaauggggccaacggagugaagggcuucuccuuuaaguauggcaacgggguuuggauuggaagaacaaaaagcaucuccucucggaauggcuucgagaugauuugggauccuaacggguggaccggaaccgacaauaacuuuagcaucaagcaagacaucauuggcaucaaugaaugguccggguacucuggcagcuucgugcagcaucccgagcuuacaggacuggauuguauucgcccuugcuucugggucgaacucaucagaggccggcccaaagagaacacgauuuggaccuccgggagcucuaucuccuuuuguggagugaauagcgacacaguuggcuggucuuggcccgauggggcugagcugccuuucaccaucgacaaguga

SEQ ID NO: 209828 - RNA, 1410 nt, Artificial Sequence
  derived and/or modified CDS sequence (opt5) from neuraminidase__InfluenzaA__ACZ81653
augaaccccaaucagaagaucauuaccaucggcagcgugugcaugacaauugggauggccaaccugauccuccaaauuggaaauaucaucuccauuuggaucucucacagcauucagcugggcaaccagaaucagaucgagacguguaaccaauccgucauuaccuacgaaaauaacacauggguuaaucagaccuaugugaacaucucuaauacaaacuucgcugccgggcagagcguggucuccgugaaacuugcgggaaauucuagccugugcccuguuuccggcugggcuauuuacagcaaggacaacucuaucagaaucggguccaaaggagauguguuugucauucgggagccguucaucagcuguucuccccucgaaugccgcaccuuuuuccugacacagggcgcccuucugaaugacaagcauuccaacggcaccauuaaagauagaagcccuuaucggacgcucaugucuugucccaucggggaggugccuucccccuacaacagccgcuuugaauccguugccuggucugcuagcgccugccacgacggaauuaauuggcugaccaucggcaucuccgggccugauaacggagcuguggccguccugaaguauaauggcauuaucacagacaccauuaagagcuggagaaacaauauccuccggacacaagagucugagugugcgugcgugaacggguccuguuucaccgugaugacggauggaccgagcgacggccaggccucuuacaaaauuuuucgcaucgaaaagggcaaaaucgucaagagcguugagaugaaugcucccaacuaucauuacgaagagugcuccuguuacccugauucuagcgagauuacaugcgugugcagagacaauuggcacggguccaaccggcccugggugagcuucaaucagaaccuggaauaucagaucggauacauuuguucuggcaucuuuggggauaauccucgccccaacgacaaaaccggauccugcggcccggucagcucuaauggggccaacggagugaagggcuucuccuuuaaguauggcaacgggguuuggauuggaagaacaaaaagcaucuccucucggaauggcuucgagaugauuugggauccuaacggguggaccggaaccgacaauaacuuuagcaucaagcaagacaucgugggcauuaaugaaugguccggguacucuggcagcuucguccagcaucccgagcuuacaggacugaacuguauccgcccuugcuucuggguggaacucauuagaggccggcccaaagagaauacgaucuggaccuccgggagcucuauuuccuuuuguggaguuaacagcgauacagugggcuggucuuggcccgacggggcugagcugccuuucaccaucgauaaguga

SEQ ID NO: 209829 - RNA, 1410 nt, Artificial Sequence; identical to SEQ ID NO: 208810
  derived and/or modified CDS sequence (opt5) from neuraminidase__InfluenzaA__ACZ95840

SEQ ID NO: 209830 - RNA, 1410 nt, Artificial Sequence; identical to SEQ ID NO: 208810
  derived and/or modified CDS sequence (opt5) from neuraminidase__InfluenzaA__ACZ95850

SEQ ID NO: 209831 - RNA, 1410 nt, Artificial Sequence; identical to SEQ ID NO: 208810
  derived and/or modified CDS sequence (opt5) from neuraminidase__InfluenzaA__ACZ95860

SEQ ID NO: 209832 - RNA, 1410 nt, Artificial Sequence; identical to SEQ ID NO: 208810
  derived and/or modified CDS sequence (opt5) from neuraminidase__InfluenzaA__ACZ95870

SEQ ID NO: 209833 - RNA, 1410 nt, Artificial Sequence; identical to SEQ ID NO: 208810
  derived and/or modified CDS sequence (opt5) from neuraminidase__InfluenzaA__ACZ95880

SEQ ID NO: 209834 - RNA, 1410 nt, Artificial Sequence; identical to SEQ ID NO: 208810
  derived and/or modified CDS sequence (opt5) from neuraminidase__InfluenzaA__ACZ95890

SEQ ID NO: 209835 - RNA, 1410 nt, Artificial Sequence; identical to SEQ ID NO: 208810
  derived and/or modified CDS sequence (opt5) from neuraminidase__InfluenzaA__ACZ95900

SEQ ID NO: 209836 - RNA, 1410 nt, Artificial Sequence; identical to SEQ ID NO: 208810
  derived and/or modified CDS sequence (opt5) from neuraminidase__InfluenzaA__ACZ95910

SEQ ID NO: 209837 - RNA, 1410 nt, Artificial Sequence; identical to SEQ ID NO: 208810
  derived and/or modified CDS sequence (opt5) from neuraminidase__InfluenzaA__ACZ95920

SEQ ID NO: 209838 - RNA, 1410 nt, Artificial Sequence; identical to SEQ ID NO: 209697
  derived and/or modified CDS sequence (opt5) from neuraminidase__InfluenzaA__ACZ95930

SEQ ID NO: 209839 - RNA, 1410 nt, Artificial Sequence; identical to SEQ ID NO: 208810
  derived and/or modified CDS sequence (opt5) from neuraminidase__InfluenzaA__ACZ95940

SEQ ID NO: 209840 - RNA, 1410 nt, Artificial Sequence; identical to SEQ ID NO: 209827
  derived and/or modified CDS sequence (opt5) from neuraminidase__InfluenzaA__ACZ95950

SEQ ID NO: 209841 - RNA, 1410 nt, Artificial Sequence; identical to SEQ ID NO: 208810
  derived and/or modified CDS sequence (opt5) from neuraminidase__InfluenzaA__ACZ95960

SEQ ID NO: 209842 - RNA, 1410 nt, Artificial Sequence; identical to SEQ ID NO: 209827
  derived and/or modified CDS sequence (opt5) from neuraminidase__InfluenzaA__ACZ95970

SEQ ID NO: 209843 - RNA, 1410 nt, Artificial Sequence; identical to SEQ ID NO: 208810
  derived and/or modified CDS sequence (opt5) from neuraminidase__InfluenzaA__ACZ95980

SEQ ID NO: 209844 - RNA, 1410 nt, Artificial Sequence; identical to SEQ ID NO: 208810
  derived and/or modified CDS sequence (opt5) from neuraminidase__InfluenzaA__ACZ95990

SEQ ID NO: 209845 - RNA, 1410 nt, Artificial Sequence; identical to SEQ ID NO: 208810
  derived and/or modified CDS sequence (opt5) from neuraminidase__InfluenzaA__ACZ96000

SEQ ID NO: 209846 - RNA, 1410 nt, Artificial Sequence; identical to SEQ ID NO: 208810
  derived and/or modified CDS sequence (opt5) from neuraminidase__InfluenzaA__ACZ96010

SEQ ID NO: 209847 - RNA, 1410 nt, Artificial Sequence
  derived and/or modified CDS sequence (opt5) from neuraminidase__InfluenzaA__ACZ96020
augaaccccaaucagaagaucauuaccaucggcagcgugugcaugacaauugggauggccaaccugauccuccaaauuggaaauaucauccugauuuggaucucccacucuauucagcuuggcaaccagaaucagacggagaccuguaaccaaagcgucaucacauacgaaaauaacaccuggguuaaucagacauaugugaacauuuccaauaccaacuucgcugccgggcagucuguggucagcgugaaacuggcgggaaauuccucucucugcccuguuagcggcugggcuaucuacuccaaggacaacagcgugagaauugggucuaaaggagaugucuuugugauccgggagccguucaucuccuguagcccccuggaaugccgcacauuuuuccuuacccagggcgcccugcucaaugacaagcauucuaacggcacgauuaaagauagauccccuuaucggacccugaugagcugucccaucggggagguuccuucucccuacaacucccgcuuugaaagcguggccugguccgcuucugccugccacgacggaauuaauuggcugacaaucggcauuagcgggccugauaacggagcugucgccgugcucaaguauaauggcaucaucaccgacacaauuaaguccuggagaaacaauauccugcggacccaagagagcgagugugcgugcgugaacgggucuuguuucacggucaugacagauggaccguccaauggccaggccagcuacaaaauuuuucgcaucgaaaagggcaaaauuguuaagucuguggagaugaacgcucccaauuaucauuacgaagagugcagcuguuacccugacuccucugagauuaccugcgugugcagagauaacuggcacgggagcaaucggcccugggucuccuucaaccagaaucuugaauaucagaucggauacaucuguagcggcaucuuuggggacaacccucgccccauugauaaaacaggaucuugcggcccgguguccagcaauggggccaacggaguuaagggcuucucuuuuaaguauggcaacgggguguggaucggaagaaccaaauccauuagcucccggaauggcuucgagaugaucugggacccuaacggguggaccggaacagauaauaacuuuucuauuaagcaagacaucgucggcaucaaugaauggagcggguacuccggcucuuucgugcagcaucccgagcugacgggacucgacuguauucgcccuugcuucuggguugaacugaucagaggccggcccaaagagaacaccauuuggacaagcggguccagcaucucuuuuuguggagucaauuccgauaccgugggcuggagcuggcccgacggggcugagcuuccuuucacaauugauaaguga

SEQ ID NO: 209848 - RNA, 1410 nt, Artificial Sequence; identical to SEQ ID NO: 208810
  derived and/or modified CDS sequence (opt5) from neuraminidase__InfluenzaA__ACZ96050

SEQ ID NO: 209849 - RNA, 1410 nt, Artificial Sequence; identical to SEQ ID NO: 208810
  derived and/or modified CDS sequence (opt5) from neuraminidase__InfluenzaA__ACZ96060

SEQ ID NO: 209850 - RNA, 1410 nt, Artificial Sequence; identical to SEQ ID NO: 208810
  derived and/or modified CDS sequence (opt5) from neuraminidase__InfluenzaA__ACZ96072

SEQ ID NO: 209851 - RNA, 1410 nt, Artificial Sequence; identical to SEQ ID NO: 208810
  derived and/or modified CDS sequence (opt5) from neuraminidase__InfluenzaA__ACZ96082

SEQ ID NO: 209852 - RNA, 1410 nt, Artificial Sequence; identical to SEQ ID NO: 208810
  derived and/or modified CDS sequence (opt5) from neuraminidase__InfluenzaA__ACZ96092

SEQ ID NO: 209853 - RNA, 1410 nt, Artificial Sequence; identical to SEQ ID NO: 208810
  derived and/or modified CDS sequence (opt5) from neuraminidase__InfluenzaA__ACZ96102

SEQ ID NO: 209854 - RNA, 1410 nt, Artificial Sequence; identical to SEQ ID NO: 208810
  derived and/or modified CDS sequence (opt5) from neuraminidase__InfluenzaA__ACZ96112

SEQ ID NO: 209855 - RNA, 1410 nt, Artificial Sequence
  derived and/or modified CDS sequence (opt5) from neuraminidase__InfluenzaA__ACZ96122
augaaccccaaucagaagaucauuaccaucggcagcgugugcaugacaauugggauggccaaccugauccuccaaauuggaaauaucaucuccauuuggaucucucacagcauucagcugggcaaccagaaucagaucgaggcuuguaaccaauccgucauuacguacgaaaauaacaccuggguuaaucagacauaugugaacaucucuaauaccaacuucgccgcggggcagagcguggucuccgugaaacuugcuggaaauucuagccugugcccuguuuccggcugggccauuuacagcaaggacaacucuaucagaaucggguccaaaggagauguguuugucauucgggagccguucaucagcuguucuccccucgaaugccgcacauuuuuccugacccagggcgcccuucugaaugacaagcauuccaacggcacaauuaaagauagaagcccuuaucggacccucaugucuugucccaucggggaggugccuucccccuacaacagccgcuuugaauccguugcuuggucugccagcgcuugccacgacggaauuaauuggcugacgaucggcaucuccgggccugauaacggagccguggcgguccugaaguauaauggcauuaucaccgacacaauuaagagcuggagaaacaauauccuccggacccaagagucugagugugccugcgugaacggguccuguuucacagugaugaccgauggaccgagcgacggccaggcuucuuacaaaauuuuucgcaucgaaaagggcaaaaucgucaagagcguugagaugaaugcccccaacuaucauuacgaagagugcuccuguuacccugauucuagcgagauuacgugcgugugcagagacaauuggcacggguccaaccggcccugggugagcuucaaucagaaccuggaauaucagaucggauacauuuguucuggcaucuuuggggauaauccucgccccaacgacaaaacaggauccugcggcccggucagcucuaauggggcuaacggagugaagggcuucuccuuuaaguauggcaacgggguuuggauuggaagaaccaaaagcaucuccucucggaauggcuucgagaugauuugggauccuaacggguggacaggaaaggacaauaacuuuagcaucaaacaagacaucgugggcauuaaugaaugguccggguacucuggcagcuucguccagcaucccgagcuuaccggacuggauuguauccgcccuugcuucuggguggaacucauuagaggccggcccaaggagaacaccaucuggacauccgggagcucuauuuccuuuuguggaaucaauagcgacacgguuggcuggucuuggcccgauggggccgagcugccuuucaccaucgacaaauga

SEQ ID NO: 209856 - RNA, 1410 nt, Artificial Sequence; identical to SEQ ID NO: 208810
  derived and/or modified CDS sequence (opt5) from neuraminidase__InfluenzaA__ACZ96132

SEQ ID NO: 209857 - RNA, 1410 nt, Artificial Sequence; identical to SEQ ID NO: 208810
  derived and/or modified CDS sequence (opt5) from neuraminidase__InfluenzaA__ACZ96142

SEQ ID NO: 209858 - RNA, 1410 nt, Artificial Sequence; identical to SEQ ID NO: 208810
  derived and/or modified CDS sequence (opt5) from neuraminidase__InfluenzaA__ACZ96152

SEQ ID NO: 209859 - RNA, 1410 nt, Artificial Sequence; identical to SEQ ID NO: 208810
  derived and/or modified CDS sequence (opt5) from neuraminidase__InfluenzaA__ACZ96162

SEQ ID NO: 209860 - RNA, 1410 nt, Artificial Sequence; identical to SEQ ID NO: 208810
  derived and/or modified CDS sequence (opt5) from neuraminidase__InfluenzaA__ACZ96172

SEQ ID NO: 209861 - RNA, 1410 nt, Artificial Sequence
  derived and/or modified CDS sequence (opt5) from neuraminidase__InfluenzaA__ACZ96182
augaaccccaaucagaagaucauuaccaucggcagcgugugcaugacaauugggauggccaaccugauccuccaaauuggaaauaucaucuccauuuggaucucucacagcauucagcugggcaaccagaaucagaucgagacguguaaccaauccgucauuaccuacgaaaauaacacauggguuaaucagaccuaugugaacaucucuaauacaaacuucgcugccgggcagagcguggucuccgugaaacuugcgggaaauucuagccugugcccuguuuccggcugggcuauuuacagcaaggacaacucuaucagaaucggguccaaaggagauguguuugucauucgggagccguucaucagcuguucuccccucgaaugccgcaccuuuuuccugacacagggcgcccuucugaaugacagacauuccaacggcaccauuaaggaucggagcccuuaucgcacgcucaugucuugucccaucggggaggugccuucccccuacaacagcagauuugaauccguugccuggucugcuagcgccugccacgacggaauuaauuggcugaccaucggcaucuccgggccugauaacggagcuguggccguccugaaauauaauggcauuaucacagacaccauuaagagcuggcggaacaauauccuccgcacacaagagucugagugugcgugcgugaacggguccuguuucaccgugaugacggauggaccgagcgacggccaggccucuuacaagauuuuuagaaucgaaaaaggcaagaucgucaaaagcguugagaugaaugcucccaacuaucauuacgaagagugcuccuguuacccugauucuagcgagauuacaugcgugugccgggacaauuggcacggguccaaccgccccugggugagcuucaaucagaaccuggaauaucagaucggauacauuuguucuggcaucuuuggggauaauccuagacccaacgacaagaccggauccugcggcccggucagcucuaauggggccaacggagugaaaggcuucuccuuuaaguauggcaacgggguuuggauuggacggacaaagagcaucuccucucgcaauggcuucgagaugauuugggauccuaacggguggaccggaaccgacaauaacuuuagcaucaaacaagacaucgugggcauuaaugaaugguccggguacucuggcagcuucguccagcaucccgagcuuacaggacuggauuguaucagaccuugcuucuggguggaacucauucggggccgccccaaggagaacacgaucuggaccuccgggagcucuauuuccuuuuguggaguuaauagcgacacagugggcuggucuuggcccgauggggcugagcugccuuucaccaucgacaaauga

SEQ ID NO: 209862 - RNA, 1410 nt, Artificial Sequence
  derived and/or modified CDS sequence (opt5) from neuraminidase__InfluenzaA__ACZ96192
augaaccccaaucagaagaucauuaccaucggcagcgugugcaugacaauugggauggccaaccugauccuccaaauuggaaauaucaucuccauuuggaucucucacagcauucagcugggcaaccagaaucagaucgagacguguaaccaauccgucauuaccuacgaaaauaacacauggguuaaucagaccuaugugaacaucucuaauacaaacuucgcugccgggcagagcguggucuccgugaaacuugcgggaaauucuagccugugcccuguuuccggcugggcuauuuacagcaaggacaacucuaucagaaucggguccaaaggagauguguuugucauucgggagccguucaucagcuguucuccccucgaaugccgcaccuuuuuccugacacagggcgcccuucugaaugacaagcauuccaacggcaccauuaaagauagaagcccuuaucggacgcucaugucuugucccaucggggaggugccuucccccuacaacagccgcuuugaauccguugccuggucugcuagcgccugccacgacggaauuaauuggcugaccaucggcaucuccgggccugauaacggagcuguggccguccugaaguauaauggcauuaucacagacaccauuaagagcuggagaaacaauauccuccggacacaagagucugagugugcgugcgugaacggguccuguuucaccgugaugacggauggaccgagcgacggccaggccucuuacaaaauuuuucgcaucgaaaagggcaaaaucgucaagagcguugagaugaaugcucccaacuaucauuacgaagagugcuccuguuacccugauucuagcgagauuacaugcgugugcagagacaauuggcacggguccaaccggcccugggugagcuucaaucagaaccuggaauaucagaucggauacauuuguucuggcaucuuuggggauaauccucgcuccaacgacaaaaccggaagcugcggccccgucucuuccaauggggccaacggagugaagggcuucagcuuuaaguauggcaacgggguuuggauuggaagaacaaaauccaucucuagccggaauggcuucgagaugauuugggauccgaacggguggaccggaaccgacaauaacuuuuccaucaagcaagacaucgugggcauuaaugaauggucuggguacagcggcuccuucguccagcauccugagcuuacaggacuggauuguauccgccccugcuucuggguggaacucauuagaggccggccuaaagagaacacgaucuggaccagcgggucuuccauuagcuuuuguggaguuaauucugacacagugggcugguccuggcccgauggggcugagcugcccuucaccaucgacaaguga

SEQ ID NO: 209863 - RNA, 1410 nt, Artificial Sequence
  derived and/or modified CDS sequence (opt5) from neuraminidase__InfluenzaA__ACZ96232
augaaccccaaucagaagaucauuaccaucggcagcgugugcaugacagucgggauggccaaccugauucuccaaaucggaaauauuaucuccaucuggauuucucacagcauccagcugggcaaccagaaucagauugagacguguaaccaauccguuaucaccuacgaaaauaacacaugggugaaucagaccuaugugaacauuucuaauacaaacuucgcugccgggcagagcgucguguccguuaaacuugcgggaaauucuagccugugcccuguguccggcugggcuaucuacagcaaggacaacucuauuagaaucggguccaaaggagaugucuuugugauccgggagccguucauuagcuguucuccccucgaaugccgcaccuuuuuccugacacagggcgcccuucugaaugacaagcauuccaacggcaccaucaaagauagaagcccuuaucggacgcucaugucuugucccauuggggagguuccuucccccuacaacagccgcuuugaauccguggccuggucugcuagcgccugccacgacggaaucaauuggcugaccauuggcaucuccgggccugauaacggagcugucgccgugcugaaguauaauggcaucauuacagacaccaucaagagcuggagaaacaauauucuccggacacaagagucugagugugcgugcgugaacggguccuguuucaccgucaugacggauggaccgagcgacggccaggccucuuacaaaaucuuucgcauugaaaagggcaaaaucguuaagagcguggagaugaaugcucccaacuaucauuacgaagagugcuccuguuacccugauucuagcgagaucacaugcgugugcagagacaauuggcacggguccaaccggcccugggucagcuucaaucagaaccuggaauaucagauuggauacaucuguucuggcauuuuuggggauaauccucgccccaacgacaaaaccggauccugcggcccggugagcucuaauggggccaacggaguuaagggcuucuccuuuaaguauggcaacgggguguggaucggaagaacaaaaagcauuuccucucggaauggcuucgagaugaucugggauccuaacggguggaccggaaccgacaaugacuuuagcauuaagcaagauaucgucggcaucaacgaaugguccggguacucuggcagcuucgugcagcaucccgagcuuacaggacuggacuguauucgcccuugcuucuggguugaacucaucagaggccggcccaaagagaauacgauuuggaccuccgggagcucuaucuccuuuuguggagugaacagcgauacagucggcuggucuuggcccgacggggcugagcugccuuucaccauugauaaguga

SEQ ID NO: 209864 - RNA, 1410 nt, Artificial Sequence
  derived and/or modified CDS sequence (opt5) from neuraminidase__InfluenzaA__ACZ96242
augaaccccaaucagaagaucauuaccaucggcagcgugugcaugacaauugggauggccaaccugauccuccaaauuggaaauaucaucuccauuuggaucucucacagcauucagcugggcaaccagaaucagaucgagacguguaaccaauccgucauuaccuacgaaaauaacacauggguuaaucagaccuaugugaacaucucuaauacaaacuucgcugccgggcagagcguggucuccgugaaacuugcgggaaauucuagccugugcccuguuuccggcugggcuauuuacagcaaggacaacucuaucagaaucggguccaaaggagauguguuugucauucgggagccguucaucagcuguucuccccucgaaugccgcaccuuuuuccugacacagggcgcccuucugaaugacaagcauuccaacggcaccauuaaagauagaagcccuuaucggacgcucaugucuugucccaucggggaggugccuucccccuacaacagccgcuuugaauccguugccuggucugcuagcgccugccacgacggaauuaauuggcugaccaucggcaucuccgggccugauaacggagcuguggccguccugaaguauaauggcauuaucacagacaccauuaagagcuggagaaacaauauccuccggacacaagagucugagugugcgugcgugaacggguccuguuucaccgugaugacggauggaccgagcgacggccaggccucuuacaaaauuuuucgcaucgaaaagggcaaaaucgucaagagcguugagaugaaugcucccaacuaucauuacgaagagugcuccuguuacccugauucuagcgagauuacaugcgugugcagagacaauuggcacggguccaaccggcccugggugagcuucaaucagaaccuggaauaucagaucggauacauuuguucuggcaucuuuggggauaauccucgccccaacgacaaaaccggauccugcggcccggucagcucuaauggggccaacggagugaagggcuucuccuuuaaguauggcaacgggguuuggauuggaagaacaaaaagcaucuccucucggaauggcuucgagaugauuugggauccuaacggguggaccggaaccgacaauaacuuuagcaucaagcaagacaucgugggcauuaaugaaugguccggguacucuggcagcuucguccagcaucccgagcuuacaggacuggauuguauccgcccuugcuucuggguggaacucauuagaggccggcccaaagaguccacgaucuggaccagcgggucuuccauuagcuuuuguggaguuaacucugacacagugggcugguccuggcccgauggggcugagcugccuuucaccaucgacaaguga

SEQ ID NO: 209865 - RNA, 1410 nt, Artificial Sequence; identical to SEQ ID NO: 208810
  derived and/or modified CDS sequence (opt5) from neuraminidase__InfluenzaA__ACZ96252

SEQ ID NO: 209866 - RNA, 1410 nt, Artificial Sequence; identical to SEQ ID NO: 208810
  derived and/or modified CDS sequence (opt5) from neuraminidase__InfluenzaA__ACZ96292

SEQ ID NO: 209867 - RNA, 1410 nt, Artificial Sequence; identical to SEQ ID NO: 208810
  derived and/or modified CDS sequence (opt5) from neuraminidase__InfluenzaA__ACZ96302

SEQ ID NO: 209868 - RNA, 1410 nt, Artificial Sequence; identical to SEQ ID NO: 208810
  derived and/or modified CDS sequence (opt5) from neuraminidase__InfluenzaA__ACZ96312

SEQ ID NO: 209869 - RNA, 1410 nt, Artificial Sequence
  derived and/or modified CDS sequence (opt5) from neuraminidase__InfluenzaA__ACZ96322
augaaccccaaucagaagaucauuaccaucggcagcgugugcaugacaauugggauggccaaccugauccuccaaauuggaaauaucaucuccauuuggaucucucacagcauucagcugggcaaccagaaucagaucgagacguguaaccaauccgucauuaccuacgaaaauaacacauggguuaaucagaccuaugugaacaucucuaauacaaacuucgcugccgggcagagcguggucuccgugaaacuuaccggaaauucuagccugugcccuguuuccggcugggcgauuuacagcaaggacaacucuaucagaaucggguccaaaggagauguguuugucauucgggagccguucaucagcuguucuccccucgaaugccgcacauuuuuccugacccagggcgcccuucugaaugacaagcauuccaacggcacgauuaaagauagaagcccuuaucggacccucaugucuugucccaucggggaggugccuucccccuacaacagccgcuuugaauccguugcuuggucugccagcgcuugccacgacggaauuaauuggcugacaaucggcaucuccgggccugauaacggagccguggcuguccugaaguauaauggcauuaucaccgacacaauuaagagcuggagaaacaauauccuccggacccaagagucugagugugccugcgugaacggguccuguuucacggugaugacagauggaccgagcgacggccaggcgucuuacaaaauuuuucgcaucgaaaagggcaaaaucgucaagagcguugagaugaaugcccccaacuaucauuacgaagagugcuccuguuacccugauucuagcgagauuaccugcgugugcagagacaauuggcacggguccaaccggcccugggugagcuucaaucagaaccuggaauaucagaucggauacauuuguucuggcaucuuuggggauaauccucgccccaacgacaaaacaggauccugcggcccggucagcucuaauggggcuaacggagugaagggcuucuccuuuaaguauggcaacgggguuuggauuggaagaaccaaaagcaucuccucucggaauggcuucgagaugauuugggauccuaacggguggaccggaacagacaauaacuuuagcaucaagcaagacaucgugggcauuaaugaaugguccggguacucuggcagcuucguccagcaucccgagcuuacgggacuggauuguauccgcccuugcuucuggguggaacucauuagaggccggcccaaagagaacaccaucuggacauccgggagcucuauuuccuuuuguggaguuaauagcgacaccgugggcuggucuuggcccgauggggccgagcugccuuucacaaucgacaaguga

SEQ ID NO: 209870 - RNA, 1410 nt, Artificial Sequence; identical to SEQ ID NO: 209869
  derived and/or modified CDS sequence (opt5) from neuraminidase__InfluenzaA__ACZ96332

SEQ ID NO: 209871 - RNA, 1410 nt, Artificial Sequence; identical to SEQ ID NO: 208810
  derived and/or modified CDS sequence (opt5) from neuraminidase__InfluenzaA__ACZ96352

SEQ ID NO: 209872 - RNA, 1410 nt, Artificial Sequence; identical to SEQ ID NO: 209869
  derived and/or modified CDS sequence (opt5) from neuraminidase__InfluenzaA__ACZ96362

SEQ ID NO: 209873 - RNA, 1410 nt, Artificial Sequence; identical to SEQ ID NO: 208810
  derived and/or modified CDS sequence (opt5) from neuraminidase__InfluenzaA__ACZ96375

SEQ ID NO: 209874 - RNA, 1410 nt, Artificial Sequence; identical to SEQ ID NO: 209869
  derived and/or modified CDS sequence (opt5) from neuraminidase__InfluenzaA__ACZ96385

SEQ ID NO: 209875 - RNA, 1410 nt, Artificial Sequence
  derived and/or modified CDS sequence (opt5) from neuraminidase__InfluenzaA__ACZ96395
augaaccccaaucagaagaucauuaccaucggcagcgugugcaugacaauugggauggccaaccugauccuccaaauuggaaauaucaucuccauuuggaucucucacagcauucagcugggcaaccagaaucagacggagaccuguaaccaauccgucaucacauacgaaaauaacaccuggguuaaucagacauaugugaacauuucuaauaccaacuucgcugccgggcagagcguggucuccgugaaacuugcgggaaauucuagccugugcccuguuuccggcugggcuaucuacagcaaggacaacucugugagaauuggguccaaaggagaugucuuugugauccgggagccguucaucagcuguucuccccucgaaugccgcacauuuuuccugacccagggcgcccuucugaaugacaagcauuccaacggcacgauuaaagauagaagcccuuaucggacccucaugucuugucccaucggggagguuccuucccccuacaacagccgcuuugaauccguggccuggucugcuagcgccugccacgacggaauuaauuggcugacaaucggcauuuccgggccugauaacggagcugucgccgugcugaaguauaauggcaucaucaccgacacaauuaagagcuggagaaacaauauccuccggacccaagagucugagugugcgugcgugaacggguccuguuucacggucaugacagauggaccgagcaauggccaggccucuuacaaaauuuuucgcaucgaaaagggcaaaauuguuaagagcguggagaugaacgcucccaauuaucauuacgaagagugcuccuguuacccugacucuagcgagauuaccugcgugugcagagauaacuggcacggguccaaucggcccugggucagcuucaaccagaaucuggaauaucagaucggauacaucuguucuggcaucuuuggggacaacccucgccccauugauaaaacaggauccugcggcccggugagcucuaauggggccaacggaguuaagggcuucuccuuuaaguauggcaacgggguguggaucggaagaaccaaaagcauuuccucucggaauggcuucgagaugaucugggacccuaacggguggaccggaacagauaauaacuuuagcauuaagcaagacaucgucggcaucaaugaaugguccggguacucuggcagcuucgugcagcaucccgagcuuacgggacuggacuguauucgcccuugcuucuggguugaacucaucagaggccggcccaaagagaacaccauuuggacauccgggagcucuaucuccuuuuguggagugaauagcgauaccgucggcuggucuuggcccgacggggcugagcugccuuucacaauugauaaguga

SEQ ID NO: 209876 - RNA, 1410 nt, Artificial Sequence; identical to SEQ ID NO: 208810
  derived and/or modified CDS sequence (opt5) from neuraminidase__InfluenzaA__ACZ96408

SEQ ID NO: 209877 - RNA, 1410 nt, Artificial Sequence; identical to SEQ ID NO: 208810
  derived and/or modified CDS sequence (opt5) from neuraminidase__InfluenzaA__ACZ96428

SEQ ID NO: 209878 - RNA, 1410 nt, Artificial Sequence; identical to SEQ ID NO: 208810
  derived and/or modified CDS sequence (opt5) from neuraminidase__InfluenzaA__ACZ96438

SEQ ID NO: 209879 - RNA, 1410 nt, Artificial Sequence; identical to SEQ ID NO: 208810
  derived and/or modified CDS sequence (opt5) from neuraminidase__InfluenzaA__ACZ96448

SEQ ID NO: 209880 - RNA, 1410 nt, Artificial Sequence; identical to SEQ ID NO: 208810
  derived and/or modified CDS sequence (opt5) from neuraminidase__InfluenzaA__ACZ96479

SEQ ID NO: 209881 - RNA, 1410 nt, Artificial Sequence; identical to SEQ ID NO: 209827
  derived and/or modified CDS sequence (opt5) from neuraminidase__InfluenzaA__ACZ96489

SEQ ID NO: 209882 - RNA, 1410 nt, Artificial Sequence; identical to SEQ ID NO: 208810
  derived and/or modified CDS sequence (opt5) from neuraminidase__InfluenzaA__ACZ96499

SEQ ID NO: 209883 - RNA, 1410 nt, Artificial Sequence
  derived and/or modified CDS sequence (opt5) from neuraminidase__InfluenzaA__ACZ96509
augaaccccaaucagaagaucauuaccaucggcagcgugugcaugacaauugggauggccaaccugauccuccaaauuggaaauaucaucuccauuuggaucucucacagcauucagcugggcaaccagaaucagaucgagacguguaaccaauccgucauuaccuacgaaaauaacacauggaucaaucagaccuauguuaacauuucuaauacaaacuucgcugccgggcagagcgugguguccgucaaacuugcgggaaauucuagccugugcccuguguccggcugggcuaucuacagcaaggacaacucuaucagaauuggguccaaaggagauguuuuugugauccgggagccguucauuagcuguucuccccucgaaugccgcaccuuuuuccugacacagggcgcccuucugaaugacaagcauuccaacggcaccaucaaagauagaagcccuuaucggacgcucaugucuugucccauuggggaggucccuucccccuacaacagccgcuuugaauccguggccuggucugcuagcgccugccacgacggaaucaauuggcugaccaucggcauuuccgggccugauaacggagcuguugccgugcugaaguauaauggcaucauuacagacaccaucaagagcuggagaaacaauauucuccggacacaagagucugagugugcgugcgucaacggguccuguuucaccgugaugacggauggaccgagcgacggccaggccucuuacaaaaucuuucgcaucgaaaagggcaaaauugucaagagcguggagaugaaugcucccaacuaucauuacgaagagugcuccuguuacccugauucuagcgagaucacaugcguuugcagagacaauuggcacggguccaaccggcccugggugagcuucaaucagaaccuggaauaucagauuggauacaucuguucuggcauuuuuggggauaauccucgccccaacgacaaaaccggauccugcggcccggugagcucuaauggggccaacggagucaagggcuucuccuuuaaguauggcaacgggguguggaucggaagaacaaaaagcauuuccucucggaauggcuucgagaugaucugggauccuaacggguggaccggaaccgacaauaacuuuagcaucaagcaagacauuguuggcaucaaugaaugguccggguacucuggcagcuucgugcagcaucccgagcuuacaggacuggauuguauucgcccuugcuucugggucgaacucaucagaggccggcccaaagagaacacgauuuggaccuccgggagcucuaucuccuuuuguggagugaauagcgacacaguuggcuggucuuggcccgauggggcugagcugccuuucaccaucgacaaguga

SEQ ID NO: 209884 - RNA, 1410 nt, Artificial Sequence; identical to SEQ ID NO: 208810
  derived and/or modified CDS sequence (opt5) from neuraminidase__InfluenzaA__ACZ96519

SEQ ID NO: 209885 - RNA, 1410 nt, Artificial Sequence; identical to SEQ ID NO: 208810
  derived and/or modified CDS sequence (opt5) from neuraminidase__InfluenzaA__ACZ96529

SEQ ID NO: 209886 - RNA, 1410 nt, Artificial Sequence
  derived and/or modified CDS sequence (opt5) from neuraminidase__InfluenzaA__ACZ96552
augaaccccaaucagaagaucauuaccaucggcagcgugugcaugacaauugggauggccaaccugauccuccaaauuggaaauaucaucuccauuuggaucucucacagcucccagcugggcaaccagaaucagauugagacguguaaccaaucugucaucaccuacgaaaauaacacauggguuaaucagaccuaugugaacauuagcaauacaaacuucgcugccgggcaguccguggucucugugaaacuugcgggaaauagcucccugugcccuguuagcggcugggcuaucuacucuaaggacaacuccauuagaaucgggagcaaaggagauguguuugucauccgggagccguucauuucuuguagcccccucgaaugccgcaccuuuuuccugacacagggcgcccuucugaaugacaagcauuccaacggcaccaucaaagauagaucuccuuaucggacgcucauguccugucccauuggggaggugccuagccccuacaacucccgcuuugaaucuguugccuggagcgcuuccgccugccacgacggaaucaauuggcugaccauuggcaucagcgggccugauaacggagcuguggccguccugaaguauaauggcaucauuacagacaccaucaagucuuggagaaacaauauucuccggacacaagaguccgagugugcgugcgugaacgggagcuguuucaccgugaugacggauggaccgucugacggccaggccagcuacaaaaucuuucgcauugaaaagggcaaaaucgucaaguccguugagaugaaugcucccaacuaucauuacgaagagugcucuuguuacccugauagcuccgagaucacaugcgugugcagagacaauuggcacgggagcaaccggcccugggugucuuucaaucagaaccuggaauaucagauuggauacaucuguuccggcauuuuuggggauaauccucgccccaacgacaaaaccggaagcugcggcccggucucuuccaauggggccaacggagugaagggcuucagcuuuaaguauggcaacgggguuuggaucggaagaacaaaauccauuucuagccggaauggcuucgagaugaucugggauccuaacggguggaccggaaccgacaauaacuuuuccauuaagcaagacaucgugggcaucaaugaauggucuggguacagcggcuccuucguccagcaucccgagcuuacaggacuggauuguauucgcccuugcuucuggguggaacucaucagaggccggcccaaagagaacacgauuuggaccagcgggucuuccaucagcuuuuguggaguuaauucugacacagugggcugguccuggcccgauggggcugagcugccuuucaccauugacaaguga

SEQ ID NO: 209887 - RNA, 1410 nt, Artificial Sequence; identical to SEQ ID NO: 208810
  derived and/or modified CDS sequence (opt5) from neuraminidase__InfluenzaA__ACZ96562

SEQ ID NO: 209888 - RNA, 1410 nt, Artificial Sequence; identical to SEQ ID NO: 208810
  derived and/or modified CDS sequence (opt5) from neuraminidase__InfluenzaA__ACZ96572

SEQ ID NO: 209889 - RNA, 1410 nt, Artificial Sequence; identical to SEQ ID NO: 208810
  derived and/or modified CDS sequence (opt5) from neuraminidase__InfluenzaA__ACZ96582

SEQ ID NO: 209890 - RNA, 1410 nt, Artificial Sequence
  derived and/or modified CDS sequence (opt5) from neuraminidase__InfluenzaA__ACZ96592
augaaccccaaucagaagaucauuaccaucggcagcgugugcaugacaauugggauggccaaccugauccuccaaauuggaaauaucaucuccauuuggaucucucacagcauucagcugggcaaccagaaucagaucgagacguguaaccaauccgucauuaccuacgaaaauaacacauggguuaaucagaccuaugugaacaucucuaauacaaacuucgcugccgggcagagcguggucuccgugaaacuugcgggaaauucuagccugugcccuguuuccggcugggcuauuuacagcaaggacaacucuaucagaaucggguccaaaggagauguguuugucauucgggagccguucaucagcuguucuccccucgaaugccgcaccuuuuuccugacacagggcgcccuucugaaugacaagcauuccaacggcaccauuaaagauagaagcccuuaucggacgcucaugucuugucccaucggggaggugccuucccccuacaacagccgcuuugaauccguugccuggucugcuagcgccugccacgacggaauuaauuggcugaccaucggcaucuccgggccugauaacggagcuguggccguccugaaguauaauggcauuaucacagacaccauuaagagcuggagaaacaauauccuccggacacaagagucugagugugcgugcgugaacggguccuguuucaccgugaugacggauggaccgagcgacggccagucuagcuacaaaauuuuuaagaucgaaaaaggcaagaucgucaaauccguugagaugaaugcccccaacuaucauuacgaagagugcucuuguuacccugauagcuccgagauuacaugcgugugccgcgacaauuggcacgggagcaacagacccugggugucuuucaaucagaaccuggaauaucagaucggauacauuuguuccggcaucuuuggggauaauccucggcccaacgacaagaccggaagcugcggcccggucucuuccaauggggcuaacggagugaagggcuucagcuuuaaauauggcaacgggguuuggauuggacgcacaaaguccaucucuagcagaaauggcuucgagaugauuugggauccuaacggguggaccggaaccgacaauaacuuuuccaucaaacaagacaucgugggcauuaaugaauggucuggguacagcggcuccuucguccagcaucccgagcuuacaggacuggauuguauccggccuugcuucuggguggaacucauucgcggcagacccaaggagaacacgaucuggaccagcgggucuuccauuagcuuuuguggaguuaauucugacacagugggcugguccuggcccgauggggccgagcugccuuucaccaucgacaaauga

SEQ ID NO: 209891 - RNA, 1410 nt, Artificial Sequence; identical to SEQ ID NO: 208810
  derived and/or modified CDS sequence (opt5) from neuraminidase__InfluenzaA__ACZ96602

SEQ ID NO: 209892 - RNA, 1410 nt, Artificial Sequence
  derived and/or modified CDS sequence (opt5) from neuraminidase__InfluenzaA__ACZ96612
augaaccccaaucagaagaucauuaccaucggcagcgugugcaugacaauugggauggccaaccugauccuccaaauuggaaauaucaucuccauuuggaucucucacagcauucagcugggcaaccagaaucagaucgagacguguaaccaauccgucguuaccuacgaaaauaacacaugggugaaucagaccuaugugaacauuucuaauacaaacuucgcugccgggcagagcgucguguccguuaaacuugcgggaaauucuagccugugcccuguguccggcugggcuaucuacagcaaggacaacucugucagaauuggguccaaaggagauguguuuguuauccgggagccguucaucagcuguucuccccucgaaugccgcaccuuuuuccugacacagggcgcccuucugaaugacaagcauuccaacggcaccauuaaagauagaagcccuuaucggacgcucaugucuugucccaucggggaggugccuucccccuacaacagccgcuuugaauccgucgccuggucugcuagcgccugccacgacggaauuaauuggcugaccaucggcauuuccgggccugauaacggagcuguggccgugcugaaguauaauggcaucaucacagacaccauuaagagcuggagaaacaauauccuccggacacaagagucugagugugcgugcgucaacggguccuguuucaccguuaugacggauggaccgagcaauggccaggccucuuacaaaauuuuucgcaucgaaaagggcaaaauugucaagagcguggagaugaacgcucccaauuaucauuacgaagagugcuccuguuacccugacucuagcgagaucacaugcgugugcagagauaacuggcacggguccaaucggcccugggugagcuucaaccagaaucuggaauaucagaucggauacauuuguucuggcaucuuuggggacaacccucgccccaaugauaaaaccggauccugcggcccgguuagcucuaacggggccaacggagugaagggcuucuccuuuaaguauggcaauggggucuggauuggaagaacaaaaagcaucuccucucggaacggcuucgagaugauuugggacccuaauggguggaccggaaccgauaacaauuuuagcaucaagcaagacauugugggcaucaacgaaugguccggguacucuggcagcuucguucagcaucccgagcuuacaggacuggacuguauccgcccuugcuucuggguggaacucauuagaggccggcccaaagagaauacgaucuggaccuccgggagcucuauuuccuuuuguggagucaacagcgauacagugggcuggucuuggcccgacggggcugagcugccuuucaccaucgauaaguga

SEQ ID NO: 209893 - RNA, 1410 nt, Artificial Sequence; identical to SEQ ID NO: 208840
  derived and/or modified CDS sequence (opt5) from neuraminidase__InfluenzaA__ACZ96622

SEQ ID NO: 209894 - RNA, 1410 nt, Artificial Sequence; identical to SEQ ID NO: 208840
  derived and/or modified CDS sequence (opt5) from neuraminidase__InfluenzaA__ACZ96632

SEQ ID NO: 209895 - RNA, 1410 nt, Artificial Sequence; identical to SEQ ID NO: 208840
  derived and/or modified CDS sequence (opt5) from neuraminidase__InfluenzaA__ACZ96642

SEQ ID NO: 209896 - RNA, 1410 nt, Artificial Sequence; identical to SEQ ID NO: 208840
  derived and/or modified CDS sequence (opt5) from neuraminidase__InfluenzaA__ACZ96652

SEQ ID NO: 209897 - RNA, 1410 nt, Artificial Sequence; identical to SEQ ID NO: 208840
  derived and/or modified CDS sequence (opt5) from neuraminidase__InfluenzaA__ACZ96662

SEQ ID NO: 209898 - RNA, 1410 nt, Artificial Sequence; identical to SEQ ID NO: 208840
  derived and/or modified CDS sequence (opt5) from neuraminidase__InfluenzaA__ACZ96672

SEQ ID NO: 209899 - RNA, 1410 nt, Artificial Sequence; identical to SEQ ID NO: 208840
  derived and/or modified CDS sequence (opt5) from neuraminidase__InfluenzaA__ACZ96682

SEQ ID NO: 209900 - RNA, 1410 nt, Artificial Sequence; identical to SEQ ID NO: 208840
  derived and/or modified CDS sequence (opt5) from neuraminidase__InfluenzaA__ACZ96692

SEQ ID NO: 209901 - RNA, 1410 nt, Artificial Sequence; identical to SEQ ID NO: 208840
  derived and/or modified CDS sequence (opt5) from neuraminidase__InfluenzaA__ACZ96702

SEQ ID NO: 209902 - RNA, 1410 nt, Artificial Sequence; identical to SEQ ID NO: 208840
  derived and/or modified CDS sequence (opt5) from neuraminidase__InfluenzaA__ACZ96712

SEQ ID NO: 209903 - RNA, 1410 nt, Artificial Sequence; identical to SEQ ID NO: 208840
  derived and/or modified CDS sequence (opt5) from neuraminidase__InfluenzaA__ACZ96722

SEQ ID NO: 209904 - RNA, 1410 nt, Artificial Sequence; identical to SEQ ID NO: 208840
  derived and/or modified CDS sequence (opt5) from neuraminidase__InfluenzaA__ACZ96732

SEQ ID NO: 209905 - RNA, 1410 nt, Artificial Sequence; identical to SEQ ID NO: 208840
  derived and/or modified CDS sequence (opt5) from neuraminidase__InfluenzaA__ACZ96742

SEQ ID NO: 209906 - RNA, 1410 nt, Artificial Sequence; identical to SEQ ID NO: 208800
  derived and/or modified CDS sequence (opt5) from neuraminidase__InfluenzaA__ACZ96752

SEQ ID NO: 209907 - RNA, 1410 nt, Artificial Sequence; identical to SEQ ID NO: 208800
  derived and/or modified CDS sequence (opt5) from neuraminidase__InfluenzaA__ACZ96762

SEQ ID NO: 209908 - RNA, 1410 nt, Artificial Sequence; identical to SEQ ID NO: 208800
  derived and/or modified CDS sequence (opt5) from neuraminidase__InfluenzaA__ACZ96772

SEQ ID NO: 209909 - RNA, 1410 nt, Artificial Sequence; identical to SEQ ID NO: 208800
  derived and/or modified CDS sequence (opt5) from neuraminidase__InfluenzaA__ACZ96782

SEQ ID NO: 209910 - RNA, 1410 nt, Artificial Sequence; identical to SEQ ID NO: 208800
  derived and/or modified CDS sequence (opt5) from neuraminidase__InfluenzaA__ACZ96792

SEQ ID NO: 209911 - RNA, 1410 nt, Artificial Sequence; identical to SEQ ID NO: 208810
  derived and/or modified CDS sequence (opt5) from neuraminidase__InfluenzaA__ACZ96802

SEQ ID NO: 209912 - RNA, 1410 nt, Artificial Sequence; identical to SEQ ID NO: 208810
  derived and/or modified CDS sequence (opt5) from neuraminidase__InfluenzaA__ACZ96812

SEQ ID NO: 209913 - RNA, 1410 nt, Artificial Sequence; identical to SEQ ID NO: 209393
  derived and/or modified CDS sequence (opt5) from neuraminidase__InfluenzaA__ACZ96822

SEQ ID NO: 209914 - RNA, 1410 nt, Artificial Sequence
  derived and/or modified CDS sequence (opt5) from neuraminidase__InfluenzaA__ACZ96842
augaaccccaaucagaagaucauuaccaucggcagcgugugcaugacaauugggauggccaaccugauccuccaaauuggaaauaucaucuccauuuggaucucucacagcauucagcugggcaaccagaaucagaucgagacguguaaccaauccgucauuaccuacgaaaauaacacauggguuaaucagaccuaugugaacaucucuaauacaaacuucgcugccgggcagagcguggucuccgugaaacuugcgggaaauucuagccugugcccuguuuccggcugggcuauuuacagcaaggacaacucugugagaaucggguccaaaggagaugucuuugugauccgggagccguucauuagcuguucuccccucgaaugccgcaccuuuuuccugacacagggcgcccuucugaaugacaagcauuccaacggcaccaucaaagauagaagcccuuaucggacgcucaugucuugucccauuggggagguuccuucccccuacaacagccgcuuugaauccguggccuggucugcuagcgccugccacgacggaaucaauuggcugaccauuggcaucuccgggccugauaacggagcugucgccgugcugaaguauaauggcaucauuacagacaccaucaagagcuggagaaacaauauucuccggacacaagagucugagugugcgugcgugaacggguccuguuucaccgucaugacggauggaccgagcaauggccaggccucuuacaaaaucuuucgcauugaaaagggcaaaaucguuaagagcguggagaugaucgcucccaacuaucauuacgaagagugcuccuguuacccugacucuagcgagauuacaugcgugugcagagauaauuggcacggguccaaccggcccugggucagcuucaaucagaaccuggaauaucagaucggauacauuuguucuggcaucuuuggggacaauccucgccccaacgauaaaaccggauccugcggcccggugagcucuaauggggccaacggaguuaagggcuucuccuuuaaguauggcaacgggguguggauuggaagaacaaaaagcaucuccucucggaauggcuucgagaugauuugggacccuaacggguggaccggaaccgauaauaacuuuagcaucaagcaagacaucgucggcauuaaugaaugguccggguacucuggcagcuucgugcagcaucccgagcuuacaggacuggacuguauccgcccuugcuucuggguugaacucauuagaggccggcccaaagagaacacgaucuggaccuccgggagcucuauuuccuuuuguggagugaauagcgauacagucggcuggucuuggcccgacggggcugagcugccuuucaccaucgauaaguga

SEQ ID NO: 209915 - RNA, 1410 nt, Artificial Sequence; identical to SEQ ID NO: 208810
  derived and/or modified CDS sequence (opt5) from neuraminidase__InfluenzaA__ACZ96852

SEQ ID NO: 209916 - RNA, 1410 nt, Artificial Sequence; identical to SEQ ID NO: 208810
  derived and/or modified CDS sequence (opt5) from neuraminidase__InfluenzaA__ACZ96862

SEQ ID NO: 209917 - RNA, 1410 nt, Artificial Sequence
  derived and/or modified CDS sequence (opt5) from neuraminidase__InfluenzaA__ACZ96872
augaaccccaaucagaagaucauuaccaucggcagcgugugcaugacaauugggauggccaaccugauccuccaaauuggaaauaucaucuccauuuggaucucucacagcauucagcugggcaaccagaaucagaucgagacguguaaccaauccgucauuaccuacgaaaauaacacauggguuaaucagaccuaugugaacaucucuaauacaaacuucgcugccgggcagagcguggucuccaugaaacuugcgggaaauucuagccugugcccuguguccggcugggcuauuuacagcaaggacaacucuaucagaaucggguccaaaggagauguuuuugugauucgggagccguucaucagcuguucuccccucgaaugccgcaccuuuuuccugacacagggcgcccuucugaaugacaagcauuccaacggcaccauuaaagauagaagcccuuaucggacgcucaugucuugucccaucggggaggucccuucccccuacaacagccgcuuugaauccguggccuggucugcuagcgccugccacgacggaauuaauuggcugaccaucggcaucuccgggccugauaacggagcuguugccgugcugaaguauaauggcauuaucacagacaccauuaagagcuggagaaacaauauccuccggacacaagagucugagugugcgugcgucaacggguccuguuucaccgugaugacggauggaccgagcgacggccaggccucuuacaaaauuuuucgcaucgaaaagggcaaaaucgucaagagcguggagaugaaugcucccaacuaucauuacgaagagugcuccuguuacccugauucuagcgagauuacaugcguuugcagagacaauuggcacggguccaaccggcccugggugagcuucaaucagaaccuggaauaucagaucggauacauuuguucuggcaucuuuggggauaauccucgccccaacgacaaaaccggauccugcggcccggugagcucuaauggggccaacggagucaagggcuucuccuuuaaguauggcaacgggguguggauuggaagaacaaaaagcaucuccucucggaauggcuucgagaugauuugggauccuaacggguggaccggaaccgacaauaacuuuagcaucaagcaagacaucguuggcauuaaugaaugguccggguacucuggcagcuucgugcagcaucccgagcuuacaggacuggauuguauccgcccuugcuucugggucgaacucauuagaggccggcccaaagagaacacgaucuggaccuccgggagcucuauuuccuuuuguggagugaauagcgacacaguuggcuggucuuggcccgauggggcugagcugccuuucaccaucgacaaguga

SEQ ID NO: 209918 - RNA, 1410 nt, Artificial Sequence; identical to SEQ ID NO: 208800
  derived and/or modified CDS sequence (opt5) from neuraminidase__InfluenzaA__ACZ96882

SEQ ID NO: 209919 - RNA, 1410 nt, Artificial Sequence; identical to SEQ ID NO: 209917
  derived and/or modified CDS sequence (opt5) from neuraminidase__InfluenzaA__ACZ96892

SEQ ID NO: 209920 - RNA, 1410 nt, Artificial Sequence; identical to SEQ ID NO: 209917
  derived and/or modified CDS sequence (opt5) from neuraminidase__InfluenzaA__ACZ96902

SEQ ID NO: 209921 - RNA, 1410 nt, Artificial Sequence; identical to SEQ ID NO: 208800
  derived and/or modified CDS sequence (opt5) from neuraminidase__InfluenzaA__ACZ96912

SEQ ID NO: 209922 - RNA, 1410 nt, Artificial Sequence; identical to SEQ ID NO: 208800
  derived and/or modified CDS sequence (opt5) from neuraminidase__InfluenzaA__ACZ96922

SEQ ID NO: 209923 - RNA, 1410 nt, Artificial Sequence; identical to SEQ ID NO: 209917
  derived and/or modified CDS sequence (opt5) from neuraminidase__InfluenzaA__ACZ96932

SEQ ID NO: 209924 - RNA, 1410 nt, Artificial Sequence; identical to SEQ ID NO: 209917
  derived and/or modified CDS sequence (opt5) from neuraminidase__InfluenzaA__ACZ96942

SEQ ID NO: 209925 - RNA, 1410 nt, Artificial Sequence; identical to SEQ ID NO: 208800
  derived and/or modified CDS sequence (opt5) from neuraminidase__InfluenzaA__ACZ96952

SEQ ID NO: 209926 - RNA, 1410 nt, Artificial Sequence; identical to SEQ ID NO: 208800
  derived and/or modified CDS sequence (opt5) from neuraminidase__InfluenzaA__ACZ97024

SEQ ID NO: 209927 - RNA, 1410 nt, Artificial Sequence; identical to SEQ ID NO: 209917
  derived and/or modified CDS sequence (opt5) from neuraminidase__InfluenzaA__ACZ97336

SEQ ID NO: 209928 - RNA, 1410 nt, Artificial Sequence; identical to SEQ ID NO: 209917
  derived and/or modified CDS sequence (opt5) from neuraminidase__InfluenzaA__ACZ97346

SEQ ID NO: 209929 - RNA, 1410 nt, Artificial Sequence; identical to SEQ ID NO: 208810
  derived and/or modified CDS sequence (opt5) from neuraminidase__InfluenzaA__ACZ97366

SEQ ID NO: 209930 - RNA, 1410 nt, Artificial Sequence; identical to SEQ ID NO: 208810
  derived and/or modified CDS sequence (opt5) from neuraminidase__InfluenzaA__ACZ97376

SEQ ID NO: 209931 - RNA, 1410 nt, Artificial Sequence; identical to SEQ ID NO: 208810
  derived and/or modified CDS sequence (opt5) from neuraminidase__InfluenzaA__ACZ97386

SEQ ID NO: 209932 - RNA, 1410 nt, Artificial Sequence; identical to SEQ ID NO: 209917
  derived and/or modified CDS sequence (opt5) from neuraminidase__InfluenzaA__ACZ97396

SEQ ID NO: 209933 - RNA, 1410 nt, Artificial Sequence; identical to SEQ ID NO: 208810
  derived and/or modified CDS sequence (opt5) from neuraminidase__InfluenzaA__ACZ98171

SEQ ID NO: 209934 - RNA, 1410 nt, Artificial Sequence; identical to SEQ ID NO: 208810
  derived and/or modified CDS sequence (opt5) from neuraminidase__InfluenzaA__ACZ98181

SEQ ID NO: 209935 - RNA, 1410 nt, Artificial Sequence
  derived and/or modified CDS sequence (opt5) from neuraminidase__InfluenzaA__ACZ98191
augaaccccaaucagaagaucauuaccaucggcagcgugugcaugacaauugggauggccaaccugauccuccaaauuggaaauaucaucuccauuuggaucucucacagcauucagcugggcaaccagaaucagaucgagacguguaaccaauccgucauuucuuacgaaaauaacaccuggguuaaucagacauaugugaacaucagcaauaccaacuucgcugccgggcaguccguggucucugugaaacuugcgggaaauagcucccugugcccuguuagcggcugggcuauuuacucuaaggacaacuccaucagaaucgggagcaaaggagauguguuugucauucgggagccguucaucucuuguagcccccucgaaugccgcacauuuuuccugacccagggcgcccuucugaaugacaagcauuccaacggcacaauuaaagauagaucuccuuaucggacccucauguccugucccaucggggaggugccuagccccuacaacucccgcuuugaaucuguugccuggagcgcuuccgccugccacgacggaauuaauuggcugacgaucggcaucagcgggccugauaacggagcuguggccguccugaaguauaauggcauuaucaccgacacaauuaagucuuggagaaacaauauccuccggacccaagaguccgagugugcgugcgugaacgggagcuguuucacagugaugaccgauggaccgucugacggccaggccagcuacaaaauuuuucgcaucgaaaagggcaaaaucgucaaguccguugagaugaaugcucccaacuaucauuacgaagagugcucuuguuacccugauagcuccgagauuacgugcgugugcagagacaauuggcacgggagcaaccggcccugggugucuuucaaucagaaccuggaauaucagaucggauacauuuguuccggcaucuuuggggauaauccucgccccaacgacaaaacaggaagcugcggcccggucucuuccaauggggccaacggagugaagggcuucagcuuuaaguauggcaacgggguuuggauuggaagaaccaaauccaucucuagccggaauggcuucgagaugauuugggauccuaacggguggacaggaaccgacaauaacuuuuccaucaagcaagacaucgugggcauuaaugaauggucuggguacagcggcuccuucguccagcaucccgagcuuaccggacuggauuguauccgcccuugcuucuggguggaacucauuagaggccggcccaaagagaacacaaucuggacgagcgggucuuccauuagcuuuuguggaguuaauucugacaccgugggcugguccuggcccgauggggcugagcugccuuucacaaucgacaaguga

SEQ ID NO: 209936 - RNA, 1410 nt, Artificial Sequence; identical to SEQ ID NO: 208800
  derived and/or modified CDS sequence (opt5) from neuraminidase__InfluenzaA__ACZ98201

SEQ ID NO: 209937 - RNA, 1410 nt, Artificial Sequence; identical to SEQ ID NO: 208810
  derived and/or modified CDS sequence (opt5) from neuraminidase__InfluenzaA__ACZ98211

SEQ ID NO: 209938 - RNA, 1410 nt, Artificial Sequence; identical to SEQ ID NO: 208810
  derived and/or modified CDS sequence (opt5) from neuraminidase__InfluenzaA__ACZ98221

SEQ ID NO: 209939 - RNA, 1410 nt, Artificial Sequence; identical to SEQ ID NO: 208810
  derived and/or modified CDS sequence (opt5) from neuraminidase__InfluenzaA__ACZ98231

SEQ ID NO: 209940 - RNA, 1410 nt, Artificial Sequence; identical to SEQ ID NO: 208810
  derived and/or modified CDS sequence (opt5) from neuraminidase__InfluenzaA__ACZ98241

SEQ ID NO: 209941 - RNA, 1410 nt, Artificial Sequence; identical to SEQ ID NO: 209787
  derived and/or modified CDS sequence (opt5) from neuraminidase__InfluenzaA__ACZ98251

SEQ ID NO: 209942 - RNA, 1410 nt, Artificial Sequence; identical to SEQ ID NO: 208810
  derived and/or modified CDS sequence (opt5) from neuraminidase__InfluenzaA__ACZ98261

SEQ ID NO: 209943 - RNA, 1410 nt, Artificial Sequence; identical to SEQ ID NO: 208810
  derived and/or modified CDS sequence (opt5) from neuraminidase__InfluenzaA__ACZ98271

SEQ ID NO: 209944 - RNA, 1410 nt, Artificial Sequence; identical to SEQ ID NO: 208810
  derived and/or modified CDS sequence (opt5) from neuraminidase__InfluenzaA__ACZ98281

SEQ ID NO: 209945 - RNA, 1410 nt, Artificial Sequence; identical to SEQ ID NO: 208810
  derived and/or modified CDS sequence (opt5) from neuraminidase__InfluenzaA__ACZ98291

SEQ ID NO: 209946 - RNA, 1410 nt, Artificial Sequence; identical to SEQ ID NO: 208800
  derived and/or modified CDS sequence (opt5) from neuraminidase__InfluenzaA__ACZ98301

SEQ ID NO: 209947 - RNA, 1410 nt, Artificial Sequence
  derived and/or modified CDS sequence (opt5) from neuraminidase__InfluenzaA__ACZ98321
augaaccccaaucagaagaucauuaccaucggcagcgugugcaugacaauugggauggccaaccugauccuccaaauuggaaauaucaucuccauuuggaucucucacagcauucagcugggcaaccagaaucagaucgagacguguaaccaauccgucauuaccuacgaaaauaacacauggguuaaucagaccuaugugaacaucucuaauacaaacuucgcugccgggcagagcguggucuccgugaaacuugcgggaaauucuagccugugcccuguuuccggcugggcuauuuacagcaaggacaacucuaucagaaucggguccaaaggagauguguuugucauucgggagccguucaucagcuguucuccccucgaaugccgcaccuuuuuccugacacagggcgcccuucugaaugacaagcauuccaacggcaccauuaaagauagaagcccuuaucggacgcucaugucuugucccaucggggaggugccuucccccuacaacagccgcuuugaauccguugccuggucugcuagcgccugccacgacggaauuaauuggcugaccaucggcaucuccgggccugauaacggagcuguggccguccugaaguauaauggcauuaucacagacaccauuaagagcuggagaaacaauauccuccggacacaagagucugagugugcgugcgugaacggguccuguuucaccgugaugacggauggaccgagcgacggccaggccucuuacaaaauuuuucgcaucgaaaagggcaaaaucgucaagagcguugagaugaaugcucccaacuaucauuacgaagagugcuccuguuacccugauucuagcgagauuacaugcgugugcagagacaauuggcacggguccaaccggcccugggugagcuucaaucagaaccuggaauaucagaucggauacauuuguucuggcaucuuuggggauaauccucgccccaacgacaaaaccggauccugcggcccggucagcucuaauggggccaacggagugaagggcuucuccuuuaaguauggcaacgggguuuggauuggaagaacaaaaagcaucaauucccggaacggcuucgagaugauuugggauccuaauggguggaccggaaccgacaacaauuuuucuaucaagcaagacaucgugggcauuaacgaauggagcggguacuccggcucuuucguccagcaucccgagcuuacaggacuggauuguauccgcccuugcuucuggguggaacucauuagaggccggcccaaagagaauacgaucuggaccagcggguccagcauuucuuuuuguggaguuaacuccgacacagugggcuggagcuggcccgauggggcugagcugccuuucaccaucgacaaguga

SEQ ID NO: 209948 - RNA, 1410 nt, Artificial Sequence; identical to SEQ ID NO: 208810
  derived and/or modified CDS sequence (opt5) from neuraminidase__InfluenzaA__ACZ98331

SEQ ID NO: 209949 - RNA, 1410 nt, Artificial Sequence
  derived and/or modified CDS sequence (opt5) from neuraminidase__InfluenzaA__ACZ98341
augaaccccaaucagaagaucauuaccaucggcagcgugugcauuacaaucgggauggccaaccugauucuccaaaucggaaauaucauuuccaucuggauuucucacccuauccagcugggcaaccagaaucagauugagacguguaaccaaagcgucaucaccuacgaaaauaacacauggguuaaucagaccuaugugaacauuuccaauacaaaccuugcugccgggcagucuguggucagcgugaaacuggcgggaaauuccucucucugcccgguuagcggcugggcuaucuacuccaaggacaacagcaucagaauugggucuaaaggagauguguucgucauccgggagcccuuuauuuccuguagcccucuggaaugccgcaccuucuuucuuacacagggcgcccugcucaaugacaagcauucuaacggcaccaucaaagauagaucccccuaucggacgcugaugagcuguccuauuggggaggugcccucuccuuacaacucccgcuucgaaagcguugccugguccgcuucugccugccacgacggaaucaauuggcugaccaucggcauuagcgggccggauaacggagcuguggccguccucaaguauaauggcaucauuacagacaccaucaaguccuggagaaacaauauucugcggacacaagagagcgagugugcgugcgugaacgggucuuguuuuaccgugaugacggauggacccuccgacggccaggccagcuacaaaaucuuccgcaucgaaaagggcaaaauugucaagucuguugagaugaaugcuccuaacuaucauuacgaagagugcagcuguuaccccgauuccucugagaucacaugcgugugcagagacaauuggcacgggagcaaccggccuuggguguccuuuaaucagaaccuugaauaucagauuggauacaucuguagcggcauuuucggggauaauccccgcccgaacgacaaaaccggaucuugcggcccugucuccagcaauggggccaacggagugaagggcuuuucuuucaaguauggcaacgggguuuggaucggaagaacaaaauccauuagcucccggaauggcuuugagaugaucugggaucccaacggguggaccggaaccgacaauaacuucucuaucaagcaagacauugugggcaucaaugaauggagcggguacuccggcucuuuuguccagcauccugagcugacaggacucgauuguauucgccccugcuucuggguggaacugaucagaggccggcccaaagagaacacgauuuggaccagcggguccagcaucucuuucuguggaguuaauuccgacacagugggcuggagcuggccugauggggcugagcuuccguuuaccaucgacaaguga

SEQ ID NO: 209950 - RNA, 1410 nt, Artificial Sequence; identical to SEQ ID NO: 208810
  derived and/or modified CDS sequence (opt5) from neuraminidase__InfluenzaA__ACZ98351

SEQ ID NO: 209951 - RNA, 1410 nt, Artificial Sequence; identical to SEQ ID NO: 208810
  derived and/or modified CDS sequence (opt5) from neuraminidase__InfluenzaA__ACZ98361

SEQ ID NO: 209952 - RNA, 1410 nt, Artificial Sequence; identical to SEQ ID NO: 208810
  derived and/or modified CDS sequence (opt5) from neuraminidase__InfluenzaA__ACZ98371

SEQ ID NO: 209953 - RNA, 1410 nt, Artificial Sequence; identical to SEQ ID NO: 208810
  derived and/or modified CDS sequence (opt5) from neuraminidase__InfluenzaA__ACZ98381

SEQ ID NO: 209954 - RNA, 1410 nt, Artificial Sequence; identical to SEQ ID NO: 208810
  derived and/or modified CDS sequence (opt5) from neuraminidase__InfluenzaA__ACZ98391

SEQ ID NO: 209955 - RNA, 1410 nt, Artificial Sequence; identical to SEQ ID NO: 208810
  derived and/or modified CDS sequence (opt5) from neuraminidase__InfluenzaA__ACZ98401

SEQ ID NO: 209956 - RNA, 1410 nt, Artificial Sequence; identical to SEQ ID NO: 208810
  derived and/or modified CDS sequence (opt5) from neuraminidase__InfluenzaA__ACZ98411

SEQ ID NO: 209957 - RNA, 1410 nt, Artificial Sequence; identical to SEQ ID NO: 208840
  derived and/or modified CDS sequence (opt5) from neuraminidase__InfluenzaA__ACZ98421

SEQ ID NO: 209958 - RNA, 1410 nt, Artificial Sequence; identical to SEQ ID NO: 208810
  derived and/or modified CDS sequence (opt5) from neuraminidase__InfluenzaA__ACZ98431

SEQ ID NO: 209959 - RNA, 1410 nt, Artificial Sequence; identical to SEQ ID NO: 208810
  derived and/or modified CDS sequence (opt5) from neuraminidase__InfluenzaA__ACZ98441

SEQ ID NO: 209960 - RNA, 1410 nt, Artificial Sequence; identical to SEQ ID NO: 208810
  derived and/or modified CDS sequence (opt5) from neuraminidase__InfluenzaA__ACZ98451

SEQ ID NO: 209961 - RNA, 1410 nt, Artificial Sequence; identical to SEQ ID NO: 208810
  derived and/or modified CDS sequence (opt5) from neuraminidase__InfluenzaA__ACZ98461

SEQ ID NO: 209962 - RNA, 1410 nt, Artificial Sequence; identical to SEQ ID NO: 209393
  derived and/or modified CDS sequence (opt5) from neuraminidase__InfluenzaA__ACZ98674

SEQ ID NO: 209963 - RNA, 1410 nt, Artificial Sequence; identical to SEQ ID NO: 209917
  derived and/or modified CDS sequence (opt5) from neuraminidase__InfluenzaA__ACZ98684

SEQ ID NO: 209964 - RNA, 1410 nt, Artificial Sequence; identical to SEQ ID NO: 209863
  derived and/or modified CDS sequence (opt5) from neuraminidase__InfluenzaA__ACZ98694

SEQ ID NO: 209965 - RNA, 1410 nt, Artificial Sequence; identical to SEQ ID NO: 208810
  derived and/or modified CDS sequence (opt5) from neuraminidase__InfluenzaA__ADA60801

SEQ ID NO: 209966 - RNA, 1410 nt, Artificial Sequence; identical to SEQ ID NO: 208810
  derived and/or modified CDS sequence (opt5) from neuraminidase__InfluenzaA__ADA69294

SEQ ID NO: 209967 - RNA, 1410 nt, Artificial Sequence; identical to SEQ ID NO: 208810
  derived and/or modified CDS sequence (opt5) from neuraminidase__InfluenzaA__ADA69304

SEQ ID NO: 209968 - RNA, 1410 nt, Artificial Sequence; identical to SEQ ID NO: 208810
  derived and/or modified CDS sequence (opt5) from neuraminidase__InfluenzaA__ADA69314

SEQ ID NO: 209969 - RNA, 1410 nt, Artificial Sequence; identical to SEQ ID NO: 208810
  derived and/or modified CDS sequence (opt5) from neuraminidase__InfluenzaA__ADA69324

SEQ ID NO: 209970 - RNA, 1410 nt, Artificial Sequence; identical to SEQ ID NO: 208810
  derived and/or modified CDS sequence (opt5) from neuraminidase__InfluenzaA__ADA69334

SEQ ID NO: 209971 - RNA, 1410 nt, Artificial Sequence; identical to SEQ ID NO: 208810
  derived and/or modified CDS sequence (opt5) from neuraminidase__InfluenzaA__ADA69451

SEQ ID NO: 209972 - RNA, 1410 nt, Artificial Sequence; identical to SEQ ID NO: 208810
  derived and/or modified CDS sequence (opt5) from neuraminidase__InfluenzaA__ADA69453

SEQ ID NO: 209973 - RNA, 1410 nt, Artificial Sequence
  derived and/or modified CDS sequence (opt5) from neuraminidase__InfluenzaA__ADA71153
augaaccccaaucagaagaucauuaccaucggcagcgugucccugacaauuucuacgaucugcuucuuuaugcaaauugccauccucgucaccacaguuacccugcacuucaaacaguacgaguuuaacagcccuccgaauaaccaggugaugcuuugugaacccacaaucauugagagaaauaucaccgaaauuguguaucugacaaacaccacgaucgagaaggaaauuugcccuaaacucgcugaguaccggaauugguccaagccccagugugacaucaccggguucgccccuuuuucuaaagauaacagcauucgccuguccgcgggaggcgacaucugggucacaagagagcccuaugugucuugcgauccugacaaguguuaccaauucgcucuugggcagggaaccacacugaauaacguucauagcaauaacaccgugcgggaucgcacgccguauagaacacuccugaugaaugaacugggcguccccuuucaccucgggaccaaacaggugugcaucgccugguccagcagcuccugucaugacggaaaggccuggcugcacguuugcauuacaggcgaugacaagaacgcuaccgccagcuucaucuacaauggccggcuuguggauucugucguguccuggagcaaagacauucugcgcacccaggagucugaaugugugugcaucaacgggacauguacggucguuaugaccgauggauccgcuagcggcaaggccgacacaaaaauucucuuuaucgaggaggggaagaucgugcauaccuccacacugucuggaagcgcgcaacacguggaagagugcuccugcuauccuagauaccccggcguccggugugugugccgcgauaacuggaaggggagcaauagaccuauuguugacaucaacauuaaagaccacucuaucgugucccgguacgucuguagcggacuugugggcgaucccccgcgcaagaaugacucuagcuccucuagccauugccuggauccuaacaaugaagagggcgggcacggaguuaaaggcugggccuucgacgaugggaacgacguguggaugggaagaaccauuuccgaaaagagccggcucggcuaugagacguuuaaagucaucgagggguggucuaaucccaaguccaaacugcagaucaaccgccaggugauugucgauagaggaaaucggagcggcuacucuggcaucuucuccguggaagggaagucuuguauuaacagaugcuuuuauguugagcugauccgcggacggaaggaagagacagaagugcucuggaccuccaauucuauugucguguucuguggcaccagcgggacauacggaaccggcuccuggccugacggggcuaacaucaaucugaugcccauuuga

SEQ ID NO: 209974 - RNA, 1413 nt, Artificial Sequence
  derived and/or modified CDS sequence (opt5) from neuraminidase__InfluenzaA__ADA71155
augaaccccaaucagaagaucauuaccaucggcagcauuuccaucgccauugggaucaucucucugaugcuccaaauuggaaacaucauuagcaucugggcuucccacucuauucagaucggcagccagaauaacacagggauuugcaaucagagaaucaucacguacgagaacuccaccugggugaaucauacauaugucaacauuaauaacaccaaaguuguggccggagaagacaagacaucugugacccuggcgggcaauagcucccuuuguagcaucucugggugggcuauuuacacaaaagauaacuccauccggauuggaagcaagggcgacgucuucgugauccgcgagccuuuuaucucuugcucccaccuggaauguagaaccuucuuucucacgcaaggcgcccugcuuaaugauaaacauagcaacgggaccguuaaggaccggucuccguaucgcgcccugauguccugcccccucggagaggcuccuagccccuacaauuccaaguucgaaucuguggccuggagcgcuuccgccugucacgauggcaugggguggcugacaauuggaaucagcggcccugacaacggggcggucgccgugcugaaauauaacggaauuaucaccggcacaauuaagucuuggaaaaagcagauccucagaacccaggaguccgagugcguuuguaugaauggcagcugcuuuacgaucaugacagaugggcccucuaacaaagcugccagcuacaagauuuucaagaucgaaaaaggaaaggugaccaaauccauugagcugaaugcuccuaacuuuuauuacgaagaguguucuugcuacccggacacaggcaucgucaugugugugugccgggauaauuggcaugggagcaaccgccccuggguguccuucaaucagaaccuugacuaucaaauuggauacaucugcagcggcgucuuuggggauaauccuagacccgaggacggagaaggcucuuguaacccuguuaccguggauggcgccaauggggugaagggauucuccuauaaauacggcaacggggucuggauuggacggaccaagagcaaucgccugagaaaaggcuuugagaugaucugggaccccaacggguggacaaauacggacucugauuucuccgugaagcaggacguuguggcgaucaccgauuggagcggcuauuccggaucuuuuguccagcacccggaacucacaggccuggacugcauucggccuuguuucuggguggagcuuguucgcgggcugcccagagaaaacaccacaaucuggaccagcggauccucuauuagcuucugcggcgugaacuccgauacggccaauuggagcuggccugacggggcugagcuccccuuuacaaucgauaaguga

SEQ ID NO: 209975 - RNA, 1413 nt, Artificial Sequence; identical to SEQ ID NO: 209533
  derived and/or modified CDS sequence (opt5) from neuraminidase__InfluenzaA__ADA71157

SEQ ID NO: 209976 - RNA, 1413 nt, Artificial Sequence
  derived and/or modified CDS sequence (opt5) from neuraminidase__InfluenzaA__ADA71159
augaaccccaaucagaagaucauuaccaucggcagcauuuccaucgccauugggaucaucucucugaugcuccaaauuggaaacaucauuagcaucugggcuucccacucuauucagaucggcagccagaauaacacagggauuugcaaucagagaaucaucacguacgagaacuccaccugggugaaucauacauaugugaacauuaauaacaccaaaguuguggccggagaaggcaagacaucugugacccuggcggggaauagcucccuuuguagcaucucuggaugggcuauuaacacaaaagacaauuccauccggauuggcagcaagggcgaugucuucgugauccgcgagccuuuuaucucuugcucccaccuggaauguagaaccuucuuucucacgcaaggggcccugcuuaacgacaaacauagcaaucggaccguuaaggaucgcucuccguacagagcccugauguccugcccccucggagaggcuccuagccccuauaacuccaaguucgaaucuguggccuggagcgcuuccgccugucacgacggcaugggguggcugacaauuggaaucagcggcccugauaacggggcggucgccgugcugaaauacaauggaauuaucaccggcacaauuaagucuuggaaaaagcagauccuccggacccaggaguccgagugcguuuguaugaacggcagcugcuuuacgaucaugacagacgggcccucuaauaaagcugccagcuauaagauuuucaagaucgaaaaaggaaaggugaccaaauccauugagcugaacgcuccuaauuuuuacuaugaagaguguucuugcuacccggauacaggcaucgucaugugugugugccgcgacaacuggcaugggagcaauagacccuggguguccuucaaccagaaucuugauuaccaaauuggauauaucugcagcggcgucuuuggggacaacccucggcccgaggauggagaaggcucuuguaauccuguuaccguggacggcgccaacggggugaagggauucuccuacaaauauggcaauggggucuggauuggacgcaccaagagcaacagacugcggaaaggcuuugagaugaucugggaucccaauggguggacaaacacggacucugacuucuccgugaagcaggauguuguggcgaucaccgacuggagcggcuacuccggaucuuuuguccagcacccggaacucacaggccuggauugcauucgcccuuguuucuggguggagcuuguuagagggcugccccgggaaaacaccacaaucuggaccagcggauccucuauuagcuucugcggcgucaauuccgacacggccaacuggagcuggccugauggggcugagcuccccuuuacaaucgacaaguga

SEQ ID NO: 209977 - RNA, 1410 nt, Artificial Sequence
  derived and/or modified CDS sequence (opt5) from neuraminidase__InfluenzaA__ADA71161
augaaccccaaucagaagaucauuaccaucggcagcgugucccugacaauuucuacgaucugcuucuuuaugcaaauugccauccucaucaccacagucacccugcacuucaaacaguacgaguuuaacagcccuccgaauaaccagguuaugcuuugugaacccacaauuaucgagagaaauauuaccgaaaucguguaucugacaaacaccacgauugagaaggaaaucugcccuaaacucgcugaguaccggaauugguccaagccccagugugacauuaccggguucgccccuuuuucuaaagauaacagcauccgccuguccgcgggaggcgacaucugggugacaagagagcccuaugucucuugcgauccugacaaguguuaccaauucgcucuugggcagggaaccacacugaauaacgugcauagcaauaacaccguucgggaucgcacgccguauagaacacuccugaugaaugaacugggcgugcccuuucaccucgggaccaagcaggucugcauugccugguccucuagcuccugucaugacggaaaagccuggcugcacgugugcaucacaggcgaugacaagaacgcuaccgccagcuucauuuacaauggccggcuuguugauucuguggucuccuggagcaaagagauccugcgcacccaggaaucugagugugugugcauuaacgggacauguacgguggucaugaccgacggauccgcuagcggcaaggccgauacaaaaauccucuuuaucgaggaagggaagauuguucauaccuccacacugucuggaagcgcgcaacacguggaggaaugcuccugcuauccuagauaccccggcgugcggugugucugccgcgacaacuggaaggggagcaauagaccuaucguggauauuaacaucaaagaccacucuauuguuuccagcuacguguguucuggacuugucggcgacacgccccggaagaaugauagcuccucuagcucccauugccuggacccgaacaaugaggaaggcgggcacggagugaaaggcugggccuucgaugacgggaacgauguuuggaugggacgcaccaucagcgagaagucuagacucggcuaugagacauuuaaagugaucgaagggugguccaaucauaagagcaaacugcagauuaaccggcaggucaucguggaccgcggaaauagaucuggcuacuccggcauuuucagcgucgaggggaaguccuguaucaaccggugcuuuuauguggaacugauuagaggacgcaaggaggaaaccgagguucucuggaccucuaauagcaucguggucuucuguggcacauccgggaccuacggaacaggcucuuggccugauggggcugaccugaaccuuaugcccauuuga

SEQ ID NO: 209978 - RNA, 1413 nt, Artificial Sequence
  derived and/or modified CDS sequence (opt5) from neuraminidase__InfluenzaA__ADA71165
augaaccccaaucagaagaucauuaccaucggcagcauuuccaucgccauugggaucaucucucugaugcuccaaauuggaaacaucauuagcaucugggcuucccacucuauucagacaggcagccagaauaacacggggaucugcaaucagagaauuaucaccuacgagaacuccacaugggugaaucauaccuaugucaacaucaauaacacaaauguuguggccggagaagacaaaaccucugugacacuggcgggcaacagcucccuuuguagcauuucugggugggcuaucuacaccaaggauaauuccauucggaucggaagcaaaggcgacgucuucgugauucgcgagccuuuuaucucuugcucccaccuggaauguagaacguucuuucucacccaaggcgcccugcuuaacgauaagcauagcaaugggacaguuaaagaccggucuccguaucgcgcccugauguccugcccccucggagaggcuccuagccccuacaacuccaaguucgaaucuguggccuggagcgcuuccgccugucacgauggcaugggguggcugaccaucggaauuagcggcccugacaacggggcggucgccgugcugaaguauaauggaaucauuacaggcaccaucaaaucuuggaagaaacagauucucagaacgcaggaguccgagugcguuuguaugaacggcagcugcuuuacaaucaugaccgaugggcccucuaauaaggcugccagcuacaaaaucuccaagauugaaaagggaaaagugacaaagucuaucgagcugaacgcuccuaauuucuauuacgaagaguguagcugcuacccggacaccggcauugucaugugugugugccgggauaacuggcauggguccaaucgccccugggugagcuuuaaccagaaucuugacuaucaaaucggauacauuugcucuggcgucuucggggauaacccuagacccgaggacggagaaggcuccuguaauccuguuaccguggauggcgccaacggggugaaaggauuuagcuauaaguacggcaauggggucuggaucggacggacaaaaucuaaccgccugagaaagggcuucgagaugauuugggaccccaauggguggacgaacaccgacuccgauuuuagcgugaaacaggacguuguggcgaucacagauugguccggcuauucuggcagcuucguccagcacccggaacucaccggacuggacugcauccggccuuguuuuuggguggagcuuguucgcgggcugcccagagaaaacacaaccauuuggacguccggaucuagcaucuccuucugcggcgugaauagcgauacagccaacuggucuuggccugacggggcugagcuccccuucaccauugauaaguga

SEQ ID NO: 209979 - RNA, 1410 nt, Artificial Sequence
  derived and/or modified CDS sequence (opt5) from neuraminidase__InfluenzaA__ADA71167
augaaccccaaucagaagaucauuaccaucggcagcgugucccugacaauuucuacgaucugcuucuuuaugcaaauugccauccucaucaccacagucacccugcacuucaaacaguacgaguuuaacagcccuccgaauaaccagguuaugcuuugugaacccacaauuaucgagagaaauauuaccgaaaucguguaucugacaaacaccacgauugagaaggaaaucugcccuaaacucgcugaguaccggaauugguccaagccccagugugacauuaccggguucgccccuuuuucuaaagauaacagcauccgccuguccgcgggaggcgacaucugggugacaagagagcccuaugucucuugcgauccugacaaguguuaccaauucgcucuugggcagggaaccacacugaauaacgugcauagcaauaacaccguucggggccgcacgccguauagaacacuccugaugaaugaacugggggugcccuuucaccucggaaccaagcaggucugcauugccugguccucuagcuccugucaugauggcaaagccuggcugcacgugugcaucacaggcgacgauaagaacgcuaccgccagcuucauuuacaaugggcggcuuguugacucuguggucuccuggagcaaagauauccugcgcacccaggagucugaaugugugugcauuaacggaacauguacgguggucaugaccgacggcuccgcuagcgggaaggccgauacaaaaauccucuuuaucgaggagggaaagauuguucauaccuccacacugucuggcagcgcgcaacacguggaagagugcuccugcuauccuagauaccccggggugcggugugucugccgcgacaacuggaagggaagcaauagaccuaucguggauauuaacaucaaagaccacucuauuguuuccagcuacguguguucuggccuugucggcgacacgccccggaagaaugauagcuccucuagcucccauugccugaacccgaauaacgaagaagggggacacggcgugaaagggugggccuucgacgauggaaaugacguuuggaugggccgcaccaucagcgagaagucuagacucggguaugagacauuuaaagugaucgagggaugguccaacccuaagagcaaacugcagauuaaucggcaggucaucguggaucgcggcaacagaucuggcuacuccgggauuuucagcgucgaaggaaaguccuguaucaaucggugcuuuuauguggagcugauuagaggccgcaaggaagagaccgaaguucucuggaccucuaacagcaucguggucuucugugggacauccggaaccuacggcacagggucuuggcccgacggcgcuaauauuaaccugaugccuaucuga

SEQ ID NO: 209980 - RNA, 1413 nt, Artificial Sequence
  derived and/or modified CDS sequence (opt5) from neuraminidase__InfluenzaA__ADA71169
augaaccccaaucagaagaucauuaccaucggcagcauuuccaucgccauugggaucaucucucugaugcuccaaauuggaaacaucauuagcaucugggcuucccacucuauucagacaggcagccagaaucauacggggaucugcaaccagagaauuaucaccuacgaaaauuccacaugggugaaccacaccuaugucaauaucaacaauacaaacguuguggccggaaaagacaagaccccugugacacuggucggcaauucuagccuuuguuccauuagcgggugggcgaucuacaccaaagauaacucuauucggaucggauccaagggcgacguguucguuauucgcgagccguuuaucagcugcucucaucuggaguguaaaacguucuuucucacccaaggcgcucugcuuaaugauaagcacuccaacgggacagugaaggacagaagccccuaucgggcccugaugucuugcccucucggagaagcccccuccccuuacaauagcaaauucgaguccgucgcuuggucugccagcgcuugucaugauggcaucggguggcugaccauuggaaucuccggccccgacaacggggccguggcgguucugaaguauaaaggaauuaucacaggcaccauuaagagcuggaaaaagcagauccuccgcacgcaggaaucugagugcguguguaucaacggcuccugcuuuacaauuaugaccgaugggccuagcgacggagccgcuucuuacaagaucuucaaaauugagaagggcaaagucacaaagagcauggaacugaaugccccgaacuuucacuaugaggaauguuccugcuaccccgauaccgggaccgugaugugugugugcagagacaauuggcacggaucuaaccggccuugggucagcuucaaucagaaccuugauuaccaaaucggcuauauuugcuccgggguuuuuggagacaauccccgcccuaaagauggcgagggcagcuguaaccccgugacaguggacggggcuaauggagucaagggcuucucuuacaaauaugggaacggaguguggaucggcagaacgaaguccaaucggauucgcaagggguuugagaugaucugggacccgaacggcuggaccaauacagauagcgacuucucuguuaaacaggauaucguggccauuaccgacugguccggauacagcggcuccuuuguccagcauccugaacugacagggcucgauugcaucagacccuguuucuggguggagcugguucggggacuuccucgcgaaaacaccacgauuuggacaucuggcagcuccaucucuuucugcggggugaauggagacauugcgaacuggagcuggcccgauggcgccgagcugcccuuuaccaucgacaaguga

SEQ ID NO: 209981 - RNA, 1413 nt, Artificial Sequence; identical to SEQ ID NO: 209533
  derived and/or modified CDS sequence (opt5) from neuraminidase__InfluenzaA__ADA71171

SEQ ID NO: 209982 - RNA, 1410 nt, Artificial Sequence
  derived and/or modified CDS sequence (opt5) from neuraminidase__InfluenzaA__ADA71173
augaaccccaaucagaagaucauuaccaucggcagcgugucccugacaauuucuacgaucugcuucuuuaugcaaauugccauccucaucaccacagucacccugcacuucaaacaguacgaguuuaacagcccuccgaauaaccagguuaugcuuugugaacccacaauuaucgagagaaauauuaccgaaaucguguaucugacaaacaccacgauugagaaggaaaucugcccuaaacucgcugaguaccggaauugguccaagccccagugugacauuaccggguucgccccuuuuucuaaagauaacagcauccgccuguccgcgggaggcgacaucugggugacaagagagcccuaugucucuugcgauccugacaaguguuaccaauucgcucuugggcagggaaccacacugaauaacgugcauagcaauaacaccguucgggcccgcacgccguauagaacacuccugaugaaugaacugggcgugcccuuucaccucgggaccaagcaggucugcauugccugguccucuagcuccugucaugauggaaaggcuuggcugcacgugugcaucacaggcgacgauaaaaacgccaccgcuagcuucauuuacaauggccggcuuguugacucuguggucuccuggagcaaagauauccugcgcacccaggagucugaaugugugugcauuaacgggacauguacgguggucaugaccgacggauccgccagcggcaaggcggauacaaaaauccucuuuaucgaggaggggaagauuguucauaccuccacacugucuggaagcgcccaacacguggaagagugcuccugcuauccuagauaccccggcgugcggugugucugccgcgacaacuggaaggggagcaauagaccuaucguggauauuaacaucaaagaccacucuauuguuuccagcuacguguguucuggacuugucggcgacacgccccggaagaaugauagcuccucuagcucccauugccugaacccgaauaacgaagagggcgggcacggagugaaaggcugggcuuucgacgaugggaaugacguuuggaugggacgcaccaucagcgaaaagucuagacucggcuaugagacauuuaaagugaucgaggggugguccaacccuaagagcaaacugcagauuaaucggcaggucaucguggaucgcggaaacagaucuggcuacuccggcauuuucagcgucgaagggaaguccuguaucaaucggugcuuuuauguggagcugauuagaggacgcaaggaagagaccgaaguucucuggaccucuaacagcaucguggucuucuguggcacauccgggaccuacggaacaggcucuuggcccgacggggccaauauuaaccugaugccuaucuga

SEQ ID NO: 209983 - RNA, 1413 nt, Artificial Sequence
  derived and/or modified CDS sequence (opt5) from neuraminidase__InfluenzaA__ADA71175
augaaccccaaucagaagaucauuaccaucggcagcauuuccaucgccauugggaucaucucucugaugcuccaaauuggaaacaucauuagcaucugggcuucccacucuauucagaucggcagccagaauaacacagggauuugcaaucagagaaucaucacguacgagaacuccaccugggugaaucauacauaugugaacauuaauaacaccaaaguuguggccggagaagacaagacaucugugacccuggcgggcaauagcucccuuuguagcaucucugggugggcuauuaacacaaaagauaauuccauccggauuggaagcaagggcgacgucuucgugauccgcgagccuuuuaucucuugcucccaccuggaauguagaaccuucuuucucacgcaaggcgcccugcuuaacgauaaacauagcaaugggaccguuaaggaccggucuccguaccgcgcccugauguccugcccccucggagaggcuccuagccccuauaacuccaaguucgaaucuguggccuggagcgcuuccgccugucacgauggcaugggguggcugacaauuggaaucagcggcccugacaacggggcggucgccgugcugaaauacaauggaauuaucaccggcacaauuaagucuuggaaaaagcagauccucagaacccaggaguccgagugcguuuguaugaacggcagcugcuuuacgaucaugacagaugggcccucuaauaaagcugccagcuauaagauuuucaagaucgaaaaaggaaaggugaccaaauccauugagcugaacgcuccuaauuuuuacuaugaagaguguucuugcuacccggacacaggcaucgucaugugugugugccgggauaacuggcaugggagcaaucgccccuggguguccuucaaccagaaucuugacuaccaaauuggauauaucugcagcggcgucuuuggggauaacccuagacccgaggacggagaaggcucuuguaauccuguuaccguggauggcgccaacggggugaagggauucuccuacaaauauggcaauggggucuggauuggacggaccaagagcaaccgccugagaaaaggcuuugagaugaucugggaccccaauggguggacaaacacggacucugauuucuccgugaagcaggacguuguggcgaucaccgauuggagcggcuacuccggaucuuuuguccagcacccggaacucacaggccuggacugcauucggccuuguuucuggguggagcuuguucgcgggcugcccagagaaaacaccacaaucuggaccagcggauccucuauuagcuucugcggcgucaauuccgauacggccaacuggagcuggccugacggggcugagcuccccuuuacaaucgauaaguga

SEQ ID NO: 209984 - RNA, 1413 nt, Artificial Sequence; identical to SEQ ID NO: 209533
  derived and/or modified CDS sequence (opt5) from neuraminidase__InfluenzaA__ADA71177

SEQ ID NO: 209985 - RNA, 1410 nt, Artificial Sequence
  derived and/or modified CDS sequence (opt5) from neuraminidase__InfluenzaA__ADA71193
augaaccccaaucagaagaucauuaccaucggcagcgugugcaugacaauugggauggccaaccugauccuccaaauuggaaauaucaucuccauuuggaucucucacagcauucagcugggcaaccagaaucagaucgagacguguaaccaauccgucauuaccuacgaaaauaacacauggguuaaucagaccuaugugaacaucucuaauacaaacuucgcugccgggcagagcguggucuccgugaaacuugcgggaaauucuagccugugcccuguuuccggcugggcuauuuacagcaaggacaacucuaucagaaucggguccaaaggagauguguuugucauucgggagccguucaucagcuguucuccccucgaaugccgcaccuuuuuccugacacagggcgcccuucugaaugacaagcauuccaacggcaccauuaaagauagaagcccuuaucggacgcucaugucuugucccaucggggaggugccuucccccuacaacagccgcuuugaauccguugccuggucugcuagcgccugccacgacggaauuaauuggcugaccaucggcaucuccgggccugauaacggagcuguggccguccugaaguauaauggcauuaucacagacaccauuaagagcuggagaaacaauauccuccggacacaagagucugagugugcgugcgugaacggguccuguuucaccgugaugacggauggaccgagcgacggccaggccucuuacaaaauuuuucgcaucgaaaagggcaaagucguuaagagcguggagaugaaugcucccaacuaucauuacgaagagugcuccuguuacccugauucuagcgagaucacaugcgugugcagagacaauuggcacggguccaaccggcccugggucagcuucaaucagaaccuggaauaucagauuggauacaucuguucuggcauuuuuggggauaauccucgccccaacgacaaaaccggauccugcggcccggugagcucuaauggggccaacggaguuaagggcuucuccuuuaaguauggcaacgggguguggaucggaagaacaaaaagcauuuccucucggaauggcuucgagaugaucugggauccuaacggguggaccggaaccgacaauaacuuuagcauuaagcaagacaucgucggcaucaaugaaugguccggguacucuggcagcuucgugcagcaucccgagcuuacaggacuggauuguauucgcccuugcuucuggguugaacucaucagaggccggcccaaagagaacacgauuuggaccuccgggagcucuaucuccuuuuguggagugaauagcgacacagucggcuggucuuggcccgauggggcugagcugccuuucaccauugacaaguga

SEQ ID NO: 209986 - RNA, 1410 nt, Artificial Sequence
  derived and/or modified CDS sequence (opt5) from neuraminidase__InfluenzaA__ADA79589
augaaccccaaucagaagaucauuaccaucggcagcgugugcaugacaauugggauggccaaccugauccuccaaauuggaaauaucaucuccauuuggaucucucacagcauucagcugggcaaccagaaucagaucgagacguguaaccaauccgucauuaccuacgaaaauaacacauggguuaaucagaccuaugugaacaucucuaauacaaacuucgcugccgggcagagcguggucuccgugaaacuugcgggaucuagcucccugugcccuguuagcggcugggcuauuuacucuaaggacaauuccaucagaaucgggagcaaaggagauguguuugucauucgggagccguucaucucuuguagcccccucgaaugccgcaccuuuuuccugacacagggcgcccuucugaacgacaagcauuccaauggcaccauuaaagauagaucuccuuaucggacgcucauguccugucccaucggggaggugccuagccccuacaagucccgcuuugaaucuguugccuggagcgcuuccgccugccacgacggaauuaacuggcugaccaucggcaucagcgggccugauaacggagcuguggccguccugaaguauaauggcauuaucacagacaccauuaaaucuuggagaaacaauauccuccggacacaagaguccgagugugcgugcgugaacgggagcuguuucaccgugaugacggauggaccgucugacggccaggccagcuacaagauuuuucgcaucgaaaaaggcaagaucgucaaauccguugagaugaaugcucccaacuaucauuacgaagagugcucuuguuacccugauagcuccgagauuacaugcgugugcagagacaauuggcacgggagcaaccggcccugggugucuuucaaucagaaccuggaauaucagaucggauacauuuguuccggcaucuuuggggauaauccucgccccaacgacaagaccggaagcugcggcccggucucuuccaauggggccaacggagugaagggcuucagcuuuaaauauggcaaugggguuuggauuggaagaacaaaguccaucucuagccggaacggcuucgagaugauuugggauccuaacggguggaccggaaccgacaauaacuuuuccaucaaacaagacaucgugggcauuaaugaauggucuggguacagcggcuccuucguccagcaucccgagcuuacaggacuggauuguauccgcccuugcuucuggguggaacucauuagaggccggcccaaggagaacacgaucuggaccagcgggucuuccauuagcuuuuguggaguuaauucugacacagugggcugguccuggcccgauggggcugagcugccuuucaccaucgacaaauga

SEQ ID NO: 209987 - RNA, 1410 nt, Artificial Sequence
  derived and/or modified CDS sequence (opt5) from neuraminidase__InfluenzaA__ADA79599
augaaccccaaucagaagaucauuaccaucggcagcgugugcaugacaauugggauggccaaccugauccuccaaauuggaaauaucaucuccauuuggaucucucacagcauucagcugggcaaccagaaucagaucgagacguguaaccaauccgucauuaccuacgaaaauaacacauggguuaaucagaccuaugugaacaucucuaauacaaacuucgcugccgggcagagcguggucuccgugaaacuugcgggaaauucuagccugugcccuguuuccggcugggcuauuuacagcaaggacaacucuaucagaaucggguccaaaggagauguguuugucauucgggagccguucaucagcuguucuccccucgaaugccgcaccuuuuuccugacacagggcgcccuucugaaugacaagcauuccaacggcaccauuaaagauagaagcccuuaucggacgcucaugucuugucccaucggggaggugccuucccccuacaacagccgcuuugaauccguugccuggucugcuagcgccugccacgacggaauuaauuggcugaccaucggcaucuccgggccugauaacggagcuguggccguccugaaguauaauggcauuaucacagacaccauuaagagcuggagaaacaauauccuccggacacaagagucugagugugcgugcgugaacggguccuguuucaccgugaugacggauggaccgagcgacggccaggccucuuacaaaauuuuucgcaucgaaaagggcaaaaucgucaagagcguugagaugaaugcucccaacuaucauuacgaagagugcuccuguuacccugauucuagcgagauuacaugcgugugcagagacaauuggcacggguccaaccggcccugggugagcuucaaucagaaccuggaauaucagaucggauacauuuguucuggcaucuuuggggauaauccucgccccaacgacaaaaccggauccugcggcccggucagcucuaauggggccaacggagugaagggcuucuccuuuaaguauggcaacgggguuuggauuggaagaacaaaaagcaucuccucucggaauggcuucgagaugauuugggauccuaacggguggaccggaaccgacaauaaguuuagcaucaaacaagacaucgugggcauuaacgaaugguccggguacucuggcagcuucguccagcaucccgagcuuacaggacuggauuguauccgcccuugcuucuggguggaacucauuagaggccggcccaaggagaauacgaucuggaccuccgggagcucuauuuccuuuuguggaguuaacagcgacacagugggcuggucuuggcccgauggggcugagcugccuuucaccaucgacaaauga

SEQ ID NO: 209988 - RNA, 1410 nt, Artificial Sequence; identical to SEQ ID NO: 209987
  derived and/or modified CDS sequence (opt5) from neuraminidase__InfluenzaA__ADA79609

SEQ ID NO: 209989 - RNA, 1410 nt, Artificial Sequence
  derived and/or modified CDS sequence (opt5) from neuraminidase__InfluenzaA__ADA79619
augaaccccaaucagaagaucauuaccaucggcagcauuugcaugacaaucgggauggccaaccugauucuccaaaucggaaauaucauuuccaucuggauuucucacagcauccagcugggcaaccagaaucagauugagacguguaaccaauccgugaucaccuacgaaaauaacacaugggucaaucagaccuauguuaacauuucuaauacaaacuucgcugccgggcagagcguggcguccgugaaacuugcuggaaauucuagccugugcccugucuccggcugggccaucuacagcaaggacaacucuaucagaauuggguccaaaggagauguguuuguuauccgggagccguucauuagcuguucuccccucgaaugccgcaccuuuuuccugacacagggcgcccuucugaaugacaagcauuccaacggcaccaucaaagauagaagcccuuaucggacgcucaugucuugucccauuggggaggugccuucccccuacaacagccgcuuugaauccgucgcuuggucugccagcgcuugccacgacggaaucaauuggcugaccaucggcauuuccgggccugauaacggagccguggcgguucugaaguauaauggcaucauuacagacaccaucaagagcuggagaaacaauauucuccggacacaagagucugagugugccugcgugaacggguccuguuucaccgucaugacggauggaccgagcgacggccaggcuucuuacaaaaucuuucgcaucgaaaagggcaaaauugucaagagcguggagaugaaugcccccaacuaucauuacgaagagugcuccuguuacccugauucuagcgagaucacaugcgugugcagagacaauuggcacggguccaaccggcccuggguuagcuucaaucagaaccuggaauaucagauuggauacaucuguucuggcauuuuuggggauaauccucgccccaacgacaaaaccggauccugcggcccggugagcucuaauggggcuaacggagugaagggcuucuccuuuaaguauggcaacggggucuggaucggaagaacaaaaagcauuuccucucggaauggcuucgagaugaucugggauccuaacggguggaccggaaccgacaauaacuuuagcaucaagcaagacauugugggcaucaaugaaugguccggguacucuggcagcuucguucagcaucccgagcuuacaggacuggauuguauucgcccuugcuucuggguggaacucaucagaggccggcccaaagagaacacgauuuggaccuccgggagcucuaucuccuuuuguggagucaauagcgacacagugggcuggucuuggcccgauggggccgagcugccuuucaccaucgacaaguga

SEQ ID NO: 209990 - RNA, 1410 nt, Artificial Sequence; identical to SEQ ID NO: 208810
  derived and/or modified CDS sequence (opt5) from neuraminidase__InfluenzaA__ADA81211

SEQ ID NO: 209991 - RNA, 1410 nt, Artificial Sequence
  derived and/or modified CDS sequence (opt5) from neuraminidase__InfluenzaA__ADA83035
augaaccccaaucagaagaucauuaccaucggcagcgugugcaugacaauugggauggccaaccugauccuccaaauuggaaauaucaucuccauuuggaucucucacagcauucagcugggcaaccagaaucagaucgagacguguaaccaauccgucauuaccuacgaaaauaacacauggguuaaucagaccuaugugaacaucucuaauacaaacuucgcugccgggcagagcguggucuccgugaaacuugcgggaaauucuagccugugcccuguuuccggcugggcuauuuacagcaaggacaacucuaucagaaucggguccaaaggagauguguuugucauucgggagccguucaucagcuguucuccccucgaaugcuccaccuuuuuccugacacagggcgcccuucugaaugacaagcauagcaacggcaccauuaaagaucgcucuccuuauagaacgcucauguccugucccaucggggaggugccuagccccuacaacucccgguuugaaucuguugccuggagcgcuuccgccugccacgacggaauuaauuggcugaccaucggcaucagcgggccugauaacggagcuguggccguccugaaguauaauggcauuaucacagacaccauuaagucuuggcgcaacaauauccucagaacacaagaguccgagugugcgugcgugaacgggagcuguuucaccgugaugacggauggaccgucugacggccaggccagcuacaaaauuuuucggaucgaaaagggcaaaaucgucaaguccguugagaugaaugcucccaacuaucauuacgaagagugcucuuguuacccugauagcuccgagauuacaugcgugugccgcgacaauuggcacgggagcaacagacccugggugucuuucaaucagaaccuggaauaucagaucggauacauuuguuccggcaucuuuggggauaauccucggcccaacgacaaaaccggaagcugcggcccggucucuuccaauggggccaacggagugaagggcuucagcuuuaaguauggcaacgggguuuggauuggacgcacaaaauccaucucuagcagaaauggcuucgagaugauuugggauccuaacggguggaccggaaccgacaauaacuuuuccaucaagcaagacaucgugggcauuaaugaauggucuggguacagcggcuccuucguccagcaucccgagcuuacaggacuggauuguauccggccuugcuucuggguggaacucauucgcggcagacccaaagagaacacgaucuggaccagcgggucuuccauuagcuuuuguggaguuaauucugacacagugggcugguccuggcccgauggggcugagcugccuuucaccaucgacaaguga

SEQ ID NO: 209992 - RNA, 1410 nt, Artificial Sequence
  derived and/or modified CDS sequence (opt5) from neuraminidase__InfluenzaA__ADA83037
augaaccccaaucagaagaucauuaccaucggcagcgugugcaugacaauugggauggccaaccugauccuccaaauuggaaauaucaucuccauuuggaucucucacagcauucagcugggcaaccaggaccagaucgagacguguaaucaauccgucauuaccuacgaaaacaauacauggguuaaccagaccuaugugaauaucucuaacacaaauuucgcugccgggcagagcguggucuccgugaaacuugcgggaaacucuagccugugcccuguuuccggcugggcuauuuacagcaaggauaauucuaucagaaucggguccaaaggagacguguuugucauucgggagccguucaucagcuguucuccccucgaaugccgcaccuuuuuccugacacagggcgcccuucugaacgauaagcauuccaauggcaccauuaaagacagaagcccuuaucggacgcucaugucuugucccaucggggaggugccuucccccuacaacagccgcuuugaauccguugccuggucugcuagcgccugccacgauggaauuaacuggcugaccaucggcaucuccgggccugacaauggagcuguggccguccugaaguauaacggcauuaucacagauaccauuaagagcuggagaaauaacauccuccggacacaagagucugagugugcgugcgugaauggguccuguuucaccgugaugacggacggaccgagcgauggccaggccucuuacaaaauuuuucgcaucgaaaagggcaaaaucgucaagagcguugagaugaacgcucccaauuaucauuacgaagagugcuccuguuacccugacucuagcgagauuacaugcgugugcagagauaacuggcacggguccaaucggcccugggugagcuucaaccagaaucuggaauaucagaucggauacauuuguucuggcaucuuuggggacaacccucgccccaaugauaaaaccggauccugcggcccggucagcucuaacggggccaauggagugaagggcuucuccuuuaaguauggcaacgggguuuggauuggaagaacaaaaagcaucuccucucggaacggcuucgagaugauuugggacccuaauggguggaccggaaccgacaacaaguuuagcaucaaacaagauaucgugggcauuaaugaaugguccggguacucuggcagcuucguccagcaucccgagcuuacaggacuggacuguauccgcccuugcuucuggguggaacucauuagaggccggcccaaggagaacacgaucuggaccuccgggagcucuauuuccuuuuguggaguuaauagcgauacagugggcuggucuuggcccgacggggcugagcugccuuucaccaucgauaaauga

SEQ ID NO: 209993 - RNA, 1410 nt, Artificial Sequence; identical to SEQ ID NO: 208810
  derived and/or modified CDS sequence (opt5) from neuraminidase__InfluenzaA__ADA83588

SEQ ID NO: 209994 - RNA, 1410 nt, Artificial Sequence; identical to SEQ ID NO: 208810
  derived and/or modified CDS sequence (opt5) from neuraminidase__InfluenzaA__ADA83592

SEQ ID NO: 209995 - RNA, 1410 nt, Artificial Sequence; identical to SEQ ID NO: 208810
  derived and/or modified CDS sequence (opt5) from neuraminidase__InfluenzaA__ADA83596

SEQ ID NO: 209996 - RNA, 1410 nt, Artificial Sequence; identical to SEQ ID NO: 208810
  derived and/or modified CDS sequence (opt5) from neuraminidase__InfluenzaA__ADA83600

SEQ ID NO: 209997 - RNA, 1410 nt, Artificial Sequence; identical to SEQ ID NO: 208810
  derived and/or modified CDS sequence (opt5) from neuraminidase__InfluenzaA__ADA83604

SEQ ID NO: 209998 - RNA, 1410 nt, Artificial Sequence; identical to SEQ ID NO: 208810
  derived and/or modified CDS sequence (opt5) from neuraminidase__InfluenzaA__ADA83608

SEQ ID NO: 209999 - RNA, 1410 nt, Artificial Sequence; identical to SEQ ID NO: 208810
  derived and/or modified CDS sequence (opt5) from neuraminidase__InfluenzaA__ADA83612

SEQ ID NO: 210000 - RNA, 1410 nt, Artificial Sequence; identical to SEQ ID NO: 209164
  derived and/or modified CDS sequence (opt5) from neuraminidase__InfluenzaA__ADA83616

SEQ ID NO: 210001 - RNA, 1410 nt, Artificial Sequence; identical to SEQ ID NO: 208810
  derived and/or modified CDS sequence (opt5) from neuraminidase__InfluenzaA__ADA83624

SEQ ID NO: 210002 - RNA, 1410 nt, Artificial Sequence; identical to SEQ ID NO: 208810
  derived and/or modified CDS sequence (opt5) from neuraminidase__InfluenzaA__ADA83630

SEQ ID NO: 210003 - RNA, 1410 nt, Artificial Sequence; identical to SEQ ID NO: 208810
  derived and/or modified CDS sequence (opt5) from neuraminidase__InfluenzaA__ADA83634

SEQ ID NO: 210004 - RNA, 1410 nt, Artificial Sequence; identical to SEQ ID NO: 208810
  derived and/or modified CDS sequence (opt5) from neuraminidase__InfluenzaA__ADA83638

SEQ ID NO: 210005 - RNA, 1410 nt, Artificial Sequence; identical to SEQ ID NO: 208810
  derived and/or modified CDS sequence (opt5) from neuraminidase__InfluenzaA__ADA83642

SEQ ID NO: 210006 - RNA, 1410 nt, Artificial Sequence; identical to SEQ ID NO: 208810
  derived and/or modified CDS sequence (opt5) from neuraminidase__InfluenzaA__ADA83649

SEQ ID NO: 210007 - RNA, 1410 nt, Artificial Sequence; identical to SEQ ID NO: 208810
  derived and/or modified CDS sequence (opt5) from neuraminidase__InfluenzaA__ADA83653

SEQ ID NO: 210008 - RNA, 1410 nt, Artificial Sequence; identical to SEQ ID NO: 208810
  derived and/or modified CDS sequence (opt5) from neuraminidase__InfluenzaA__ADA83657

SEQ ID NO: 210009 - RNA, 1410 nt, Artificial Sequence; identical to SEQ ID NO: 208810
  derived and/or modified CDS sequence (opt5) from neuraminidase__InfluenzaA__ADA83661

SEQ ID NO: 210010 - RNA, 1410 nt, Artificial Sequence; identical to SEQ ID NO: 208810
  derived and/or modified CDS sequence (opt5) from neuraminidase__InfluenzaA__ADA83669

SEQ ID NO: 210011 - RNA, 1410 nt, Artificial Sequence; identical to SEQ ID NO: 208810
  derived and/or modified CDS sequence (opt5) from neuraminidase__InfluenzaA__ADA83673

SEQ ID NO: 210012 - RNA, 1410 nt, Artificial Sequence; identical to SEQ ID NO: 208810
  derived and/or modified CDS sequence (opt5) from neuraminidase__InfluenzaA__ADA83677

SEQ ID NO: 210013 - RNA, 1410 nt, Artificial Sequence; identical to SEQ ID NO: 208810
  derived and/or modified CDS sequence (opt5) from neuraminidase__InfluenzaA__ADA83681

SEQ ID NO: 210014 - RNA, 1410 nt, Artificial Sequence; identical to SEQ ID NO: 208810
  derived and/or modified CDS sequence (opt5) from neuraminidase__InfluenzaA__ADA83685

SEQ ID NO: 210015 - RNA, 1410 nt, Artificial Sequence; identical to SEQ ID NO: 208810
  derived and/or modified CDS sequence (opt5) from neuraminidase__InfluenzaA__ADA86069

SEQ ID NO: 210016 - RNA, 1410 nt, Artificial Sequence; identical to SEQ ID NO: 208810
  derived and/or modified CDS sequence (opt5) from neuraminidase__InfluenzaA__ADB27973

SEQ ID NO: 210017 - RNA, 1410 nt, Artificial Sequence; identical to SEQ ID NO: 208810
  derived and/or modified CDS sequence (opt5) from neuraminidase__InfluenzaA__ADB27983

SEQ ID NO: 210018 - RNA, 1410 nt, Artificial Sequence
  derived and/or modified CDS sequence (opt5) from neuraminidase__InfluenzaA__ADB66693
augaaccccaaucagaagaucauuaccaucggcagcgugugcaugacaauugggauggccaaccugauccuccaaauuggaaauaucaucuccauuuggaucauucacucuauccagcugggcaaccagaaucagauugagacguguaaccaaagcgucaucaccuacgaaaauaacacauggguuaaucagaccuaugugaacauuuccaauacaaacuucgcugccgggcagucuguggucagcgugaaacuugcgggaaauuccucucugugcccuguuagcggcugggcuaucuacuccaaggacaacagcaucagaauugggucuaaaggagauguguuugucauccgggagccguucauuuccuguagcccccucgaaugccgcaccuuuuuccugacacagggcgcccuucugaaugacaagcauucuaacggcaccaucaaagauagauccccuuaucggacgcucaugagcugucccauuggggaggugccuucucccuacaacucccgcuuugaaagcguugccugguccgcuucugccugccacgacggaaucaauuggcugaccaucggcauuagcgggccugauaacggagcuguggccguccugaaguauaauggcaucauuacagacaccaucaaguccuggagaaacaauauucuccggacacaagagagcgagugugcgugcgugaacgggucuuguuucaccgugaugacggauggaccguccgacggccaggccagcuacaaaaucuuucgcaucgaaaagggcaaaauugucaagucuguugagaugaaugcucccaacuaucauuacgaagagugcagcuguuacccugauuccucugagaucacaugcgugugcagagacaauuggcacgggagcaaccggcccuggguguccuucaaucagaaccuggaauaucagauuggauacaucuguagcggcauuuuuggggauaauccucgccccaacgacaaaaccggaucuugcggcccggucuccagcaauggggccaacggagugaagggcuucucuuuuaaguauggcaacgggguuuggaucggaagaacaaaauccauuagcucccggaauggcuucgagaugaucugggauccuaacggguggaccggaaccgacaauaacuuuucuaucaagcaagacauugugggcaucaaugaauggagcggguacuccggcucuuucguccagcaucccgagcuuacaggacuggauuguauucgcccuugcuucuggguggaacucaucagaggccggcccaaagagaacacgauuuggaccagcggguccagcaucucuuuuuguggaguuaauuccgacacagugggcuggagcuggcccgauggggcugagcugccuuucaccaucgacaaguga

SEQ ID NO: 210019 - RNA, 1410 nt, Artificial Sequence; identical to SEQ ID NO: 208810
  derived and/or modified CDS sequence (opt5) from neuraminidase__InfluenzaA__ADB66695

SEQ ID NO: 210020 - RNA, 1410 nt, Artificial Sequence; identical to SEQ ID NO: 208810
  derived and/or modified CDS sequence (opt5) from neuraminidase__InfluenzaA__ADB66696

SEQ ID NO: 210021 - RNA, 1410 nt, Artificial Sequence
  derived and/or modified CDS sequence (opt5) from neuraminidase__InfluenzaA__ADB66697
augaaccccaaucagaagaucauuaccaucggcagcgugugcauuacaaucgggauggccaaccugauucuccaaaucggaaauaucauuuccaucuggauuucucacagcauccagcugggcaaccagaaucagauugagacguguaaccaauccgucaucaccuacgaaaauaacacauggguuaaucagaccuaugugaacauuucuaauacaaacuucgcugccgggcagagcguggucuccgugaaacuugcgggaaauucuagccugugcccuguuuccggcugggcuaucuacagcaaggacaacucuaucagaauuggguccaaaggagauguguuugucauccgggagccguucauuagcuguucuccccucgaaugccgcaccuuuuuccugacacagggcgcccuucugaaugacaagcauuccaacggcaccaucaaagauagaagcccuuaucggacgcucaugucuugucccauuggggaggugccuucccccuacaacagccgcuuugaauccguugccuggucugcuagcgccugccacgacggaaucaauuggcugaccaucggcauuuccgggccugauaacggagcuguggccguccugaaguauaauggcaucauuacagacaccaucaagagcuggagaaacaauauucuccggacacaagagucugagugugcgugcgugaacggguccuguuucaccgugaugacggauggaccgagcgacgaacaggccucuuacaaaaucuuucgcaucgagaagggcaaaauugucaagagcguugaaaugaaugcucccaacuaucauuacgaggagugcuccuguuacccugauucuagcgaaaucacaugcgugugcagagacaauuggcacggcuccaaccggcccugggugagcuucaaucagaaccuggaguaucgcauuggguacaucuguucuggaauuuuuggcgauaauccuagacccaacgacaaaaccggguccugcggaccggucagcucuaauggcgccaacggggugaagggauucuccuuuaaguauggcaacggcguuuggaucgggcggacaaaaagcauuuccucucgcaauggauucgaaaugaucugggauccuaacggcuggaccgggaccgacaauaacuuuagcaucaagcaggacauugugggaauccaugagugguccggcuacucugggagcuucguccaacaccccgaacuuacaggccuggauuguauuagaccuugcuucuggguggagcucauccggggacgccccaaagagaauacgauuuggaccuccggcagcucuaucuccuuuugugggguuaacagcgacacagugggauggucuuggcccgauggcgcugaacugccuuucaccaucgacaaguga

SEQ ID NO: 210022 - RNA, 1410 nt, Artificial Sequence; identical to SEQ ID NO: 209985
  derived and/or modified CDS sequence (opt5) from neuraminidase__InfluenzaA__ADB81401

SEQ ID NO: 210023 - RNA, 1410 nt, Artificial Sequence; identical to SEQ ID NO: 209828
  derived and/or modified CDS sequence (opt5) from neuraminidase__InfluenzaA__ADB81421

SEQ ID NO: 210024 - RNA, 1410 nt, Artificial Sequence; identical to SEQ ID NO: 209164
  derived and/or modified CDS sequence (opt5) from neuraminidase__InfluenzaA__ADB81431

SEQ ID NO: 210025 - RNA, 1410 nt, Artificial Sequence; identical to SEQ ID NO: 208810
  derived and/or modified CDS sequence (opt5) from neuraminidase__InfluenzaA__ADB81441

SEQ ID NO: 210026 - RNA, 1410 nt, Artificial Sequence
  derived and/or modified CDS sequence (opt5) from neuraminidase__InfluenzaA__ADB81451
augaaccccaaucagaagaucauuaccaucggcagcgugugcaugacaauugggauggccaaccugauccuccaaauuggaaauaucaucuccauuuggaucucucacagcauucagcugggcaaccagaaucagaucgagacguguaaccaauccgucauuaccuacgaaaauaacacauggguuaaucagaccuaugugaacaucucuaauacaaacuucgcugccgggcagagcguggucuccgugaaacuugcgggaaauucuagccugugcccuguuuccggcugggcuauuuacagcaaggacaacucuaucagaaucggguccaaaggagauguguuugucauucgggagccguucaucagcuguucuccccucgaaugccgcaccuuuuuccugacacagggcgcccuucugaaugacaagcauuccaacggcaccauuaaagauagaagcccuuaucggacgcucaugucuugucccaucggggaggugccuucccccuacaacagccgcuuugaauccguugccuggucugcuagcgccugccacgacggaauuaauuggcugaccaucggcaucuccgggccugauaacggagcuguggccguccugaaguauaauggcauuaucacagacaccauuaagagcuggagaaacaauauccuccggacacaagagucugagugugugugcgugaacggguccuguuucaccgucaugacggauggaccgagcgacggccaggcgucuuacaaaauuuuucgcaucgaaaagggcaaaaucguuaagagcguggagaugaaugcccccaacuaucauuacgaagagugcuccuguuacccugauucuagcgagauuacaugcgugugcagagacaauuggcacggguccaaccggcccugggucagcuucaaucagaaccuggaauaucagaucggauacauuuguucuggcaucuuuggggauaauccucgccccaacgacaaaaccggauccugcggcccggugagcucuaauggggcuaacggaguuaagggcuucuccuuuaaguauggcaacgggguguggauuggaagaacaaaaagcaucuccucucggaauggcuucgagaugauuugggauccuaacggguggaccggaaccgacaauaaguuuagcaucaaacaagacaucgucggcauuaacgaaugguccggguacucuggcagcuucgugcagcaucccgagcuuacaggacuggauuguauccgcccuugcuucuggguugaacucauuagaggccggcccaaggagaauacgaucuggaccuccgggagcucuauuuccuuuuguggagugaacagcgacacagucggcuggucuuggcccgauggggccgagcugccuuucaccaucgacaaauga

SEQ ID NO: 210027 - RNA, 1410 nt, Artificial Sequence; identical to SEQ ID NO: 209987
  derived and/or modified CDS sequence (opt5) from neuraminidase__InfluenzaA__ADB81461

SEQ ID NO: 210028 - RNA, 1410 nt, Artificial Sequence; identical to SEQ ID NO: 209987
  derived and/or modified CDS sequence (opt5) from neuraminidase__InfluenzaA__ADB82942

SEQ ID NO: 210029 - RNA, 1410 nt, Artificial Sequence; identical to SEQ ID NO: 208965
  derived and/or modified CDS sequence (opt5) from neuraminidase__InfluenzaA__ADB82945

SEQ ID NO: 210030 - RNA, 1410 nt, Artificial Sequence; identical to SEQ ID NO: 208810
  derived and/or modified CDS sequence (opt5) from neuraminidase__InfluenzaA__ADB89132

SEQ ID NO: 210031 - RNA, 1410 nt, Artificial Sequence; identical to SEQ ID NO: 209393
  derived and/or modified CDS sequence (opt5) from neuraminidase__InfluenzaA__ADB89142

SEQ ID NO: 210032 - RNA, 1410 nt, Artificial Sequence; identical to SEQ ID NO: 208810
  derived and/or modified CDS sequence (opt5) from neuraminidase__InfluenzaA__ADB89224

SEQ ID NO: 210033 - RNA, 1410 nt, Artificial Sequence
  derived and/or modified CDS sequence (opt5) from neuraminidase__InfluenzaA__ADB89234
augaaccccaaucagaagaucauuaccaucggcagcgugugcaugacaauugggauggccaaccugauccuccaaauuggaaauaucaucuccauuuggaucucucacagcauucagcugggcaaccagaaucagaucgagacguguaaccaauccgucauuaccuacgaaaauaacacauggguuaaucagaccuaugugaacaucucuaauacaaacuucgcugccgggcagagcguggucuccgugaaacuuguuggaaauucuagccugugcccuguguccggcugggcgauuuacagcaaggacaacucugucagaaucggguccaaaggagauguguuuguuauccgggagccguucauuagcuguucuccccucgaaugccgcaccuuuuuccugacacagggcgcccuucugaaugacaagcauuccaacggcaccaucaaagauagaagcccuuaucggacgcucaugucuugucccauuggggaggugccuucccccuacaacagccgcuuugaauccgucgcuuggucugccagcgcuugccacgacggaaucaauuggcugaccauuggcaucuccgggccugauaacggagccguggcugugcugaaguauaauggcaucauuacagacaccaucaagagcuggagaaacaauauucuccggacacaagagucugagugugccugcgucaacggguccuguuucaccguuaugacggauggaccgagcaauggccaggcgucuuacaaaaucuuucgcauugaaaagggcaaaaucgucaagagcguggagaugaacgcccccaauuaucauuacgaagagugcuccuguuacccugacucuagcgagaucacaugcgugugcagagauaacuggcacggguccaaucggcccugggugagcuucaaccagaaucuggaauaucagauuggauacaucuguucuggcauuuuuggggacaacccucgccccaaugauaaaaccggauccugcggcccgguuagcucuaacggggcuaacggagugaagggcuucuccuuuaaguauggcaauggggucuggaucggaagaacaaaaagcauuuccucucggaacggcuucgagaugaucugggacccuaauggguggaccggaaccgauaacaauuuuagcauuaagcaagacaucgugggcaucaacgaaugguccggguacucuggcagcuucguucagcaucccgagcuuacaggacuggacuguauucgcccuugcuucuggguggaacucaucagaggccggcccaaagagaauacgauuuggaccuccgggagcucuaucuccuuuuguggagucaacagcgauacagugggcuggucuuggcccgacggggccgagcugccuuucaccauugauaaguga

SEQ ID NO: 210034 - RNA, 1410 nt, Artificial Sequence; identical to SEQ ID NO: 208800
  derived and/or modified CDS sequence (opt5) from neuraminidase__InfluenzaA__ADB89244

SEQ ID NO: 210035 - RNA, 1410 nt, Artificial Sequence; identical to SEQ ID NO: 208810
  derived and/or modified CDS sequence (opt5) from neuraminidase__InfluenzaA__ADB89264

SEQ ID NO: 210036 - RNA, 1410 nt, Artificial Sequence; identical to SEQ ID NO: 209780
  derived and/or modified CDS sequence (opt5) from neuraminidase__InfluenzaA__ADB89274

SEQ ID NO: 210037 - RNA, 1410 nt, Artificial Sequence; identical to SEQ ID NO: 208965
  derived and/or modified CDS sequence (opt5) from neuraminidase__InfluenzaA__ADB89284

SEQ ID NO: 210038 - RNA, 1410 nt, Artificial Sequence; identical to SEQ ID NO: 208810
  derived and/or modified CDS sequence (opt5) from neuraminidase__InfluenzaA__ADB89294

SEQ ID NO: 210039 - RNA, 1410 nt, Artificial Sequence; identical to SEQ ID NO: 208810
  derived and/or modified CDS sequence (opt5) from neuraminidase__InfluenzaA__ADB89304

SEQ ID NO: 210040 - RNA, 1410 nt, Artificial Sequence; identical to SEQ ID NO: 208810
  derived and/or modified CDS sequence (opt5) from neuraminidase__InfluenzaA__ADB89314

SEQ ID NO: 210041 - RNA, 1410 nt, Artificial Sequence; identical to SEQ ID NO: 208810
  derived and/or modified CDS sequence (opt5) from neuraminidase__InfluenzaA__ADB89324

SEQ ID NO: 210042 - RNA, 1410 nt, Artificial Sequence; identical to SEQ ID NO: 208810
  derived and/or modified CDS sequence (opt5) from neuraminidase__InfluenzaA__ADB89334

SEQ ID NO: 210043 - RNA, 1410 nt, Artificial Sequence; identical to SEQ ID NO: 208810
  derived and/or modified CDS sequence (opt5) from neuraminidase__InfluenzaA__ADB89344

SEQ ID NO: 210044 - RNA, 1410 nt, Artificial Sequence; identical to SEQ ID NO: 208810
  derived and/or modified CDS sequence (opt5) from neuraminidase__InfluenzaA__ADB89364

SEQ ID NO: 210045 - RNA, 1410 nt, Artificial Sequence; identical to SEQ ID NO: 208810
  derived and/or modified CDS sequence (opt5) from neuraminidase__InfluenzaA__ADB89374

SEQ ID NO: 210046 - RNA, 1410 nt, Artificial Sequence; identical to SEQ ID NO: 208810
  derived and/or modified CDS sequence (opt5) from neuraminidase__InfluenzaA__ADB89384

SEQ ID NO: 210047 - RNA, 1410 nt, Artificial Sequence; identical to SEQ ID NO: 208810
  derived and/or modified CDS sequence (opt5) from neuraminidase__InfluenzaA__ADB89394

SEQ ID NO: 210048 - RNA, 1410 nt, Artificial Sequence
  derived and/or modified CDS sequence (opt5) from neuraminidase__InfluenzaA__ADB89404
augaaccccaaucagaagaucauuaccaucggcagcgugugcaugacaauugggauggccaaccugauccuccaaauuggaaauaucaucuccauuuggaucucucacagcauucagcugggcaaccagaaucagaucgagacguguaaccaauccgucauuaccuacgaaaauaacacauggguuaaucagaccuaugugaacaucucuaauacaaacuucgcugccgggcagagcguggucuccgugaaacuugcgggaaauucuagccugugcccuguuuccggcugggcuauuuacagcaaggacaacucugugagaaucggguccaaaggagaugucuuugugauccgggagccguucauuagcuguucuccccucgaaugccgcaccuuuuuccugacacagggcgcccuucugaaugacaagcauuccaacggcaccaucaaagauagaagcccuuaucggacgcucaugucuugucccauuggggagguuccuucccccuacaacagccgcuuugaauccguggccuggucugcuagcgccugccacgacggaaucaauuggcugaccauuggcaucuccgggccugauaacggagcugucgccgugcugaaguauaauggcaucauuacagacaccaucaagagcuggagaaacucuauucuccggacacaagaguccgagugugcgugcgugaaugggagcuguuucaccgucaugacggauggaccgucuaacggccaggccagcuacaaaaucuuucgcauugaaaagggcaaaaucguuaaguccguggagaugaaugcucccaacuaucauuacgaagagugcucuuguuacccugacagcuccgagaucacaugcgugugcagagauaauuggcacgggagcaaccggcccugggucucuuucaaucagaaccuggaauaucagauuggauacaucuguuccggcauuuuuggggacaauccucgccccaacgauaaaaccggaagcugcggcccggugucuuccaauggggccaacggaguuaagggcuucagcuuuaaguauggcaacgggguguggaucggaagaacaaaauccauuucuagccggaauggcuucgagaugaucugggacccuaacggguggaccggaaccgauaauaacuuuuccauuaagcaagacaucgucggcaucaaugaauggucuggguacagcggcuccuucgugcagcaucccgagcuuacaggacuggacuguauucgcccuugcuucuggguugaacucaucagaggccggcccaaagagaacacgauuuggaccagcgggucuuccaucagcuuuuguggagucaauucugauacagugggcugguccuggcccgacggggcugagcugccuuucaccauugauaaguga

SEQ ID NO: 210049 - RNA, 1410 nt, Artificial Sequence; identical to SEQ ID NO: 208810
  derived and/or modified CDS sequence (opt5) from neuraminidase__InfluenzaA__ADB89414

SEQ ID NO: 210050 - RNA, 1410 nt, Artificial Sequence; identical to SEQ ID NO: 208810
  derived and/or modified CDS sequence (opt5) from neuraminidase__InfluenzaA__ADB89424

SEQ ID NO: 210051 - RNA, 1410 nt, Artificial Sequence; identical to SEQ ID NO: 208810
  derived and/or modified CDS sequence (opt5) from neuraminidase__InfluenzaA__ADB89434

SEQ ID NO: 210052 - RNA, 1410 nt, Artificial Sequence; identical to SEQ ID NO: 208810
  derived and/or modified CDS sequence (opt5) from neuraminidase__InfluenzaA__ADB89444

SEQ ID NO: 210053 - RNA, 1410 nt, Artificial Sequence
  derived and/or modified CDS sequence (opt5) from neuraminidase__InfluenzaA__ADB89454
augaaccccaaucagaagaucauuaccaucggcagcgugugcaugacaauugggauggccaaccugauccuccaaauuggaaauaucaucuccauuuggaucucucacagcauucagcugggcaaccagaaucagaucgagacguguaaccaauccgucauuaccuacgaaaauaacacauggguuaaucagaccuaugugaacaucucuaauacaaacuucgcugccgggcagagcguggucuccgugaaacuugcgggaaauucuagccugugcccuguuuccggcugggcuauuuacagcaaggacaacucuaucagaaucggguccaaaggagauguguuugucauucgggagccguucaucagcuguucuccccucgaaugccgcaccuuuuuccugacacagggcgcccuucugaaugacaagcauuccaacggcaccauuaaagauagaagcccuuaucggacgcucaugucuugucccaucggggaggugccuucccccuacaacagccgcuuugaauccguugccuggucugcuagcgccugccacgacggaauuaauuggcugaccaucggcaucuccgggccugauaacggagcuguggccguccugaaguauaauggcauuaucacagacaccauuaagagcuggagaaacaauauccuccggacacaagagucugagugugcgugcgugaacggguccuguuucaccgugaugacggauggaccgaaugacggccaggccagcuacaaaauuuuucgcaucgaaaagggcaaaaucgucaagucuguugagaugaacgcucccaauuaucauuacgaagagugcagcuguuacccugauuccucugagauuacaugcgugugcagagacaacuggcacgggagcaaucggcccuggguguccuucaaccagaaucuggaauaucagaucggauacauuuguagcggcaucuuuggggauaacccucgccccaaugacaaaaccggaucuugcggcccggucuccagcaacggggccaacggagugaagggcuucucuuuuaaguauggcaaugggguuuggauuggaagaacaaaauccaucagcucccggaacggcuucgagaugauuugggauccuaauggguggaccggaaccgacaacaauuuuucuaucaagcaagacaucgugggcauuaacgaauggagcggguacuccggcucuuucguccagcaucccgagcuuacaggacuggauuguauccgcccuugcuucuggguggaacucauuagaggccggcccaaagagaauacgaucuggaccagcggguccagcauuucuuuuuguggaguuaacuccgacacagugggcuggagcuggcccgauggggcugagcugccuuucaccaucgacaaguga

SEQ ID NO: 210054 - RNA, 1410 nt, Artificial Sequence; identical to SEQ ID NO: 208810
  derived and/or modified CDS sequence (opt5) from neuraminidase__InfluenzaA__ADB89464

SEQ ID NO: 210055 - RNA, 1410 nt, Artificial Sequence; identical to SEQ ID NO: 208810
  derived and/or modified CDS sequence (opt5) from neuraminidase__InfluenzaA__ADB89484

SEQ ID NO: 210056 - RNA, 1410 nt, Artificial Sequence; identical to SEQ ID NO: 208810
  derived and/or modified CDS sequence (opt5) from neuraminidase__InfluenzaA__ADB89494

SEQ ID NO: 210057 - RNA, 1410 nt, Artificial Sequence; identical to SEQ ID NO: 208800
  derived and/or modified CDS sequence (opt5) from neuraminidase__InfluenzaA__ADB89504

SEQ ID NO: 210058 - RNA, 1410 nt, Artificial Sequence; identical to SEQ ID NO: 208810
  derived and/or modified CDS sequence (opt5) from neuraminidase__InfluenzaA__ADB89514

SEQ ID NO: 210059 - RNA, 1410 nt, Artificial Sequence; identical to SEQ ID NO: 208810
  derived and/or modified CDS sequence (opt5) from neuraminidase__InfluenzaA__ADB89524

SEQ ID NO: 210060 - RNA, 1410 nt, Artificial Sequence
  derived and/or modified CDS sequence (opt5) from neuraminidase__InfluenzaA__ADB89544
augaaccccaaucagaagaucauuaccaucggcagcgugugcaugacaauugggauggccaaccugauccuccaaauuggaaauaucaucuccauuuggaucucucacagcauucagcugggcaaccagaaucagaucgagacguguaaccaauccgucauuaccuacgaaaauaacacauggguuaaucagaccuaugugaacaucucuaauacaaacuucgcugccgggcagagcguggucuccgugaaacuugcgggaaauucuagccugugcccuguuuccggcugggcuauuuacagcaaggacaacucuaucagaaucggguccaaaggagauguguuugucauucgggagccguucaucagcuguucucuccuggaaugccgcaccuuuuuccuuacacagggcgcccugcucaaugacaagcauuccaacggcaccauuaaagauagaagccccuaucggacgcugaugucuuguccuaucggggaggugcccuccccuuacaacagccgcuuugaauccguugccuggucugcuagcgccugccacgacggaauuaauuggcugaccaucggcaucuccgggcccgauaacggagcuguggccguccucaaguauaauggcauuaucacagacaccauuaagagcuggagaaacaauauccugcggacacaagagucugagugugcgugcgugaacggguccuguuucaccgugaugacggauggaccuagcgacggccaggccucuuacaaaauuuuucgcaucgaaaagggcaaaaucgucaagagcguugagaugaaugcuccgaacuaucauuacgaagagugcuccuguuaccccgauucuagcgagauuacaugcgugugcagagacaauuggcacggguccaaccggccuugggugagcuucaaucagaaccuugaauaucagaucggauacauuuguucuggcaucuuuggggauaauccccgcccuaacgacaaaaccggauccugcggccccgucagcucuaauggggccaacggagugaagggcuucuccuuuaaguauggcaacgggguuuggauuggaagaacaaaaagcaucuccucucggaauggcuucgagaugauuugggauccgaacggguggaccggaaccgacaauaacuuuagcaucaagcaagacaucgugggcauuaaugaaugguccggguacucuggcagcuucguccagcauccugagcugacaggacucgauuguauccgccccugcuucuggguggaacugauuagaggccggccuaaagagaacacgaucuggaccuccgggagcucuauuuccuuuuguggaguuaauagcgacacagugggcuggucuuggcccgauggggcugagcuucccuucaccaucgacaaguga

SEQ ID NO: 210061 - RNA, 1410 nt, Artificial Sequence; identical to SEQ ID NO: 208810
  derived and/or modified CDS sequence (opt5) from neuraminidase__InfluenzaA__ADB89564

SEQ ID NO: 210062 - RNA, 1410 nt, Artificial Sequence; identical to SEQ ID NO: 208810
  derived and/or modified CDS sequence (opt5) from neuraminidase__InfluenzaA__ADB89574

SEQ ID NO: 210063 - RNA, 1410 nt, Artificial Sequence; identical to SEQ ID NO: 208810
  derived and/or modified CDS sequence (opt5) from neuraminidase__InfluenzaA__ADB89594

SEQ ID NO: 210064 - RNA, 1410 nt, Artificial Sequence; identical to SEQ ID NO: 208810
  derived and/or modified CDS sequence (opt5) from neuraminidase__InfluenzaA__ADB89604

SEQ ID NO: 210065 - RNA, 1410 nt, Artificial Sequence
  derived and/or modified CDS sequence (opt5) from neuraminidase__InfluenzaA__ADB89614
augaaccccaaucagaagaucauuaccaucggcagcgugugcaugacaauugggauggccaaccugauccuccaaauuggaaauaucaucuccauuuggaucucucacagcauucagcugggcaaccagaaucagaucgagacguguaaccaauccgucauuaccuacgaaaauaacacauggguuaaucagaccuaugugaacaucucuaauacaaacuucgcugccgggcagagcguggucuccgugaaacuugcgggaaauucuagccugugcccuguuuccggcugggcuauuuacagcaaggacaacucuaucagaaucggguccaaaggagauguguuugucauucgggagccguucaucagcuguucuccccucgaaugccgcaccuuuuuccugacacagggcgcccuucugaaugacaagcauuccaacggcaccauuaaagauagaagcccuuaucggacgcucaugucuugucccaucggggaggugccuucccccuacaacagccgcuuugaauccguugccuggucugcuagcgccugccacgacggaauuaauuggcugaccaucggcaucuccgggccugauaacggagcuguggccguccugaaguauaauggcauuaucacagacaccauuaagagcuggagaaacaauauccuccggacacaagagucugagugugcgugcgugaacggguccuguuucaccgugaugacggauggaccgagcgacggccaggccucuuacaaaauuuuucgcaucgaaaagggcaaaaucgucaagagcguugagaugaaugcucccaacuaucauuacgaagagugcuccuguuacccugauucuagcgagauuacaugcgugugcagagacaauuggcacggguccaaccggcccugggugagcuucaaucagaaccuggaauaucagaucggauacauuuguucuggcaucuuuggggauaauccucgccccaacgacaaaaccggauccugcggcccggucagcucuaauggggccaacggagugaagggcuucuccuuuaaguauggcaacgggauuuggaucggaagaacaaaaagcauuuccucucggaauggcuucgagaugaucugggauccuaacggguggaccggaaccgacaauaacuuuagcaucaagcaagacauuguuggcaucaaugaaugguccggguacucuggcagcuucgugcagcaucccgagcuuacaggacuggauuguauucgcccuugcuucugggucgaacucaucagaggccggcccaaagagaacacgauuuggaccuccgggagcucuaucuccuuuuguggagugaauagcgacacaguuggcuggucuuggcccgauggggcugagcugccuuucaccaucgacaaguga

SEQ ID NO: 210066 - RNA, 1410 nt, Artificial Sequence; identical to SEQ ID NO: 208810
  derived and/or modified CDS sequence (opt5) from neuraminidase__InfluenzaA__ADB89624

SEQ ID NO: 210067 - RNA, 1410 nt, Artificial Sequence; identical to SEQ ID NO: 208810
  derived and/or modified CDS sequence (opt5) from neuraminidase__InfluenzaA__ADB89634

SEQ ID NO: 210068 - RNA, 1410 nt, Artificial Sequence; identical to SEQ ID NO: 208810
  derived and/or modified CDS sequence (opt5) from neuraminidase__InfluenzaA__ADB89644

SEQ ID NO: 210069 - RNA, 1410 nt, Artificial Sequence; identical to SEQ ID NO: 209828
  derived and/or modified CDS sequence (opt5) from neuraminidase__InfluenzaA__ADB89664

SEQ ID NO: 210070 - RNA, 1410 nt, Artificial Sequence; identical to SEQ ID NO: 208810
  derived and/or modified CDS sequence (opt5) from neuraminidase__InfluenzaA__ADB89674

SEQ ID NO: 210071 - RNA, 1410 nt, Artificial Sequence; identical to SEQ ID NO: 208810
  derived and/or modified CDS sequence (opt5) from neuraminidase__InfluenzaA__ADB89684

SEQ ID NO: 210072 - RNA, 1410 nt, Artificial Sequence
  derived and/or modified CDS sequence (opt5) from neuraminidase__InfluenzaA__ADB89694
augaaccccaaucagaagaucauuaccaucggcagcgugugcaugacaauugggauggccaaccugauccuccaaauuggaaauaucaucuccauuuggaucucucacagcauucagcugggcaaccagaaucagaucgagacguguaaccaauccgucauuaccuacgaaaauaacacauggguuaaucagaccuaugugaacaucucuaauacaaacuucgcugccgggcagagcguggucuccgugaaacuugcgggaaauucuagccugugcccuguuuccggcugggcuauuuacagcaaggacaacucuaucagaaucggguccaaaggagauguguuugucauucgggagccguucaucagcuguucuccccucgaaugccgcaccuuuuuccugacacagggcgcccuucugaaugacaagcauuccaacggcaccauuaaagauagaagcccuuaucggacgcucaugucuugucccaucggggaggugccuucccccuacaacagccgcuuugaauccguugccuggucugcuagcgccugccacgacggaauuaauuggcugaccaucggcaucuccgggccugauaacggagcuguggccguccugaaguauaauggcauuaucacagacaccauuaagagcuggagaaacaauauccuccggacacaagagucugagugugcgugcgugaacggguccuguuucaccgugaugacggauggaccgagcgacggccaggccucuuacaaaauuuuucgcaucgaaaagggcaaaaucgucaagagcguugagaugaaugcucccaacuaucauuacgaagagugcuccuguuacccugauucuagcgagauuacaugcgugugcagagacaauuggcacggguccaaccggcccugggugagcuucaaucagaaccuggaauaucagaucggauacauuuguucuggcaucuuuggggauaauccucgccccaacgacaaaaccggauccugcggcccggucagcucuaauggggccaacggagugaagggcuucuccuuuaaguauggcaacgggguuuggauuggaagaacaaaaagcaucuccucucggaauggcuucgagaugauuugggauccuaacggguggaccggaaccgacaauaacuuuacaaucaagcaagacaucgugggcauuaaugaauggagcggguacuccggcucuuucguccagcaucccgagcuuacgggacuggauuguauccgcccuugcuucuggguggaacucauuagaggccggcccaaagagaacaccaucuggacaagcggguccagcauuucuuuuuguggaguuaauuccgacaccgugggcuggagcuggcccgauggggcugagcugccuuucacaaucgacaaguga

SEQ ID NO: 210073 - RNA, 1410 nt, Artificial Sequence; identical to SEQ ID NO: 208810
  derived and/or modified CDS sequence (opt5) from neuraminidase__InfluenzaA__ADB89704

SEQ ID NO: 210074 - RNA, 1410 nt, Artificial Sequence; identical to SEQ ID NO: 208810
  derived and/or modified CDS sequence (opt5) from neuraminidase__InfluenzaA__ADB89714

SEQ ID NO: 210075 - RNA, 1410 nt, Artificial Sequence; identical to SEQ ID NO: 208671
  derived and/or modified CDS sequence (opt5) from neuraminidase__InfluenzaA__ADB89724

SEQ ID NO: 210076 - RNA, 1410 nt, Artificial Sequence; identical to SEQ ID NO: 208671
  derived and/or modified CDS sequence (opt5) from neuraminidase__InfluenzaA__ADB89735

SEQ ID NO: 210077 - RNA, 1410 nt, Artificial Sequence; identical to SEQ ID NO: 208810
  derived and/or modified CDS sequence (opt5) from neuraminidase__InfluenzaA__ADB90357

SEQ ID NO: 210078 - RNA, 1410 nt, Artificial Sequence; identical to SEQ ID NO: 208810
  derived and/or modified CDS sequence (opt5) from neuraminidase__InfluenzaA__ADB90358

SEQ ID NO: 210079 - RNA, 1410 nt, Artificial Sequence
  derived and/or modified CDS sequence (opt5) from neuraminidase__InfluenzaA__ADB90359
augaaccccaaucagaagaucauuaccaucggcagcgugugcaugacaauugggauggccaaccugauccuccaaauuggaaauaucaucuccauuuggaucucucacagcauucagcugggcaaccagaaucagaucgagacguguaaccaauccauuaucaccuacgaaaauaacacaugggucaaucagaccuauguuaacauuucuaauacaaacuucgcugccgggcagagcgugguguccgucaaacuugcgggaaauucuagccugugcccuguguccggcugggcuaucuacagcaaggacaacucuaucagaauuggguccaaaggagauguuuuugugauccgggagccguucauuagcuguucuccccucgaaugccgcaccuuuuuccugacacagggcgcccuucugaaugacaagcauuccaacggcaccaucaaagauagaagcccuuaucggacgcucaugucuugucccauuggggaggucccuucccccuacaacagccgcuuugaauccguggccuggucugcuagcgccugccacgacggaaucaauuggcugaccaucggcauuuccgggccugauaacggagcuguugccgugcugaaguauaauggcaucauuacagacaccaucaagagcuggagaaacaauauucuccggacacaagagucugagugugcgugcgucaacggguccuguuucaccgugaugacggauggaccgagcgacggccaggccucuuacaaaaucuuucgcaucgaaaagggcaaaauugucaagagcguggagaugaaugcucccaacuaucauuacgaagagugcuccuguuacccugauucuagcgagaucacaugcguuugcagagacaauuggcacggguccaaccggcccugggugagcuucaaucagaaccuggaauaucgcauuggauacaucuguucuggcauuuuuggggauaauccuagacccaacgacaaaaccggauccugcggcccggugagcucuaauggggccaacggagucaagggcuucuccuuuaaguauggcaacgggguguggaucggacggacaaaaagcauuuccucucgcaauggcuucgagaugaucugggauccuaacggguggaccggaaccgacaauaacuuuagcaucaagcaggacauuguuggcacaaaugaaugguccggguacucuggcagcuucgugcaacaucccgagcuuacgggacuggauuguaucagaccuugcuucugggucgaacucauucggggccgccccaaagagaacaccaucuggacauccgggagcucuauuuccuuuuguggagugaauagcgacaccguuggcuggucuuggcccgauggggcugagcugccuuucacaaucgacaaguga

SEQ ID NO: 210080 - RNA, 1410 nt, Artificial Sequence; identical to SEQ ID NO: 208810
  derived and/or modified CDS sequence (opt5) from neuraminidase__InfluenzaA__ADB90363

SEQ ID NO: 210081 - RNA, 1410 nt, Artificial Sequence; identical to SEQ ID NO: 209987
  derived and/or modified CDS sequence (opt5) from neuraminidase__InfluenzaA__ADB90373

SEQ ID NO: 210082 - RNA, 1410 nt, Artificial Sequence; identical to SEQ ID NO: 208810
  derived and/or modified CDS sequence (opt5) from neuraminidase__InfluenzaA__ADB98137

SEQ ID NO: 210083 - RNA, 1410 nt, Artificial Sequence; identical to SEQ ID NO: 209164
  derived and/or modified CDS sequence (opt5) from neuraminidase__InfluenzaA__ADB98138

SEQ ID NO: 210084 - RNA, 1410 nt, Artificial Sequence; identical to SEQ ID NO: 208810
  derived and/or modified CDS sequence (opt5) from neuraminidase__InfluenzaA__ADB98139

SEQ ID NO: 210085 - RNA, 1410 nt, Artificial Sequence; identical to SEQ ID NO: 209164
  derived and/or modified CDS sequence (opt5) from neuraminidase__InfluenzaA__ADB98140

SEQ ID NO: 210086 - RNA, 1410 nt, Artificial Sequence; identical to SEQ ID NO: 209164
  derived and/or modified CDS sequence (opt5) from neuraminidase__InfluenzaA__ADB98141

SEQ ID NO: 210087 - RNA, 1410 nt, Artificial Sequence; identical to SEQ ID NO: 208810
  derived and/or modified CDS sequence (opt5) from neuraminidase__InfluenzaA__ADC32391

SEQ ID NO: 210088 - RNA, 1410 nt, Artificial Sequence; identical to SEQ ID NO: 208810
  derived and/or modified CDS sequence (opt5) from neuraminidase__InfluenzaA__ADC32392

SEQ ID NO: 210089 - RNA, 1410 nt, Artificial Sequence; identical to SEQ ID NO: 208810
  derived and/or modified CDS sequence (opt5) from neuraminidase__InfluenzaA__ADC32393

SEQ ID NO: 210090 - RNA, 1410 nt, Artificial Sequence; identical to SEQ ID NO: 208810
  derived and/or modified CDS sequence (opt5) from neuraminidase__InfluenzaA__ADC32394

SEQ ID NO: 210091 - RNA, 1410 nt, Artificial Sequence; identical to SEQ ID NO: 208810
  derived and/or modified CDS sequence (opt5) from neuraminidase__InfluenzaA__ADC32395

SEQ ID NO: 210092 - RNA, 1410 nt, Artificial Sequence; identical to SEQ ID NO: 208810
  derived and/or modified CDS sequence (opt5) from neuraminidase__InfluenzaA__ADC32396

SEQ ID NO: 210093 - RNA, 1410 nt, Artificial Sequence; identical to SEQ ID NO: 208810
  derived and/or modified CDS sequence (opt5) from neuraminidase__InfluenzaA__ADC32397

SEQ ID NO: 210094 - RNA, 1410 nt, Artificial Sequence; identical to SEQ ID NO: 208810
  derived and/or modified CDS sequence (opt5) from neuraminidase__InfluenzaA__ADC32398

SEQ ID NO: 210095 - RNA, 1410 nt, Artificial Sequence; identical to SEQ ID NO: 208810
  derived and/or modified CDS sequence (opt5) from neuraminidase__InfluenzaA__ADC32399

SEQ ID NO: 210096 - RNA, 1410 nt, Artificial Sequence; identical to SEQ ID NO: 208810
  derived and/or modified CDS sequence (opt5) from neuraminidase__InfluenzaA__ADC32400

SEQ ID NO: 210097 - RNA, 1410 nt, Artificial Sequence; identical to SEQ ID NO: 208810
  derived and/or modified CDS sequence (opt5) from neuraminidase__InfluenzaA__ADC32401

SEQ ID NO: 210098 - RNA, 1410 nt, Artificial Sequence
  derived and/or modified CDS sequence (opt5) from neuraminidase__InfluenzaA__ADC32404
augaaccccaaucagaagaucauuaccaucggcagcgugugcaugacaauugggauggccaaccugauccuccaaauuggaaauaucaucuccauuuggaucucucacagcauucagcugggcaaccagaaucagaucgagacguguaaccaauccgucauuaccuacgaaaauaacacauggguuaaucagaccuaugugaacaucucuaauacaaacuucgcugccgggcagagcguggucuccgugaaacuugcgggaaauucuagccugugcccuguuuccggcugggcuauuuacagcaaggacaacucuaucagaaucggguccaaaggagauguguuugucauucgggagccguucaucagcuguucuccccucgaaugccgcaccuuuuuccugacacagggcgcccuucugaaugacaagcauuccaacggcaccauuaaagauagaagcccuuaucggacgcucaugucuugucccaucggggaggugccuucccccuacaacagccgcuuugaauccguugccuggucugcuagcgccugccacgacggaauuaauuggcugaccaucggcaucuccgggccugauaacggagcuguggccguccugaaguauaauggcauuaucacagacaccauuaagagcuggagaaacaauauccuccggacacaagagucugagugugcgugcgugaacggguccuguuucaccgugaugacggauggaccgagcgacggccaggccucuuacaaaauuuuucgcaucgaaaagggcaaaaucgucaagagcguugagaugaaugcucccaacuaucauuacgaagagugcuccuguuacccugauucuagcgagauuacaugcgugugcagagacaauuggcacggguccaaccggcccugggugagcuucaaucagaaccuggaauaucagaucggauacauuuguucuggcaucuuuggggauaauccucgccccaacgacaaaaagggauccugcggcccggucagcucuaauggggccaacggagugaagggcuucuccuuuaaauauggcaacgggguuuggauuggaagaaccaagagcaucuccucucggaauggcuucgagaugauuugggauccuaacggguggacaggaaccgacaauaacuuuagcaucaaacaagacaucgugggcauuaaugaaugguccggguacucuggcagcuucguccagcaucccgagcuuaccggacuggauuguauccgcccuugcuucuggguggaacucauuagaggccggcccaaggagaacacaaucuggacguccgggagcucuauuuccuuuuguggaguuaauagcgacaccgugggcuggucuuggcccgauggggcugagcugccuuucacaaucgacaaauga

SEQ ID NO: 210099 - RNA, 1410 nt, Artificial Sequence
  derived and/or modified CDS sequence (opt5) from neuraminidase__InfluenzaA__ADC32407
augaaccccaagcagaaaaucauuaccaucggcagcgugugcaugacaauugggauggccaaucugauccuccaaauuggaaacaucaucuccauuuggaucucucacagcauucagcugggcaaucagaaccagaucgagacguguaaucaauccgucauuaccuacgaaaacaauacauggguuaaccagaccuaugugaauaucucuaacacaaauuucgcugccgggcagagcguggucuccgugaaacuugcgggaaacucuagccugugcccuguuuccggcugggcuauuuacagcaaggacaauucuaucagaaucggguccaagggagauguguuugucauucgggagccguucaucagcuguucuccccucgaaugccgcaccuuuuuccugacacagggcgcccuucugaacgacaaacauuccaauggcaccauuaaggauagaagcccuuaucggacgcucaugucuugucccaucggggaggugccuucccccuacaacagccgcuuugaauccguugccuggucugcuagcgccugccacgacggaauuaacuggcugaccaucggcaucuccgggccugauaauggagcuguggccguccugaaguauaacggcauuaucacagacaccauuaaaagcuggagaaauaacauccuccggacacaagagucugagugugcgugcgugaauggguccuguuucaccgugaugacggauggaccgagcgacggccaggccucuuacaagauuuuucgcaucgaaaaaggcaagaucgucaaaagcguugagaugaacgcucccaauuaucauuacgaagagugcuccuguuacccugauucuagcgagauuacaugcgugugcagagacaacuggcacggguccaaucggcccugggugagcuucaaccagaaucuggaauaucagaucggauacauuuguucuggcaucuuuggggauaacccucgccccaaugacaagaagggauccugcggcccggucagcucuaacggggccaauggagugaaaggcuucuccuuuaaguauggcaacgggguuuggauuggaagaaccaaaagcaucuccucucggaacggcuucgagaugauuugggauccuaauggguggacaggaaccgacaacaauuuuagcaucaagcaagacaucgugggcauuaacgaaugguccggguacucuggcagcuucguccagcaucccgagcuuaccggacuggauuguauccgcccuugcuucuggguggaacucauuagaggccggcccaaagagaauacaaucuggacguccgggagcucuauuuccuuuuguggaguuaacagcgacaccgugggcuggucuuggcccgauggggcugagcugccuuucacaaucgacaaguga

SEQ ID NO: 210100 - RNA, 1410 nt, Artificial Sequence
  derived and/or modified CDS sequence (opt5) from neuraminidase__InfluenzaA__ADC34942
augaaccccaaucagaagaucauuaccaucggcagcgugucccugacaauuucuacgaucugcuucuuuaugcaaauugccauccucaucaccacagucacccugcacuucaaacaguacgaguuuaacccuccgcccaauaaccagguuaugcuuugugaaccuacaauuaucgagagaaauauuaccgaaaucguguaucugacaaacaccacgauugagaaggaaaucugccccaaacucgcugaguaccgggaguggagcaagccucaguguaauauuaccggguucgcccccuuuuccaaagacaacucuauccgccugagcgcgggaggcgauaucugggugacaagagaaccuuaugucuccugcgacccggauaaguguuaccaauucgcucuugggcagggaaccacacugaauaacgugcauucuaaugacauuguucgggaucgcacccccuauagaacgcuccugaugaacgagcugggcgugccuuuucaccucgggacaaagcaggucugcaucgccuggagcuccagcucuugucaugacggaaaagccuggcugcacgugugcguuaccggcgaugacaagaaugcuacagccuccuucauuuacaacggccggcuuguggauagcaucgucucuugguccaaagaaauucugcgcacccaggagagcgagugugugugcaucaaugggaccuguacaguggucaugacggacggaucugcuuccggcaaggccgauaccaaaauccucuuuauugaagaggggaagaucguucauacaagcacccuguccggaucugcgcaacacguggaagagugcagcugcuaucccagauacccuggcgugcggugugucugccgcgacaacuggagaggguccaaccggcccauuguggauaucaauaugaaggacuacagcauuguuucuuccuauguguguagcggacuugucggcgacacaccgcgcaaaaacgauucuagcuccucuggccacugccugaauccuaacaaugaagaagggggacauggcgugaaggggugggccuucgacgauggaaacgacguuuggaugggcagaaccaucagcgagaaacuccgguccggguacgagacguuuaaggugaucgagggauggagcaaucccaacucuaaacugcagauuaaucgccaggucaucguggauagaggcaaccgguccggcuauagcgggauuuucucugucgaaggaaaguccuguaucaauagaugcuuuuacguggagcugauucgcggccggaaagaagagacagagguucucuggaccagcaacuccaucguggucuucugugggaccucuggaacauauggcaccgggagcuggccugacggcgcugauauuaaucugaugcccaucuga

SEQ ID NO: 210101 - RNA, 1410 nt, Artificial Sequence
  derived and/or modified CDS sequence (opt5) from neuraminidase__InfluenzaA__ADC39000
augaaccccaaucagaagaucauuaccaucggcagcgugugcaugacaauugggauggccaaccugauccuccaaauuggaaauaucaucuccauuuggaucucucacagcauucagcugggcaaccagaaucagaucgagacguguaaccaauccgucauuaccuacgaaaauaacacauggguuaaucagaccuaugugaacaucucuaauacaaacuucgcugccgggcagagcguggucuccgugaaacuugcgggaaauucuagccugugcccuguuuccggcugggcuauuuacagcaaggacaacucuaucagaaucggguccaaaggagauguguuugucauucgggagccguucaucagcuguucuccccucgaaugccgcaccuuuuuccugacacagggcgcccuucugaaugacaagcauuccaacggcaccauuaaagauagaagcccuuaucggacgcucaugucuugucccaucggggaggugccuucccccuacaacagccgcuuugaauccguugccuggucugcuagcgccugccacgacggaauuaauuggcugaccaucggcaucuccgggccugauaacggagcuguggccguccugaaguauaauggcauuaucacagacaccauuaagagcuggagaaacaauauccuccggacacaagagucugagugugcgugcgugaacggguccuguuucaccgugaugacggauggaccgagcgacggccaggccucuuacaaaauuuuucgcaucgaaaagggcaaaaucgucaagagcguugagaugaaugcucccaacuaucauuacgaagagugcuccuguuacccugauucuagcgagauuacaugcgugugcagagacaauuggcacggguccaaccggcccugggugagcuucaaucagaaccuggaauaucagaucggauacauuuguucuggcaucuuuggggauaauccucgccccaacgacaaaaccggauccugcggcccggucagcucuaauggggccaacggagugaagggcuucuccuuuaaguauggcaacgggguuuggauuggaagaacaaaaagcaucuccucucggaauggcuucgagaugauuugggauccuaacggguggaccggaaccgacaauaacuuuagcaucaagcaagacaucgugggcauuaaugaaugguccggguacucuggcagcuucguccagcaucccgagcuuacaggacuggauuguauccgcccuugcuucuggguggaacucauuagaggccggcccaaagagaacacgaucuggaccuccgggagcucuauuuccuuuuguggaguuaauagcgacaacgugggcuggucuuggcccgauggggcugagcugccuuucacaaucgacaaguga

SEQ ID NO: 210102 - RNA, 1410 nt, Artificial Sequence; identical to SEQ ID NO: 208810
  derived and/or modified CDS sequence (opt5) from neuraminidase__InfluenzaA__ADC39010

SEQ ID NO: 210103 - RNA, 1413 nt, Artificial Sequence; identical to SEQ ID NO: 208704
  derived and/or modified CDS sequence (opt5) from neuraminidase__InfluenzaA__ADC45606

SEQ ID NO: 210104 - RNA, 1413 nt, Artificial Sequence
  derived and/or modified CDS sequence (opt5) from neuraminidase__InfluenzaA__ADC45628
augaaccccaaucagaagaucauuaccaucggcagcauuuccaucgccauugggaucaucucucugaugcuccaaaugggaaacauuaucagcauuugggcuucccacucuauccagacaggcagccagaaucauacggggauuugcaaccagagaaucauuaccuacgaaaauuccacaugggugaaccacaccuaugucaauaucaacaauacaaacguuguggccggaaaagacaagaccccugugacacuggucggcaauucuagccuuuguuccaucagcgggugggcgauuuacaccaaagauaacucuauccggauuggauccaagggcgacguguucguuauccgcgagccguuuauuagcugcucucaucuggaguguaaaacguucuuucucacccaaggcgcucugcuuaaugauaagcacuccaacgggacagugaaggacagaagccccuaucgggcccugaugucuugcccucucggagaagcccccuccccuuacaauagcaaauucgaguccgucgcuuggucugccagcgcuugucaugauggcaucggguggcugaccaucggaauuuccggccccgacaacggggccguggcgguucugaaguauaaaggaaucauuacaggcaccaucaagagcuggaaaaagcagauucuccgcacgcaggaaucugagugcguguguaugaacggcuccugcuuuacaaucaugaccgaugggccuagcaauggagccgcuucuuacaagaucuucaaaauugagaagggcaaagucacaaagagcauggaacugaacgccccgaauuuucacuaugaggaauguuccugcuaccccgacaccgggaccgugaugugugugugcagagauaacuggcacggaucuaaucggccuugggucagcuucaaccagaaucuugacuaccaaaucggcuauauuugcuccgggguuuuuggagauaacccccgcccuaaagacagagagggcagcuguaaucccgugacaguggauggcgcuaacggggucaagggauucucuuacaaauauggcaaugggguguggaucggacggacgaaguccaaccgcauuagaaagggcuuugagaugaucugggacccgaauggguggaccaacacagacagcgauuucucuguuaaacaggacauuguggccaucaccgauugguccggcuacagcggauccuuuguccagcauccugaacugacaggccucgacugcauccggcccuguuucuggguggagcugguucgcgggcuuccuagagaaaauaccacgauuuggacaucuggaagcuccaucucuuucugcggcgugaacggggauauugcgaacuggagcuggcccgacggagccgagcugcccuuuaccaucgauaaguga

SEQ ID NO: 210105 - RNA, 1413 nt, Artificial Sequence
  derived and/or modified CDS sequence (opt5) from neuraminidase__InfluenzaA__ADC45639
augaaccccaaucagaagaucauuaccaucggcagcauuuccaucgccauugggaucaucucucugaugcuccaaauuggaaacaucauuagcaucugggcuucccacucuauucagacaggcagccagaaucauacggggaucugcaaccagagaauuaucaccuacgaaaauuccacaugggugaaccacaccuaugucaauaucaacaauacaaacguuguggccggaaaagacaagaccccugugacacuggucggcaauucuagccuuuguuccauuagcgggugggcgaucuacaccaaagauaacucuauucggaucggauccaagggcgacguguucguuauucgcgagccguuuaucagcugcucucaucuggaguguaaaacguucuuucucacccaaggcgcucugcuuaaugauaagcacuccaacgggacagugaaggacagaagccccuaucgggcccugaugucuugcccucucggagaagcccccuccccuuacaauagcaaauucgaguccgucgcuuggucugccagcgcuugucaugauggcaucggguggcugaccauuggaguguccggccccgacaacggggccguugcggugcugaaguauaaaggaaucauuacaggcaccaucaagagcuggaaaaagcagauucuccgcacgcaggaaucugagugcgucuguaugaacggcuccugcuuuacaaucaugaccgaugggccuagcaauggagccgcuucuuacaagaucuucaaaauugagaagggcaaagugacaaagagcauggaacugaacgccccgaauuuucacuaugaggaauguuccugcuaccccgacaccgggaccgugaugugugucugcagagauaacuggcacggaucuaaucggccuuggguuagcuucaaccagaaucuugacuaccaaaucggcuauauuugcuccgggguguuuggagauaacccccgcccuaaagacagagagggcagcuguaaucccgugacagucgauggcgcuaacggggugaagggauucucuuacaaauauggcaaugggguuuggaucggacggacgaaguccaaccgcauuagaaagggcuuugagaugaucugggacccgaauggguggaccaacacagacagcgauuucucugugaaacaggacauugucgccaucaccgauugguccggcuacagcggauccuuugugcagcauccugaacugacaggccucgacugcauccggcccuguuucuggguugagcuggugcgcgggcuuccuagagaaaauaccacgauuuggacaucuggaagcuccaucucuuucugcggcgucaacggggauauugcgaacuggagcuggcccgacggagccgagcugcccuuuaccaucgauaaguga

SEQ ID NO: 210106 - RNA, 1413 nt, Artificial Sequence; identical to SEQ ID NO: 208704
  derived and/or modified CDS sequence (opt5) from neuraminidase__InfluenzaA__ADC45650

SEQ ID NO: 210107 - RNA, 1413 nt, Artificial Sequence; identical to SEQ ID NO: 208704
  derived and/or modified CDS sequence (opt5) from neuraminidase__InfluenzaA__ADC45661

SEQ ID NO: 210108 - RNA, 1413 nt, Artificial Sequence
  derived and/or modified CDS sequence (opt5) from neuraminidase__InfluenzaA__ADC45683
augaaccccaaucagaagaucauuaccaucggcagcauuuccaucgccauugggaucaucucucugaugcuccaaauuggaaacaucauuagcaucugggcuucccacucuauucagacaggcagccagaaucauacggggaucugcaaccagagaauuaucaccuacgaaaauuccacaugggugaaccacaccuaugucaauaucaacaauacaaacguuguggccggagaggacaaaaccccugugacacuggucggcaauucuagccuuuguuccauuagcgggugggcgaucuacaccaaggauaacucuauucggaucggauccaaaggcgacguguucguuauucgcgagccguuuaucagcugcucucaucuggaauguaagacguucuuucucacccaaggcgcucugcuuaaugauaaacacuccaacgggacagugaaggacagaagccccuaucgggcccugaugucuugcccucucggagaggcccccuccccuuacaauagcaaguucgaauccgucgcuuggucugccagcgcuugucaugauggcaucggguggcugaccauuggaaucuccggccccgacaacggggccguggcgguucugaaauauaagggaauuaucacaggcaccauuaaaagcuggaagaaacagauccuccgcacgcaggagucugagugcguguguaugaacggcuccugcuuuacaaucaugaccgaugggccuagcaauggagccgcuucuuacaagauuuucaagaucgaaaaaggcaaggucacaaaaagcauggagcugaacgccccgaauuuucacuaugaagaguguuccugcuaccccgacaccgggaccgugaugugugugugcagagauaacuggcacggaucuaaucggccuugggucagcuucaaccagaaucuugacuaccaaauuggcuauaucugcuccgggguuuuuggagauaacccccgcccuaaggacagagagggcagcuguaaucccgugacaguggauggcgcuaacggggucaaaggauucucuuacaaguauggcaaugggguguggauuggacggacgaaauccaaccgcaucagaaagggcuuugaaaugauuugggacccgaauggguggaccaacacagacagcgauuucucuguuaagcaggacaucguggccaucaccgauugguccggcuacagcggauccuuuguccagcauccugagcugacaggccucgacugcauucggcccuguuucuggguggaacugguucgcgggcuuccuagagagaauaccacgaucuggacaucuggaagcuccauuucuuucugcggcgugaacggggauaucgcgaacuggagcuggcccgacggagccgaacugcccuuuaccauugauaaauga

SEQ ID NO: 210109 - RNA, 1413 nt, Artificial Sequence
  derived and/or modified CDS sequence (opt5) from neuraminidase__InfluenzaA__ADC45705
augaaccccaaucagaagaucauuaccaucggcagcauuuccaucgccauugggaucaucucucugaugcuccaaauuggaaacaucauuagcaucugggcuucccacucuauucagacaggcagccagaauaacacggggaucugcaaucagagaauuaucaccuacgagaacuccacaugggugaaucauaccuaugucaacaucaauaacacaaauguuguggccggagaagacaaaaccucugugacacuggcgggcaacagcucccuuuguagcauuucugggugggcuaucuacaccaaggauaauuccauucggaucggaagcaaaggcgacgucuucgugauucgcgagccuuuuaucucuugcucccaccuggaauguagaacguucuuucucacccaaggcgcccugcuuaacgauaagcauagcaaugggacaguuaaaaaccggucuccguaucgcgcccugauguccugcccccucggagaggcuccuagccccuacaacuccaaguucgaaucuguggccuggagcgcuuccgccugucacgacggcaugggguggcugaccaucggaauuagcggcccugauaauggggcggucgccgugcugaaguauaacggaaucauuacaggcaccaucaaaucuuggaagaaacagauucucagaacgcaggaguccgagugcguuuguaugaauggcagcugcuuuacaaucaugaccgacgggcccucuaacaaggcugccagcuacaaaaucuucaagauugaaaagggaaaagugacaaaguccaucgagcugaaugcuccuaacuuucauuaugaagaguguucuugcuacccggauaccggcauugucaugugugugugccgggacaauuggcacgggagcaaccgccccuggguguccuucaaucagaaccuugauuaccaaaucggauauauuugcagcggcgucuuuggggacaauccuagacccgaggauggagaaggcucuuguaacccuguuaccguggacggcgccaauggggugaaaggauucuccuacaaguaugauaacggcgucuggaucgggcggacaaaaagcaaucgccugagaaagggauuugagaugauuugggaccccaacggcuggacgaacaccgacucugauuucuccgugaaacaggacguuguggcgaucacagauuggagcggguacuccggcucuuuuguccagcacccggaacucaccggacuggacugcauccggccuuguuucuggguggagcuuguucgcggccugcccagagaaaauacaaccauuuggacgagcggguccucuaucagcuucugcggagugaacuccgauacagccaauuggagcuggccugacggcgcugagcuccccuuuaccauugauaaguga

SEQ ID NO: 210110 - RNA, 1413 nt, Artificial Sequence
  derived and/or modified CDS sequence (opt5) from neuraminidase__InfluenzaA__ADC45716
augaaccccaaucagaagaucauuaccaucggcagcauuuccaucgccauugggaucaucucucugaugcuccaaauuggaaacaucauuagcaucugggcuucccacucuauucagacaggcagccagaaucauacggggaucugcaaccagagaauuaucaccuacgaaaauuccacaugggugaaccacaccuaugucaauaucaacaauacaaacguuguggccggaaaagacaagaccccugugacacuggucggcaauucuagccuuuguuccauuagcgggugggcgaucuacaccaaagauaacucuauucggaucggauccaagggcgacguguucguuauucgcgagccguuuaucagcugcucucaucuggaguguaaaacguucuuucucacccaaggcgcucugcuuaaugauaagcacuccaacgggacagugaaggacagaagccccuaucgggcccugaugucuugcccucucggagaagcccccuccccuuacaauagcaaauucgaguccgucgcuuggucugccagcgcuugucaugauggcaucggguggcugaccauuggaaucuccggccccgacaacggggccguggcgguucugaaguauaaaggaauuaucacaggcaccauuaagagcuggaaaaagcagauccuccgcacgcaggaaucugagugcguguguaugaacggcuccugcuuuacaaucaugaccgaugggccuagcaauggagccgcuucuuacaagauuuucaaaaucgagaagggcaaagucacaaagagcauggaacugaacgccccgaauuuucacuaugaggaauguuccugcuaccccgacaccgggaccgugaugugugugugcagagauaacuggcacggaucuaaucggccuugggucagcuucaaccagaaucuugacuaccaaauuggcuauaucugcuccgggguuuuuggagauaacccccgcccuaaagacagagagggcagcuguaaucccgugacaguggauggcgcuaacggggucgagggauucucuuacaaguauggcaaugggguguggauuggacggacgaaauccaaccgcaucagaaagggcuuugaaaugauuugggacccgaauggguggaccaacacagacagcgauuucucuguuaagcaggacaucguggccaucaccaauugguccggcuacagcggauccuuuguccagcauccugagcugacaggccucgauugcauucggcccuguuucuggguggaacugguucgcgggcuuccuagagagaacaccacgaucuggacaucuggaagcuccauuucuuucugcggcgugaacggggacaucgcgaauuggagcuggcccgauggagccgaacugcccuuuaccauugacaaauga

SEQ ID NO: 210111 - RNA, 1413 nt, Artificial Sequence
  derived and/or modified CDS sequence (opt5) from neuraminidase__InfluenzaA__ADC45738
augaaccccaaucagaagaucauuaccaucggcagcauuuccaucgccauugggaucaucucucugaugcuccaaauuggaaacaucauuagcaucugggcuucccacucuauucagacaggcagccagaauaacacggggaucugcaaucagagaauuaucaccuacgagaacuccacaugggugaaucauaccuaugugaacaucaauaacacaaauguuguggccggagaagacaaaaccucugugacacuggcgggcaacagcucccuuuguagcauuucugggugggcuaucuacaccaaggauaauuccauucggaucggaagcaaaggcgacgucuucgugauucgcgagccuuuuaucucuugcucccaccuggaauguagaacguucuuucucacccaaggcgcccugcuuaacgauaagcauagcaaugggacaguuaaagaccggucuccguaucgcgcccugauguccugcccccucggagaggcuccuagccccuacaacuccaaguucgaaucuguggccuggagcgcuuccgccugucacgauggcaugggguggcugaccaucggaauuagcggcccugacaacggggcggucgccgugcugaaguauaauggaaucauuacaggcaccaucaaaucuuggaagaaacagauucucagaacgcaggaguccgagugcguuuguaugaacggcagcugcuuuacaaucaugaccgaugggcccucuaauaaggcugccagcuacaaaaucuucaagauugaaaagggaaaagugacaaaguccaucgagcugaacgcuccuaauuuuuauuacgaagaguguucuugcuacccggacaccggcauugucaugugugugugccgggauaacuggcaugggagcaaucgccccuggguguccuucaaccagaaucuugacuaucaaaucggauacauuugcagcggcgucuuuggggauaacccuagacccgaggacggagaaggcucuuguaauccuguuaccguggauggcgccaacggggugaaaggauucuccuauaaguacgacaauggcgucuggaucgggcggacaaaaagcaaccgccugagaaagggauuugagaugauuugggaccccaauggcuggacgaacaccgauucugacuucuccgugaaacaggauguuguggcgaucacagacuggagcggguauuccggcucuuuuguccagcacccggaacucaccggacuggauugcauccggccuuguuucuggguggagcuuguucgcggccugcccagagaaaacacaaccauuuggacgagcggguccucuaucagcuucugcggagucaauuccgacacagccaacuggagcuggccugauggcgcugagcuccccuuuaccauugacaaguga

SEQ ID NO: 210112 - RNA, 1413 nt, Artificial Sequence
  derived and/or modified CDS sequence (opt5) from neuraminidase__InfluenzaA__ADC45760
augaaccccaaucagaagaucauuaccaucggcagcauuuccaucgccauugggaucaucucucugaugcuccaaauuggaaacaucauuagcaucugggcuucccacucuauucagacaggcagccagaauaacacggggaucugcaaucagagaauuaucaccuacgagaacuccacaugggugaaucauaccuaugucaacaucaauaacacaaauguuguggccggagaagacaaaaccucugugacacuggcgggcaacagcucccuuuguagcauuucugggugggcuaucuacaccaaggauaauuccauucggaucggaagcaaaggcgacgucuucgugauucgcgagccuuuuaucucuugcucccaccuggaauguagaacguucuuucucacccaaggcgcccugcuuaacgauaagcauagcaaugggacagccaaagaccggucuccguaucgcgcucugauguccugcccccucggagaggccccuagccccuacaacuccaaguucgaaucuguugcuuggagcgccuccgcgugucacgauggcaugggguggcugaccaucggaauuagcggcccugacaacggggccguggcuguccugaaguauaauggaaucauuacaggcaccaucaaaucuuggaagaaacagauucucagaacgcaggaguccgagugcguguguaugaacggcagcugcuuuacaaucaugaccgaugggcccucuaauaaggccgcuagcuacaaaaucuucaagauugaaaagggaaaaguuacaaaguccaucgagcugaacgccccuaauuuuuauuacgaagaguguucuugcuacccggacaccggcauugugaugugugucugccgggauaacuggcaugggagcaaucgccccuggguguccuucaaccagaaucuugacuaucaaaucggauacauuugcagcggcguguuuggggauaacccuagacccgaggacggagaaggcucuuguaauccugucaccguugauggcgcgaacggggugaaaggauucuccuauaaguacggcaaugggguguggaucggacggacaaaaagcaaccgccugagaaagggcuuugagaugauuugggaccccaauggguggacgaacaccgacucugauuucuccgucaaacaggacgugguugccaucacagauuggagcggcuauuccggaucuuuugugcagcacccggaacucaccggccuggggugcauccggccuuguuucugggucgagcuugugcgcggacugcccagagaaaacacaaccauuuggacgagcggcuccucuaucagcuucugcgggguuaauuccgacacagcuaacuggagcuggccugauggagccgagcuccccuuuaccauugacaaguga

SEQ ID NO: 210113 - RNA, 1413 nt, Artificial Sequence
  derived and/or modified CDS sequence (opt5) from neuraminidase__InfluenzaA__ADC45771
augaaccccaaucagaagaucauuaccaucggcagcauuuccaucgccauugggaucaucucucugaugcuccaaauuggaaacaucauuagcaucugggcuucccacucuauucagacaggcagccagaauaacacggggaucugcaaucagagaauuaucaccuacgagaacuccacaugggugaaucauaccuaugucaacaucaauaacacaaauguuguggccggagaagacaaaaccucugugacacuggcgggcaacagcucccuuuguagcauuucugggugggcuaucuacaccaaggauaauuccauucggaucggaagcaaaggcgacgucuucgugauucgcgagccuuuuaucucuugcucccaccuggaauguagaacguucuuucucacccaaggcgcccugcuuaacgauaagcauagcaaugggacaguuaaagaccggucuccguaucgcgcccugauguccugcccccucggagaggcuccuagccccuacaacuccaaguucgaaucuguggccuggagcgcuuccgccugucacgauggcaugggguggcugaccaucggaauuagcggcccugacaacggggcggucgccgugcugaaguauaauggaaucauuacaggcaccaucaaaucuuggaagaaacagauucucagaacgcaggaguccgagugcguuuguaugaacggcagcugcuuuacaaucaugaccgaugggcccucuaauaaggcugccagcuacaaaaucuucaagauugaaaagggaaaagugacaaaguccaucgagcugaacgcuccuaauuuuuauuacgaagaguguucuugcuacccggacaccggcauugucaugugugugugccgggauaacuggcaugggagcaaucgccccuggguguccuucaaccagaaucuugacuaucaaaucggauacauuugcagcggcgucuuuggggauaacccuagacccgaggacggagaaggcucuuguaauccuguuaccguggauggcgccaacggggugaaaggauucuccuauaaguacggcaauggggucuggaucggacggacaaaaagcaaccgccugagaaagggcuuugagaugauuugggaccccaauggguggacgaacaccgacucugauuucuccaugaaacaggacgugguugcgaucacagauuggagcggcuauuccggaucuuuugugcagcacccggaacucaccggccuggacugcauccggccuuguuucugggucgagcuugugcgcgggcugcccagagaaaacacaaccauuuggacgagcggauccucuaucagcuucugcggcguuaauuccgauacagccaacuggagcuggccugacggggcugagcuccccuuuaccauugauaaguga

SEQ ID NO: 210114 - RNA, 1413 nt, Artificial Sequence
  derived and/or modified CDS sequence (opt5) from neuraminidase__InfluenzaA__ADC45782
augaaccccaaucagaagaucauuaccaucggcagcauuuccaucgccauugggaucaucucucugaugcuccaaauuggaaacaucauuagcaucugggcuucccacucuauucagacaggcagccagaauaacacggggaucugcaaucagagaauuaucaccuacgagaacuccacaugggugaaucauaccuaugucaacaucaauaacacaaauguuguggccggagaagacaaaaccucugugacacuggcgggcaacagcucccuuuguagcauuucugggugggcuaucuacaccaaggauaauuccauucggaucggaagcaaaggcgacgucuucgugauucgcgagccuuuuaucucuugcucccaccuggaauguagaacguucuuucucacccaaggcgcccugcuuaacgauaagcauagcaaucggacaguuaaagaccgcucuccguauagagcccugauguccugcccccucggggaggcuccuagccccuacaacuccaaguucgaaucuguggccuggagcgcuuccgccugucacgauggaaugggcuggcugaccaucgggauuagcggaccugacaacggcgcggucgccgugcugaaguauaaugggaucauuacaggaaccaucaaaucuuggaagaaacagauucuccggacgcaggaguccgagugcguuugugugaacggcagcugcuuuacaaucaugaccgauggccccucuaauaaggcugccagcuacaaaaucuucaagauugaaaaggggaaagucacaaaguccaucgagcugaacgcuccuaauuuuuauuacgaagaguguucuugcuacccggacaccggaauugugaugugugugugccgcgauaacuggcauggcagcaauagacccugggucuccuucaaccagaaucuugacuaucaaaucggguacauuugcagcggaguuuuuggcgauaacccucggcccgaggacggggaaggaucuuguaauccugugaccguggauggcgccaacggcgucaaaggguucuccuauaaguacggaaauggcguguggaucgggcgcacaaaaagcaacagacugcggaagggauuugagaugauuugggaccccaauggcuggacgaacaccgacucugauuucuccguuaaacaggacguggucgcgaucacagauuggagcggguauuccggcucuuuugugcagcacccggaacucaccggacuggacugcauccgcccuuguuucuggguugagcuugugagaggccugccccgggaaaacacaaccauuuggacgagcggguccucuaucagcuucugcggagucaauuccgauacagccaacuggagcuggccugacggcgcugagcuccccuuuaccauugauaaguga

SEQ ID NO: 210115 - RNA, 1413 nt, Artificial Sequence
  derived and/or modified CDS sequence (opt5) from neuraminidase__InfluenzaA__ADC45804
augaaccccaaucagaagaucauuaccaucggcagcauuuccaucgccauugggaucaucucucugaugcuccaaauuggaaacaucauuagcaucugggcuucccacucuauucagacaggcagccagaauaacacggggaucugcaaucagagaauuaucaccuacgagaacuccacaugggugaaucauaccuaugucaacaucaauaacacaaauguuguggccggagaagacaaaaccucugugacacuggcgggcaacagcucccuuuguagcauuucugggugggcuaucuacaccaaggauaauuccauucggaucggaagcaaaggcgacgucuucgugauucgcgagccuuuuaucucuugcucccaccuggaauguagaacguucuuucucacccaaggcgcccugcuuaacgauaagcauagcaaugggacaguuaaagaccggucuccguaucgcgcccugauguccugcccccucggagaggcuccuagccccuacaacuccaaguucgaaucuguggccuggagcgcuuccgccugucacgauggcaugggguggcugaccaucggaauuagcggcccugacaacggggcggucgccgugcugaaguauaauggaaucauuacaggcaccaucaaaucuuggaagaaacagauucucagaacgcaggaguccgagugcguuuguaugaacggcagcugcuuuacaaucaugaccgaugggcccucuaauaaggcugccagcuacaaaaucuucaagauugaaaagggaaaaaucacaaaguccauugagcugaacgcuccuaauuuuuauuacgaagaguguucuugcuacccggacaccggcaucgugaugugugucugccgggauaacuggcaugggagcaaucgccccuggguguccuucaaccagaaucuugacuaucaaauuggauacaucugcagcggcguguuuggggauaacccuagacccgaggacggagaaggcucuuguaauccugucaccguugauggcgccaacggggugaaaggauucuccuauaaguacggcaaugggguguggauuggacggacaaaaagcaaccgccugagaaagggcuuugagaugaucugggaccccaauggguggacgaacaccgacucugauuucuccgucaaacaggacgugguugcgaucacagauuggagcggcuauuccggaucuuuugugcagcacccggaacucaccggccuggacugcauucggccuuguuucugggucgagcuugugcgcgggcugcccagagaaaacacaaccaucuggacgagcggauccucuauuagcuucugcggcguuaauuccgauacagccaacuggagcuggccugacggggcugagcuccccuuuaccaucgauaaguga

SEQ ID NO: 210116 - RNA, 1413 nt, Artificial Sequence
  derived and/or modified CDS sequence (opt5) from neuraminidase__InfluenzaA__ADC45815
augaaccccaaucagaagaucauuaccaucggcagcauuuccaucgccauugggaucaucucucugaugcuccaaauuggaaacaucauuagcaucugggcuucccacucuauucagacaggcagccagaauaacacggggaucugcaaucagagaauuaucaccuacgagaacuccacaugggugaaucauaccuaugucaacaucaauaacacaaauguuguggccggagaagacaaaaccucugugacacuggcgggcaacagcucccuuuguagcauuucugggugggcuaucuacaccaaggauaauuccauucggaucggaagcaaaggcgacgucuucgugauucgcgagccuuuuaucucuugcucccaccuggaauguagaacguucuuucucacccaaggcgcccugcuuaacgauaagcauagcaaugggacaguuaaagaccggucuccguaucgcgcccugauguccugcccccucggagaggcuccuagccccuacaacuccaaguucgaaucuguggccuggagcgcuuccgccugucacgauggcaugggguggcugaccaucggaauuagcggcccugacaacggggcggucgccgugcugaaguauaauggaaucauuacaggcaccguuaaaucuuggaagaaacagauccucagaacgcaggaguccgagugcguguguaugaacggcagcugcuuuacaauuaugaccgaugggcccucuaauaaggcugccagcuacaaaaucuucaagaucgaaaagggaaaagucacaaaguccauugagcugaacgcuccuaauuuuuauuacgaagaguguucuugcuacccggacaccggcauggugaugugugugugccgggauaacuggcaugggagcaaucgccccugggucuccuucaaccagaaucuugacuaucaaaucggauacauuugcagcggcguuuuuggggauaacccuagacccgaggacggagaaggcucuuguaauccugugaccguggauggcgccaacggggucaaaggauucuccuauaaguacggcaaugggguguggaucggacggacaaaaagcaaccgccugagaaagggcuuugagaugauuugggaccccaauggguggacgaacaccgacucugauuucuccguuaaacaggacguggucgcgaucacagauuggagcggcuauuccggaucuuuugugcagcacccggaacucaccggccuggacugcauucggccuuguuucuggguugagcuugugcgcgggcugcccagagaaaacacaaccaucuggacgagcggauccucuaucagcuucugcggcgucaauuccgauacagccaacuggagcuggccugacggggcugagcuccccuuuaccauugauaaguga

SEQ ID NO: 210117 - RNA, 1413 nt, Artificial Sequence; identical to SEQ ID NO: 209533
  derived and/or modified CDS sequence (opt5) from neuraminidase__InfluenzaA__ADC45837

SEQ ID NO: 210118 - RNA, 1413 nt, Artificial Sequence; identical to SEQ ID NO: 209533
  derived and/or modified CDS sequence (opt5) from neuraminidase__InfluenzaA__ADC45848

SEQ ID NO: 210119 - RNA, 1410 nt, Artificial Sequence; identical to SEQ ID NO: 208810
  derived and/or modified CDS sequence (opt5) from neuraminidase__InfluenzaA__ADC53559

SEQ ID NO: 210120 - RNA, 1410 nt, Artificial Sequence; identical to SEQ ID NO: 208810
  derived and/or modified CDS sequence (opt5) from neuraminidase__InfluenzaA__ADD14088

SEQ ID NO: 210121 - RNA, 1410 nt, Artificial Sequence; identical to SEQ ID NO: 208810
  derived and/or modified CDS sequence (opt5) from neuraminidase__InfluenzaA__ADD14090

SEQ ID NO: 210122 - RNA, 1410 nt, Artificial Sequence; identical to SEQ ID NO: 208810
  derived and/or modified CDS sequence (opt5) from neuraminidase__InfluenzaA__ADD14094

SEQ ID NO: 210123 - RNA, 1410 nt, Artificial Sequence; identical to SEQ ID NO: 208810
  derived and/or modified CDS sequence (opt5) from neuraminidase__InfluenzaA__ADD14096

SEQ ID NO: 210124 - RNA, 1410 nt, Artificial Sequence; identical to SEQ ID NO: 208810
  derived and/or modified CDS sequence (opt5) from neuraminidase__InfluenzaA__ADD14098

SEQ ID NO: 210125 - RNA, 1410 nt, Artificial Sequence; identical to SEQ ID NO: 208810
  derived and/or modified CDS sequence (opt5) from neuraminidase__InfluenzaA__ADD14100

SEQ ID NO: 210126 - RNA, 1410 nt, Artificial Sequence; identical to SEQ ID NO: 208810
  derived and/or modified CDS sequence (opt5) from neuraminidase__InfluenzaA__ADD14102

SEQ ID NO: 210127 - RNA, 1410 nt, Artificial Sequence; identical to SEQ ID NO: 208810
  derived and/or modified CDS sequence (opt5) from neuraminidase__InfluenzaA__ADD14104

SEQ ID NO: 210128 - RNA, 1410 nt, Artificial Sequence; identical to SEQ ID NO: 208810
  derived and/or modified CDS sequence (opt5) from neuraminidase__InfluenzaA__ADD14106

SEQ ID NO: 210129 - RNA, 1410 nt, Artificial Sequence; identical to SEQ ID NO: 208810
  derived and/or modified CDS sequence (opt5) from neuraminidase__InfluenzaA__ADD14110

SEQ ID NO: 210130 - RNA, 1410 nt, Artificial Sequence; identical to SEQ ID NO: 208810
  derived and/or modified CDS sequence (opt5) from neuraminidase__InfluenzaA__ADD14112

SEQ ID NO: 210131 - RNA, 1410 nt, Artificial Sequence; identical to SEQ ID NO: 209780
  derived and/or modified CDS sequence (opt5) from neuraminidase__InfluenzaA__ADD14114

SEQ ID NO: 210132 - RNA, 1410 nt, Artificial Sequence; identical to SEQ ID NO: 208810
  derived and/or modified CDS sequence (opt5) from neuraminidase__InfluenzaA__ADD14116

SEQ ID NO: 210133 - RNA, 1410 nt, Artificial Sequence; identical to SEQ ID NO: 208810
  derived and/or modified CDS sequence (opt5) from neuraminidase__InfluenzaA__ADD14118

SEQ ID NO: 210134 - RNA, 1410 nt, Artificial Sequence; identical to SEQ ID NO: 208810
  derived and/or modified CDS sequence (opt5) from neuraminidase__InfluenzaA__ADD14120

SEQ ID NO: 210135 - RNA, 1410 nt, Artificial Sequence; identical to SEQ ID NO: 208810
  derived and/or modified CDS sequence (opt5) from neuraminidase__InfluenzaA__ADD14122

SEQ ID NO: 210136 - RNA, 1410 nt, Artificial Sequence; identical to SEQ ID NO: 208810
  derived and/or modified CDS sequence (opt5) from neuraminidase__InfluenzaA__ADD14124

SEQ ID NO: 210137 - RNA, 1410 nt, Artificial Sequence; identical to SEQ ID NO: 209869
  derived and/or modified CDS sequence (opt5) from neuraminidase__InfluenzaA__ADD14126

SEQ ID NO: 210138 - RNA, 1410 nt, Artificial Sequence; identical to SEQ ID NO: 208810
  derived and/or modified CDS sequence (opt5) from neuraminidase__InfluenzaA__ADD14128

SEQ ID NO: 210139 - RNA, 1410 nt, Artificial Sequence; identical to SEQ ID NO: 208810
  derived and/or modified CDS sequence (opt5) from neuraminidase__InfluenzaA__ADD14130

SEQ ID NO: 210140 - RNA, 1410 nt, Artificial Sequence; identical to SEQ ID NO: 208810
  derived and/or modified CDS sequence (opt5) from neuraminidase__InfluenzaA__ADD14132

SEQ ID NO: 210141 - RNA, 1410 nt, Artificial Sequence; identical to SEQ ID NO: 208810
  derived and/or modified CDS sequence (opt5) from neuraminidase__InfluenzaA__ADD14134

SEQ ID NO: 210142 - RNA, 1410 nt, Artificial Sequence; identical to SEQ ID NO: 208810
  derived and/or modified CDS sequence (opt5) from neuraminidase__InfluenzaA__ADD14136

SEQ ID NO: 210143 - RNA, 1410 nt, Artificial Sequence; identical to SEQ ID NO: 208810
  derived and/or modified CDS sequence (opt5) from neuraminidase__InfluenzaA__ADD14138

SEQ ID NO: 210144 - RNA, 1410 nt, Artificial Sequence; identical to SEQ ID NO: 208810
  derived and/or modified CDS sequence (opt5) from neuraminidase__InfluenzaA__ADD14142

SEQ ID NO: 210145 - RNA, 1410 nt, Artificial Sequence; identical to SEQ ID NO: 208810
  derived and/or modified CDS sequence (opt5) from neuraminidase__InfluenzaA__ADD14144

SEQ ID NO: 210146 - RNA, 1410 nt, Artificial Sequence; identical to SEQ ID NO: 208810
  derived and/or modified CDS sequence (opt5) from neuraminidase__InfluenzaA__ADD14146

SEQ ID NO: 210147 - RNA, 1410 nt, Artificial Sequence; identical to SEQ ID NO: 208810
  derived and/or modified CDS sequence (opt5) from neuraminidase__InfluenzaA__ADD14148

SEQ ID NO: 210148 - RNA, 1410 nt, Artificial Sequence
  derived and/or modified CDS sequence (opt5) from neuraminidase__InfluenzaA__ADD14150
augaaccccaaucagaagaucauuaccaucggcagcgugugcaugacaauugggauggccaaccugauccuccaaauuggaaauaucaucuccauuuggaucucucacagcauucagcugggcaaccagaaucagaucgagacguguaaccaauccgucauuaccuacgaaaauaacacauggguuaaucagaccuaugugaacaucucuaauacaaacuucgcugccgggcagagcguggucuccgugaaacuugcgggaaauucuagccugugcccuguuuccggcugggcuauuuacagcaaggacaacucuaucagaaucggguccaaaggagauguguuugucauucgggagccguucaucagcuguucuccccucgaaugccgcaccuuuuuccugacacagggcgcccuucugaaugacaagcauuccaacggcaccauuaaagauagaagcccuuaucggacgcucaugucuugucccaucggggaggugccuucccccuacaacagccgcuuugaauccguugccuggucugcuagcgccugccacgacggaauuaauuggcugaccaucggcaucuccgggccugauaacggagcuguggccguccugaaguauaauggcauuaucacagacaccauuaagagcuggagaaacaauauccuccggacacaagagucugagugugcgugcgugaacggguccuguuucaccgugaugacggauggaccgagcgacggccaggccucuuacaaaauuuuucgcaucgaaaagggcaaaaucgucaagagcguugagaugaaugcucccaacuaucauuacgaagagugcuccuguuacccugauucuagcgagauuacaugcgugugcagagacaauuggcacggguccaaccggcccugggugagcuucaaucagaaccuggaauaucagaucggauacauuuguucuggcaucuuuggggauaauccucgccccaacgacaaaaccggauccugcggcccggucagcucuaauggggccaacggagugaagggcuucuccuuuaaguauggcaacgggguuuggauuggaagaacaaaaagcaucuccucucggaauggcuucgagaugauuugggauccuaacggguggaccggaaccgacgacaauuuuagcaucaagcaagauaucgugggcauuaacgaaugguccggguacucuggcagcuucguccagcaucccgagcuuacaggacuggacuguauccgcccuugcuucuggguggaacucauuagaggccggcccaaagagaauacgaucuggaccuccgggagcucuauuuccuuuuguggaguuaacagcgauacagugggcuggucuuggcccgacggggcugagcugccuuucaccaucgauaaguga

SEQ ID NO: 210149 - RNA, 1410 nt, Artificial Sequence; identical to SEQ ID NO: 208810
  derived and/or modified CDS sequence (opt5) from neuraminidase__InfluenzaA__ADD14152

SEQ ID NO: 210150 - RNA, 1410 nt, Artificial Sequence
  derived and/or modified CDS sequence (opt5) from neuraminidase__InfluenzaA__ADD14154
augaaccccaaucagaagaucauuaccaucggcagcgugugcaugacaauugggauggccaaccugauccuccaaauuggaaauaucaucuccauuuggaucucucacagcauucagcugggcaaccagaaucagaucgagacguguaaccaauccgucauuaccuacgaaaauaacacauggguuaaucagaccuaugugaacaucucuauuacaaauuucgcugccgggcagagcguggucuccgugaaacuugcgggaaacucuagccugugcccuguuuccggcugggcuaucuacagcaaggacaauucuaucagaauuggguccaaaggagauguguuugucauccgggagccguucauuagcuguucuccccucgaaugccgcaccuuuuuccugacacagggcgcccuucugaacgacaagcauuccaauggcaccaucaaagauagaagcccuuaucggacgcucaugucuugucccauuggggaggugccuucccccuacaacagccgcuuugaauccguugccuggucugcuagcgccugccacgacggaaucaacuggcugaccaucggcauuuccgggccugauaauggagcuguggccguccugaaguauaacggcaucauuacagacaccaucaagagcuggagaaauaacauucuccggacacaagagucugagugugcgugcgugaauggguccuguuucaccgugaugacggauggaccgagcgacggccaggccucuuacaaaaucuuucgcaucgaaaagggcaaaauugucaagagcguugagaugaacgcucccaauuaucauuacgaagagugcuccuguuacccugauucuagcgagaucacaugcgugugcagagacaacuggcacggguccaaucggcccugggugagcuucaaccagaaucuggaauaucagauuggauacaucuguucuggcauuuuuggggauaacccucgccccaaugacaaaaccggauccugcggcccggucagcucuaacggggccaauggagugaagggcuucuccuuuaaguauggcaacgggguuuggaucggaagaacaaaaagcauuuccucucggaacggcuucgagaugaucugggauccuaauggguggaccggaaccgacaacaauuuuagcaucaagcaagacauugugggcaucaacgaaugguccggguacucuggcagcuucguccagcaucccgagcuuacaggacuggauuguauucgcccuugcuucuggguggaacucaucagaggccggcccaaagagaauacgauuuggaccuccgggagcucuaucuccuuuuguggaguuaacagcgacacagugggcuggucuuggcccgauggggcugagcugccuuucaccaucgacaaguga

SEQ ID NO: 210151 - RNA, 1410 nt, Artificial Sequence; identical to SEQ ID NO: 208810
  derived and/or modified CDS sequence (opt5) from neuraminidase__InfluenzaA__ADD14156

SEQ ID NO: 210152 - RNA, 1410 nt, Artificial Sequence; identical to SEQ ID NO: 208810
  derived and/or modified CDS sequence (opt5) from neuraminidase__InfluenzaA__ADD14158

SEQ ID NO: 210153 - RNA, 1410 nt, Artificial Sequence; identical to SEQ ID NO: 208810
  derived and/or modified CDS sequence (opt5) from neuraminidase__InfluenzaA__ADD14164

SEQ ID NO: 210154 - RNA, 1410 nt, Artificial Sequence; identical to SEQ ID NO: 208810
  derived and/or modified CDS sequence (opt5) from neuraminidase__InfluenzaA__ADD14174

SEQ ID NO: 210155 - RNA, 1410 nt, Artificial Sequence; identical to SEQ ID NO: 208810
  derived and/or modified CDS sequence (opt5) from neuraminidase__InfluenzaA__ADD14184

SEQ ID NO: 210156 - RNA, 1410 nt, Artificial Sequence; identical to SEQ ID NO: 208810
  derived and/or modified CDS sequence (opt5) from neuraminidase__InfluenzaA__ADD14194

SEQ ID NO: 210157 - RNA, 1410 nt, Artificial Sequence; identical to SEQ ID NO: 209164
  derived and/or modified CDS sequence (opt5) from neuraminidase__InfluenzaA__ADD14204

SEQ ID NO: 210158 - RNA, 1410 nt, Artificial Sequence
  derived and/or modified CDS sequence (opt5) from neuraminidase__InfluenzaA__ADD21449
augaaccccaaucagagaaucauuaccaucggcacagccugccugauuaucgggauugugagccuccugcuucaaaucggaaacaucgucucccuguggauuucucacagcauccagacgggcgagaagaaucauuccgaaaccuguaaccggaauacaauuaccuacgagaacucuacauggguuaaucagaccuaugugaacaucagcaauauuaacaucgcugggggacagggcguggccuccauuauccucgcgggaaauucuagccugugcccugucaacgggugggcuaucuacuccaaagacaauagcauucgcaucggcucuaagggcgauauuuucgugaucagagaaccguuuauuuccuguagccaccuugagugccggacauucuuucugacccaaggggcccuccugaacgaccgccauucuaauggaacgguuaaagauagaucccccuaucggacccugaugagcuguccuaucggcgaagcccccucuccuuacaacuccaaguucgagagcguggcuugguccgccucugcuugccacgacgggaugggauggcucacaaucggcauuagcgggcccgauaacggagccgucgcggugcugaaauauaauggcaucauuaccgacacaaucaaguccuggcgcaaccggauucuuagaacccaggagagcgaauguguuugcaucaauggcucuuguuuuacgaucaugacagaugggccuuccaacggacaggccagcuacaagauuuucaaaauggagcgcggcaagaucauuaaaucuguggaacuggacgcuccgaauuaucauuacgaggagugcagcuguuaccccgauaccgggaaggucgugugcgugugcagagacaacuggcacgccuccaaucggccuugggucucuuuugaucagaaccucgacuaucaaaucggauacauuagcuccggcguuuucggggauaauccccgcagcaacgacggaaaaggcaauuguggcccugugcugucuaacggggcuaauggagugaagggccuuuccuuuagauaugggaacggagucuggaucggccggacaaagagcaccaauucucgcuccggguucgaaaugauuugggaccccaacggcuggaccgagacagauagcaacuuuuccaugaaacaggacaucaucgcccugacggauuggucuggauacagcggcuccuucgugcagcacccggaacucaccgggaugaauugcauuagaccuuguuuuuggguugagcugauccggggacagcccaagcaaucuacaauuuggaccagcggcuccagcaucucuuucugcgggguggacuccgaaacagcgagcuggucuuggccugauggagccgaccugcccuucaccauugauaaauga

SEQ ID NO: 210159 - RNA, 1413 nt, Artificial Sequence
  derived and/or modified CDS sequence (opt5) from neuraminidase__InfluenzaA__ADD21469
augaaccccaaucagaagaucauuaccaucggcagcauuuccaucgccauugggaucaucucucugaugcuccaaauuggaaacaucauuagcgugugggcuucccacucuauccagacaggcagccagaaucauacggggauuugcaaccagagaaucauuaccuacgagaauagcacaugggucaaccacaccuauguuaauaucaacaauacaaacgugguggccggaaaagacaagaccucugucacacuggcgggcaauagcucccuuuguagcaucucugggugggcuauuuacaccaaagauaacuccauccggauuggaagcaagggcgacguguucguuauccgcgaaccuuuuauuucuugcucccaucuggaguguagaacguucuuucucacccaaggcgcccugcuuaaugauaaacacagcaacgggacagugaaggaccggucuccguaucgcgcccugauguccugcccccucggagaagcuccuagccccuacaauuccaaguucgagucugucgccuggagcgcuuccgccugucaugauggcaugggguggcugaccaucggaaucagcggcccugacaacggggcgguggccguucugaaauauaacggaauuaucacagaaaccauuaagucuuggaaaaagagaaugcuccggacgcaggaguccgagugcaucugugugaauggcagcugcuuuacaauuaugaccgauggccccucuaacggggcugccagcuacaaaaucuucaagaucgaaaagggaaaagucacaaaguccauugagcugaaugcuccuaacuuucacuaugaagaguguucuugcuacccggacaccggcaccgugaugugugugugccgcgauaauuggcacgggagcaacagacccugggucuccuucaaucagaaccuugacuaccagaucggauauauuugcagcggcguuuuuggggauaauccucggcccaaagacggagagggcucuuguaacccugugacaguggauggcgccgacggggucaagggauucuccuacaaauauggcaaugggguguggaucggacgcacgaaguccaacagacugcggaaaggcuuugaaaugauuugggaccccaauggguggaccgauacagacucuaacuucuccguuaagcaagauguggucgcgaucaccgacuggagcggcuacuccggaucuuuugugcagcauccggagcucacaggccuggauugcauucgcccuuguuucuggguugaacuugugagagggcugccccgggagaauaccacgaucuggacaagcggauccucuaucagcuucugcggcgucaacuccgacaccgccaacuggagcuggccugauggggcugaacuccccuuuaccauugacaaguga

SEQ ID NO: 210160 - RNA, 1410 nt, Artificial Sequence; identical to SEQ ID NO: 208810
  derived and/or modified CDS sequence (opt5) from neuraminidase__InfluenzaA__ADD21747

SEQ ID NO: 210161 - RNA, 1410 nt, Artificial Sequence
  derived and/or modified CDS sequence (opt5) from neuraminidase__InfluenzaA__ADD21767
augaaccccaaucagaagaucauuaucauuggcagcgugugcaugaccaucgggauggccaaccugauucuccaaaucggaaauaucauuuccaucuggauuucucacagcauccagcugggcaaccagaaucagauugagacauguaaccaauccgucaucacguacgaaaauaacaccuggguuaaucagacauaugugaacauuucuaauaccaacuucgcugccgggcagagcguggucuccgugaaacuugcgggaaauucuagccugugcccuguuuccggcugggcuaucuacagcaaggacaacucuaucagaauuggguccaaaggagauguguuugucauccgggagccguucauuagcuguucuccccucgaaugccgcacauuuuuccugacccagggcgcccuucugaaugacaagcauuccaacggcacaaucaaagauagaagcccuuaucggacccucaugucuugucccauuggggaggugccuucccccuacaacagccgcuuugaauccguugccuggucugcuagcgccugccacgacggaaucaauuggcugacgaucggcauuuccgggccugauaacggagcuguggccguccugaaguauaauggcaucauuaccgacacaaucaagagcuggagaaacaauauucuccggacccaagagucugagugugcgugcgugaacggguccuguuucacagugaugaccgauggaccgagcgacggccaggccucuuacaaaaucuuucgcaucgaaaagggcaaaauugucaagagcguugagaugaaugcucccaacuaucauuacgaagagugcuccuguuacccugauucuagcgagaucacgugcgugugcagagacaauuggcacggguccaaccggcccugggugagcuucaaucagaaccuggaauaucagauuggauacaucuguucuggcauuuuuggggauaauccucgccccaacgacaaaacaggauccugcggcccggucagcucuaauggggccaacggagugaagggcuucuccuuuaaguauggcaacgggguuuggaucggaagaaccaaaagcauuuccucucggaauggcuucgagaugaucugggauccuaacggguggacaggaaccgacaauaacuuuagcaucaagcaagacauugugggcaucaaugaaugguccggguacucuggcagcuucguccagcaucccgagcuuaccggacuggauuguauucgcccuugcuucuggguggaacucaucagaggccggcccaaagagaacacaauuuggacguccgggagcucuaucuccuuuuguggaguuaauagcgacaccgugggcuggucuuggcccgauggggcugagcugccuuucacaaucgacaaguga

SEQ ID NO: 210162 - RNA, 1410 nt, Artificial Sequence
  derived and/or modified CDS sequence (opt5) from neuraminidase__InfluenzaA__ADD21777
augaaccccaaucagaagaucauuaccaucggcagcgugugcaugacaauugggauggccaaccugauccuccaaauuggaaauaucaucuccauuuggaucucucacagcauucagcugggcaaccagaaucagaucgagacguguaaccaauccgucauuaccuacgaaaauaacacauggguuaaucagaccuaugugaacaucucuaauacaaacuucgcugccgggcagagcguggucuccgugaaacuugcgggaaauucuagccugugcccuguuuccggcugggcuauuuacagcaaggacaacucuaucagaaucggguccaaaggagauguguuugucauucgggagccguucaucagcuguucuccccucgaaugccgcaccuuuuuccugacacagggcgcccuucugaaugacaagcauuccaacggcaccauuaaagauagaagcccuuaucggacgcucaugucuugucccaucggggaggugccuucccccuacaacagccgcuuugaauccguugccuggucugcuagcgccugccacgacggaauuaauuggcugaccaucggcaucuccgggccugauaacggagcuguggccgucauuaaguauaauggcaucauuacagacaccaucaagagcuggagaaacaauauucugcggacacaagagucugagugugcgugcgugaacggguccuguuucaccgugaugacggauggaccgagcgacggccaggccucuuacaaaaucuuucgcaucgaaaagggcaaaauugucaagagcguugagaugaaugcucccaacuaucauuacgaagagugcuccuguuacccugauucuagcgagaucacaugcgugugcagagacaauuggcacggguccaaccggcccugggugagcuucaaucagaaccucgaauaucagauuggauacaucuguucuggcauuuuuggggauaauccucgccccaacgacaaaaccggauccugcggcccggucagcucuaauggggccaacggagugaagggcuucuccuuuaaguauggcaacgggguuuggaucggaagaacaaaaagcauuuccucucggaauggcuucgagaugaucugggauccuaacggguggaccggaaccgacaauaacuuuagcaucaagcaagacauugugggcaucaaugaaugguccggguacucuggcagcuucguccagcaucccgagcugacaggacuugauuguauucgcccuugcuucuggguggaacugaucagaggccggcccaaagagaacacgauuuggaccuccgggagcucuaucuccuuuuguggaguuaauagcgacacagugggcuggucuuggcccgauggggcugagcucccuuucaccaucgacaaguga

SEQ ID NO: 210163 - RNA, 1410 nt, Artificial Sequence; identical to SEQ ID NO: 208810
  derived and/or modified CDS sequence (opt5) from neuraminidase__InfluenzaA__ADD21787

SEQ ID NO: 210164 - RNA, 1410 nt, Artificial Sequence; identical to SEQ ID NO: 208810
  derived and/or modified CDS sequence (opt5) from neuraminidase__InfluenzaA__ADD21797

SEQ ID NO: 210165 - RNA, 1410 nt, Artificial Sequence; identical to SEQ ID NO: 208810
  derived and/or modified CDS sequence (opt5) from neuraminidase__InfluenzaA__ADD21817

SEQ ID NO: 210166 - RNA, 1410 nt, Artificial Sequence; identical to SEQ ID NO: 208810
  derived and/or modified CDS sequence (opt5) from neuraminidase__InfluenzaA__ADD21827

SEQ ID NO: 210167 - RNA, 1410 nt, Artificial Sequence; identical to SEQ ID NO: 208810
  derived and/or modified CDS sequence (opt5) from neuraminidase__InfluenzaA__ADD21837

SEQ ID NO: 210168 - RNA, 1410 nt, Artificial Sequence; identical to SEQ ID NO: 208810
  derived and/or modified CDS sequence (opt5) from neuraminidase__InfluenzaA__ADD21847

SEQ ID NO: 210169 - RNA, 1410 nt, Artificial Sequence; identical to SEQ ID NO: 208810
  derived and/or modified CDS sequence (opt5) from neuraminidase__InfluenzaA__ADD21857

SEQ ID NO: 210170 - RNA, 1410 nt, Artificial Sequence; identical to SEQ ID NO: 208810
  derived and/or modified CDS sequence (opt5) from neuraminidase__InfluenzaA__ADD21867

SEQ ID NO: 210171 - RNA, 1410 nt, Artificial Sequence; identical to SEQ ID NO: 208810
  derived and/or modified CDS sequence (opt5) from neuraminidase__InfluenzaA__ADD21877

SEQ ID NO: 210172 - RNA, 1410 nt, Artificial Sequence; identical to SEQ ID NO: 208810
  derived and/or modified CDS sequence (opt5) from neuraminidase__InfluenzaA__ADD21897

SEQ ID NO: 210173 - RNA, 1410 nt, Artificial Sequence; identical to SEQ ID NO: 208810
  derived and/or modified CDS sequence (opt5) from neuraminidase__InfluenzaA__ADD22494

SEQ ID NO: 210174 - RNA, 1410 nt, Artificial Sequence; identical to SEQ ID NO: 208810
  derived and/or modified CDS sequence (opt5) from neuraminidase__InfluenzaA__ADD22504

SEQ ID NO: 210175 - RNA, 1410 nt, Artificial Sequence; identical to SEQ ID NO: 208810
  derived and/or modified CDS sequence (opt5) from neuraminidase__InfluenzaA__ADD22514

SEQ ID NO: 210176 - RNA, 1410 nt, Artificial Sequence; identical to SEQ ID NO: 208810
  derived and/or modified CDS sequence (opt5) from neuraminidase__InfluenzaA__ADD22524

SEQ ID NO: 210177 - RNA, 1410 nt, Artificial Sequence
  derived and/or modified CDS sequence (opt5) from neuraminidase__InfluenzaA__ADD22534
augaaccccaaucagaagaucauuaccaucggcagcgugugcaugacaauugggauggccaaccugauccuccaaauuggaaauaucaucuccauuuggaucucucacagcauucagcugggcaaccagaaucagaucgagacguguaaccaauccgucauuaccuacgaaaauaacacauggguuaaucagaccuaugugaacaucucuaauacaaacuucgcugccgggcagagcguggucuccgugaaacuugcgggaaauucuagccugugcccuguuuccggcugggcuauuuacagcaaggacaacucuaucagaaucggguccaaaggagauguguuugucauucgggagccguucaucagcuguucuccccucgaaugccgcaccuuuuuccugacacagggcgcccuucugaaugacaagcauuccaacggcaccauuaaagauagaagcccuuaucggacgcucaugucuugucccaucggggaggugccuucccccuacaacagccgcuuugaauccguugccuggucugcuagcgccugccacgacggaauuaauuggcugaccaucggcaucuccgggccugauaacggagcuguggccguccugaaguauaauggcauuaucacagacaccauuaagagcuggagaaacaauauccuccggacacaagagucugagugugcgugcgugaacggguccuguuucaccgugaugacggauggaccgagcgacggccaggccucuuacaaaauuuuucgcaucgaaaagggcaaaaucgucaagagcguugagaugaaugcucccaacuaucauuacgaagagugcuccuguuacccugauucuagcgagauuacaugcgugugcagagacaauuggcacggguccaaccggcccugggugagcuucaaucagaaccuggaauaucagaucggauacauuuguucuggcaucuuuggggauuccccucgccccaaugacaaaaccggaagcugcggcccggucucuuccaacggggccaauggagugaagggcuucagcuuuaaguauggcaacgggguuuggauuggaagaacaaaauccaucucuagccggaacggcuucgagaugauuugggauccuaauggguggaccggaaccgacaacaauuuuuccaucaagcaagacaucgugggcauuaacgaauggucuggguacagcggcuccuucguccagcaucccgagcuuacaggacuggauuguauccgcccuugcuucuggguggaacucauuagaggccggcccaaagagaauacgaucuggaccagcgggucuuccauuagcuuuuguggaguuaacucugacacagugggcugguccuggcccgauggggcugagcugccuuucaccaucgacaaguga

SEQ ID NO: 210178 - RNA, 1410 nt, Artificial Sequence; identical to SEQ ID NO: 208810
  derived and/or modified CDS sequence (opt5) from neuraminidase__InfluenzaA__ADD22544

SEQ ID NO: 210179 - RNA, 1410 nt, Artificial Sequence; identical to SEQ ID NO: 208810
  derived and/or modified CDS sequence (opt5) from neuraminidase__InfluenzaA__ADD22557

SEQ ID NO: 210180 - RNA, 1410 nt, Artificial Sequence; identical to SEQ ID NO: 208810
  derived and/or modified CDS sequence (opt5) from neuraminidase__InfluenzaA__ADD22567

SEQ ID NO: 210181 - RNA, 1410 nt, Artificial Sequence; identical to SEQ ID NO: 208810
  derived and/or modified CDS sequence (opt5) from neuraminidase__InfluenzaA__ADD22577

SEQ ID NO: 210182 - RNA, 1410 nt, Artificial Sequence; identical to SEQ ID NO: 208810
  derived and/or modified CDS sequence (opt5) from neuraminidase__InfluenzaA__ADD22587

SEQ ID NO: 210183 - RNA, 1410 nt, Artificial Sequence; identical to SEQ ID NO: 208810
  derived and/or modified CDS sequence (opt5) from neuraminidase__InfluenzaA__ADD22597

SEQ ID NO: 210184 - RNA, 1410 nt, Artificial Sequence; identical to SEQ ID NO: 208810
  derived and/or modified CDS sequence (opt5) from neuraminidase__InfluenzaA__ADD22617

SEQ ID NO: 210185 - RNA, 1410 nt, Artificial Sequence; identical to SEQ ID NO: 208810
  derived and/or modified CDS sequence (opt5) from neuraminidase__InfluenzaA__ADD22627

SEQ ID NO: 210186 - RNA, 1410 nt, Artificial Sequence; identical to SEQ ID NO: 208810
  derived and/or modified CDS sequence (opt5) from neuraminidase__InfluenzaA__ADD22637

SEQ ID NO: 210187 - RNA, 1410 nt, Artificial Sequence; identical to SEQ ID NO: 208810
  derived and/or modified CDS sequence (opt5) from neuraminidase__InfluenzaA__ADD22648

SEQ ID NO: 210188 - RNA, 1410 nt, Artificial Sequence; identical to SEQ ID NO: 208810
  derived and/or modified CDS sequence (opt5) from neuraminidase__InfluenzaA__ADD22658

SEQ ID NO: 210189 - RNA, 1410 nt, Artificial Sequence; identical to SEQ ID NO: 208810
  derived and/or modified CDS sequence (opt5) from neuraminidase__InfluenzaA__ADD22668

SEQ ID NO: 210190 - RNA, 1410 nt, Artificial Sequence
  derived and/or modified CDS sequence (opt5) from neuraminidase__InfluenzaA__ADD22688
augaaccccaaucagaagaucauuaccaucggcagcgugugcaugacaauugggauggccaaccugauccuccaaauuggaaauaucaucuccauuuggaucucucacagcauucagcugggcaaccagaaucagaucgagacguguaaccaauccgucauuaccuacgaaaauaacacauggguuaaucagaccuaugugaacaucucuaauacaaacuucgcugccgggcagagcguggucuccgugaaacuugcgggaaauucuagccugugcccuguuuccggcugggcuauuuacagcaaggacaacucuaucagaaucggguccaaaggagauguguuugucauucgggagccguucaucagcuguucuccccucgaaugccgcaccuuuuuccugacacagggcgcccuucugaaugacaagcauuccaacggcaccauuaaagauagaagcccuuaucggacgcucaugucuugucccaucggggaggugccuucccccuacaacagccgcuuugaauccguugccuggucugcuagcgccugccacgacggaauuaauuggcugaccaucggcaucuccgggccugauaacggagcuguggccguccugaaguauaauggcauuaucacagacaccauuaagagcuggagaaacaauauccuccggacacaagagucugagugugcgugcgugaacggguccuguuucaccgugaugacggauggaccgagcgacggccaggccucuuacaaaauuuuucgcaucgaaaagggcaaaaucgucaagagcguugagaugaaugcucccaacuaucauuacgaagagugcuccuguuacccugauucuagcgagauuacaugcgugugcagagacaauuggcacggguccaaccggcccugggugagcuucaaucagaaccuggaauaucagaucggauacauuuguucuggcaucuuuggggauaauccucgccccaacgacaaaaccggauccugcggcccggucagcucuaauggggccaacggagugaagggcuucuccuuuaaguauggcaacgggguuuggauuggaagaacaaaaagcaucuccucucggaauggcuucgagaugauuugggauccuaacggguggaccggaaccgacaauaacuuuagcaucaagcaagacaucgugggcauuaaugaaugguccggguacucuggcagcuucguccagcaucccgagcuuacaggacuggauuguauccgcccuugcuucuggauugaacucaucagaggccggcccaaagagaacacgauuuggaccuccgggagcucuaucuccuuuuguggagugaauagcgacacaguuggcuggucuuggcccgauggggcugagcugccuuucaccaucgacaaguga

SEQ ID NO: 210191 - RNA, 1410 nt, Artificial Sequence; identical to SEQ ID NO: 208810
  derived and/or modified CDS sequence (opt5) from neuraminidase__InfluenzaA__ADD22698

SEQ ID NO: 210192 - RNA, 1410 nt, Artificial Sequence; identical to SEQ ID NO: 208810
  derived and/or modified CDS sequence (opt5) from neuraminidase__InfluenzaA__ADD22725

SEQ ID NO: 210193 - RNA, 1410 nt, Artificial Sequence; identical to SEQ ID NO: 208810
  derived and/or modified CDS sequence (opt5) from neuraminidase__InfluenzaA__ADD22735

SEQ ID NO: 210194 - RNA, 1410 nt, Artificial Sequence; identical to SEQ ID NO: 208810
  derived and/or modified CDS sequence (opt5) from neuraminidase__InfluenzaA__ADD22745

SEQ ID NO: 210195 - RNA, 1410 nt, Artificial Sequence
  derived and/or modified CDS sequence (opt5) from neuraminidase__InfluenzaA__ADD22755
augaaccccaaucagaagaucauuaccaucggcagcgugugcaugacaauugggauggccaaccugauccuccaaauuggaaauaucaucuccauuuggaucucucacagcauucagcugggcaaccagaaucagaucgagacguguaaccaauccgucauuaccuacgaaaauaacacauggguuaaucagaccuaugugaacaucucuaauacaaacuucgcugccgggcagagcguggucuccgugaaacuugcgggaaauucuagccugugcaccguuuccggcugggcuauuuacagcaaggacaacucuaucagaaucggguccaaaggagauguguuugucauucgggagccuuucaucagcuguucuccgcucgaaugccgcacauuuuuccugacccagggcgcccuucugaaugacaagcauuccaacggcacgauuaaagauagaagccccuaucggacccucaugucuuguccuaucggggaggugcccuccccuuacaacagccgcuuugaauccguugccuggucugcuagcgccugccacgacggaauuaauuggcugacaaucggcaucuccgggcccgauaacggagcuguggccguccugaaguauaauggcauuaucaccgacacaauuaagagcuggagaaacaauauccuccggacccaagagucugagugugcgugcgugaacggguccuguuucacggugaugacagauggaccuagcgacggccaggccucuuacaaaauuuuucgcaucgaaaagggcaaaaucgucaagagcguugagaugaaugcuccgaacuaucauuacgaagagugcuccuguuaccccgauucuagcgagauuaccugcgugugcagagacaauuggcacggguccaaccggccuugggugagcuucaaucagaaccuggaauaucagaucggauacauuuguucuggcaucuuuggggauagcccccgcccuaaugacaaaacaggauccugcggccccgucucuuccaacggggccaauggagugaagggcuucagcuuuaaguauggcaacgggguuuggauuggaagaaccaaauccaucucuagccggaacggcuucgagaugauuugggauccgaauggguggaccggaacagacaacaauuuuuccaucaagcaagacaucgugggcauuaacgaauggucuggguacagcggcuccuucguccagcauccugagcuuacgggacuggauuguauccgccccugcuucuggguggaacucauuagaggccggccuaaagagaauaccaucuggacaagcgggucuuccauuagcuuuuguggaguuaacucugacaccgugggcugguccuggcccgauggggcugagcugcccuucacaaucgacaaguga

SEQ ID NO: 210196 - RNA, 1410 nt, Artificial Sequence
  derived and/or modified CDS sequence (opt5) from neuraminidase__InfluenzaA__ADD22765
augaaccccaaucagaagaucauuaccaucggcagcgugugcaugacaauugggauggccaaccugauccuccaaauuggaaauaucaucuccauuuggaucucucacagcauucagcugggcaaccagaaucagaucgagacguguaaccaauccgucauuaccuacgaaaauaacacauggguuaaucagaccuaugugaacaucucuaauacaaacuucgcugccgggcagagcguggucuccgugaaacuugcgggaaauucuagccugugcccuguuuccggcugggcuauuuacagcaaggacaacucuaucagaaucggguccaaaggagauguguuugucauucgggagccguucaucagcuguucuccccucgaaugccgcaccuuuuuccugacacagggcgcccuucugaaugacaagcauuccaacggcaccauuaaagauagaagcccuuaucggacgcucaugucuugucccaucggggaggugccuucccccuacaacagccgcuuugaauccguugccuggucugcuagcgccugccacgacggaauuaauuggcugaccaucggcaucuccgggccugauaacggagcuguggccguccugaaguauaauggcauuaucacagacaccauuaagagcuggagaaacaauauccuccggacacaagagucugagugugcgugcgugaacggguccuguuucaccgugaugacggauggaccgagcgacggccaggccucuuacaaaauuuuucgcaucgaaaagggcaaaaucgucaagagcguugagaugaaugcucccaacuaucauuacgaagagugcuccuguuacccugauucuagcgagauuacaugcgugugcagagacaauuggcacggguccaaccggcccugggugagcuucaaucagaaccuggaauaucagaucggauacauuuguucuggcaucuuuggggauaauccucgccccaacgacaaaaccggauccugcggcccggucagcucuaauggggccaacggagugaagggcuucuccuuuaaguauggcaacgggguuuggauuggaagaacaaaaagcaucuccucucggaauggcuucgagaugauuugggauccuaacggguggaccggaaccgacaauaacuuuagcaucaagcaagacaucgugggcauuaaugauugguccggguacucuggcagcuucguccagcaucccgaacuuacaggacuggacuguauccgcccuugcuucuggguggagcucauuagaggccggcccaaagaaaacacgaucuggaccuccgggagcucuauuuccuuuuguggaguuaauagcgauacagugggcuggucuuggcccgacggggcugagcugccuuucaccaucgauaaguga

SEQ ID NO: 210197 - RNA, 1410 nt, Artificial Sequence; identical to SEQ ID NO: 208810
  derived and/or modified CDS sequence (opt5) from neuraminidase__InfluenzaA__ADD22775

SEQ ID NO: 210198 - RNA, 1410 nt, Artificial Sequence; identical to SEQ ID NO: 208810
  derived and/or modified CDS sequence (opt5) from neuraminidase__InfluenzaA__ADD22785

SEQ ID NO: 210199 - RNA, 1410 nt, Artificial Sequence; identical to SEQ ID NO: 208810
  derived and/or modified CDS sequence (opt5) from neuraminidase__InfluenzaA__ADD22795

SEQ ID NO: 210200 - RNA, 1410 nt, Artificial Sequence; identical to SEQ ID NO: 208810
  derived and/or modified CDS sequence (opt5) from neuraminidase__InfluenzaA__ADD22805

SEQ ID NO: 210201 - RNA, 1410 nt, Artificial Sequence; identical to SEQ ID NO: 208810
  derived and/or modified CDS sequence (opt5) from neuraminidase__InfluenzaA__ADD22815

SEQ ID NO: 210202 - RNA, 1410 nt, Artificial Sequence; identical to SEQ ID NO: 208810
  derived and/or modified CDS sequence (opt5) from neuraminidase__InfluenzaA__ADD22825

SEQ ID NO: 210203 - RNA, 1410 nt, Artificial Sequence; identical to SEQ ID NO: 208810
  derived and/or modified CDS sequence (opt5) from neuraminidase__InfluenzaA__ADD22835

SEQ ID NO: 210204 - RNA, 1410 nt, Artificial Sequence; identical to SEQ ID NO: 208810
  derived and/or modified CDS sequence (opt5) from neuraminidase__InfluenzaA__ADD22845

SEQ ID NO: 210205 - RNA, 1410 nt, Artificial Sequence; identical to SEQ ID NO: 208810
  derived and/or modified CDS sequence (opt5) from neuraminidase__InfluenzaA__ADD22855

SEQ ID NO: 210206 - RNA, 1410 nt, Artificial Sequence; identical to SEQ ID NO: 208810
  derived and/or modified CDS sequence (opt5) from neuraminidase__InfluenzaA__ADD22924

SEQ ID NO: 210207 - RNA, 1410 nt, Artificial Sequence; identical to SEQ ID NO: 208810
  derived and/or modified CDS sequence (opt5) from neuraminidase__InfluenzaA__ADD22934

SEQ ID NO: 210208 - RNA, 1410 nt, Artificial Sequence; identical to SEQ ID NO: 208810
  derived and/or modified CDS sequence (opt5) from neuraminidase__InfluenzaA__ADD22944

SEQ ID NO: 210209 - RNA, 1410 nt, Artificial Sequence; identical to SEQ ID NO: 208810
  derived and/or modified CDS sequence (opt5) from neuraminidase__InfluenzaA__ADD22954

SEQ ID NO: 210210 - RNA, 1410 nt, Artificial Sequence; identical to SEQ ID NO: 208810
  derived and/or modified CDS sequence (opt5) from neuraminidase__InfluenzaA__ADD22974

SEQ ID NO: 210211 - RNA, 1410 nt, Artificial Sequence; identical to SEQ ID NO: 208810
  derived and/or modified CDS sequence (opt5) from neuraminidase__InfluenzaA__ADD23075

SEQ ID NO: 210212 - RNA, 1410 nt, Artificial Sequence
  derived and/or modified CDS sequence (opt5) from neuraminidase__InfluenzaA__ADD23085
augaaccccaaucagaagaucauuaccaucggcagcgugugcaugacaauugggauggccaaccugauccuccaaauuggaaauaucaucuccauuuggaucucucacagcauucagcugggcaaccagaaucagaucgagacguguaaccaauccgucauuaccuacgaaaauaacacauggguuaaucagaccuaugugaacaucucuaauacaaacuucgcugccgggcagagcguggucuccgugaaacuugcgggaaauucuagccugugcccuguuuccggcugggcuauuuacagcaaggacaacucuaucagaaucggguccaaaggagauguguuugucauucgggaacucuucaucagcuguucuccgcuggagugccgcaccuuuuuccuuacacagggcgcccugcucaaugacaagcauuccaacggcaccauuaaagauagaagccccuaucggacgcugaugucuuguccuaucggggaggugcccuccccuuacaacagccgcuuugaauccguugccuggucugcuagcgccugccacgacggaauuaauuggcugaccaucggcaucuccgggcccgauaacggagcuguggccguccucaaguauaauggcauuaucacagacaccauuaagagcuggagaaacaauauccugcggacacaagagucugagugugcgugcgugaacggguccuguuucaccgugaugacggauggaccuagcgacggccaggccucuuacaaaauuuuucgcaucgaaaagggcaaaaucgucaagagcguugagaugaaugcuccgaacuaucauuacgaagagugcuccuguuaccccgauucuagcgagauuacaugcgugugcagagacaauuggcacggguccaaccggccuugggugagcuucaaucagaaccuugaauaucagaucggauacauuuguucuggcaucuuuggggauaauccccgcccuaacgacaaaaccggauccugcggccccgucagcucuaauggggccaacggagugaagggcuucuccuuuaaguauggcaacgggguuuggauuggaagaacaaaaagcaucuccucucggaauggcuucgagaugauuugggauccgaacggguggaccggaaccgacaauaacuuuagcaucaagcaagacaucgugggcauuaaugaaugguccggguacucuggcagcuucguccagcauccugagcugacaggacucgauuguauccgccccugcuucuggguggaacugauuagaggccggccuaaagagaacacgaucuggaccuccgggagcucuauuuccuuuuguggaguuaauagcgacacagugggcuggucuuggcccgauggggcugagcuucccuucaccaucgacaaguga

SEQ ID NO: 210213 - RNA, 1410 nt, Artificial Sequence; identical to SEQ ID NO: 208810
  derived and/or modified CDS sequence (opt5) from neuraminidase__InfluenzaA__ADD23095

SEQ ID NO: 210214 - RNA, 1410 nt, Artificial Sequence; identical to SEQ ID NO: 208810
  derived and/or modified CDS sequence (opt5) from neuraminidase__InfluenzaA__ADD23105

SEQ ID NO: 210215 - RNA, 1410 nt, Artificial Sequence; identical to SEQ ID NO: 208810
  derived and/or modified CDS sequence (opt5) from neuraminidase__InfluenzaA__ADD23115

SEQ ID NO: 210216 - RNA, 1410 nt, Artificial Sequence; identical to SEQ ID NO: 208810
  derived and/or modified CDS sequence (opt5) from neuraminidase__InfluenzaA__ADD23125

SEQ ID NO: 210217 - RNA, 1410 nt, Artificial Sequence; identical to SEQ ID NO: 208810
  derived and/or modified CDS sequence (opt5) from neuraminidase__InfluenzaA__ADD23135

SEQ ID NO: 210218 - RNA, 1410 nt, Artificial Sequence; identical to SEQ ID NO: 208810
  derived and/or modified CDS sequence (opt5) from neuraminidase__InfluenzaA__ADD23145

SEQ ID NO: 210219 - RNA, 1410 nt, Artificial Sequence; identical to SEQ ID NO: 208810
  derived and/or modified CDS sequence (opt5) from neuraminidase__InfluenzaA__ADD23155

SEQ ID NO: 210220 - RNA, 1410 nt, Artificial Sequence; identical to SEQ ID NO: 208810
  derived and/or modified CDS sequence (opt5) from neuraminidase__InfluenzaA__ADD23165

SEQ ID NO: 210221 - RNA, 1410 nt, Artificial Sequence; identical to SEQ ID NO: 208810
  derived and/or modified CDS sequence (opt5) from neuraminidase__InfluenzaA__ADD23175

SEQ ID NO: 210222 - RNA, 1410 nt, Artificial Sequence; identical to SEQ ID NO: 208810
  derived and/or modified CDS sequence (opt5) from neuraminidase__InfluenzaA__ADD23185

SEQ ID NO: 210223 - RNA, 1410 nt, Artificial Sequence; identical to SEQ ID NO: 208810
  derived and/or modified CDS sequence (opt5) from neuraminidase__InfluenzaA__ADD23195

SEQ ID NO: 210224 - RNA, 1410 nt, Artificial Sequence; identical to SEQ ID NO: 208810
  derived and/or modified CDS sequence (opt5) from neuraminidase__InfluenzaA__ADD23223

SEQ ID NO: 210225 - RNA, 1410 nt, Artificial Sequence
  derived and/or modified CDS sequence (opt5) from neuraminidase__InfluenzaA__ADD23233
augaaccccaaucagaagaucauuaccaucggcagcgugugcaugacaauugggauggccaaccugauccuccaaauuggaaauaucaucuccauuuggaucggccacucuauucagcuggggaaccagaaucagaucgagacguguaaccaaagcgucauuaccuacgaaaauaacacauggguuaaucagaccuaugugaacaucuccaauacaaacuucgcugccggacagucuguggucagcgugaaacuugcgggcaauuccucucugugcccuguuagcgggugggcuauuuacuccaaggacaacagcaucagaaucggaucuaaaggcgauguguuugucauucgggagccguucaucuccuguagcccccucgaaugccgcaccuuuuuccugacacagggcgcccuucugaaugacaagcauucuaacgggaccauuaaagauagauccccuuaucggacgcucaugagcugucccaucggagaggugccuucucccuacaacucccgcuuugaaagcguugccugguccgcuucugccugccacgacggcauuaauuggcugaccaucgggaucagcggaccugauaacggcgcuguggccguccugaaguauaaugggauuaucacagacaccauuaaguccuggagaaacaauauccuccggacacaagagagcgagugugcgugcgugaacggaucuuguuucaccgugaugacggauggcccguccgacggccaggccagcuacaaaauuuuucgcaucgaaaaggggaaaaucgucaagucuguugagaugaaugcucccaacuaucauuacgaagagugcagcuguuacccugauuccucugagauuacaugcgugugcagagacaauuggcacggaagcaaccggcccuggguguccuucaaucagaaccuggaauaucagaucggcuacauuuguagcgggaucuuuggagauaauccucgccccaacgacaaaaccggcucuugcgggccggucuccagcaauggagccaacggcgugaagggcuucucuuuuaaguaugggaacggaguuuggauuggcagaacaaaauccaucagcucccggaauggguucgagaugauuugggauccuaacggauggaccggcaccgacaauaacuuuucuaucaagcaagacaucguggggauuaaugaauggagcggcuacuccggaucuuucguccagcaucccgagcuuacaggccuggauuguauccgcccuugcuucuggguggaacucauuagagggcggcccaaagagaacacgaucuggaccagcggauccagcauuucuuuuuguggcguuaauuccgacacagugggguggagcuggcccgauggagcugagcugccuuucaccaucgacaaguga

SEQ ID NO: 210226 - RNA, 1410 nt, Artificial Sequence; identical to SEQ ID NO: 208810
  derived and/or modified CDS sequence (opt5) from neuraminidase__InfluenzaA__ADD23243

SEQ ID NO: 210227 - RNA, 1410 nt, Artificial Sequence; identical to SEQ ID NO: 210098
  derived and/or modified CDS sequence (opt5) from neuraminidase__InfluenzaA__ADD23253

SEQ ID NO: 210228 - RNA, 1410 nt, Artificial Sequence
  derived and/or modified CDS sequence (opt5) from neuraminidase__InfluenzaA__ADD23273
augaaccccaaucagaagaucauuaccaucggcagcgugugcaugacaauugggauggccaaccugauccuccaaauuggaaauaucaucuccauuuggaucucucacagcauucagcugggcaaccagaaucagaucgagacguguaaccaauccgucauuaccuacgaaaauaacacauggguuaaucagaccuaugugaacaucucuaauacaaacuucgcugccgggcagagcguggucuccgugaaacuugcgggaaauucuagccugugcccuguuuccggcugggcuauuuacagcaaggacaacucuaucagaaucggguccgagggagauguguuugucauucgggaaccguucaucagcuguucuccccucgagugccgcaccuuuuuccugacacagggcgcccuucugaaugacaaacauuccaacggcaccauuaaggauagaagcccuuaucggacgcucaugucuugucccaucggggaagugccuucccccuacaacagccgcuuugaguccguugccuggucugcuagcgccugccacgacggaauuaauuggcugaccaucggcaucuccgggccugauaacggagcuguggccguccugaaauauaauggcauuaucacagacaccauuaagagcuggagaaacaauauccuccggacacaagagucugaaugugcgugcgugaacggguccuguuucaccgugaugacggauggaccgagcgacggccaggccucuuacaagauuuuucgcaucgagaaaggcaagaucgucaaaagcguugaaaugaaugcucccaacuaucauuacgaggagugcuccuguuacccugauucuagcgaaauuacaugcgugugcagagacaauuggcacggguccaaccggcccugggugagcuucaaucagaaccuggaguaucagaucggauacauuuguucuggcaucuuuggggauaauccucgccccaacgacaagaccggauccugcggcccggucagcucuaauggggccaacggagugaaaggcuucuccuuuaaguauggcaacgggguuuggauuggaagaacaaagagcaucuccucucggaauggcuucgaaaugauuugggauccuaacggguggaccggaaccgacaauaacuuuagcaucaaacaagacaucgugggcauuaaugagugguccggguacucuggcagcuucguccagcaucccgaacuuacaggacuggauuguauccgcccuugcuucuggguggagcucauuagaggccggcccaaggagaacacgaucuggaccuccgggagcucuauuuccuuuuguggaguuaauagcgacacagugggcuggucuuggcccgauggggcugaacugccuuucaccaucgacaaauga

SEQ ID NO: 210229 - RNA, 1410 nt, Artificial Sequence; identical to SEQ ID NO: 208810
  derived and/or modified CDS sequence (opt5) from neuraminidase__InfluenzaA__ADD23283

SEQ ID NO: 210230 - RNA, 1410 nt, Artificial Sequence; identical to SEQ ID NO: 208810
  derived and/or modified CDS sequence (opt5) from neuraminidase__InfluenzaA__ADD23293

SEQ ID NO: 210231 - RNA, 1410 nt, Artificial Sequence; identical to SEQ ID NO: 208810
  derived and/or modified CDS sequence (opt5) from neuraminidase__InfluenzaA__ADD23303

SEQ ID NO: 210232 - RNA, 1410 nt, Artificial Sequence; identical to SEQ ID NO: 208810
  derived and/or modified CDS sequence (opt5) from neuraminidase__InfluenzaA__ADD23313

SEQ ID NO: 210233 - RNA, 1410 nt, Artificial Sequence
  derived and/or modified CDS sequence (opt5) from neuraminidase__InfluenzaA__ADD23323
augaaccccaaucagaagaucauuaccaucggcagcgugugcaugacaauugggauggccaaccugauccuccaaauuggaaauaucaucuccauuuggaucucucacagcauucagcugggcaaccagaaucagaucgagacguguaaccaauccgucauuaccuacgaaaauaacacauggguuaaucagaccuaugugaacaucucuaauacaaacuucgcugccgggcagagcguggucuccgugaaacuugcgggaaauucuagccugugcccuguuuccggcugggcuauuuacagcaaggacaacucuaucagaaucggguccaaaggagauguguuugucauucgggagccguucaucagcuguucuccccucgaaugccgcaccuuuuuccugacacagggcgcccuucugaaugacaagcauuccaacggcaccauuaaagauagaagcccuuaucggacgcucaugucuugucccaucggggaggugccuucccccuacaacagccgcuuugaauccguugccuggucugcuagcgccugccacgacggaauuaauuggcugaccaucggcaucuccgggccugauaacggagcuguggccguccugaaguauaauggcauuaucacagacaccauuaagagcuggagaaacaauauccuccggacacaagagucugagugugcgugcgugaacggguccuguuucaccgugcugacggauggaccgagcgacggccaggccucuuacaaaauuuuucgcaucgaaaagggcaaaaucgucaagagcguugagaugaaugcucccaacuaucauuacgaagagugcuccuguuacccugauucuagcgagauuacaugcgugugcagagacaauuggcacggguccaaccggcccugggugagcuucaaucagaaccuugaauaucagaucggauacauuuguucuggcaucuuuggggauaauccucgccccaacgacaaaaccggauccugcggcccggucagcucuaauggggccaacggagugaagggcuucuccuuuaaguauggcaacgggguuuggauuggaagaacaaaaagcaucuccucucggaauggcuucgagaugauuugggauccuaacggguggaccggaaccgacaauaacuuuagcaucaagcaagacaucgugggcauuaaugaaugguccggguacucuggcagcuucguccagcaucccgagcugacaggacucgauuguauccgcccuugcuucuggguggaacugauuagaggccggcccaaagagaacacgaucuggaccuccgggagcucuauuuccuuuuguggaguuaauagcgacacagugggcuggucuuggcccgauggggcugagcuuccuuucaccaucgacaaguga

SEQ ID NO: 210234 - RNA, 1410 nt, Artificial Sequence; identical to SEQ ID NO: 208810
  derived and/or modified CDS sequence (opt5) from neuraminidase__InfluenzaA__ADD23333

SEQ ID NO: 210235 - RNA, 1410 nt, Artificial Sequence; identical to SEQ ID NO: 208810
  derived and/or modified CDS sequence (opt5) from neuraminidase__InfluenzaA__ADD23358

SEQ ID NO: 210236 - RNA, 1410 nt, Artificial Sequence; identical to SEQ ID NO: 210161
  derived and/or modified CDS sequence (opt5) from neuraminidase__InfluenzaA__ADD23368

SEQ ID NO: 210237 - RNA, 1410 nt, Artificial Sequence; identical to SEQ ID NO: 208810
  derived and/or modified CDS sequence (opt5) from neuraminidase__InfluenzaA__ADD23378

SEQ ID NO: 210238 - RNA, 1410 nt, Artificial Sequence; identical to SEQ ID NO: 208810
  derived and/or modified CDS sequence (opt5) from neuraminidase__InfluenzaA__ADD23388

SEQ ID NO: 210239 - RNA, 1410 nt, Artificial Sequence; identical to SEQ ID NO: 209393
  derived and/or modified CDS sequence (opt5) from neuraminidase__InfluenzaA__ADD23398

SEQ ID NO: 210240 - RNA, 1410 nt, Artificial Sequence
  derived and/or modified CDS sequence (opt5) from neuraminidase__InfluenzaA__ADD23408
augaaccccaaucagaagaucauuaccaucggcagcgugugcaugacaauugggauggccaaccugauccuccaaauuggaaauaucaucuccauuuggaucucucacagcauucagcugggcaaccagaaucagaucgagacguguaaccaauccgucauuaccuacgaaaauaacacauggguuaaucagaccuaugugaacaucucuaauacaaacuucgcugccgggcagagcguggucuccgugaaacuugcgggaaauucuagccugugcccuguuuccggcugggcuauuuacagcaaggacaacucuaucagaaucggguccaaaggagauguguuugucauucgggagccguucaucagcuguucuccccucgaaugccgcaccuuuuuccugacacagggcgcccuucugaaugacaagcauuccaacggcaccauuaaagauagaagcccuuaucggacgcucaugucuugucccaucggggaggugccuucccccuacaacagccgcuuugaauccguugccuggucugcuagcgccugccacgacggaauuaauuggcugaccaucggcaucuccgggccugauaacggagcuguggccguccugaaguauaauggcauuaucacagacaccauuaagagcuggagaaacaauauccuccggacacaagagucugagugugcgugcgugaacggguccuguuucaccgugaugacggauggaccgagcgacggccaggccucuuacaaaauuuuucgcaucgaaaagggcaaaaucgucaagagcguugagaugaaugcucccaacuaucauuacgaagagugcuccuguuacccugauucuagcgagauuacaugcgugugcagagacaauuggcacggguccaaccggcccugggugagcuucaaucaggaucuggaauaucagaucggauacauuuguucuggcaucuuuggggacaacccucgccccaaugauaaaaccggauccugcggcccggucagcucuaacggggccaauggagugaagggcuucuccuuuaaguauggcaacgggguuuggauuggaagaacaaaaagcaucuccucucggaacggcuucgagaugauuugggacccuaauggguggaccggaaccgacaacaauuuuagcaucaagcaagauaucgugggcauuaacgaaugguccggguacucuggcagcuucguccagcaucccgagcuuacaggacuggacuguauccgcccuugcuucuggguggaacucauuagaggccggcccaaagagaauacgaucuggaccuccgggagcucuauuuccuuuuguggaguuaacagcgauacagugggcuggucuuggcccgacggggcugagcugccuuucaccaucgauaaguga

SEQ ID NO: 210241 - RNA, 1410 nt, Artificial Sequence
  derived and/or modified CDS sequence (opt5) from neuraminidase__InfluenzaA__ADD23438
augaaccccaaucagaagaucauuaccaucggcagcgugugcaugacaauugggauggccaaccugauccuccaaauuggaaauaucaucuccauuuggaucucucacagcauucagcugggcaaccagaaucagaucgagacguguaaccaauccgucauuaccuacgaaaauaacacauggguuaaucagaccuaugugaacaucucuaauacaaacuucgcugccgggcagagcguggucuccgugaaacuugcgggaaauucuagccugugcccuguuuccggcugggcuauuuacagcaaggacaacucuaucagaaucggguccaaaggagauguguuugucauucgggagccguucaucagcuguucuccccucgaaugccgcaccuuuuuccugacacagggcgcccuucugaaugacaagcauuccaacggcaccauuaaagauagaagcccuuaucggacgcucaugucuugucccaucggggaggugccuucccccuacaacagccgcuuugaauccguugccuggucugcuagcgccugccacgacggaauuaauuggcugaccaucggcaucuccgggccugauaacggagcuguggccguccugaaguauaauggcauuaucacagacaccauuaagagcuggagaaacaauauccuccggacacaagagucugagugugcgugcgugaacggguccuguuucaccgugaugacggauggaccgagcgacggccaggccucuuacaaaauuuuucgcaucgaaaagggcaaaaucgucaagagcguugagaugaaugcucccaacuaucauuacgaagagugcuccuguuacccugauucuagcgagauuacaugcgugugcagagacaauuggcacggguccaaccggcccugggugagcuucaaucagaaccuggaauaucagaucggauacauuuguucuggcaucuuuggggauaauccucgccccaacgacaaaaccggauccugcggcccggucagcucuaauggggccaacggagugaagggcuucuccuuuaaguauggcaacgggguuuggauuggaagaacaaaaagcaucuccucucggaauggcuucgagaugauuugggauccuaacggguggaccggaaccgacaauagcuuuuccaucaagcaagacaucgugggcauuaacgaauggucuggguacagcggcuccuucguccagcaucccgagcuuacaggacuggauuguauccgcccuugcuucuggguggaacucauuagaggccggcccaaagagaauacgaucuggaccagcgggucuuccauuagcuuuuguggaguuaacucugacacagugggcugguccuggcccgauggggcugagcugccuuucaccaucgacaaguga

SEQ ID NO: 210242 - RNA, 1410 nt, Artificial Sequence; identical to SEQ ID NO: 208810
  derived and/or modified CDS sequence (opt5) from neuraminidase__InfluenzaA__ADD23448

SEQ ID NO: 210243 - RNA, 1410 nt, Artificial Sequence; identical to SEQ ID NO: 208810
  derived and/or modified CDS sequence (opt5) from neuraminidase__InfluenzaA__ADD23458

SEQ ID NO: 210244 - RNA, 1410 nt, Artificial Sequence
  derived and/or modified CDS sequence (opt5) from neuraminidase__InfluenzaA__ADD23468
augaaccccaaucagaagaucauuaccaucggcagcgugugcaugacaauugggauggccaaccugauccuccaaauuggaaauaucaucuccauuuggaucucucacagcauucagcugggcaaccagaaucagaucgagacguguaaccaauccgucauuaccuacgaaaauaacacauggguuaaucagaccuaugugaacaucucuaauacaaacuucgcugccgggcagagcguggucuccgugaaacuugcgggaaauucuagccugugcccuguuuccggcugggcuauuuacagcaaggacaacucuaucagaaucggguccaaaggagauguguuugucauucgggagccguucaucagcuguucuccccucgaaugccgcaccuuuuuccugacacagggcgcccuucugaaugacaagcauuccaacggcaccauuaaagauagaagcccuuaucggacgcucaugucuugucccaucggggaggugccuucccccuacaacagccgcuuugaauccguugccuggucugcuagcgccugccacgacggaauuaauuggcugaccaucggcaucuccgggccugauaacggagcuguggccguccugaaguauaauggcauuaucacagacaccauuaagagcuggagaaacaauauccuccggacacaagagucugagugugcgugcgugaacggguccuguuucaccgugaugacggauggaccgagcgacggccaggccucuuacaaaauuuuucgcaucgaaaagggcaaaaucgucaagagcguugagaugaaugcucccaacuaucauuacgaagagugcuccuguuacccugauucuagcgagauuacaugcgugugcagagacaauuggcacggguccaaccggcccugggugagcuucaaucagaaccuggaauaucagaucggauacauuuguucuggcaucuuuggggauaauccucgccccaacgacaaaaccggauccugcggcccggucagcucuaauggggccaacggagugaagggcuucuccuuuaaguauggcaacgggguuuggauuggaagaacaaaaagcaucuccucucggaauggcuucgagaugauuugggauccuaacggguggaccggaaccgacaauaacuuuagcaucaagcaagacaucgugggcgucaaugaaugguccggguacucuggcagcuucgugcagcaucccgagcuuacaggacuggauuguauucgcccuugcuucuggguugaacucaucagaggccggcccaaagagaacacgauuuggaccuccgggagcucuaucuccuuuuguggagugaauagcgacacagucggcuggucuuggcccgauggggcugagcugccuuucaccauugacaaguga

SEQ ID NO: 210245 - RNA, 1410 nt, Artificial Sequence; identical to SEQ ID NO: 208810
  derived and/or modified CDS sequence (opt5) from neuraminidase__InfluenzaA__ADD23478

SEQ ID NO: 210246 - RNA, 1410 nt, Artificial Sequence; identical to SEQ ID NO: 208810
  derived and/or modified CDS sequence (opt5) from neuraminidase__InfluenzaA__ADD23488

SEQ ID NO: 210247 - RNA, 1410 nt, Artificial Sequence
  derived and/or modified CDS sequence (opt5) from neuraminidase__InfluenzaA__ADD23498
augaaccccaaucagaagaucauuaccaucggcagcgugugcaugacaauugggauggccaaccugauccuccaaauuggaaauaucaucuccauuuggaucucucacagcauucagcugggcaaccagaaucauaucgagacguguaaccaguccgucauuaccuacgaaaauaacacauggguuaaucaaaccuaugugaacaucucuaauacaaacuucgcugccgggcagagcguggucuccgugaaacuugcgggaaauucuagccugugcccuguuuccggcugggcuauuuacagcaaggacaacucuaucagaaucggguccaaaggagauguguuugucauucgggagccguucaucagcuguucuccccucgaaugccgcaccuuuuuccugacacagggcgcccuucugaaugacaagcacuccaacggcaccauuaaagauagaagcccuuaucggacgcucaugucuugucccaucggggaggugccuucccccuacaacagccgcuuugaauccguugccuggucugcuagcgccugccaugacggaauuaauuggcugaccaucggcaucuccgggccugauaacggagcuguggccguccugaaguauaauggcauuaucacagacaccauuaagagcuggagaaacaauauccuccggacacaggagucugagugugcgugcgugaacggguccuguuucaccgugaugacggauggaccgagcgacggccaagccucuuacaaaauuuuucgcaucgaaaagggcaaaaucgucaagagcguugagaugaaugcucccaacuaucacuacgaagagugcuccuguuacccugauucuagcgagauuacaugcgugugcagagacaauuggcauggguccaaccggcccugggugagcuucaaucagaaccuggaauaucagaucggauacauuuguucuggcaucuuuggggauaauccucgccccaacgacaaaaccggauccugcggcccggucagcucuaauggggccaacggagugaagggcuucuccuuuaaguauggcaacgggguuuggauuggaagaacaaaaagcaucuccucucggaauggcuucgagaugauuugggauccuaacggguggaccggaaccgacaauaacuuuagcaucaagcaggacaucgugggcauuaaugaaugguccggguacucuggcagcuucguccaacaccccgagcuuacaggacuggauuguauccgcccuugcuucuggguggaacucauuagaggccggcccaaagagaacacgaucuggaccuccgggagcucuauuuccuuuuguggaguuaauagcgacacagugggcuggucuuggcccgauggggcugagcugccuuucaccaucgacaaguga

SEQ ID NO: 210248 - RNA, 1410 nt, Artificial Sequence; identical to SEQ ID NO: 208810
  derived and/or modified CDS sequence (opt5) from neuraminidase__InfluenzaA__ADD23508

SEQ ID NO: 210249 - RNA, 1410 nt, Artificial Sequence; identical to SEQ ID NO: 208810
  derived and/or modified CDS sequence (opt5) from neuraminidase__InfluenzaA__ADD23518

SEQ ID NO: 210250 - RNA, 1410 nt, Artificial Sequence; identical to SEQ ID NO: 208810
  derived and/or modified CDS sequence (opt5) from neuraminidase__InfluenzaA__ADD23997

SEQ ID NO: 210251 - RNA, 1410 nt, Artificial Sequence; identical to SEQ ID NO: 208810
  derived and/or modified CDS sequence (opt5) from neuraminidase__InfluenzaA__ADD24007

SEQ ID NO: 210252 - RNA, 1410 nt, Artificial Sequence; identical to SEQ ID NO: 208810
  derived and/or modified CDS sequence (opt5) from neuraminidase__InfluenzaA__ADD24017

SEQ ID NO: 210253 - RNA, 1410 nt, Artificial Sequence; identical to SEQ ID NO: 208810
  derived and/or modified CDS sequence (opt5) from neuraminidase__InfluenzaA__ADD24024

SEQ ID NO: 210254 - RNA, 1410 nt, Artificial Sequence; identical to SEQ ID NO: 208810
  derived and/or modified CDS sequence (opt5) from neuraminidase__InfluenzaA__ADD24025

SEQ ID NO: 210255 - RNA, 1410 nt, Artificial Sequence; identical to SEQ ID NO: 208810
  derived and/or modified CDS sequence (opt5) from neuraminidase__InfluenzaA__ADD24026

SEQ ID NO: 210256 - RNA, 1410 nt, Artificial Sequence; identical to SEQ ID NO: 208810
  derived and/or modified CDS sequence (opt5) from neuraminidase__InfluenzaA__ADD24027

SEQ ID NO: 210257 - RNA, 1410 nt, Artificial Sequence; identical to SEQ ID NO: 208810
  derived and/or modified CDS sequence (opt5) from neuraminidase__InfluenzaA__ADD24028

SEQ ID NO: 210258 - RNA, 1410 nt, Artificial Sequence; identical to SEQ ID NO: 208810
  derived and/or modified CDS sequence (opt5) from neuraminidase__InfluenzaA__ADD24029

SEQ ID NO: 210259 - RNA, 1410 nt, Artificial Sequence; identical to SEQ ID NO: 208810
  derived and/or modified CDS sequence (opt5) from neuraminidase__InfluenzaA__ADD24030

SEQ ID NO: 210260 - RNA, 1410 nt, Artificial Sequence; identical to SEQ ID NO: 208810
  derived and/or modified CDS sequence (opt5) from neuraminidase__InfluenzaA__ADD24031

SEQ ID NO: 210261 - RNA, 1410 nt, Artificial Sequence; identical to SEQ ID NO: 208810
  derived and/or modified CDS sequence (opt5) from neuraminidase__InfluenzaA__ADD24032

SEQ ID NO: 210262 - RNA, 1410 nt, Artificial Sequence; identical to SEQ ID NO: 208810
  derived and/or modified CDS sequence (opt5) from neuraminidase__InfluenzaA__ADD25231

SEQ ID NO: 210263 - RNA, 1410 nt, Artificial Sequence; identical to SEQ ID NO: 208810
  derived and/or modified CDS sequence (opt5) from neuraminidase__InfluenzaA__ADD25233

SEQ ID NO: 210264 - RNA, 1410 nt, Artificial Sequence; identical to SEQ ID NO: 208810
  derived and/or modified CDS sequence (opt5) from neuraminidase__InfluenzaA__ADD25235

SEQ ID NO: 210265 - RNA, 1410 nt, Artificial Sequence; identical to SEQ ID NO: 208810
  derived and/or modified CDS sequence (opt5) from neuraminidase__InfluenzaA__ADD25244

SEQ ID NO: 210266 - RNA, 1410 nt, Artificial Sequence
  derived and/or modified CDS sequence (opt5) from neuraminidase__InfluenzaA__ADD25246
augaaccccaaucagaagaucauuaccaucggcagcgugugcaugacaauugggauggccaaccugauccuccaaauuggaaauaucaucuccauuuggaucucucacagcauucagcugggcaaccagaaucagaucgagacguguaaccaauccgucauuaccuacgaaaauaacacauggguuaaucagaccuaugugaacaucucuaauacaaacuucgcugccgggcagagcguggucuccgugaaacuugcgggaaauucuagccugugcccuguuuccggcugggcuauuuacagcaaggacaacucuaucagaaucggguccaaaggagauguguuugucauucgggagccguucaucagcuguucuccccucgaaugccgcaccuuuuuccugacacagggcgcccuucugaaugacaagcauuccaacggcaccauuaaagauagaagcccuuaucggacgcucaugucuugucccaucggggaggugccuucccccuacaacagccgcuuugaauccguugccuggucugcuagcgccugccacgacggaaccaauuggcugacaauuggcaucuccgggccugauaacggagcuguggccguccugaaguauaauggcaucauuaccgacacaaucaagagcuggagaaacaauauucuccggacccaagagucugagugugcgugcgugaacggguccuguuucacggugaugacagauggaccgagcgacggccaggccucuuacaaaaucuuucgcauugaaaagggcaaaaucgucaagagcguugagaugaaugcucccaacuaucauuacgaagagugcuccuguuacccugauucuagcgagauuaccugcgugugcagagacaauuggcacggguccaaccggcccugggugagcuucaaucagaaccuggaauaucagaucggauacaucuguucuggcauuuuuggggauaauccucgccccaacgacaaaacaggauccugcggcccggucagcucuaauggggccaacggagugaagggcuucuccuuuaaguauggcaacgggguuuggaucggaagaaccaaaagcauuuccucucggaauggcuucgagaugaucugggauccuaacggguggaccggaacagacaauaacuuuagcauuaagcaagacaucgugggcaucaaugaaugguccggguacucuggcagcuucguccagcaucccgagcuuacgggacuggauuguauucgcccuugcuucuggguggaacucaucagaggccggcccaaagagaacaccauuuggacauccgggagcucuaucuccuuuuguggaguuaauagcgacaccgugggcuggucuuggcccgauggggcugagcugccuuucacaauugacaaguga

SEQ ID NO: 210267 - RNA, 1410 nt, Artificial Sequence; identical to SEQ ID NO: 208810
  derived and/or modified CDS sequence (opt5) from neuraminidase__InfluenzaA__ADD25248

SEQ ID NO: 210268 - RNA, 1410 nt, Artificial Sequence
  derived and/or modified CDS sequence (opt5) from neuraminidase__InfluenzaA__ADD25250
augaaccccaaucagaagaucauuaccaucggcagcgugugcaugacaauugggauggccaaccugauccuccaaauuggaaauaucaucuccauuuggaucucuagaagcauucagcugggcaaccagaaucagaucgagacguguaaccaauccauuaucaccuacgaaaauaacacaugggucaaucagaccuauguuaacauuucuaauacaaacuucgcugccgggcagagcgugguguccgucaaacuugcgggaaauucuagccugugcccuguguccggcugggcuaucuacagcaaggacaacucuauccggauuggguccaaaggagauguuuuugugauccgcgagccguucauuagcuguucuccccucgaaugcagaaccuuuuuccugacacagggcgcccuucugaaugacaagcacuccaacggcaccaucaaagaucggagcccuuaucgcacgcucaugucuugucccauuggggaggucccuucccccuacaacagcagauuugaauccguggccuggucugcuagcgccugccaugacggaaucaauuggcugaccaucggcauuuccgggccugauaacggagcuguugccgugcugaaguauaauggcaucauuacagacaccaucaagagcuggcggaacaauauucuccgcacacaagagucugagugugcgugcgucaacggguccuguuucaccgugaugacggauggaccgagcgacggccaggccucuuacaaaaucuuuagaaucgaaaagggcaaaauugugaaguccgucgagaugaaugcucccaacuaucacuacgaagagugcuccuguuacccugauucuggggagaucacaugcguuugccgggacaauuggcauggaagcaaccgccccuggguguccuucaaucagaaccuggaauaucagauuggcuacaucuguagcgggauuuuuggagauaauccuagacccaacgacaaaaccggcucuugcgggccgguguccagcaauggagccaacggcgucaagggcuucucuuuuaaguaugggaacggaguguggaucggccggacaaaauccauuagcucccgcaauggguucgagaugaucugggauccuaacggauggaccggcaccgacaauaacuuuucuaucaagcaagacauuguugggaucaaugaauggagcggcuacuccggaucuuucgugcagcaccccgagcuuacaggccuggauuguauuagaccuugcuucugggucgaacucauccgggggcgccccaaagagaacacgauuuggaccagcggauccagcaucucuuuuuguggcgugaauagcgacacaaugggguggagcuggcccgauggagcugagcugccuuucaccaucgacaaguga

SEQ ID NO: 210269 - RNA, 1410 nt, Artificial Sequence; identical to SEQ ID NO: 208810
  derived and/or modified CDS sequence (opt5) from neuraminidase__InfluenzaA__ADD25255

SEQ ID NO: 210270 - RNA, 1410 nt, Artificial Sequence; identical to SEQ ID NO: 208810
  derived and/or modified CDS sequence (opt5) from neuraminidase__InfluenzaA__ADD25259

SEQ ID NO: 210271 - RNA, 1410 nt, Artificial Sequence
  derived and/or modified CDS sequence (opt5) from neuraminidase__InfluenzaA__ADD25262
augaaccccaaucagaagaucauuaccaucggcagcgugugcaugacaauugggauggccaaccugauccuccaaauuggaaauaucaucuccauuuggaucucucacagcauucagcugggcaaccagaaucagaucgagacguguaaccaauccgucauuaccuacgaaaauaacacauggguuaaucagaccuaugugaacaucucuaauacaaacuucgcugccgggcagagcguggucuccgugaaacuugcgggaaauucuagccugugcccuguuuccggcugggcuauuuacagcaaggacaacucuaucagaaucggguccaaaggagauguguuugucauucgggagccguucaucagcuguucuccccucgaaugccgcaccuuuuuccugacacagggcgcccuucugaaugacaagcauuccaacggcaccauuaaagauagaagcccuuaucggacgcucaugucuugucccaucggggaggugccuucccccuacaacagccgcuuugaauccguugccuggucugcuagcgccugccacgacggaauuaauuggcugaccaucggcaucuccgggccugauaacggagcuguggccguccugaaguauaauggcauuaucacagacaccauuaagagcuggagaaacaauauccuccggacacaagagucugagugugcgugcgugaacggguccuguuucaccgugaugacggauggaccgagcgacggccaggccucuuacaaaauuuuucgcaucgaaaagggcaaaaucgucaagagcguugagaugaaugcucccaacuaucauuacgaagagugcuccuguuacccugauucuagcgagauuacaugcgugugcagagacaauuggcacggguccaaccggcccugggugagcuucaaucagaaccuggaauaucagaucggauacauuuguucuggcaucuuuggggauaauccucgccccaacgacaaaaagggauccugcggcccggucagcucuaauggggccgauggagugaagggcuucuccuuuaaauauggcaacgggguuuggauuggaagaaccaagagcaucuccucucggaacggcuucgagaugauuugggacccuaauggguggacaggaaccgacaacaauuuuagcaucaaacaagauaucgugggcauuaacgaaugguccggguacucuggcagcuucguccagcaucccgagcuuaccggacuggacuguauccgcccuugcuucuggguggaacucauuagaggccggcccaaggagaauacaaucuggacguccgggagcucuauuuccuuuuguggaguuaacagcgauaccgugggcuggucuuggcccgacggggcugagcugccuuucacaaucgauaaauga

SEQ ID NO: 210272 - RNA, 1410 nt, Artificial Sequence
  derived and/or modified CDS sequence (opt5) from neuraminidase__InfluenzaA__ADD25266
augaaccccaaucagaagaucauuaccaucggcagcgugugcaugacaauugggauggccaaccugauccuccaaauuggaaauaucaucuccauuuggaucucucacagcauucagcugggcaaccagaaucagaucgagacguguaaccaauccgucauuaccuacgaaaauaacacauggguuaaucagaccuaugugaacaucucuaauacaaacuucgcugccgggcagagcguggucccugugaaacuugcgggaaauuccucucugugcccgguuagcggcugggcuauuuacuccaaggacaacagcaucagaaucgggucuaaaggagauguguuugucauucgggagcccuucaucuccuguagcccucucgaaugccgcaccuuuuuccugacacagggcgcccuucugaaugacaagcauucuaacggcaccauuaaagauagaucccccuaucggacgcucaugagcuguccuaucggggaggugcccucuccuuacaacucccgcuuugaaagcguugccugguccgcuucugccugccacgacggaauuaauuggcugaccaucggcaucagcgggccggauaacggagcuguggccguccugaaguauaauggcauuaucacagacaccauuaaguccuggagaaacaauauccuccggacacaagagagcgagugugcgugcgugaacgggucuuguuucaccgugaugacggauggacccuccgacggccaggccagcuacaaaauuuuucgcaucgaaaagggcaaaaucgucaagucuguugagaugaaugcuccuaacuaucauuacgaagagugcagcuguuaccccgauuccucugagauuacaugcgugugcagagacaauuggcacgggagcaaccggccuuggguguccuucaaucagaaccuggaauaucagaucggauacauuuguagcggcaucuuuggggauaauccccgcccgaacgacaaaaccggaucuugcggcccugucuccagcaauggggccaacggagugaagggcuucucuuuuaaguauggcaacgggguuuggauuggaagaacaaaauccaucagcucccggaauggcuucgagaugauuugggaucccaacggguggaccggaaccgacaauaacuuuucuaucaagcaagacaucgugggcauuaaugaauggagcggguacuccggcucuuucguccagcauccugagcuuacaggacuggauuguauccgccccugcuucuggguggaacucauuagaggccggcccaaagagaacacgaucuggaccagcggguccagcauuucuuuuuguggaguuaauuccgacacagugggcuggagcuggccugauggggcugagcugccguucaccaucgacaaguga

SEQ ID NO: 210273 - RNA, 1410 nt, Artificial Sequence; identical to SEQ ID NO: 208810
  derived and/or modified CDS sequence (opt5) from neuraminidase__InfluenzaA__ADD25268

SEQ ID NO: 210274 - RNA, 1410 nt, Artificial Sequence; identical to SEQ ID NO: 208810
  derived and/or modified CDS sequence (opt5) from neuraminidase__InfluenzaA__ADD25271

SEQ ID NO: 210275 - RNA, 1410 nt, Artificial Sequence; identical to SEQ ID NO: 208810
  derived and/or modified CDS sequence (opt5) from neuraminidase__InfluenzaA__ADD25274

SEQ ID NO: 210276 - RNA, 1410 nt, Artificial Sequence; identical to SEQ ID NO: 208810
  derived and/or modified CDS sequence (opt5) from neuraminidase__InfluenzaA__ADD25276

SEQ ID NO: 210277 - RNA, 1410 nt, Artificial Sequence
  derived and/or modified CDS sequence (opt5) from neuraminidase__InfluenzaA__ADD25278
augaaccccaaucagaagaucauuaccaucggcagcgugugcaugacaauugggauggccaaccugauccuccaaauuggaaauaucaucuccauuuggaucucuagaagcauucagcugggcaaccagaaucagaucgagacguguaaccaauccauuaucaccuacgaaaauaacacaugggucaaucagaccuauguuaacauuucuaauacaaacuucgcugccgggcagagcgugguguccgucaaacuugcgggaaauucuagccugugcccuguguccggcugggcuaucuacagcaaggacaacucuauccggauuggguccaaaggagauguuuuugugauccgcgagccguucauuagcuguucuccccucgaaugcagaaccuuuuuccugacacagggcgcccuucugaaugacaagcacuccaacggcaccaucaaagaucggagcccuuaucgcacgcucaugucuugucccauuggggaggucccuucccccuacaacagcagauuugaauccguggccuggucugcuagcgccugccaugacggaaucaauuggcugaccaucggcauuuccgggccugauaacggagcuguugccgugcugaaguauaauggcaucauuacagacaccaucaagagcuggcggaacaauauucuccgcacacaagagucugagugugcgugcgucaacggguccuguuucaccgugaugacggauggaccgagcgacggccaggccucuuacaaaaucuuuagaaucgaaaagggcaaaauugugaaguccgucgagaugaaugcucccaacuaucacuacgaagagugcuccuguuacccugauucuggggagaucacaugcguuugccgggacaauuggcauggaagcaaccgccccuggguguccuucaaucagaaccuggaauaucagauuggcuacaucuguagcgggauuuuuggagauaauccuagacccaacgacaaaaccggcucuugcgggccgguguccagcaauggagccaacggcgucaagggcuucucuuuuaaguaugggaacggaguguggaucggccggacaaaauccauuagcucccgcaauggguucgagaugaucugggauccuaacggauggaccggcaccgacaauaacuuuucuaucaagcaagacauuguugggaucaaugaauggagcggcuacuccggaucuuucgugcagcaccccgagcuuacaggccuggauuguauuagaccuugcuucugggucgaacucauccgggggcgccccaaagagaacacgauuuggaccagcggauccagcaucucuuuuuguggcgugaauagcgacacaguuggguggagcuggcccgauggagcugagcugccuuucaccaucgacaaguga

SEQ ID NO: 210278 - RNA, 1410 nt, Artificial Sequence; identical to SEQ ID NO: 208810
  derived and/or modified CDS sequence (opt5) from neuraminidase__InfluenzaA__ADD25280

SEQ ID NO: 210279 - RNA, 1410 nt, Artificial Sequence; identical to SEQ ID NO: 208810
  derived and/or modified CDS sequence (opt5) from neuraminidase__InfluenzaA__ADD25282

SEQ ID NO: 210280 - RNA, 1410 nt, Artificial Sequence; identical to SEQ ID NO: 210098
  derived and/or modified CDS sequence (opt5) from neuraminidase__InfluenzaA__ADD25284

SEQ ID NO: 210281 - RNA, 1410 nt, Artificial Sequence; identical to SEQ ID NO: 208810
  derived and/or modified CDS sequence (opt5) from neuraminidase__InfluenzaA__ADD25287

SEQ ID NO: 210282 - RNA, 1410 nt, Artificial Sequence; identical to SEQ ID NO: 208810
  derived and/or modified CDS sequence (opt5) from neuraminidase__InfluenzaA__ADD25291

SEQ ID NO: 210283 - RNA, 1410 nt, Artificial Sequence; identical to SEQ ID NO: 210098
  derived and/or modified CDS sequence (opt5) from neuraminidase__InfluenzaA__ADD25293

SEQ ID NO: 210284 - RNA, 1410 nt, Artificial Sequence; identical to SEQ ID NO: 208810
  derived and/or modified CDS sequence (opt5) from neuraminidase__InfluenzaA__ADD25300

SEQ ID NO: 210285 - RNA, 1410 nt, Artificial Sequence
  derived and/or modified CDS sequence (opt5) from neuraminidase__InfluenzaA__ADD25304
augaaccccaaucagaagaucauuaccaucggcagcgugugcaugacaauugggauggccaaccugauccuccaaauuggaaauaucgucuccaucuggauuucucacagcauccagcugggcaaccagaaucagauugagacguguaaccaauccguuaucaccuacgaaaauaacacaugggugaaucagaccuaugugaacauuucuaauacaaacuucgcugccgggcagagcgucguguccguuaaacuugcgggaaauucuagccugugcccuguguccggcugggcuaucuacagcaaggacaacucuauuagaaucggguccaaaggagaugucuuugugauccgggagccguucauuagcuguucuccccucgaaugccgcaccuuuuuccugacacagggcgcccuucugaaugacaagcauuccaacggcaccaucaaagauagaagcccuuaucggacgcucaugucuugucccauuggggagguuccuucccccuacaacagccgcuuugaauccguggccuggucugcuagcgccugccacgacggaaucaauuggcugaccauuggcaucuccgggccugauaacggagcugucgccgugcugaaguauaauggcaucauuacagacaccaucaagagcuggagaaacaauauucuccggacacaagagucugagugugcgugcgugaacggguccuguuucaccgucaugacggauggaccgagcgacggccaggccucuuacaaaaucuuucgcauugaaaagggcaaaaucguuaagagcguggagaugaaugcucccaacuaucauuacgaagagugcuccuguuacccugauucuagcgagaucacaugcgugugcagagacaauuggcacggguccaaccggcccugggucagcuucaaucagaaccuggaauaucagauuggauacaucuguucuggcauuuuuggggauaauccucgccccaacgacaaaaccggauccugcggcccggugagcucuaauggggccaacggaguuaagggcuucuccuuuaaguauggcaacgggguguggaucggaagaacaaaaagcauuuccucucggaauggcuucgagaugaucugggauccuaacggguggaccggaaccgacaauaacuuuagcauuaagcaagacaucgucggcaucaaugaaugguccggguacucuggcagcuucgugcagcaucccgagcuuacaggacuggauuguauucgcccuugcuucuggguugaacucaucagaggccggcccaaagagaacacgauuuggaccuccgggagcucuaucuccuuuuguggagugaauagcgacacagucggcuggucuuggcccgauggggcugagcugccuuucaccauugacaaguga

SEQ ID NO: 210286 - RNA, 1410 nt, Artificial Sequence
  derived and/or modified CDS sequence (opt5) from neuraminidase__InfluenzaA__ADD25306
augaaccccaaucagaagaucauuaccaucggcagcgugugcaugacaauugggauggccaaccugauccuccaaauuggaaauaucaucuccauuuggaucucuagaagcauucagcugggcaaccagaaucagaucgagacguguaaccaauccauuaucaccuacgaaaauaacacaugggucaaucagaccuauguuaacauuucuaauacaaacuucgcugccgggcagagcgugguguccgucaaacuugcgggaaauucuagccugugcccuguguccggcugggcuaucuacagcaaggacaacucuauccggauuggguccaaaggagauguuuuugugauccgcgagccguucauuagcuguucuccccucgaaugcagaaccuuuuuccugacacagggcgcccuucugaaugacaagcacuccaacggcaccaucaaagaucggagcccuuaucgcacgcucaugucuugucccauuggggaggucccuucccccuacaacagcagauuugaauccguggccuggucugcuagcgccugccaugacggaaucaauuggcugaccaucggcauuuccgggccugauaacggagcuguugccgugcugaaguauaauggcaucauuacagacaccaucaagagcuggcggaacaauauucuccgcacacaagagucugagugugcgugcgucaacggguccuguuucaccgugaugacggaugaaccgagcgacggacaggccucuuacaaaaucuuuagaaucgagaagggcaaaauugugaaguccgucgaaaugaaugcucccaacuaucacuacgaggagugcuccuguuacccugauucuggcgaaaucacaugcguuugccgggacaauuggcaugggagcaaccgccccuggguguccuucaaucagaaccuggaguaucagauuggauacaucuguagcggcauuuuuggggauaauccuagacccaacgacaaaaccggaucuugcggcccgguguccagcaauggggccaacggagucaagggcuucucuuuuaaguauggcaacgggguguggaucggacggacaaaauccauuagcucccgcaauggcuucgaaaugaucugggauccuaacggguggaccggaaccgacaauaacuuuucuaucaagcaagacauuguuggcaucaaugaguggagcggguacuccggcucuuucgugcagcaccccgaacuuacaggacuggauuguauuagaccuugcuucugggucgagcucauccggggccgccccaaagagaacacgauuuggaccagcggguccagcaucucuuuuuguggagugaauagcgacacaguuggcuggagcuggcccgauggggcugaacugccuuucaccaucgacaaguga

SEQ ID NO: 210287 - RNA, 1410 nt, Artificial Sequence; identical to SEQ ID NO: 208810
  derived and/or modified CDS sequence (opt5) from neuraminidase__InfluenzaA__ADD25308

SEQ ID NO: 210288 - RNA, 1410 nt, Artificial Sequence; identical to SEQ ID NO: 208810
  derived and/or modified CDS sequence (opt5) from neuraminidase__InfluenzaA__ADD25310

SEQ ID NO: 210289 - RNA, 1410 nt, Artificial Sequence; identical to SEQ ID NO: 208810
  derived and/or modified CDS sequence (opt5) from neuraminidase__InfluenzaA__ADD25312

SEQ ID NO: 210290 - RNA, 1410 nt, Artificial Sequence; identical to SEQ ID NO: 208810
  derived and/or modified CDS sequence (opt5) from neuraminidase__InfluenzaA__ADD25314

SEQ ID NO: 210291 - RNA, 1410 nt, Artificial Sequence; identical to SEQ ID NO: 208810
  derived and/or modified CDS sequence (opt5) from neuraminidase__InfluenzaA__ADD25316

SEQ ID NO: 210292 - RNA, 1410 nt, Artificial Sequence; identical to SEQ ID NO: 208810
  derived and/or modified CDS sequence (opt5) from neuraminidase__InfluenzaA__ADD29799

SEQ ID NO: 210293 - RNA, 1410 nt, Artificial Sequence; identical to SEQ ID NO: 208810
  derived and/or modified CDS sequence (opt5) from neuraminidase__InfluenzaA__ADD29800

SEQ ID NO: 210294 - RNA, 1410 nt, Artificial Sequence; identical to SEQ ID NO: 208810
  derived and/or modified CDS sequence (opt5) from neuraminidase__InfluenzaA__ADD29801

SEQ ID NO: 210295 - RNA, 1410 nt, Artificial Sequence; identical to SEQ ID NO: 208810
  derived and/or modified CDS sequence (opt5) from neuraminidase__InfluenzaA__ADD29802

SEQ ID NO: 210296 - RNA, 1410 nt, Artificial Sequence; identical to SEQ ID NO: 208810
  derived and/or modified CDS sequence (opt5) from neuraminidase__InfluenzaA__ADD29803

SEQ ID NO: 210297 - RNA, 1410 nt, Artificial Sequence; identical to SEQ ID NO: 208810
  derived and/or modified CDS sequence (opt5) from neuraminidase__InfluenzaA__ADD29804

SEQ ID NO: 210298 - RNA, 1410 nt, Artificial Sequence; identical to SEQ ID NO: 208810
  derived and/or modified CDS sequence (opt5) from neuraminidase__InfluenzaA__ADD29805

SEQ ID NO: 210299 - RNA, 1410 nt, Artificial Sequence; identical to SEQ ID NO: 208810
  derived and/or modified CDS sequence (opt5) from neuraminidase__InfluenzaA__ADD29806

SEQ ID NO: 210300 - RNA, 1410 nt, Artificial Sequence; identical to SEQ ID NO: 208810
  derived and/or modified CDS sequence (opt5) from neuraminidase__InfluenzaA__ADD29807

SEQ ID NO: 210301 - RNA, 1410 nt, Artificial Sequence; identical to SEQ ID NO: 208810
  derived and/or modified CDS sequence (opt5) from neuraminidase__InfluenzaA__ADD29808

SEQ ID NO: 210302 - RNA, 1410 nt, Artificial Sequence; identical to SEQ ID NO: 208810
  derived and/or modified CDS sequence (opt5) from neuraminidase__InfluenzaA__ADD52538

SEQ ID NO: 210303 - RNA, 1410 nt, Artificial Sequence; identical to SEQ ID NO: 210033
  derived and/or modified CDS sequence (opt5) from neuraminidase__InfluenzaA__ADD74353

SEQ ID NO: 210304 - RNA, 1410 nt, Artificial Sequence; identical to SEQ ID NO: 208810
  derived and/or modified CDS sequence (opt5) from neuraminidase__InfluenzaA__ADD74373

SEQ ID NO: 210305 - RNA, 1410 nt, Artificial Sequence; identical to SEQ ID NO: 208810
  derived and/or modified CDS sequence (opt5) from neuraminidase__InfluenzaA__ADD74383

SEQ ID NO: 210306 - RNA, 1410 nt, Artificial Sequence; identical to SEQ ID NO: 208810
  derived and/or modified CDS sequence (opt5) from neuraminidase__InfluenzaA__ADD74401

SEQ ID NO: 210307 - RNA, 1410 nt, Artificial Sequence
  derived and/or modified CDS sequence (opt5) from neuraminidase__InfluenzaA__ADD74411
augaaccccaaucagaagaucauuaccaucggcagcgugugcaugacaauugggauggccaaccugauccuccaaauuggaaauaucaucuccauuuggaucucucacagcauucagcugggcaaccagaaucagaucgagacguguaaccaauccgucauuaccuacgaaaauaacacauggguuaaucagaccuaugugaacaucucuaauacaaacguggcugccgggcagagcgucguguccguuaaacuugcgggaaauucuagccugugcccuguguccggcugggcuauuuacagcaaggacaacucuaucagaaucggguccaaaggagaugucuucgugauucgggagccguuuaucagcuguucuccccucgaaugccgcaccuucuuucugacacagggcgcccuucugaaugacaagcauuccaacggcaccauuaaagauagaagcccuuaucggacgcucaugucuugucccaucggggagguuccuucccccuacaacagccgcuucgaauccguggccuggucugcuagcgccugccacgacggaauuaauuggcugaccaucggcaucuccgggccugauaacggagcugucgccgugcugaaguauaauggcauuaucacagacaccauuaagagcuggagaaacaauauccuccggacacaagagucugagugugcgugcgugaacggguccuguuuuaccgucaugacggauggaccgagcgacggccaggccucuuacaaaauuuuccgcaucgaaaagggcaaaaucguuaagagcguggagaugaaugcucccaacuaucauuacgaagagugcuccuguuacccugauucuagcgagauuacaugcgugugcagagacaauuggcacggguccaaccggcccugggucagcuuuaaucagaaccuggaauaucagaucggauacauuuguucuggcaucuucggggauaauccucgccccaacgacaaaaccggauccugcggcccggugagcucuaauggggccaacggaguuaagggcuuuuccuucaaguauggcagcgggguguggauuggaagaacaaaauccaucucuagccgguccggcuuugagaugauuugggauccuaacggguggaccggaaccgacaauaacuucucuaucaagcaagacaucgucggcauuaaugaauggagcggguacuccggcagcuuugugcagcaucccgagcuuacaggacuggauuguauccgcccuugcuucuggguugaacucauuagaggccggcccaaagagaacacgaucuggaccucuggguccagcauuucuuucuguggagucaauuccgacacagugggcuggagcuggcccgauggggcugagcugccuuuuaccaucgacaaguga

SEQ ID NO: 210308 - RNA, 1410 nt, Artificial Sequence; identical to SEQ ID NO: 208810
  derived and/or modified CDS sequence (opt5) from neuraminidase__InfluenzaA__ADD74421

SEQ ID NO: 210309 - RNA, 1410 nt, Artificial Sequence; identical to SEQ ID NO: 208810
  derived and/or modified CDS sequence (opt5) from neuraminidase__InfluenzaA__ADD74431

SEQ ID NO: 210310 - RNA, 1410 nt, Artificial Sequence
  derived and/or modified CDS sequence (opt5) from neuraminidase__InfluenzaA__ADD74441
augaaccccaaucagaagaucauuaccaucggcagcgugugcaugacaauugggauggccaaccugauccuccaaauuggaaauaucaucuccauuuggaucucucacagcauucagcugggcaaccagaaucagaucgagacguguaaccaauccgucauuaccuacgaaaauaacacauggguuaaucagaccuaugugaacaucucuaauacaaacuucgcugccgggcagagcguggucuccgugaaacuugcgggaaauucuagccugugcccuguuuccggcugggcuauuuacagcaaggacaacucuaucagaaucggguccaaaggagauguguuugucauucgggagccguucaucagcuguucuccccucgaaugccgcaccuuuuuccugacacagggcgcccuucugaaugacaagcauuccaacggcaccauuaaagauagaagcccuuaucggacgcucaugucuugucccaucggggaggugccuucccccuacaacagccgcuuugaauccguugccuggucugcuagcgccugccacgacggaauuaauuggcugaccaucggcaucuccgggccugauaacggagcuguggccguccugaaguauaauggcauuaucacagacaccauuaagagcuggagaaacaauauccuccggacacaagagucugagugugcgugcgugaacggguccuguuucaccgugaugacggauggaccgagcgacggccaggccucuuacaaaauuuuucgcaucgaaaagggcaaaaucgucaagagcguugagaugaaugcucccaacuaucauuacgaagagugcuccuguuacccugauucuagcgagauuacaugcgugugcagagacaauuggcacggguccaaccggcccugggugagcuucaaucagaaccuggaauaucagaucggauacauuuguucuggcaucuuuggggauaauccucgccccaacgacaaaaccggauccugcggcccggucagcucuaauggggccaacggagugaagggcuucuccuuuaaguauggcaacgggguuuggauuggaagaacaaaaagcaucuccucucggaauggcuucgagaugauuugggauccuaacggguggaccggaaccgacaauaucuuuagcaucaagcaagacauugugggcaucaacgaaugguccggguacucuggcagcuucguccagcaucccgagcuuacaggacuggauuguauucgcccuugcuucuggguggaacucaucagaggccggcccaaagagaauacgauuuggaccuccgggagcucuaucuccuuuuguggaguuaacagcgacacagugggcuggucuuggcccgauggggcugagcugccuuucaccaucgacaaguga

SEQ ID NO: 210311 - RNA, 1410 nt, Artificial Sequence; identical to SEQ ID NO: 208810
  derived and/or modified CDS sequence (opt5) from neuraminidase__InfluenzaA__ADD74451

SEQ ID NO: 210312 - RNA, 1410 nt, Artificial Sequence; identical to SEQ ID NO: 208810
  derived and/or modified CDS sequence (opt5) from neuraminidase__InfluenzaA__ADD74461

SEQ ID NO: 210313 - RNA, 1410 nt, Artificial Sequence; identical to SEQ ID NO: 208810
  derived and/or modified CDS sequence (opt5) from neuraminidase__InfluenzaA__ADD74471

SEQ ID NO: 210314 - RNA, 1410 nt, Artificial Sequence; identical to SEQ ID NO: 208810
  derived and/or modified CDS sequence (opt5) from neuraminidase__InfluenzaA__ADD74481

SEQ ID NO: 210315 - RNA, 1410 nt, Artificial Sequence; identical to SEQ ID NO: 209827
  derived and/or modified CDS sequence (opt5) from neuraminidase__InfluenzaA__ADD74491

SEQ ID NO: 210316 - RNA, 1410 nt, Artificial Sequence; identical to SEQ ID NO: 208810
  derived and/or modified CDS sequence (opt5) from neuraminidase__InfluenzaA__ADD74501

SEQ ID NO: 210317 - RNA, 1410 nt, Artificial Sequence; identical to SEQ ID NO: 208810
  derived and/or modified CDS sequence (opt5) from neuraminidase__InfluenzaA__ADD74511

SEQ ID NO: 210318 - RNA, 1410 nt, Artificial Sequence; identical to SEQ ID NO: 209828
  derived and/or modified CDS sequence (opt5) from neuraminidase__InfluenzaA__ADD74521

SEQ ID NO: 210319 - RNA, 1410 nt, Artificial Sequence; identical to SEQ ID NO: 208810
  derived and/or modified CDS sequence (opt5) from neuraminidase__InfluenzaA__ADD74531

SEQ ID NO: 210320 - RNA, 1410 nt, Artificial Sequence
  derived and/or modified CDS sequence (opt5) from neuraminidase__InfluenzaA__ADD74551
augaaccccaaucagaagaucauuaccaucggcagcgugugcaugacaauugggauggccaaccugauccuccaaauuggaaauaucaucuccauuuggaucucucacagcauucagcugggcaaccagaaucagaucgagacguguaaccaauccgucauuaccuacgaaaauaacacauggguuaaucagaccuaugugaacaucucuaauacaaacuucgcugccgggcagagcguggucuccgugaaacuugcgggaaauucuagccugugcccuguuuccggcugggcuauuuacagcaaggacaacucugugagaaucggguccaaaggagaugucuuugugauccgggagccguucauuagcuguucuccccucgaaugccgcaccuuuuuccugacacagggcgcccuucugaaugacaagcauuccaacggcaccaucaaagauagaagcccuuaucggacgcucaugucuugucccauuggggagguuccuucccccuacaacagccgcuuugaauccguggccuggucugcuagcgccugccacgacggaaucaauuggcugaccauuggcaucuccgggccugauuauggagcugucgccgugcugaaguacaacggcaucauuacagacaccaucaagagcuggagaaauaacauucuccggacacaagagucugagugugcgugcgugaauggguccuguuucaccgucaugacggauggaccgagcgacggccaggccucuuauaaaaucuuucgcauugaaaagggcaaaaucguuaagagcguggagaugaacgcucccaauuaccauuacgaagagugcuccuguuauccugauucuagcgagaucacaugcgugugcagagacaacuggcacggguccaaucggcccugggucagcuucaaccagaaucuggaauaccagauuggauauaucuguucuggcauuuuuggggauaacccucgccccaaugacaaaaccggauccugcggcccggugagcucuaacggggccaauggaguuaagggcuucuccuuuaaguacggcaacgggguguggaucggaagaacaaaaagcauuuccucucggaacggcuucgagaugaucugggauccuaauggguggaccggaaccgacaacaauuuuagcauuaagcaagacaucgucggcaucaacgaaugguccggguauucuggcagcuucgugcagcaucccgagcuuacaggacuggauuguauucgcccuugcuucuggguugaacucaucagaggccggcccaaagagaauacgauuuggaccuccgggagcucuaucuccuuuuguggagugaacagcgacacagucggcuggucuuggcccgauggggcugagcugccuuucaccauugacaaguga

SEQ ID NO: 210321 - RNA, 1410 nt, Artificial Sequence; identical to SEQ ID NO: 208810
  derived and/or modified CDS sequence (opt5) from neuraminidase__InfluenzaA__ADD74561

SEQ ID NO: 210322 - RNA, 1410 nt, Artificial Sequence; identical to SEQ ID NO: 208810
  derived and/or modified CDS sequence (opt5) from neuraminidase__InfluenzaA__ADD74571

SEQ ID NO: 210323 - RNA, 1410 nt, Artificial Sequence
  derived and/or modified CDS sequence (opt5) from neuraminidase__InfluenzaA__ADD74581
augaaccccaaucagaagaucauuaccaucggcagcgugugcaugacaauugggauggccaaccugauccuccaaauuggaaauaucaucuccauuuggaucucucacagcauucagcugggcaaccagaaucagaucgagacguguaaccaauccgucauuaccuacgaaaauaacacauggguuaaucagaccuaugugaacaucucuaauacaaacuucgcugccgggcagagcguggucuccgugaaacuugcgggaaauucuagccugugcccuguuuccggcugggcuauuuacagcaaggacaacucuaucagaaucggguccaaaggagauguguuugucauucgggagccguucaucagcuguucuccccucgaaugccgcaccuuuuuccugacacagggcgcccuucugaaugacaagcauuccaacggcaccauuaaagauagaagcccuuaucggacgcucaugucuugucccaucggggaggugccuucccccuacaacagccgcuuugaauccguugccuggucugcuagcgccugccacgacggaauuaauuggcugaccaucggcaucuccgggccugauaacggagcuguggccguccugaaguauaauggcauuaucacagacaccauuaagagcuggagaaacaauauccuccggacacaagagucugagugugcgugcgugaacggguccuguuucaccgugaugacggauggaccgagcgacggccaggccucuuacaaaauuuuucgcaucgaaaagggcaaaaucgucaagagcguugagaugaaugcucccaacuaucauuacgaagagugcuccuguuacccugauucuagcgagauuacaugcgugugcagagacaauuggcacggguccaaccggcccugggugagcuucaaucagaaccuggaauaucagaucggauacauuuguucuggcaucuuuggggauaauccucgccccaacgacaaaaccggauccugcggcccggucagcucuaauggggccaacggagugaagggcuucuccuuuaaguauggcaacgggguuuggauuggaagaacaaaaagcaucuccucucggaauggcuucgagaugauuugggauccuaacggguggaccggaaccgacaauaacuuuagcaucaagcaagacaucgugggcauuaaugaaugguccggguacucuggcagcuucguccagcaucccgagcuuacaggacuggauuguauccgcccuugcuucuggguggaacucauuagaggccggcccaaagagaacacgaucuggaccuccgggagcucuauuuccuuuuguggaguuaauagcgacgcugugggcuggucuuggcccgauggggccgagcugccuuucacaaucgacaaguga

SEQ ID NO: 210324 - RNA, 1410 nt, Artificial Sequence; identical to SEQ ID NO: 208810
  derived and/or modified CDS sequence (opt5) from neuraminidase__InfluenzaA__ADD74591

SEQ ID NO: 210325 - RNA, 1410 nt, Artificial Sequence; identical to SEQ ID NO: 208810
  derived and/or modified CDS sequence (opt5) from neuraminidase__InfluenzaA__ADD74601

SEQ ID NO: 210326 - RNA, 1410 nt, Artificial Sequence
  derived and/or modified CDS sequence (opt5) from neuraminidase__InfluenzaA__ADD74611
augaaccccaaucagaagaucauuaccaucggcagcgugugcaugacaauugggauggccaaccugauccuccaaauuggaaauaucaucuccauuuggaucucucacagcauucagcugggcaaccagaaucagaucgagacguguaaccaauccgucauuaccuacgaaaauaacacauggguuaaucagaccuaugugaacaucucuaauacaaacuucgcugccgggcagagcguggucuccgugaaacuugcgggaaauucuagccugugcccuguuuccggcugggcuauuuacagcaaggacaacucuaucagaaucggguccaaaggagauguguuugucauucgggagccguucaucagcuguucuccccucgaaugccgcaccuuuuuccugacacagggcgcccuucugaaugacaagcauuccaacggcaccauuaaagauagaagcccuuaucggacgcucaugucuugucccaucggggaggugccuucccccuacaacagccgcuuugaauccguugccuggucugcuagcgccugccacgacggaauuaauuggcugaccaucggcaucuccgggccugauaacggagcuguggccguccugaaguauaauggcauuaucacagacaccauuaagagcuggagaaacaauauccuccggacacaagagucugagugugcgugcgugaacggguccuguuucaccgugaugacggauggaccgagcgacggccaggccucuuacaaaauuuuucgcaucgaaaagggcaaaaucgucaagagcguugagaugaaugcucccaacuaucauuacgaagagugcuccuguuacccugauucuagcgagauuacaugcgugugcagagacaauuggcacggguccaaccggcccugggugagcuucaaucagaaccuggaauaucagaucggauacauuuguucuggcaucuuuggggauaauccucgccccaacgacaaaaccggauccugcggcccggucagcucuaauggggccaacggaauuaagggcuucuccuuuaaguauggcaacgggguguggaucggaagaacaaaaagcauuuccucucggaauggcuucgagaugaucugggauccuaacggguggaccggaaccgacaauaacuuuagcaucaagcaagacauuguuggcaucaaugaaugguccggguacucuggcagcuucgugcagcaucccgagcuuacaggacuggauuguauucgcccuugcuucugggucgaacucaucagaggccggcccaaagagaacacgauuuggaccuccgggagcucuaucuccuuuuguggagugaauagcgacacaguuggcuggucuuggcccgauggggcugagcugccuuucaccaucgacaaguga

SEQ ID NO: 210327 - RNA, 1410 nt, Artificial Sequence; identical to SEQ ID NO: 208810
  derived and/or modified CDS sequence (opt5) from neuraminidase__InfluenzaA__ADD74621

SEQ ID NO: 210328 - RNA, 1410 nt, Artificial Sequence; identical to SEQ ID NO: 208810
  derived and/or modified CDS sequence (opt5) from neuraminidase__InfluenzaA__ADD74631

SEQ ID NO: 210329 - RNA, 1410 nt, Artificial Sequence; identical to SEQ ID NO: 208810
  derived and/or modified CDS sequence (opt5) from neuraminidase__InfluenzaA__ADD74641

SEQ ID NO: 210330 - RNA, 1410 nt, Artificial Sequence; identical to SEQ ID NO: 208810
  derived and/or modified CDS sequence (opt5) from neuraminidase__InfluenzaA__ADD74651

SEQ ID NO: 210331 - RNA, 1410 nt, Artificial Sequence; identical to SEQ ID NO: 210161
  derived and/or modified CDS sequence (opt5) from neuraminidase__InfluenzaA__ADD74661

SEQ ID NO: 210332 - RNA, 1410 nt, Artificial Sequence; identical to SEQ ID NO: 208810
  derived and/or modified CDS sequence (opt5) from neuraminidase__InfluenzaA__ADD74671

SEQ ID NO: 210333 - RNA, 1410 nt, Artificial Sequence; identical to SEQ ID NO: 208810
  derived and/or modified CDS sequence (opt5) from neuraminidase__InfluenzaA__ADD74681

SEQ ID NO: 210334 - RNA, 1410 nt, Artificial Sequence
  derived and/or modified CDS sequence (opt5) from neuraminidase__InfluenzaA__ADD74691
augaaccccaaucagaagaucauuaccaucggcagcgugugcaugacaauugggauggccaaccugauccuccaaauuggaaauaucaucuccauuuggaucugucacucuauucagcugggcaaccagaaucagaucgagacgugcaaccaaagcgucauuaccuacgaaaauaacacauggguuaaucagaccuaugugaacaucuccaauacaaacuucgcugccgggcagucuguggucagcgugaaacuugcgggaaauuccucucuguguccuguuagcggcugggcuauuuacuccaaggacaacagcaucagaaucgggucuaaaggagauguguuugucauucgggagccguucaucuccugcagcccccucgaaugucgcaccuuuuuccugacacagggcgcccuucugaaugacaagcauucuaacggcaccauuaaagauagauccccuuaucggacgcucaugagcugccccaucggggaggugccuucucccuacaacucccgcuuugaaagcguugccugguccgcuucugccugucacgacggaauuaauuggcugaccaucggcaucagcgggccugauaacggagcuguggccguccugaaguauaauggcauuaucacagacaccauuaaguccuggagaaacaauauccuccggacacaagagagcgagugcgcgugugugaacgggucuugcuucaccgugaugacggauggaccguccgacggccaggccagcuacaaaauuuuucgcaucgaaaagggcaaaaucgucaagucuguugagaugaaugcucccaacuaucauuacgaagaguguagcugcuacccugauuccucugagauuacaugcguguguagagacaauuggcacgggagcaaccggcccuggguguccuucaaucagaaccuggaauaucagaucggauacauuugcagcggcaucuuuggggauaauccucgccccaacgacaaaaccggaucuuguggcccggucuccagcaauggggccaacggagugaagggcuucucuuuuaaguauggcaacgggguuuggauuggaagaacaaaauccaucagcucccggaauggcuucgagaugauuugggauccuaacggguggaccggaaccgacaauaacuuuucuaucaagcaagacaucgugggcauuaaugaauggagcggguacuccggcucuuucguccagcaucccgagcuuacaggacuggauugcauccgcccuuguuucuggguggaacucauuagaggccggcccaaagagaacacgaucuggaccagcggguccagcauuucuuuuugcggaguuaauuccgacacagugggcuggagcuggcccgauggggcugagcugccuuucaccaucgacaaguga

SEQ ID NO: 210335 - RNA, 1410 nt, Artificial Sequence; identical to SEQ ID NO: 208810
  derived and/or modified CDS sequence (opt5) from neuraminidase__InfluenzaA__ADD74701

SEQ ID NO: 210336 - RNA, 1410 nt, Artificial Sequence; identical to SEQ ID NO: 208810
  derived and/or modified CDS sequence (opt5) from neuraminidase__InfluenzaA__ADD74711

SEQ ID NO: 210337 - RNA, 1410 nt, Artificial Sequence; identical to SEQ ID NO: 208810
  derived and/or modified CDS sequence (opt5) from neuraminidase__InfluenzaA__ADD74721

SEQ ID NO: 210338 - RNA, 1410 nt, Artificial Sequence; identical to SEQ ID NO: 208810
  derived and/or modified CDS sequence (opt5) from neuraminidase__InfluenzaA__ADD74731

SEQ ID NO: 210339 - RNA, 1410 nt, Artificial Sequence
  derived and/or modified CDS sequence (opt5) from neuraminidase__InfluenzaA__ADD74741
augaaccccaaucagaagaucauuaccaucggcagcgugugcauuacaaucgggauggccaaccugauucuccaaaucggaaauaucauuuccaucuggauuucucacagcauccagcugggcaaccagaaucagauugagacguguaaccaauccgucaucaccuacgaaaauaacacauggguuaaucagaccuaugugaacauuucuaauacaaacuucgcugccgggcagagcguggucuccgugaaacuugcgggaucuagcucccugugcccuguuagcggcugggcuaucuacucuaaggacaauuccaucagaauugggagcaaaggagauguguuugucauccgggagccguucauuucuuguagcccccucgaaugccgcaccuuuuuccugacacagggcgcccuucugaacgacaagcauuccaauggcaccaucaaagauagaucuccuuaucggacgcucauguccugucccauuggggaggugccuagccccuacaacucccgcuuugaaucuguugccuggagcgcuuccgccugccacgacggaaucaacuggcugaccaucggcauuagcgggccugauaauggagcuguggccguccugaaguauaacggcaucauuacagacaccaucaagucuuggagaaauaacauucuccggacacaagaguccgagugugcgugcgugaaugggagcuguuucaccgugaugacggauggaccgucugacggccaggccagcuacaaaaucuuucgcaucgaaaagggcaaaauugucaaguccguugagaugaacgcucccaauuaucauuacgaagagugcucuuguuacccugauagcuccgagaucacaugcgugugcagagacaacuggcacgggagcaaucggcccugggugucuuucaaccagaaucuggaauaucagauuggauacaucuguuccggcauuuuuggggauaacccucgccccaaugacaaaaagggaagcugcggcccggucucuuccaacggggccaauggagugaagggcuucagcuuuaaauauggcaacgggguuuggaucggaagaaccaaguccauuucuagccggaacggcuucgagaugaucugggauccuaauggguggacaggaaccgacaacaauuuuuccaucaaacaagacauugugggcaucaacgaauggucuggguacagcggcuccuucguccagcaucccgagcuuaccggacuggauuguauucgcccuugcuucuggguggaacucaucagaggccggcccaaggagaauacaauuuggacgagcgggucuuccaucagcuuuuguggaguuaacucugacaccgugggcugguccuggcccgauggggcugagcugccuuucacaaucgacaaauga

SEQ ID NO: 210340 - RNA, 1410 nt, Artificial Sequence
  derived and/or modified CDS sequence (opt5) from neuraminidase__InfluenzaA__ADD74751
augaaccccaaucagaagaucauuaccaucggcagcgugugcaugacaauugggauggccaaccugauccuccaaauuggaaauaucaucuccauuuggaucucucacagcauucagcugggcaacaaaaaucagaucgagacguguaaccaguccgucauuaccuacgaaaauaacacauggguuaaucaaaccuaugugaacaucucuaauacaaacuucgcugccgggcagagcguggucuccgugaaacuugcgggaaauucuagccugugcccuguuuccggcugggcuauuuacagcaaggacaacucuaucagaaucggguccaagggagauguguuugucauucgggagccguucaucagcuguucuccccucgaaugccgcaccuuuuuccugacacagggcgcccuucugaaugacaaacauuccaacggcaccauuaaggauagaagcccuuaucggacgcucaugucuugucccaucggggaggugccuucccccuacaacagccgcuuugaauccguugccuggucugcuagcgccugccacgacggaauuaauuggcugaccaucggcaucuccgggccugauaacggagcuguggccguccugaaguauaauggcauuaucacagacaccauuaaaagcuggagaaacaauauccuccggacacaggagucugagugugcgugcgugaacggguccuguuucaccgugaugacggauggaccgagcgacggccaagccucuuacaagauuuuucgcaucgaaaaaggcaagaucgucaaaagcguugagaugaaugcucccaacuaucauuacgaagagugcuccuguuacccugauucuagcgagauuacaugcgugugcagagacaauuggcacggguccaaccggcccugggugagcuucaaucagaaccugaaguaucagaucggauacauuuguucuggcaucuuuggggauaauccucgccccaacgacaagaaaggauccugcggcccggucagcucuaauggggccaacggagugaagggcuucuccuuuaaauauggcaacgggguuuggauuggaagaaccaagagcaucuccucucggaauggcuucgaaaugauuugggauccuaacggguggacaggaaccgacaauaacuuuagcaucaaacaggacaucgugggcaugaaugagugguccggguacucuggcagcuucguccaacaucccgaacuuaccggacuggauuguauucgcccuugcuucuggguggagcucaucagaggccggcccaaggaaaacacaauuuggacguccgggagcucuaucuccuuuuguggaguuaauagcgacaccgugggcuggucuuggcccgauggggcugagcugccuuucacaauugacaaauga

SEQ ID NO: 210341 - RNA, 1410 nt, Artificial Sequence
  derived and/or modified CDS sequence (opt5) from neuraminidase__InfluenzaA__ADD74761
augaaccccaaucagaagaucauuaccaucggcagcgugugcaugacaauugggauggccaaccugauccuccaaauuggaaauaucaucuccauuuggaucucucacagcauucagcugggcaaccagaaucagaucgagacguguaaccaauccgucauuaccuacgaaaauaacacauggguuaaucagaccuaugugaacaucucuaauacaaacuucgcugccgggcagagcguggucuccgugaaacuugcgggaaauucuagccugugcccuguuuccggcugggcuauuuacagcaaggacaacucuaucagaaucggguccaaaggagauguguuugucauucgggagccguucaucagcuguucuccccucgaaugccgcaccuuuuuccugacacagggcgcccuucugaaugacaagcauuccaacggcaccauuaaagauagaagcccuuaucggacgcucaugucuugucccaucggggaggugccuucccccuacaacagccgcuuugaauccguugccuggucugcuagcgccugccacgacggaauuaauuggcugaccaucggcaucuccgggccugauaacggagcuguggccguccugaaguauaauggcauuaucacagacaccauuaagagcuggagaaacaauauccuccggacacaagagucugagugugcgugcgugaacggguccuguuucaccgugaugacggauggaccgagcgacggccaggccucuuacaaaauuuuucgcaucgaaaagggcaaaaucgucaagagcguugagaugaaugcucccaacuaucauuacgaagagugcuccuguuacccugauucuagcgagauuacaugcgugugcagagacaauuggcacggguccaaccggcccugggugagcuucaaucagaaccuggaauaucagaucggauacauuuguucuggcaucuuuggggauaauccucgccccaacgacaaaaccggauccugcggcccggucagcucuaauggggccaacggagugaagggcuucuccuuuaaguauggcaacgggguuuggauuggaagaacaaaaagcaucuccucucggaauggcuucgagaugauuugggauccuaacggguggaccggaaccgacaauaacuuuagcaucaagcaagacaucgugggcauuaaugaaugguccggguacucuggcagcuucguccagcaucccgagcuuacaggacuggauuguauccgcccuugcuucuggguggaacucauuagaggccggcccaaagagaacacgaucuggaccuccgggagcucuauuuccuuuuguggaaucaauagcgacacaguuggcuggucuuggcccgauggggcugagcugccuuucaccaucgacaaguga

SEQ ID NO: 210342 - RNA, 1410 nt, Artificial Sequence; identical to SEQ ID NO: 208810
  derived and/or modified CDS sequence (opt5) from neuraminidase__InfluenzaA__ADD74791

SEQ ID NO: 210343 - RNA, 1410 nt, Artificial Sequence; identical to SEQ ID NO: 209393
  derived and/or modified CDS sequence (opt5) from neuraminidase__InfluenzaA__ADD74811

SEQ ID NO: 210344 - RNA, 1410 nt, Artificial Sequence; identical to SEQ ID NO: 208810
  derived and/or modified CDS sequence (opt5) from neuraminidase__InfluenzaA__ADD74821

SEQ ID NO: 210345 - RNA, 1410 nt, Artificial Sequence
  derived and/or modified CDS sequence (opt5) from neuraminidase__InfluenzaA__ADD74831
augaaccccaaucagaagaucauuaccaucggcagcauuugcaugacaaucgggauggccaaccugauucuccaaaucggaaauaucauuuccaucuggauuucucacagcauccagcugggcaaccagaaucagauugagacguguaaccaauccgugaucaccuacgaaaauaacacaugggucaaucagaccuauguuaacauuucuaauacaaacuucgcugccgggcagagcgugguguccgucaaacuugcgggaaauucuagccugugcccuguguccggcugggcuaucuacagcaaggacaacucuaucagaauuggguccaaaggagauguuuuugugauccgggagccguucauuagcuguucuccccucgaaugccgcaccuuuuuccugacacagggcgcccuucugaaugacaagcauuccaacggcaccaucaaagauagaagcccuuaucggacgcucaugucuugucccauuggggaggucccuucccccuacaacagccgcuuugaauccguggccuggucugcuagcgccugccacgacggaaucaauuggcugaccaucggcauuuccgggccugauaacggagcuguugccgugcugaaguauaauggcaucauuacagacaccaucaagagcuggagaaacaauauucuccggacacaagagucugagugugcgugccugaacggguccuguuucaccgucaugacggauggaccgagcgacggccaggccucuuacaaaaucuuucgcaucgaaaagggcaaaauugucaagagcguggagaugaaugcucccaacuaucauuacgaagagugcuccuguuacccugauucuagcgagaucacaugcgugugcagagacaauuggcacggguccaaccggcccuggguuagcuucaaucagaaccuugaauaucagauuggauacaucuguucuggcauuuuuggggauaauccucgccccaacgacaaaaccggauccugcggcccggugagcucuaauggggccaacggagugaagggcuucuccuuuaaguauggcaacggggucuggaucggaagaacaaaaagcauuuccucucggaauggcuucgagaugaucugggauccuaacggguggaccggaaccgacaauaacuuuagcaucaagcaagacauugugggcaucaaugaaugguccggguacucuggcagcuucguucagcaucccgagcugacaggacucgauuguauucgcccuugcuucuggguggaacugaucagaggccggcccaaagagaacacgauuuggaccuccgggagcucuaucuccuuuuguggagucaauagcgacacagugggcuggucuuggcccgauggggcugagcuuccuuucaccaucgacaaguga

SEQ ID NO: 210346 - RNA, 1410 nt, Artificial Sequence; identical to SEQ ID NO: 208810
  derived and/or modified CDS sequence (opt5) from neuraminidase__InfluenzaA__ADD74841

SEQ ID NO: 210347 - RNA, 1410 nt, Artificial Sequence; identical to SEQ ID NO: 208810
  derived and/or modified CDS sequence (opt5) from neuraminidase__InfluenzaA__ADD74851

SEQ ID NO: 210348 - RNA, 1410 nt, Artificial Sequence; identical to SEQ ID NO: 209917
  derived and/or modified CDS sequence (opt5) from neuraminidase__InfluenzaA__ADD74861

SEQ ID NO: 210349 - RNA, 1410 nt, Artificial Sequence; identical to SEQ ID NO: 208810
  derived and/or modified CDS sequence (opt5) from neuraminidase__InfluenzaA__ADD74871

SEQ ID NO: 210350 - RNA, 1410 nt, Artificial Sequence; identical to SEQ ID NO: 208810
  derived and/or modified CDS sequence (opt5) from neuraminidase__InfluenzaA__ADD74881

SEQ ID NO: 210351 - RNA, 1410 nt, Artificial Sequence; identical to SEQ ID NO: 208810
  derived and/or modified CDS sequence (opt5) from neuraminidase__InfluenzaA__ADD74891

SEQ ID NO: 210352 - RNA, 1410 nt, Artificial Sequence; identical to SEQ ID NO: 208810
  derived and/or modified CDS sequence (opt5) from neuraminidase__InfluenzaA__ADD74901

SEQ ID NO: 210353 - RNA, 1410 nt, Artificial Sequence; identical to SEQ ID NO: 208810
  derived and/or modified CDS sequence (opt5) from neuraminidase__InfluenzaA__ADD74911

SEQ ID NO: 210354 - RNA, 1410 nt, Artificial Sequence; identical to SEQ ID NO: 208810
  derived and/or modified CDS sequence (opt5) from neuraminidase__InfluenzaA__ADD74921

SEQ ID NO: 210355 - RNA, 1410 nt, Artificial Sequence; identical to SEQ ID NO: 208810
  derived and/or modified CDS sequence (opt5) from neuraminidase__InfluenzaA__ADD74941

SEQ ID NO: 210356 - RNA, 1410 nt, Artificial Sequence
  derived and/or modified CDS sequence (opt5) from neuraminidase__InfluenzaA__ADD74961
augaaccccaaucagaagaucauuaccaucggcagcgugugcaugacaauugggauggccaaccugauccuccaaauuggaaauaucaucuccauuuggaucucucacagcauucagcugggcaaccagaaucagaucgggacguguaaccaauccgucauuaccuacgagaauaacacauggguuaaucauaccuaugugaacaucucuaauacaaacuucgcugccggacagagcguggucuccgugaaacuugcgggcaauucuagccugugcccuguuuccgggugggcuauuuacagcaaggacaacucugugagaaucggauccaaaggcgaugucuuugugauccgggaaccguucauuagcuguucuccccucgagugccgcaccuuuuuccugacacagggcgcccuucugaaugacaagcacuccaacgggaccaucaaagauagaagcccuuaucggacgcucaugucuugucccauuggagaaguuccuucccccuacaacagccgcuuugaguccguggccuggucugcuagcgccugccaugacggcaucaauuggcugaccauugggaucuccggaccugauaacggcgcugucgccgugcugaaguauaaugggaucauuacagacaccaucaagagcuggagaaacaauauucuccggacacaggaaucugagugugcgugcgugaacggauccuguuucaccgucaugacggauggcccgagcgacggccaagccucuuacaaaaucuuucgcauugagaaggggaaaaucguuaagagcguggaaaugaaugcucccaacuaucacuacgaggaaugcuccuguuacccugauucuagcgagaucacaugcgugugcagagacaauuggcauggauccaaccggcccugggucagcuucaaucagaaccuggaguaucagauuggcuacaucuguucugggauuuuuggagauaauccucgccccaacgacaaaaccggcuccugcgggccggugagcucuaauggagccaacggcguuaagggcuucuccuuuaaguaugggaacggaguguggaucggcagaacaaaaagcauuuccucucggaauggguucgaaaugaucugggauccuaacggauggaccggcaccgacaauaacuuuagcauuaagcaggacaucgucgggaucaaugagugguccggcuacucuggcagcuucgugcaacaccccgaacuuacaggacuggauuguauucgcccuugcuucuggguugagcucaucagagggcggcccaaagaaaacacgauuuggaccuccggaagcucuaucuccuuuuguggcgugaauagcgacacagucggguggucuuggcccgauggagcugagcugccuuucaccauugacaaguga

SEQ ID NO: 210357 - RNA, 1410 nt, Artificial Sequence; identical to SEQ ID NO: 208810
  derived and/or modified CDS sequence (opt5) from neuraminidase__InfluenzaA__ADD74971

SEQ ID NO: 210358 - RNA, 1410 nt, Artificial Sequence
  derived and/or modified CDS sequence (opt5) from neuraminidase__InfluenzaA__ADD74981
augaaccccaaucagaagaucauuaccaucggcagcgugugcaugacaauugggauggccaaccugauccuccaaauuggaaauaucaucuccauuuggaucucucacagcauucagcugggcaaccagaaucagaucgagacguguaaccaauccauuaucaccuacgaaaauaacacaugggucaaucagaccuauguuaacauuucuaauacaaacuucgcugccgggcagagcgugguguccgucaaacuugcgggaaauucuagccugugcccuguguccggcugggcuaucuacagcaaggacaacucuaucagaauuggguccaaaggagauguuuuugugauccgggagccguucauuagcuguucuccccucgaaugccgcaccuuuuuccugacacagggcgcccuucugaaugacaagcauuccaacggcaccaucaaagauagaagcccuuaucggacgcucaugucuugucccauuggggaggucccuucccccuacaacagccgcuuugaauccguggccuggucugcuagcgccugccacgacggaaucaauuggcugaccaucggcauuuccgggccugauaacggagcuguugccgugcugaaguauaauggcaucauuacagacaccaucaagagcuggagaaacaauauucuccggacacaagagucugagugugcgugcgucaacggguccuguuucaccgugaugacggauggaccgagcgacggccaggccucuuacaaaaucuuucgcaucgaaaagggcaaaauugucaagagcguggagaugaaugcucccaacuaucauuacgaagagugcuccuguuacccugauucuagcgagaucacaugcguuugcagagacaauuggcacggguccaaccggcccugggugagcuucaaucagaaccuggaauaucagauuggauacaucuguucuggcauuuuuggggauaauccucgccccaacgacaaaaccggauccugcggcccggugagcucuaauggggccaacggagucaagggcuucuccuuuaaguauggcaacgggguguggaucggaagaacaaaaagcauuuccucucggagcggcuucgagaugaucugggauccuaauggguggaccggaaccgacaacaauuuuuccaucaagcaagacauuguuggcaucaacgaauggucuggguacagcggcuccuucgugcagcaucccgagcuuacaggacuggauuguauucgcccuugcuucugggucgaacucaucagaggccggcccgaggagaauacgauuuggaccagcgggucuuccaucagcuuuuguggagugaacucugacacaguuggcugguccuggcccgauggggcugaacugccuuucaccaucgacaaauga

SEQ ID NO: 210359 - RNA, 1410 nt, Artificial Sequence; identical to SEQ ID NO: 208810
  derived and/or modified CDS sequence (opt5) from neuraminidase__InfluenzaA__ADD74991

SEQ ID NO: 210360 - RNA, 1410 nt, Artificial Sequence; identical to SEQ ID NO: 208810
  derived and/or modified CDS sequence (opt5) from neuraminidase__InfluenzaA__ADD75001

SEQ ID NO: 210361 - RNA, 1410 nt, Artificial Sequence
  derived and/or modified CDS sequence (opt5) from neuraminidase__InfluenzaA__ADD75011
augaaccccaaucagaagaucauuaccaucggcagcgugugcaugacaauugggauggccaaccugauccuccaaauuggaaauaucaucuccauuuggaucucucacagcauucagcugggcaaccagaaucagaucgagacguguaaccaauccgucauuaccuacgaaaauaacacauggguuaaucagaccuaugugaacaucucuaauacaaacuucgcugccgggcagagcguggucuccgugaaacuugcgggaaauucuagccugugcccuguuuccggcugggcuauuuacagcaaggacaacucuaucagaaucggguccaaaggagauguguuugucauucgggagccguucaucagcuguucuccccucgaaugccgcaccuuuuuccugacacagggcgcccuucugaaugacaagcauuccaacggcaccauuaaagauagaagcccuuaucggacgcucaugucuugucccaucggggaggugccuucccccuacaacagccgcuuugaauccguugccuggucugcuagcgccugccacgacggaauuaauuggcugaccaucggcaucuccgggccugauaacggagcuguggccguccugaaguauaauggcauuaucacagacaccauuaagagcuggagaaacaauauccuccggacacaagagucugagugugcgugcgugaacggguccuguuucaccgugaugacggauggaccgagcgacggccaggccucuuacaaaauuuuucgcaucgaaaagggcaaaaucgucaagagcguugagaugaaugcucccaacuaucauuacgaagagugcuccuguuacccugauucuagcgagauuacaugcgugugcagagacaauuggcacggguccaaccggcccugggugagcuucaaucagaaccuggaauaucagaucggauacauuuguucuggcaucuuuggggauaauccucgccccaacgacaaaaccggauccugcgauccggucagcucuaauggcgccaacggggugaagggauucuccuuuaaguauggcaacggcguuuggauugggagaacaaaaagcaucuccucucggaauggauucgagaugauuugggacccuaacggcuggaccgggaccgacaauaacuuuagcaucaagcaagauaucgugggaauuaaugaaugguccggcuacucugggagcuucguccagcaucccgagcuuacaggccuggacuguauccgcccuugcuucuggguggaacucauuagaggacggcccaaagagaacacgaucuggaccuccggcagcucuauuuccuuuugugggguuaauagcgauacagugggauggucuuggcccgacggcgcugagcugccuuucaccaucgauaaguga

SEQ ID NO: 210362 - RNA, 1410 nt, Artificial Sequence; identical to SEQ ID NO: 210098
  derived and/or modified CDS sequence (opt5) from neuraminidase__InfluenzaA__ADD75031

SEQ ID NO: 210363 - RNA, 1410 nt, Artificial Sequence
  derived and/or modified CDS sequence (opt5) from neuraminidase__InfluenzaA__ADD75041
augaaccccaaucagaagaucauuaccaucggcagcgugugcaugacaauugggauggccaaccugauccuccaaauuggaaauaucaucuccauuuggaucucucacagcauucagcugggcaaccagaaucagaucgagacguguaaccaauccgucauuaccuacgaaaauaaaacauggguuaaccagaccuaugugaauaucucuaacacaaauuucgcugccgggcagagcguggucuccgugaaacuugcgggaaacucuagccugugcccuguuuccggcugggcuauuuacagcaaggacaauucuaucagaaucggguccaagggagauguguuugucauucgggagccguucaucagcuguucuccccucgaaugccgcaccuuuuuccugacacagggcgcccuucugaacgacaaacauuccaauggcaccauuaaggauagaagcccuuaucggacgcucaugucuugucccaucggggaggugccuucccccuacaacagccgcuuugaauccguugccuggucugcuagcgccugccacgacggaauuaacuggcugaccaucggcaucuccgggccugauaauggagcuguggccguccugaaguauaacggcauuaucacagacaccauuaaaagcuggagaaauaacauccuccggacacaagagucugagugugcgugcgugaauggguccuguuucaccgugaugacggauggaccgagcgacggccaggccucuuacaagauuuuucgcaucgaaaaaggcaagaucgucaaaagcguugagaugaacgcucccaauuaucauuacgaagagugcuccuguuacccugauucuagcgagauuacaugcgugugcagagacaacuggcacggguccaaucggcccugggugagcuucaaccagaaucuggaauaucagaucggauacauuuguucuggcaucuuuggggauaacccucgccccaaugacaagaccggauccugcggcccggucagcucuaacggggccaauggagugaagggcuucuccuuuaaauauggcaacgggguuuggauuggaagaacaaagagcaucuccucucggaacggcuucgagaugauuugggauccuaauggguggaccggaaccgacaacaauuuuagcaucaaacaagacaucgugggcauuaacgaaugguccggguacucuggcagcuucguccagcaucccgagcuuacaggacuggauuguauccgcccuugcuucuggguggaacucauuagaggccggcccaaggagaauacgaucuggaccuccgggagcucuauuuccuuuuguggaguuaacagcgacacagugggcuggucuuggcccgauggggcugagcugccuuucaccaucgacaaauga

SEQ ID NO: 210364 - RNA, 1410 nt, Artificial Sequence; identical to SEQ ID NO: 208810
  derived and/or modified CDS sequence (opt5) from neuraminidase__InfluenzaA__ADD75051

SEQ ID NO: 210365 - RNA, 1410 nt, Artificial Sequence; identical to SEQ ID NO: 208810
  derived and/or modified CDS sequence (opt5) from neuraminidase__InfluenzaA__ADD75061

SEQ ID NO: 210366 - RNA, 1410 nt, Artificial Sequence; identical to SEQ ID NO: 208810
  derived and/or modified CDS sequence (opt5) from neuraminidase__InfluenzaA__ADD75071

SEQ ID NO: 210367 - RNA, 1410 nt, Artificial Sequence; identical to SEQ ID NO: 208810
  derived and/or modified CDS sequence (opt5) from neuraminidase__InfluenzaA__ADD75081

SEQ ID NO: 210368 - RNA, 1410 nt, Artificial Sequence
  derived and/or modified CDS sequence (opt5) from neuraminidase__InfluenzaA__ADD75091
augaaccccaaucagaagaucauuaccaucggcagcgugugcaugacaauugggauggccaaccugauccuccaaauuggaaauaucaucuccauuuggaucucucacagcauucagcugggcaaccagaaucagaucgagacguguaaccaauccgucauuaccuacgaaaauaacacauggguuaaucagaccuaugugaacaucucuaauacaaacuucgcugccgggcagagcguggucuccgugaaacuugcgggaaauucuagccugugcccuguuuccggcugggcuauuuacagcaaggacaacucuaucagaaucggguccaaaggagauguguuugucauucgggagccguucaucagcuguucuccccucgaaugccgcaccuuuuuccugacacagggcgcccuucugaaugacaagcauuccaacggcaccauuaaagauagaagcccuuaucggacgcucaugucuugucccaucggggaggugccuucccccuacaacagccgcuuugaauccguugccuggucugcuagcgccugccacgacggaauuaauuggcugaccaucggcaucuccgggccugauaacggagcuguggccguccugaaguauaauggcauuaucacagacaccauuaagagcuggagaaacaauauccuccggacacaagagucugagugugcgugcgugaacggguccuguuucaccgugaugacggauggaccgagcgacggccaggccucuuacaaaauuuuucgcaucgaaaagggcaaaaucgucaagagcguugagaugaaugcucccaacuaucauuacgaagagugcuccuguuacccugauucuagcgagauuacaugcgugugcagagacaauuggcacggguccaaccggcccugggugagcuucaaucagaaccuggaauaucagaucggauacauuuguucuggcaucuuuggggauaauccucgccccaacgacaaaaccggauccugcggcccggucagcucuaauggggccaacggagugaagggcuucuccuuuaaguauggcaacgggguuuggauuggaagaacaaaaagcaucuccucucggagcggcuucgagaugauuugggauccuaauggguggaccggaaccgacaacaauuuuuccaucaagcaagacaucgugggcauuaacgaauggucuggguacagcggcuccuucguccagcaucccgagcuuacaggacuggauuguauccgcccuugcuucuggguggaacucauuagaggccggcccaaagagaauacgaucuggaccagcgggucuuccauuagcuuuuguggaguuaacucugacacagugggcugguccuggcccgauggggcugagcugccuuucaccaucgacaaguga

SEQ ID NO: 210369 - RNA, 1410 nt, Artificial Sequence; identical to SEQ ID NO: 208810
  derived and/or modified CDS sequence (opt5) from neuraminidase__InfluenzaA__ADD75101

SEQ ID NO: 210370 - RNA, 1410 nt, Artificial Sequence; identical to SEQ ID NO: 208810
  derived and/or modified CDS sequence (opt5) from neuraminidase__InfluenzaA__ADD75111

SEQ ID NO: 210371 - RNA, 1410 nt, Artificial Sequence; identical to SEQ ID NO: 208810
  derived and/or modified CDS sequence (opt5) from neuraminidase__InfluenzaA__ADD75121

SEQ ID NO: 210372 - RNA, 1410 nt, Artificial Sequence; identical to SEQ ID NO: 208810
  derived and/or modified CDS sequence (opt5) from neuraminidase__InfluenzaA__ADD75131

SEQ ID NO: 210373 - RNA, 1410 nt, Artificial Sequence; identical to SEQ ID NO: 208810
  derived and/or modified CDS sequence (opt5) from neuraminidase__InfluenzaA__ADD75141

SEQ ID NO: 210374 - RNA, 1410 nt, Artificial Sequence
  derived and/or modified CDS sequence (opt5) from neuraminidase__InfluenzaA__ADD75161
augaaccccaaucagaagaucauuaccaucggcagcgugugcaugacaauugggauggccaaccugauccuccaaauuggaaauaucaucuccauuuggaucucucacagcauucagcugggcaaccagaaucagaucgagacguguaaccaauccgucauuaccuacgaaaauaacacauggguuaaucagaccuaugugaacaucucuaauacaaacuucgcugccgggcagagcguggucuccgugaaacuugcgggaaauucuagccugugcccuguuuccggcugggcuauuuacagcaaggacaacucuaucagaaucggguccaaaggagauguguuugucauucgggagccguucaucagcuguucuccccucgaaugccgcaccuuuuuccugacacagggcgcccuucugaaugacaagcauuccaacggcaccauuaaagauagaagcucuuaucggacgcucauguccuguccuaucggggaggugcccagcccuuacaacucccgcuuugaaucuguugccuggagcgcuuccgccugccacgacggaauuaauuggcugaccaucggcaucagcgggcccgauaacggagcuguggccguccugaaguauaauggcauuaucacagacaccauuaagucuuggagaaacaauauccuccggacacaagaguccgagugugcgugcgugaacgggagcuguuucaccgugaugacggauggaccuucugacggccaggccagcuacaaaauuuuucgcaucgaaaagggcaaaaucgucaaguccguugagaugaaugcuccgaacuaucauuacgaagagugcucuuguuaccccgauagcuccgagauuacaugcgugugcagagacaauuggcacgggagcaaccggccuugggugucuuucaaucagaaccuggaauauaaaaucggauacauuuguuccggcaucuuuggggauaauccccgcccuaacgacaagaccggaagcugcggccccgucucuuccaauggggccaacggagugaagggcuucagcuuuaaauauggcaacgggguuuggauuggaagaacaaaguccaucucuagccggaauggcuucgagaugauuugggauccgaacggguggaccggaaccgacaauaacuuuuccaucaaacaggacaucgugggcauuaaugaauggucuggguacagcggcuccuucguccaacauccugagcuuacaggacuggauuguauccgccccugcuucuggguggaacucauuagaggccggccuaaggagaacacgaucuggaccagcgggucuuccauuagcuuuuguggaguuaauucugacacagugggcugguccuggcccgauggggcugagcugcccuucaccaucgaccgcuga

SEQ ID NO: 210375 - RNA, 1410 nt, Artificial Sequence
  derived and/or modified CDS sequence (opt5) from neuraminidase__InfluenzaA__ADD84500
augaaccccaaucagaacaucauuaccaucggcagcgugugcaugacaauugggauggccaaucugauccuccaaauuggaaacaucaucuccauuuggaucucucacagcauucagcugggcaaucagaaccagaucgagacguguaaucaauccgucauuaccuacgaaaacaauacauggguuaaccagaccuaugugaauaucucuaacacaaauuucgcugccgggcagagcguggucuccgugaaacuugcgggaaacucuagccugugcccuguuuccggcugggcuauuuacagcaaggacaauucuaucagaaucggguccaagggagauguguuugucauucgggagccguucaucagcuguucuccccucgaaugccgcaccuuuuuccugacacagggcgcccuucugaacgacaaacauuccaacggcaccauuaaggauagaagcccuuaucggacgcucaugucuugucccaucggggaggugccuucccccuacaauagccgcuuugaauccguugccuggucugcuagcgccugccacgacggaauuaacuggcugaccaucggcaucuccgggccugauaauggagcuguggccguccugaaauauaacggcauuaucacagacaccauuaagagcuggagaaauaacauccuccggacacaagagucugagugugcgugcgugaauggguccuguuucauugugaugaccgauggaccgagcgacggccaggccucuuacaagaucuuucgcaucgaaaaaggcaagauugucaaaagcguugagaugaacgcucccaauuaucauuacgaagagugcuccuguuacccugauucuagcgagaucacgugcgugugcagagacaacuggcacggguccaaucggcccugggugagcuucaaccagaaucuggaauaucagauuggauacaucuguucuggcauuuuuggggauaacccucgccccaaugacaagacaggauccugcggcccggucagcucuaacggggccaacggagugaaaggcuucuccuuuaaguauggcaaugggguuuggaucggaagaaccaagagcauuuccucucggaacggcuucgagaugaucugggauccuaauggguggacaggaaccgacaacaauuuuagcaucaaacaagacauugugggcaucaacgaaugguccggguacucuggcagcuucguccagcaucccgagcuuaccggacuggauuguauucgcccuugcuucuggguggaacucaucagaggccggcccaaggagaauacaauuuggacguccgggagcucuaucuccuuuuguggaguuaacagcgacaccgugggcuggucuuggcccgauggggcugagcugccuuucacaaucgacaaauga

SEQ ID NO: 210376 - RNA, 1410 nt, Artificial Sequence
  derived and/or modified CDS sequence (opt5) from neuraminidase__InfluenzaA__ADD84502
augaaccccaaucagaacaucauuaccaucggcagcgugugcaugacaauugggauggccaaucugauccuccaaauuggaaacaucaucuccauuuggaucucucacagcauucagcugggcaaucagaaccagaucgagacguguaaucaauccgucauuaccuacgaaaacaauacauggguuaaccagaccuaugugaauaucucuaacacaaauuucgcugccgggcagagcguggucuccgugaaacuugcgggaaacucuagccugugcccuguuuccggcugggcuauuuacagcaaggacaauucuaucagaaucggguccaagggagauguguuugucauucgggagccguucaucagcuguucuccccucgaaugccgcaccuuuuuccugacacagggcgcccuucugaacgacaaacauuccaacggcaccauuaaggauagaagcccuuaucggacgcucaugucuugucccaucggggaggugccuucccccuacaauagccgcuuugaauccguugccuggucugcuagcgccugccacgacggaauuaacuggcugaccaucggcaucuccgggccugauaauggagcuguggccguccugaaauauaacggcauuaucacagacaccauuaagagcuggagaaauaacauccuccggacacaagagucugagugugcgugcgugaauggguccuguuucaccgugaugacggauggaccgagcgacggccaggccucuuacaagauuuuucgcaucgaaaaaggcaagaucgucaaaagcguugagaugaacgcucccaauuaucauuacgaagagugcuccuguuacccugauucuagcgagauuacaugcgugugcagagacaacuggcacggguccaaucggcccugggugagcuucaaccagaaucuggaauaucagaucggauacauuuguucuggcaucuuuggggauaacccucgccccaaugacaagaccggauccugcggcccggucagcucuaacggggccaacggagugaaaggcuucuccuuuaaguauggcaaugggguuuggauuggaagaacaaagagcaucuccucucggaacggcuucgagaugauuugggauccuaauggguggaccggaaccgacaacaauuuuagcaucaaacaagacaucgugggcauuaacgaaugguccggguacucuggcagcuucguccagcaucccgagcuuacaggacuggauuguauccgcccuugcuucuggguggaacucauuagaggccggcccaaggagaauacgaucuggaccuccgggagcucuauuuccuuuuguggaguuaacagcgacacagugggcuggucuuggcccgauggggcugagcugccuuucaccaucgacaaauga

SEQ ID NO: 210377 - RNA, 1410 nt, Artificial Sequence; identical to SEQ ID NO: 210376
  derived and/or modified CDS sequence (opt5) from neuraminidase__InfluenzaA__ADD84503

SEQ ID NO: 210378 - RNA, 1410 nt, Artificial Sequence
  derived and/or modified CDS sequence (opt5) from neuraminidase__InfluenzaA__ADD84504
augaaccccaaucagaacaucauuaccaucggcagcgugugcaugacaauugggauggccaaucugauccuccaaauuggaaacaucaucuccauuuggaucucucacagcauucagcugggcaaucagaaccagaucgagacguguaaucaauccgucauuaccuacgaaaacaauacauggguuaaccagaccuaugugaauaucucuaacacaaauuucgcugccgggcagagcguggucuccgugaaacuugcgggaaacuuuucucugugcccuguuagcggcugggcuauuuacuccaaggacaauagcaucagaaucgggucuaagggagauguguucgucauucgggagccguuuaucuccuguagcccccucgaaugccgcaccuucuuucugacacagggcgcccuucugaacgacaaacauucuaacggcaccauuaaggauagauccccuuaucggacgcucaugagcugucccaucggggaggugccuucucccuacaauucccgcuucgaaagcguugccugguccgcuucugccugccacgacggaauuaacuggcugaccaucggcaucagcgggccugauaauggagcuguggccguccugaaauauaacggcauuaucacagacaccauuaaguccuggagaaauaacauccuccggacacaagagagcgagugugcgugcgugaaugggucuuguuuuaccgugaugacggauggaccguccgacggccaggccagcuacaagauuuuccgcaucgaaaaaggcaagaucgucaaaucuguugagaugaacgcucccaauuaucauuacgaagagugcagcuguuacccugauuccucugagauuacaugcgugugcagagacaacuggcacgggagcaaucggcccuggguguccuuuaaccagaaucuggaauaucagaucggauacauuuguagcggcaucuucggggauaacccucgccccaaugacaagaccggaucuugcggcccggucuccagcaacggggccaacggagugaaaggcuuuucuuucaaguauggcaaugggguuuggauuggaagaacaaaguccaucagcucccggaacggcuuugagaugauuugggauccuaauggguggaccggaaccgacaacaauuucucuaucaaacaagacaucgugggcauuaacgaauggagcggguacuccggcucuuucguccagcaucccgagcuuacaggacuggauuguauccgcccuugcuuuuggguggaacucauuagaggccggcccaaggagaauacgaucuggaccagcggguccagcauuucuuucuguggaguuaacuccgacacagugggcuggagcuggcccgauggggcugagcugccuuuuaccaucgacaaauga

SEQ ID NO: 210379 - RNA, 1410 nt, Artificial Sequence; identical to SEQ ID NO: 210376
  derived and/or modified CDS sequence (opt5) from neuraminidase__InfluenzaA__ADD84505

SEQ ID NO: 210380 - RNA, 1410 nt, Artificial Sequence; identical to SEQ ID NO: 210376
  derived and/or modified CDS sequence (opt5) from neuraminidase__InfluenzaA__ADD84506

SEQ ID NO: 210381 - RNA, 1410 nt, Artificial Sequence
  derived and/or modified CDS sequence (opt5) from neuraminidase__InfluenzaA__ADD92528
augaaccccaaucagaagaucauuaccaucggcagcgugugcaugacaauugggauggccaaccugauccuccaaauuggaaauaucaucuccauuuggaucucucacagcauucagcugggcaaccagaaucagaucgagacguguaaccaauccgucauuaccuacgaaaauaacacauggguuaaucagaccuaugugaacaucucuaauacaaacuucgcugccgggcagagcguggucuccgugaaacuugcgggaaauucuagccugugcccuguuuccggcugggcuauuuacagcaaggacaacucuaucagaaucggguccaaaggagauguguuugucauucgggagccguucaucagcuguucuccccucgaaugccgcaccuuuuuccugacacagggcgcccuucugaaugacaagcauuccaacggcaccauuaaagauagaagcccuuaucggacgcucaugucuugucccaucggggaggugccuucccccuacaacagccgcuuugaauccguugccuggucugcuagcgccugccacgacggaauuaauuggcugaccaucggcaucuccgggccugauaacggagcuguggccguccugaaguauaauggcauuaucacagacaccauuaagagcuggagaaacaauauccuccggacacaagagucugagugugcgugcgugaacggguccuguuucaccgugaugacggauggaccgagcgacggccaggccucuuacaaaauuuuucgcaucgaaaagggcaaaaucgucaagagcguugagaugaaugcucccaacuaucauuacgaagagugcuccuguuacccugauucuagcgagauuacaugcgugugcagagacaauuggcacggguccaaccggcccugggugagcuucaaucagaaccuggaauaucagaucggauacauuuguucuggcaucuuuggggauaauccucgccccaacgacaaaaccggauccugcggcccggucagcucuaauggggccaacggagugaagggcuucuccuuuaaguauggcaacgggguuuggauuggaagaacaaaaagcaucuccucucggaauggcuucgagaugauuugggauccuaacggguggaccggaaccgacaauaacuuuagcaucaagcaagacaucgugggcauuaaugaaugguccgggcauucuggcagcuccguccagcaccccgagcuuacaggacuggauuguauccgcccuugcuucuggguggaacucauuagaggccggcccaaagagaacacgaucuggaccagcgggucuuccauuagcuucuguggaguuaauucugacacagugggcugguccuggcccgauggggcugagcugccuuuuaccaucgacaaguga

SEQ ID NO: 210382 - RNA, 1410 nt, Artificial Sequence; identical to SEQ ID NO: 210033
  derived and/or modified CDS sequence (opt5) from neuraminidase__InfluenzaA__ADD96769

SEQ ID NO: 210383 - RNA, 1410 nt, Artificial Sequence; identical to SEQ ID NO: 210033
  derived and/or modified CDS sequence (opt5) from neuraminidase__InfluenzaA__ADD96779

SEQ ID NO: 210384 - RNA, 1410 nt, Artificial Sequence; identical to SEQ ID NO: 210033
  derived and/or modified CDS sequence (opt5) from neuraminidase__InfluenzaA__ADD96789

SEQ ID NO: 210385 - RNA, 1410 nt, Artificial Sequence; identical to SEQ ID NO: 210161
  derived and/or modified CDS sequence (opt5) from neuraminidase__InfluenzaA__ADD96799

SEQ ID NO: 210386 - RNA, 1410 nt, Artificial Sequence; identical to SEQ ID NO: 208810
  derived and/or modified CDS sequence (opt5) from neuraminidase__InfluenzaA__ADD96809

SEQ ID NO: 210387 - RNA, 1410 nt, Artificial Sequence
  derived and/or modified CDS sequence (opt5) from neuraminidase__InfluenzaA__ADD96819
augaaccccaaucagaagaucauuaccaucggcagcgugugcaugacaauugggauggccaaccugauccuccaaauuggaaauaucaucuccauuuggaucucucacagcauucagcugggcaaccagaaucagaucgagacguguaaccaauccgucauuaccuacgaaaauaacacauggguuaaucagaccuaugugaacaucucuaauacaaacuucgcugccgggcagagcguggucuccgugaaacuugcgggaucuagcucccugugcccuguuagcggcugggcuauuuacucuaaggacaauuccaucagaaucgggagcaaaggagauguguuugucauucgggagccguucaucucuuguagcccccucgaaugccgcaccuuuuuccugacacagggcgcccuucugaacgacaagcauuccaauggcaccauuaaagauagaucuccuuaucggacgcucauguccugucccaucggggaggugccuagccccuacaacucccgcuuugaaucuguugccuggagcgcuuccgccugccacgacggaauuaacuggcugaccaucggcaucagcgggccugauaauggagcuguggccguccugaaguauaacggcauuaucacagacaccauuaagucuuggagaaauaacauccuccggacacaagaguccgagugugcgugcgugaaugggagcuguuucaccgugaugacggauggaccgucugacggccaggccagcuacaaaauuuuucgcaucgaaaagggcaaaaucgucaaguccguugagaugaacgcucccaauuaucauuacgaagagugcucuuguuacccugauagcuccgagauuacaugcgugugcagagacaacuggcacgggagcaaucggcccugggugucuuucaaccagaaucuggaauaucagaucggauacauuuguuccggcaucuuuggggauaacccucgccccaaugacaaaaagggaagcugcggcccggucucuuccaacggggccaauggagugaagggcuucagcuuuaaauauggcaacgggguuuggauuggaagaaccaaguccaucucuagccggaacggcuucgagaugauuugggauccuaauggguggacaggaaccgacaacaauuuuuccaucaaacaagacaucgugggcauuaacgaauggucuggguacagcggcuccuucguccagcaucccgagcuuaccggacuggauuguauccgcccuugcuucuggguggaacucauuagaggccggcccaaggagaauacaaucuggacgagcgggucuuccauuagcuuuuguggaguuaacucugacaccgugggcugguccuggcccgauggggcugagcugccuuucacaaucgacaaauga

SEQ ID NO: 210388 - RNA, 1410 nt, Artificial Sequence; identical to SEQ ID NO: 208810
  derived and/or modified CDS sequence (opt5) from neuraminidase__InfluenzaA__ADD96829

SEQ ID NO: 210389 - RNA, 1410 nt, Artificial Sequence; identical to SEQ ID NO: 208810
  derived and/or modified CDS sequence (opt5) from neuraminidase__InfluenzaA__ADD96839

SEQ ID NO: 210390 - RNA, 1410 nt, Artificial Sequence; identical to SEQ ID NO: 208810
  derived and/or modified CDS sequence (opt5) from neuraminidase__InfluenzaA__ADD96849

SEQ ID NO: 210391 - RNA, 1410 nt, Artificial Sequence; identical to SEQ ID NO: 208810
  derived and/or modified CDS sequence (opt5) from neuraminidase__InfluenzaA__ADD96859

SEQ ID NO: 210392 - RNA, 1410 nt, Artificial Sequence
  derived and/or modified CDS sequence (opt5) from neuraminidase__InfluenzaA__ADD96869
augaaccccaaucagaagaucauuaccaucggcagcgugugcaugacaauugggauggccaaccugauccuccaaauuggaaauaucaucuccauuuggaucucucacccuauucagcugggcaaccagaaucagaucgagacguguaaccaaagcgucauuaccuacgaaaauaacacauggguuaaucagaccuaugugaacaucuccaauacaaacuucgcugccgggcagucuguggucagcgugaaacuugcgggaaauuccucucugugcccgguuagcggcugggcuauuuacuccaaggacaacagcaucagaaucgggucuaaaggagauguguuugucauucgggagcccuucaucuccuguagcccucucgaaugccgcaccuuuuuccugacacagggcgcccuucugaaugacaagcauucuaacggcaccauuaaagauagaucccccuaucggacgcucaugagcuguccuaucggggaggugcccucuccuuacaacucccgcuuugaaagcguugccugguccgcuucugccugccacgacggaauuaauuggcugaccaucggcaucagcgggccggauaacggagcuguggccguccugaaguauaauggcauuaucacagacaccauuaaguccuggaaaaacaauauccucagaacacaagagagcgagugugcgugcgugaacgggucuuguuucaccgugaugacggauggacccuccgacggccaggccagcuacaagauuuuucggaucgaaaaaggcaagaucgucaaaucuguugagaugaaugcuccuaacuaucauuacgaagagugcagcuguuaccccgauuccucugagauuacaugcgugugccgcgacaauuggcacgggagcaacagaccuuggguguccuucaaucagaaccuggaauaucagaucggauacauuuguagcggcaucuuuggggauaauccccggccgaacgacaagaccggaucuugcggcccugucuccagcaauggggccaacggagugaagggcuucucuuuuaaauauggcaacgggguuuggauuggacgcacaaaguccaucagcuccagaaauggcuucgagaugauuugggaucccaacggguggaccggaaccgacaauaacuuuucuaucaaacaagacaucgugggcauuaaugaauggagcggguacuccggcucuuucguccagcauccugagcuuacaggacuggauuguauccggcccugcuucuggguggaacucauucgcggcagacccaaggagaacacgaucuggaccagcggguccagcauuucuuuuuguggaguuaauuccgacacagugggcuggagcuggccugauggggcugagcugccguucaccaucgacaaauga

SEQ ID NO: 210393 - RNA, 1410 nt, Artificial Sequence
  derived and/or modified CDS sequence (opt5) from neuraminidase__InfluenzaA__ADD96879
augaaccccaaucagaagaucauuaccaucggcagcgugugcaugacaauugggauggccaaccugauccuccaaauuggaaauaucaucuccauuuggaucucucacagcauucagcugggcaaccagaaucagaucgagacguguaaccaauccgucauuaccuacgaaaauaacacauggguuaaucagaccuaugugaacaucucuaauacaaacuucgcugccgggcagagcguggucuccgugaaacuugcgggaaauucuagccugugcccuguuuccggcugggcuauuuacagcaaggacaacucuaucagaaucggguccaaaggagauguguuugucauucgggagccguucaucagcuguucuccccucggcugccgcaccuuuuuccugacacagggcgcccuucugaaugacaagcauuccaacgggaccauuaaagauagaagcccuuaucggacgcucaugucuugucccaucggagaagugccuucccccuacaacagccgcuuugaguccguugccuggucugcuagcgccugccacgacggcauuaauuggcugaccaucgggaucuccggaccugauaacggcgcuguggccguccugaaguauaaugggauuaucacagacaccauuaagagcuggagaaacaauauccuccggacacaagaaucugagugugcgugcgugaacggauccuguuucaccgugaugacggauggcccgagcgacggccaggccucuuacaaaauuuuucgcaucgagaaggggaaaaucgucaagagcguugaaaugaaugcucccaacuaucauuacgaggaaugcuccuguuacccugauucuagcgagauuacaugcgugugcagagacaauuggcacggauccaaccggcccugggugagcuucaaucagaaccuggaguaucagaucggcuacauuuguucugggaucuuuggagauaauccucgccccaacgacaaaaccggcuccugcgggccggucagcucuaauggagccaacggcgugaagggcuucuccuuuaaguaugggaacggaguuuggauuggcagaacaaaaagcaucuccucucggaauggguucgaaaugauuugggauccuaacggauggaccggcaccgacaauaacuuuagcaucaagcaagacaucguggggauuaaugagugguccggcuacucuggcagcuucguccagcaucccgaacuuacaggacuggauuguauccgcccuugcuucuggguggagcucauuagagggcggcccaaagaaaacacgaucuggaccuccggaagcucuauuuccuuuuguggcguuaauagcgacacagugggguggucuuggcccgauggagcugagcugccuuucaccaucgacaaguga

SEQ ID NO: 210394 - RNA, 1410 nt, Artificial Sequence; identical to SEQ ID NO: 208810
  derived and/or modified CDS sequence (opt5) from neuraminidase__InfluenzaA__ADD96889

SEQ ID NO: 210395 - RNA, 1410 nt, Artificial Sequence; identical to SEQ ID NO: 209393
  derived and/or modified CDS sequence (opt5) from neuraminidase__InfluenzaA__ADD96899

SEQ ID NO: 210396 - RNA, 1410 nt, Artificial Sequence; identical to SEQ ID NO: 208810
  derived and/or modified CDS sequence (opt5) from neuraminidase__InfluenzaA__ADD96909

SEQ ID NO: 210397 - RNA, 1410 nt, Artificial Sequence; identical to SEQ ID NO: 208810
  derived and/or modified CDS sequence (opt5) from neuraminidase__InfluenzaA__ADD96919

SEQ ID NO: 210398 - RNA, 1410 nt, Artificial Sequence; identical to SEQ ID NO: 208810
  derived and/or modified CDS sequence (opt5) from neuraminidase__InfluenzaA__ADD96929

SEQ ID NO: 210399 - RNA, 1410 nt, Artificial Sequence; identical to SEQ ID NO: 208810
  derived and/or modified CDS sequence (opt5) from neuraminidase__InfluenzaA__ADD96939

SEQ ID NO: 210400 - RNA, 1410 nt, Artificial Sequence; identical to SEQ ID NO: 208810
  derived and/or modified CDS sequence (opt5) from neuraminidase__InfluenzaA__ADD96959

SEQ ID NO: 210401 - RNA, 1410 nt, Artificial Sequence; identical to SEQ ID NO: 208810
  derived and/or modified CDS sequence (opt5) from neuraminidase__InfluenzaA__ADD96969

SEQ ID NO: 210402 - RNA, 1410 nt, Artificial Sequence
  derived and/or modified CDS sequence (opt5) from neuraminidase__InfluenzaA__ADD96989
augaaccccaaucagaagaucauuaccaucggcagcgugugcaugacaauugggauggccaaccugauccuccaaauuggaaauaucaucuccauuuggaucucucacagcauucagcugggcaaccagaaucagaucgagacguguaaccaauccgucauuaccuacgaaaauaacacauggguuaaucagaccuaugugaacaucucuaauacaaacuucgcugccgggcagagcguggucuccgugaaacuugcgggaaauucuagccugugcccuguuuccggcugggcuauuuacagcaaggacaacucuaucagaaucggguccaaaggagauguguuugucauucgggagccguucaucagcuguucuccccucgaaugccgcaccuuuuuccugacacagggcgcccuucugaaugacaagcauuccaacggcaccauuaaagauagaagcucuuaucggacgcucauguccuguccuaucggggaggugcccagcccuuacaacucccgcuuugaaucuguugccuggagcgcuuccgccugccacgacggaauuaauuggcugaccaucggcaucagcgggcccgauaacggagcuguggccguccugaaguauaauggcauuaucacagacaccauuaagucuuggagaaacaauauccuccggacacaagaguccgagugugcgugcgugaacgggagcuguuucaccgugaugacggauggaccuucugacggccaggccagcuacaaaauuuuucgcaucgaaaagggcaaaaucgucaaguccguugagaugaaugcuccgaacuaucauuacgaagagugcucuuguuaccccgauagcuccgagauuacaugcgugugcagagacaauuggcacgggagcaaccggccuugggugucuuucaaucagaaccuggaauaucagaucggauacauuuguuccggcaucuuuggggauaauccccgcccuaacgacaaaaccggaagcugcggccccgucucuuccaauggggccaacggagugaagggcuucagcuuuaaguauggcaacgggguuuggauuggaagaacaaaauccaucucuagccggaauggcuucgagaugauuugggauccgaacggguggaccggaaccgacaauaacuuuuccaucaagcaagacaucgugggcauuaaugaauggucuggguacagcggcuccuucguccagcauccugagcuuacaggacuggauuguauccgccccugcuucuggguggaacucauuagaggccggccuaaagagaacacgaucuggaccagcgggucuuccauuagcuuuuguggaguuaauucugacacagugggcugguccuggcccgauggggcugagcugcccuucaccaucgacaaguga

SEQ ID NO: 210403 - RNA, 1410 nt, Artificial Sequence
  derived and/or modified CDS sequence (opt5) from neuraminidase__InfluenzaA__ADD97038
augaaccccaaucagaagaucauuaccaucggcagcgugugcaugacaauugggauggccaaccugauccuccaaauuggaaauaucaucuccauuuggaucucucacagcauucagcugggcaaccagaaucagaucgagacguguaaccaauccgucauuaccuacgaaaauaacacauggguuaaucagaccuaugugaacaucucuaauacaaacuucgcugccgggcagagcguggucuccgugaaacuugcgggaaauucuagccugugcccuguuuccggcugggcuauuuacagcaaggacaacucuaucagaaucggguccaaaggagauguguuugucauucgggagccguucaucagcuguucuccccucgaaugccgcaccuuuuuccugacacagggcgcccuucugaaugacaagcauuccaacggcaccauuaaagauagaagcccuuaucggacgcucaugucuugucccaucggggaggugccuucccccuacaacagccgcuuugaauccguugccuggucugcuagcgccugccacgacggaauuaauuggcugaccaucggcaucuccgggccugauaacggagcuguggccguccugaaguauaauggcauuaucacagacaccauuaagagcuggagaaacaauauccuccggacacaagagucugagugugcgugcgugaacggguccuguuucaccgugaugacggauggaccgagcgacggccaggccucuuacaaaauuuuucgcaucgaaaagggcaaaaucgucaagagcguugagaugaaugcucccaacuaucauuacgaagagugcuccuguuacccugauucuagcgagauuacaugcgugugcagagacaauuggcacggguccaaccggcccugggugagcuucaaucagaaccuggaauaucagaucggauacauuuguucuggcaucuuuggggauaauccucgccccaacgacaaaaccggauccugcggcccggucagcucuaauggggccaacggagugaagggcuucuccuuuaaguauggcaacgggguuuggauuggaagaacaaaaagcaucuccucucggaauggcuucgagaugauuugggauccuaacggguggaucggaaccgacaauaacuuuagcaucaagcaagacauugugggcaucaaugaaugguccggguacucuggcagcuucguccagcaucccgagcuuaccggacuggauuguauucgcccuugcuucuggguggaacucaucagaggccggcccaaagagaacacaauuuggacguccgggagcucuaucuccuuuuguggaguuaauagcgacaccggcggguggucuuggcccgauggagcugagcugccuuucacaaucgacaaguga

SEQ ID NO: 210404 - RNA, 1410 nt, Artificial Sequence; identical to SEQ ID NO: 208810
  derived and/or modified CDS sequence (opt5) from neuraminidase__InfluenzaA__ADD97048

SEQ ID NO: 210405 - RNA, 1410 nt, Artificial Sequence; identical to SEQ ID NO: 208810
  derived and/or modified CDS sequence (opt5) from neuraminidase__InfluenzaA__ADD97058

SEQ ID NO: 210406 - RNA, 1410 nt, Artificial Sequence; identical to SEQ ID NO: 208810
  derived and/or modified CDS sequence (opt5) from neuraminidase__InfluenzaA__ADD97069

SEQ ID NO: 210407 - RNA, 1410 nt, Artificial Sequence; identical to SEQ ID NO: 208810
  derived and/or modified CDS sequence (opt5) from neuraminidase__InfluenzaA__ADD97126

SEQ ID NO: 210408 - RNA, 1410 nt, Artificial Sequence; identical to SEQ ID NO: 208810
  derived and/or modified CDS sequence (opt5) from neuraminidase__InfluenzaA__ADD97164

SEQ ID NO: 210409 - RNA, 1410 nt, Artificial Sequence; identical to SEQ ID NO: 208810
  derived and/or modified CDS sequence (opt5) from neuraminidase__InfluenzaA__ADD97174

SEQ ID NO: 210410 - RNA, 1410 nt, Artificial Sequence; identical to SEQ ID NO: 208810
  derived and/or modified CDS sequence (opt5) from neuraminidase__InfluenzaA__ADD97184

SEQ ID NO: 210411 - RNA, 1410 nt, Artificial Sequence
  derived and/or modified CDS sequence (opt5) from neuraminidase__InfluenzaA__ADD97194
augaaccccaaucagaagaucauuaccaucggcagcgugugcaugacaauugggauggccaaccugauccuccaaauuggaaauaucaucuccauuuggaucucucacagcauucagcugggcaaccagaaucagaucgagacguguaaccaauccgucauuaccuacgaaaauaacacauggguuaaucagaccuaugugaacaucucuaaugcuaacuucgccgcggggcagagcguggucuccgugaaacuugcuggaaauucuagccugugcccuguuuccggcugggccauuuacagcaaggacaacucuaucagaaucggguccaaaggagauguguuugucauucgggagccguucaucagcuguucuccccucgaaugccgcacauuuuuccugacccagggcgcccuucugaaugacaagcauuccaacggcacaauuaaagauagaagcccuuaucggacccucaugucuugucccaucggggaggugccuucccccuacaacagccgcuuugaauccguugcuuggucugccagcgcuugccacgacggaauuaauuggcugacgaucggcaucuccgggccugauaacggagccguggcgguccugaaguauaauggcauuaucaccgacacaauuaagagcuggagaaacaauauccuccggacccaagagucugagugugccugcgugaacggguccuguuucacagugaugaccgauggaccgagcgacggccaggcuucuuacaaaauuuuucgcaucgaaaagggcaaaaucgucaagagcguugagaugaaugcccccaacuaucauuacgaagagugcuccuguuacccugauucuagcgagauuacgugcgugugcagagacaauuggcacggguccaaccggcccugggugagcuucaaucagaaccuggaauaucagaucggauacauuuguucuggcaucuuuggggauaauccucgccccaacgacaaaacaggauccugcggcccggucagcucuaauggggcuaacggagugaagggcuucuccuuuaaguauggcaacgggguuuggauuggaagaaccaaaagcaucuccucucggaauggcuucgagaugauuugggauccuaacggguggacaggaaccgacaauaacuuuagcaucaagcaagacaucgugggcauuaaugaaugguccggguacucuggcagcuucguccagcaucccgagcuuaccggacuggauuguauccgcccuugcuucuggguggaacucauuagaggccggcccaaagagaacacaaucuggacguccgggagcucuauuuccuuuuguggaguuaauagcgacaccgugggcuggucuuggcccgauggggccgagcugccuuucacaaucgacaaguga

SEQ ID NO: 210412 - RNA, 1410 nt, Artificial Sequence; identical to SEQ ID NO: 210402
  derived and/or modified CDS sequence (opt5) from neuraminidase__InfluenzaA__ADD97204

SEQ ID NO: 210413 - RNA, 1410 nt, Artificial Sequence; identical to SEQ ID NO: 208810
  derived and/or modified CDS sequence (opt5) from neuraminidase__InfluenzaA__ADD97214

SEQ ID NO: 210414 - RNA, 1410 nt, Artificial Sequence; identical to SEQ ID NO: 208810
  derived and/or modified CDS sequence (opt5) from neuraminidase__InfluenzaA__ADD97224

SEQ ID NO: 210415 - RNA, 1410 nt, Artificial Sequence; identical to SEQ ID NO: 208810
  derived and/or modified CDS sequence (opt5) from neuraminidase__InfluenzaA__ADD97234

SEQ ID NO: 210416 - RNA, 1410 nt, Artificial Sequence; identical to SEQ ID NO: 208810
  derived and/or modified CDS sequence (opt5) from neuraminidase__InfluenzaA__ADD97244

SEQ ID NO: 210417 - RNA, 1410 nt, Artificial Sequence; identical to SEQ ID NO: 208810
  derived and/or modified CDS sequence (opt5) from neuraminidase__InfluenzaA__ADD97254

SEQ ID NO: 210418 - RNA, 1410 nt, Artificial Sequence; identical to SEQ ID NO: 208810
  derived and/or modified CDS sequence (opt5) from neuraminidase__InfluenzaA__ADD97264

SEQ ID NO: 210419 - RNA, 1410 nt, Artificial Sequence; identical to SEQ ID NO: 208810
  derived and/or modified CDS sequence (opt5) from neuraminidase__InfluenzaA__ADD97274

SEQ ID NO: 210420 - RNA, 1410 nt, Artificial Sequence
  derived and/or modified CDS sequence (opt5) from neuraminidase__InfluenzaA__ADD97284
augaaccccaaucagaagaucauuaccaucggcagcgugugcaugacaauugggauggccaaccugauccuccaaauuggaaauaucaucuccauuuggaucucucacagcauucagcugggcaaccagaaucagaucgagacguguaaccaauccgucauuaccuacgaaaauaacacauggguuaaucagaccuaugugaacaucugcaauacaaacuucgcugccgggcagucuguggucagcgugaaacuugcgggaaauuccucucuguguccuguuagcggcugggcuauuuacuccaaggacaacagcaucagaaucgggucuaaaggagauguguuugucauucgggagccguucaucuccugcagcccccucgaaugucgcaccuuuuuccugacacagggcgcccuucugaaugacaagcauucuaacggcaccauuaaagauagauccccuuaucggacgcucaugagcugccccaucggggaggugccuucucccuacaacucccgcuuugaaagcguugccugguccgcuucugccugucacgacggaauuaauuggcugaccaucggcaucagcgggccugauaacggagcuguggccguccugaaguauaauggcauuaucacagacaccauuaaguccuggagaaacaauauccuccggacacaagagagcgagugcgcgugugugaacgggucuugcuucaccgugaugacggauggaccguccgacggccaggccagcuacaaaauuuuucgcaucgaaaagggcaaaaucgucaagucuguugagaugaaugcucccaacuaucauuacgaagaguguagcugcuacccugauuccucugagauuacaugcguguguagagacaauuggcacgggagcaaccggcccuggguguccuucaaucagaaccuggaauaucagaucggauacauuugcagcggcaucuuuggggauaauccucgccccaacgacaaaaccggaucuuguggcccggucuccagcaauggggccaacggagugaagggcuucucuuuuaaguauggcaacgggguuuggauuggaagaacaaaauccaucagcucccggaauggcuucgagaugauuugggauccuaacggguggaccggaaccgacaauaacuuuucuaucaagcaagacaucgugggcauuaaugaauggagcggguacuccggcucuuucguccagcaucccgagcuuacaggacuggauugcauccgcccuuguuucuggguggaacucauuagaggccggcccaaagagaacacgaucuggaccagcggguccagcauuucuuuuugcggaguuaauuccgacacagugggcuggagcuggcccgauggggcugagcugccuuucaccaucgacaaguga

SEQ ID NO: 210421 - RNA, 1410 nt, Artificial Sequence; identical to SEQ ID NO: 208810
  derived and/or modified CDS sequence (opt5) from neuraminidase__InfluenzaA__ADD97294

SEQ ID NO: 210422 - RNA, 1410 nt, Artificial Sequence
  derived and/or modified CDS sequence (opt5) from neuraminidase__InfluenzaA__ADD97314
augaaccccaaucagaagaucauuaccaucggcagcgugugcaugacaauugggauggccaaccugauccuccaaauuggaaauaucaucuccauuuggaucucucacagcauucagcugggcaaccagaaucagaucgagacguguaaccaauccgucauuaccuacgaaaauaacacauggguuaaucagaccuaugugaacaucucuaauacaaacuucgcugccgggcagagcguggucuccgugaaacuugcgggaaauucuagccugugcccuguuuccggcugggcuauuuacagcaaggacaacucuaucagaaucggguccaaaggagauguguuugucauucgggagccguucaucagcuguucuccccucgaaugccgcaccuuuuuccugacacagggcgcccuucugaaugacaagcauuccaacggcaccauuaaagauagaagcccuuaucggacgcucaugucuugucccaucggggaggugccuucccccuacaacagccgcuuugaauccguugccuggucugcuagcgccugccacgacggaauuaauuggcugaccaucggcaucuccgggccugauaacggagcuguggccguccugaaguauaauggcauuaucacagacaccauuaagagcuggagaaacaauauccuccggacacaagagucugagugugcgugcgugaacggguccuguuucaccgugaugacggauggaccgagcgacggccaggccucuuacaaaauuuuucgcaucgaaaagggcaaaaucgucaagagcguugagaugaaugcucccaacuaucauuacgaagagugcuccuguuacccugauucuagcgagauuacaugcgugugcagagacaauuggcacggguccaaccggcccugggugagcuucaaucagaaccuggaauaucagaucggauacauuuguucuggcaucuuuggggauaauccucgccccaacgacaaaaccggauccugcggcccggucagcucuaauggggccaacggagugaagggcuucuccuuuaaguauggcaacgggguuuggauuggaagaacaaaaagcaucuccucucggaauggcuucgagaugauuugggauccuaacggguggaccggaaccgacaauaacuuuagcaucaagcaagacaucgugggcacaaaugaaugguccggguacucuggcagcuucguccagcaucccgagcuuacgggacuggauuguauucgcccuugcuucuggguggaacucaucagaggccggcccaaagagaacaccauuuggacauccgggagcucuaucuccuuuuguggaguuaauagcgacaccgugggcuggucuuggcccgauggggcugagcugccuuucacaauugacaaguga

SEQ ID NO: 210423 - RNA, 1410 nt, Artificial Sequence; identical to SEQ ID NO: 208810
  derived and/or modified CDS sequence (opt5) from neuraminidase__InfluenzaA__ADD97334

SEQ ID NO: 210424 - RNA, 1410 nt, Artificial Sequence; identical to SEQ ID NO: 208810
  derived and/or modified CDS sequence (opt5) from neuraminidase__InfluenzaA__ADD97344

SEQ ID NO: 210425 - RNA, 1410 nt, Artificial Sequence; identical to SEQ ID NO: 208810
  derived and/or modified CDS sequence (opt5) from neuraminidase__InfluenzaA__ADD97354

SEQ ID NO: 210426 - RNA, 1410 nt, Artificial Sequence
  derived and/or modified CDS sequence (opt5) from neuraminidase__InfluenzaA__ADD97384
augaaccccaaucagaagaucauuaccaucggcagcgugugcaugacaauugggauggccaaccugauccuccaaauuggaaauaucaucuccauuuggaucucucacacgauucagcugggcaaccagaaucagaucgagaccuguaaccaaagcgucauuacauacgaaaauaacaccuggguuaaucagacauaugugaacaucuccaauaccaacuucgcugccgggcagucuguggucagcgugaaacuugcgggaaauuccucucugugcccuguuagcggcugggcuauuuacuccaaggacaacagcaucagaaucgggucuaaaggagauguguuugucauucgggagccguucaucuccuguagcccccucgaaugccgcacauuuuuccugacccagggcgcccuucugaaugacaagcauucuaacggcacgauuaaagauagauccccuuaucggacccucaugagcugucccaucggggaggugccuucucccuacaacucccgcuuugaaagcguugccugguccgcuucugccugccacgacggaauuaauuggcugacaaucggcaucagcgggccugauaacggagcuguggccguccugaaguauaauggcauuaucaccgacacaauuaaguccuggagaaacaauauccuccggacccaagagagcgagugugcgugcgugaacgggucuuguuucacggugaugacagauggaccguccgacggccaggccagcuacaaaauuuuucgcaucgaaaagggcaaaaucgucaagucuguugagaugaaugcucccaacuaucauuacgaagagugcagcuguuacccugauuccucugagauuaccugcgugugcagagacaauuggcacgggagcaaccggcccuggguguccuucaaucagaaccuggaauaucagaucggauacauuuguagcggcaucuuuggggauaauccucgccccaacgacaaaacaggaucuugcggcccggucuccagcaauggggccaacggagugaagggcuucucuuuuaaguauggcaacgggguuuggauuggaagaaccaaauccaucagcucccggaauggcuucgagaugauuugggauccuaacggguggaccggaacagacaauaacuuuucuaucaagcaagacaucgugggcauuaaugaauggagcggguacuccggcucuuucguccagcaucccgagcuuacgggacuggauuguauccgcccuugcuucuggguggaacucauuagaggccggcccaaagagaacaccaucuggacaagcggguccagcauuucuuuuuguggaguuaauuccgacaccgugggcuggagcuggcccgauggggcugagcugccuuucacaaucgacaaguga

SEQ ID NO: 210427 - RNA, 1410 nt, Artificial Sequence
  derived and/or modified CDS sequence (opt5) from neuraminidase__InfluenzaA__ADD97394
augaaccccaaucagaagaucauuaccaucggcagcgugugcaugacaauugggauggccaaccugauccuccaaauuggaaauaucaucuccauuuggaucucucacagcauucagcugggcaaccagaaucagaucgagacguguaaccaauccgucauuaccuacgaaaauaacacauggguuaaucagaccuaugugaacaucucuaauacaaacuucgcugccgggcagccuguggucagcgugaaacuugcgggaaauuccucucugugcccgguuaacggcugggcuauuuacagcaaggacaauuccaucagaaucgggagcaaaggagauguguuugucauucgggagcccuucaucucuuguuccccucucgaaugccgcaccuuuuuccugacacagggcgcccuucugaacgacaagcauagcaacggcaccauuaaagauagaucucccuaucggacgcucauguccuguccuaucggggaggugcccagcccuuacaauucucgcuuugaauccguugccuggagcgcuuccgccugccacgacggaauuaacuggcugaccaucggcaucucugggccggauaauggagcuguggccguccugaaguauaacggcauuaucacagacaccauuaagagcuggagaaauaacauccuccggacacaagaguccgagugugcgugcgugaaugggagcuguuucaccgugaugacggauggacccucugacggccaggccuccuacaaaauuuuucgcaucgaaaagggcaaaaucgucaagagcguugagaugaacgcuccuaauuaucauuacgaagagugcucuuguuaccccgauagcuccgagauuacaugcgugugcagagacaacuggcacgggucuaaucggccuugggugagcuucaaccagaaucuggaauaucagaucggauacauuuguuccggcaucuuuggggauaacccccgcccgaaugacaaaaccggaagcugcggcccugucucuuccaacggggccaacggagugaagggcuucagcuuuaaguauggcaaugggguuuggauuggaagaacaaaaucuaucuccagccggaacggcuucgagaugauuugggaucccaauggguggaccggaaccgacaacaauuuuuccaucaagcaagacaucgugggcauuaacgaauggucuggguacagcggcuccuucguccagcauccugagcuuacaggacuggauuguauccgccccugcuucuggguggaacucauuagaggccggcccaaagagaauacgaucuggaccucugggagcuccauuagcuuuuguggaguuaacucugacacagugggcugguccuggccugauggggcugagcugccguucaccaucgacaaguga

SEQ ID NO: 210428 - RNA, 1410 nt, Artificial Sequence; identical to SEQ ID NO: 208810
  derived and/or modified CDS sequence (opt5) from neuraminidase__InfluenzaA__ADD97404

SEQ ID NO: 210429 - RNA, 1410 nt, Artificial Sequence; identical to SEQ ID NO: 208810
  derived and/or modified CDS sequence (opt5) from neuraminidase__InfluenzaA__ADD97424

SEQ ID NO: 210430 - RNA, 1410 nt, Artificial Sequence; identical to SEQ ID NO: 208810
  derived and/or modified CDS sequence (opt5) from neuraminidase__InfluenzaA__ADD97434

SEQ ID NO: 210431 - RNA, 1410 nt, Artificial Sequence; identical to SEQ ID NO: 208810
  derived and/or modified CDS sequence (opt5) from neuraminidase__InfluenzaA__ADD97444

SEQ ID NO: 210432 - RNA, 1410 nt, Artificial Sequence
  derived and/or modified CDS sequence (opt5) from neuraminidase__InfluenzaA__ADD97454
augaaccccaaucagaagaucauuaccaucggcagcgugugcaugacaauugggauggccaaccugauccuccaaauuggaaauaucaucuccauuuggaucucucacagcauucagcugggcaaccagaaucagaucgagacguguaaccaauccgucauuaccuacgaaaauaacacauggguuaaucagaccuaugugaacaucucuaauacaaacuucgcugccgggcagagcguggucuccgugaaacuugcgggaaauucuagccugugcccuauuuccggcugggcuaucuacagcaaggacaacucuaucagaauuggguccaaaggagauguuuuugugauccgggagccguucauuagcuguucuccccucgaaugccgcaccuuuuuccugacacagggcgcccuucuguccgacaagcauagcaauggcaccaucaaagauagaucuccuuaucggacgcucauguccugucccauuggggaggucccuagccccuacaacucccgcuuugaaucuguggccuggagcgcuuccgccugccacgacggaaucaacuggcugaccaucggcauuagcgggccugauaauggagcuguugccgugcugaaguauaacggcaucauuacagacaccaucaagucuuggagaaauaacauucuccggacacaagaguccgagugugcgugcgucaaugggagcuguuucaccgugaugacggauggaccgucugacggccaggccagcuacaaaaucuuucgcaucgaaaagggcaaaauugugaaguccgucgagaugaacgcucccaauuaucauuacgaagagugcucuuguuacccugauagcuccgagaucacaugcguuugcagagacaacuggcacgggagcaaucggcccugggugucuuucaaccagaaucuggaauaucagauuggauacaucuguuccggcauuuuuggggauaacccucgccccaaugacaaaaccggaagcugcggcccggugucuuccaacggggccaauggagucaagggcuucagcuuuaaguauggcaacgggguguggaucggaagaacaaaauccauuucuagccggaacggcuucgagaugaucugggauccuaauggguggaccggaaccgacaacaauuuuuccaucaagcaagacauuguuggcaucaacgaauggucuggguacagcggcuccuucgugcagcaucccgagcuuacaggacuggauuguauucgcccuugcuucugggucgaacucaucagaggccggcccaaagagaauacgauuuggaccagcgggucuuccaucagcuuuuguggagugaacucugacacaguuggcugguccuggcccgauggggcugagcugccuuucaccaucgacaaguga

SEQ ID NO: 210433 - RNA, 1410 nt, Artificial Sequence
  derived and/or modified CDS sequence (opt5) from neuraminidase__InfluenzaA__ADD97464
augaaccccaaucagaagaucauuaccaucggcagcgugugcaugacaauugggauggccaaccugauccuccaaauuggaaauaucaucuccauuuggaucucucacagcauucagcugggcaaccagaaucagaucgagacguguaaccaauccgucauuaccuacgaaaauaacacauggguuaaucagaccuaugugaacaucucuaauacaaacuucgcugccgggcagagcguggucuccgugaaacuugcgggaaauucuagccugugcccuguuuccggcugggcuauuuacagcaaggacaacucuaucagaaucggguccaaaggagauguguuugucauucgggagccguucaucagcuguucuccccucgaaugccgcaccuuuuuccugacacagggcgcccuucugaaugacaagcauuccaacggcaccauuaaagauagaagcccuuaucggacgcucaugucuugucccaucggggaggugccuucccccuacaacagccgcuuugaauccguugccuggucugcuagcgccugccacgacggaauuaauuggcugaccaucggcaucuccgggccugauaacggagcuguggccguccugaaguauaauggcauuaucacagacaccauuaagagcuggagaaacaauauccuccggacacaagagucugagugugcgugcgugaacggguccuguuucaccgugaugacggauggaccgagcgacggccaggccucuuacaaaauuuuucgcaucgaaaagggcaaaaucgucaagagcguugagaugaaugcucccaacuaucauuacgaagagugcuccuguuacccugauucuagcgagauuacaugcgugugcagagacaauuggcacggguccaaccggcccugggugagcuucaaucagaaccuggaauaucagaucggauacauuuguucuggcaucuuuggggauaauccucgccccaacgacaaaaccggauccugcggcccggucagcucuaauggggccaacggagugaagggcuucuccuuuaaguauggcaacgggguuuggauuggaagaacaaaaagcaucuccucucggaauggcuucgagaugauuugggauccuaacggguggaccggaaccgacaauaacuuuagcacaaagcaagacaucgugggcaucaaugaaugguccggguacucuggcagcuucguccagcaucccgagcuuacgggacuggauuguauucgcccuugcuucuggguggaacucaucagaggccggcccaaagagaacaccauuuggacauccgggagcucuaucuccuuuuguggaguuaauagcgacaccgugggcuggucuuggcccgauggggcugagcugccuuucacaauugacaaguga

SEQ ID NO: 210434 - RNA, 1410 nt, Artificial Sequence; identical to SEQ ID NO: 208810
  derived and/or modified CDS sequence (opt5) from neuraminidase__InfluenzaA__ADD97474

SEQ ID NO: 210435 - RNA, 1410 nt, Artificial Sequence; identical to SEQ ID NO: 208810
  derived and/or modified CDS sequence (opt5) from neuraminidase__InfluenzaA__ADD97484

SEQ ID NO: 210436 - RNA, 1410 nt, Artificial Sequence
  derived and/or modified CDS sequence (opt5) from neuraminidase__InfluenzaA__ADD97494
augaaccccaaucagaagaucauuaccaucggcagcgugugcaugacaauugggauggccaaccugauccuccaaauuggaaauaucaucuccauuuggaucucucacagcauucagcugggcaaccagaaucagaucgagacguguaaccaauccgucauuaccuacgaaaauaacacauggguuaaucagaccuaugugaacaucucuaauacaaacuucgcugccgggcagagcguggucuccgugaaacuugcgggaaauucuagccugugcccuguuuccggcugggcuauuuacagcaaggacaacucuaucagaaucggguccaaaggagauguguuugucauucgggagccguucaucagcuguucucccuccgaaugccgcaccuuuuuccucacacagggcgcccugcuuaaugacaagcauagcaacggcaccauuaaagauagaucuccuuaucggacgcugauguccugucccaucggggaggugccuagccccuacaacucccgcuuugaaucuguugccuggagcgcuuccgccugccacgacggaauuaauuggcucaccaucggcaucagcgggccugauaacggagcuguggccguccugaaguauaauggcauuaucacagacaccauuaagucuuggagaaacaauauccugcggacacaagaguccgagugugcgugcgugaacgggagcuguuucaccgugaugacggauggaccgucugacggccaggccagcuacaaaauuuuucgcaucgaaaagggcaaaaucgucaaguccguugagaugaaugcucccaacuaucauuacgaagagugcucuuguuacccugauagcuccgagauuacaugcgugugcagagacaauuggcacgggagcaaccggcccugggugucuuucaaucagaaccucgaauaucagaucggauacauuuguuccggcaucuuuggggauaauccucgccccaacgacaaaaccggaagcugcggcccggucucuuccaauggggccaacggagugaagggcuucagcuuuaaguauggcaacgggguuuggauuggaagaacaaaauccaucucuagccggaauggcuucgagaugauuugggauccuaacggguggaccggaaccgacaauaacuuuuccaucaagcaagacaucgugggcauuaaugaauggucuggguacagcggcuccuucguccagcaucccgagcugacaggacuugauuguauccgcccuugcuucuggguggaacugauuagaggccggcccaaagagaacacgaucuggaccagcgggucuuccauuagcuuuuguggaguuaauucugacacagugggcugguccuggcccgauggggcugagcucccuuucaccaucgacaaguga

SEQ ID NO: 210437 - RNA, 1410 nt, Artificial Sequence; identical to SEQ ID NO: 208810
  derived and/or modified CDS sequence (opt5) from neuraminidase__InfluenzaA__ADD97504

SEQ ID NO: 210438 - RNA, 1410 nt, Artificial Sequence; identical to SEQ ID NO: 208810
  derived and/or modified CDS sequence (opt5) from neuraminidase__InfluenzaA__ADD97514

SEQ ID NO: 210439 - RNA, 1410 nt, Artificial Sequence; identical to SEQ ID NO: 210422
  derived and/or modified CDS sequence (opt5) from neuraminidase__InfluenzaA__ADD97534

SEQ ID NO: 210440 - RNA, 1410 nt, Artificial Sequence; identical to SEQ ID NO: 208810
  derived and/or modified CDS sequence (opt5) from neuraminidase__InfluenzaA__ADD97544

SEQ ID NO: 210441 - RNA, 1410 nt, Artificial Sequence; identical to SEQ ID NO: 208810
  derived and/or modified CDS sequence (opt5) from neuraminidase__InfluenzaA__ADD97554

SEQ ID NO: 210442 - RNA, 1410 nt, Artificial Sequence; identical to SEQ ID NO: 210426
  derived and/or modified CDS sequence (opt5) from neuraminidase__InfluenzaA__ADD97564

SEQ ID NO: 210443 - RNA, 1410 nt, Artificial Sequence; identical to SEQ ID NO: 208810
  derived and/or modified CDS sequence (opt5) from neuraminidase__InfluenzaA__ADD97574

SEQ ID NO: 210444 - RNA, 1410 nt, Artificial Sequence; identical to SEQ ID NO: 208810
  derived and/or modified CDS sequence (opt5) from neuraminidase__InfluenzaA__ADD97584

SEQ ID NO: 210445 - RNA, 1410 nt, Artificial Sequence
  derived and/or modified CDS sequence (opt5) from neuraminidase__InfluenzaA__ADD97681
augaaccccaaucagaagaucauuaccaucggcagcgugugcaugacaauugggauggccaaccugauccuccaaauuggaaauaucaucuccauuuggaucucucacagcauucagcugggcaaccagaaucagaucgagacguguaaccaauccgucauuaccuacgaaaauaacacauggguuaaucagaccuaugugaacaucucuaauacaaacuucgcugccgggcagagcguggucuccgugaaacuugcgggaaauucuagccugugcccuguuuccggcugggcuauuuacagcaaggacaacucuaucagaaucggguccaaaggagauguguuugucauucgggagccguucaucagcuguucuccccucgaaugccgcaccuuuuuccugacacagggcgcccuucugaaugacaagcauuccaacggcaccauuaaagauagaagcccuuaucggacgcucaugucuugucccaucggggaggugccuucccccuacaacagccgcuuugaauccguugccuggucugcuagcgccugccacgacggaauuaauuggcugaccaucggcaucuccgggccugauaacggagcuguggccguccugaaguauaauggcauuaucacagacaccauuaagagcuggagaaacaauauccuccggacacaagagucugagugugcgugcgugaacggguccuguuucaccgugaugacggauggaccgagcgacggccaggccucuuacaaaauuuuucgcaucgaaaagggcaaaaucgucaagagcguugagauuaaugcucccaacuaucauuacgaagagugcuccuguuacccugauucuagcgagaucacaugcgugugcagagacaauuggcacggguccaaccggcccugggugagcuucaaucagaaccuggaauaucagauuggauacaucuguucuggcauuuuuggggauaauccucgccccaacgacaaaaccggauccugcggcccggucagcucuaauggggccaacggagugaagggcuucuccuuuaaguauggcaacgggguuuggaucggaagaacaaaaagcauuuccucucggaauggcuucgagaugaucugggauccuaacggguggaccggaaccgacaauaacuuuagcaucaagcaagacauugugggcaucaaugaaugguccggguacucuggcagcuucguccagcaucccgagcuuacaggacuggauuguauucgcccuugcuucuggguggaacucaucagaggccggcccaaagagaacacgauuuggaccuccgggagcucuaucuccuuuuguggaaucaauagcgacacaguuggcuggucuuggcccgauggggcugagcugccuuucaccauugacaaguga

SEQ ID NO: 210446 - RNA, 1410 nt, Artificial Sequence; identical to SEQ ID NO: 210402
  derived and/or modified CDS sequence (opt5) from neuraminidase__InfluenzaA__ADD97691

SEQ ID NO: 210447 - RNA, 1410 nt, Artificial Sequence; identical to SEQ ID NO: 209947
  derived and/or modified CDS sequence (opt5) from neuraminidase__InfluenzaA__ADD97701

SEQ ID NO: 210448 - RNA, 1410 nt, Artificial Sequence; identical to SEQ ID NO: 208810
  derived and/or modified CDS sequence (opt5) from neuraminidase__InfluenzaA__ADD97891

SEQ ID NO: 210449 - RNA, 1410 nt, Artificial Sequence; identical to SEQ ID NO: 208810
  derived and/or modified CDS sequence (opt5) from neuraminidase__InfluenzaA__ADD97901

SEQ ID NO: 210450 - RNA, 1410 nt, Artificial Sequence; identical to SEQ ID NO: 208810
  derived and/or modified CDS sequence (opt5) from neuraminidase__InfluenzaA__ADD97911

SEQ ID NO: 210451 - RNA, 1410 nt, Artificial Sequence; identical to SEQ ID NO: 208810
  derived and/or modified CDS sequence (opt5) from neuraminidase__InfluenzaA__ADD97921

SEQ ID NO: 210452 - RNA, 1410 nt, Artificial Sequence; identical to SEQ ID NO: 208810
  derived and/or modified CDS sequence (opt5) from neuraminidase__InfluenzaA__ADD97931

SEQ ID NO: 210453 - RNA, 1410 nt, Artificial Sequence; identical to SEQ ID NO: 209577
  derived and/or modified CDS sequence (opt5) from neuraminidase__InfluenzaA__ADD97941

SEQ ID NO: 210454 - RNA, 1410 nt, Artificial Sequence
  derived and/or modified CDS sequence (opt5) from neuraminidase__InfluenzaA__ADD97951
augaaccccaaucagaagaucauuaccaucagcuccgugugcaugacaauuggcauggccaaccugauccuccaaauugggaauaucaucucuauuuggaucagccacuccauucagcugggaaaccagaaucagaucgagacguguaaccaaucugucauuaccuacgaaaauaacacauggguuaaucagaccuaugugaacaucagcaauacaaacuucgcugccggccaguccguggucucugugaaacuugcggggaauagcucccugugcccuguuagcggaugggcuauuuacucuaaggacaacuccaucagaaucggcagcaaaggggauguguuugucauucgggagccguucaucucuuguucuccccucgaaugccgcaccuuuuuccugacacagggagcccuucugaaugacaagcauagcaacggcaccauuaaagauagaucuccuuaucggacgcucauguccugucccaucggcgaggugccuagccccuacaacucccgcuuugaaucuguugccuggagcgcuuccgccugccacgacgggauuaauuggcugaccaucggaaucagcggcccugauaacggggcuguggccguccugaaguauaauggaauuaucacagacaccauuaagucuuggagaaacaauauccuccggacacaagaguccgagugugcgugcgugaacggcagcuguuucaccgugaugacggaugggccgucugacggacaggccagcuacaaaauuuuucgcaucgaaaagggcaaaaucgucaaguccguugagaugaaugcucccaacuaucauuacgaagagugcucuuguuacccugauagcuccgagauuacaugcgugugcagagacaauuggcacggcagcaaccggcccugggugucuuucaaucagaaccuggaauaucagaucggguacauuuguuccggaaucuuuggcgauaauccucgccccaacgacaaaaccgggagcugcggaccggucucuuccaauggcgccaacggggugaagggauucagcuuuaaguauggcaacggcguuuggauugggagaacaaaauccaucucuagccggaauggauucgagaugauuugggauccuaacggcuggaccgggaccgacaauaacuuuuccaucaagcaagacaucgugggaauuaaugaauggucuggcuacagcggguccuucguccagcaucccgagcuuacaggccuggauuguauccgcccuugcuucuggguggaacucauuagaggacggcccaaagagaacacgaucuggaccagcggcuccuccauuagcuuuugugggguuaauucugacacagugggaugguccuggcccgauggcgcugagcugccuuucaccaucgacaaguga

SEQ ID NO: 210455 - RNA, 1410 nt, Artificial Sequence
  derived and/or modified CDS sequence (opt5) from neuraminidase__InfluenzaA__ADD97961
augaaccccaaucagaagaucauuaccaucggcagcgugugcaugacaauugggauggucaaccugauccuccaaauuggaaauaucaucuccauuuggaucucucacagcauucagcugggcaaccagaaucagaucgagacguguaaccaauccguuauuaccuacgaaaauaacacaugggugaaucagaccuaugugaacaucucuaauacaaacuucgccgcugggcagagcgucguguccguuaaacuugccggaaaugcgucucugugcccugugagcggcugggcuauuuacuccaaggacaacagcaucagaaucgggucuaaaggagaugucuuugugauucgggagccguucaucuccuguagcccccucgaaugccgcaccuuuuuccugacacagggcgcccuucugaaugacaagcauucuaacggcaccauuaaagauagauccccuuaucggacgcucaugagcugucccaucggggagguuccuucucccuacaacucccgcuuugaaagcguggccugguccgcuucugccugccacgacggaauuaauuggcugaccaucggcaucagcgggccugauaacggagcugucgccgugcugaaguauaauggcauuaucacagacaccauuaaguccuggagaaacaauauccuccggacacaagagagcgagugugcgugcgugaacgggucuuguuucaccgucaugacggauggaccguccgacggccaggccagcuacaaaauuuuucgcaucgaaaagggcaaaaucguuaagucuguggagaugaaugcucccaacuaucauuacgaagagugcagcuguuacccugauuccucugagauuacaugcgugugcagagacaauuggcacgggagcaaccggcccugggucuccuucaaucagaaccuggaauaucagaucggauacauuuguagcggcaucuuuggggauaauccucgccccaacgacaaaaccggaucuugcggcccgguguccagcaauggggccaacggaguuaagggcuucucuuuuaaguauggcaacgggguguggauuggaagaacaaaauccaucagcucccggaauggcuucgagaugauuugggauccuaacggguggaccggaaccgacaauaacuuuucuaucaagcaagacaucgucggcauuaaugaauggagcggguacuccggcucuuucgugcagcaucccgagcuuacaggacuggauuguauccgcccuugcuucuggguugaacucauuagaggccggcccaaagagaacacgaucuggaccagcggguccagcauuucuuuuuguggagucaauuccgacacagugggcuggagcuggcccgauggggcugagcugccuuucaccaucgacaaguga

SEQ ID NO: 210456 - RNA, 1410 nt, Artificial Sequence; identical to SEQ ID NO: 210402
  derived and/or modified CDS sequence (opt5) from neuraminidase__InfluenzaA__ADD97971

SEQ ID NO: 210457 - RNA, 1410 nt, Artificial Sequence; identical to SEQ ID NO: 208810
  derived and/or modified CDS sequence (opt5) from neuraminidase__InfluenzaA__ADD97981

SEQ ID NO: 210458 - RNA, 1410 nt, Artificial Sequence
  derived and/or modified CDS sequence (opt5) from neuraminidase__InfluenzaA__ADD97991
augaaccccaaucagaagaucauuaccaucggcagcgugugcaugacaauugggauggccaaccugauccuccaaauuggaaauaucaucuccauuuggaucucucacagcauucagcugggcaaccagaaucagaucgagacguguaaccaauccgucauuaccuacgaaaauaacacauggguuaaucagaccuaugugaacaucucuaauacaaacuucgcugccgggcagagcguggucuccgugaaacuugcgggaaauucuagccugugcccuguuuccggcugggcuauuuacagcaaggacaacucuaucagaaucggguccaaaggagauguguuugucauucgggagccguucaucagcuguucuccccucgaaugccgcaccuuuuuccugacacagggcgcccuucugaaugacaagcauuccaacggcaccauuaaagauagaagcccuuaucggacgcucaugucuugucccaucggggaggugccuucccccuacaacagccgcuuugaauccguugccuggucugcuagcgccugccacgacggaauuaauuggcugaccaucggcaucuccgggccugauaacggagcuguggccguccugaaguauaauggcauuaucacagacaccauuaagagcuggagaaacaauauccuccggacacaagagucugagugugcgugcgugaacggguccuguuucaccgugaugacggauggaccgagcgacggccaggccucuuacaaaauuuuucgcaucgaaaagggcaaaaucgucaagagcguugagaugaaugcucccaacuaucauuacgaagagugcuccuguuacccugauucuagcgagauuacaugcgugugcagagacaauuggcacggguccaaccggcccugggugagcuucaaucagaaccuggaauaucagaucggauacauuuguucuggcaucuuuggggauaauccucgccccaacgacaaaaccggauccugcggcccggucagcucuaauggggccaacggagugaagggcuucuccuuuaaguauggcaacgggguuuggauuggaagaacaaaaagcaucuccucucggaauggcuucgagaugauuugggauccuaacggguggaucggaaccgacaauaacuuuagcaucaagcaagacauugugggcaucaaugaaugguccggguacucuggcagcuucguccagcaucccgagcuuaccggacuggauuguauucgcccuugcuucuggguggaacucaucagaggccggcccaaagagaacacaauuuggacguccgggagcucuaucuccuuuuguggaguuaauagcgacaccgugggcuggucuuggcccgauggggcugagcugccuuucacaaucgacaaguga

SEQ ID NO: 210459 - RNA, 1410 nt, Artificial Sequence
  derived and/or modified CDS sequence (opt5) from neuraminidase__InfluenzaA__ADD98001
augaaccccaaucagaagaucauuaccaucggcagcgugugcaugacaauugggauggccaaccugauccuccaaauuggaaauaucaucuccauuuggaucucucacagcauucagcugggcaaccagaaucagaucgagacguguaaccaauccgucauuaccuacgaaaauaacacauggguuaaucagaccuaugugaacaucucuaauacaaacuucgcugccgggcagagcguggucuccgugaaacuugcgggaaauucuagccugugcccuguuuccggcugggcuauuuacagcaaggacaacucuaucagaaucggguccaaaggagauguguuugucauucgggagccguucaucagcuguucuccccucgaaugccgcaccuuuuuccugacacagggcgcccuucugaaugacaagcauuccaacggcaccauuaaagauagaagcccuuaucggacgcucaugucuugucccaucggggaggugccuucccccuacaacagccgcuuugaauccguugccuggucugcuagcgccugccacgacggaauuaauuggcugaccaucggcaucuccgggccugauaacggagcuguggccguccugaaguauaauggcauuaucacagacaccgucaagagcuggagaaacaauauucuccggacacaagagucugagugugcgugcgugaacggguccuguuucaccgugaugacggauggaccgagcgacggccaggccucuuacaaaaucuuucgcauugaaaagggcaaaaucguuaagagcguggagaugaaugcucccaacuaucauuacgaagagugcuccuguuacccugauucuagcgagaucacaugcgugugcagagacaauuggcacggguccaaccggcccugggucagcuucaaucagaaccuggaauaucagauuggauacaucuguucuggcauuuuuggggauaauccucgccccaacgacaaaaccggauccugcggcccggugagcucuaauggggccaacggaguuaagggcuucuccuuuaaguauggcaacgggguguggaucggaagaacaaaaagcauuuccucucggaauggcuucgagaugaucugggauccuaacggguggaccggaaccgacaauaacuuuagcauuaagcaagacaucgucggcaucaaugaaugguccggguacucuggcagcuucgugcagcaucccgagcuuacaggacuggauuguauucgcccuugcuucuggguugaacucaucagaggccggcccaaagagaacacgauuuggaccuccgggagcucuaucuccuuuuguggagugaauagcgacacagucggcuggucuuggcccgauggggcugagcugccuuucaccauugacaaguga

SEQ ID NO: 210460 - RNA, 1410 nt, Artificial Sequence; identical to SEQ ID NO: 208810
  derived and/or modified CDS sequence (opt5) from neuraminidase__InfluenzaA__ADD98011

SEQ ID NO: 210461 - RNA, 1410 nt, Artificial Sequence; identical to SEQ ID NO: 208810
  derived and/or modified CDS sequence (opt5) from neuraminidase__InfluenzaA__ADD98031

SEQ ID NO: 210462 - RNA, 1410 nt, Artificial Sequence; identical to SEQ ID NO: 210459
  derived and/or modified CDS sequence (opt5) from neuraminidase__InfluenzaA__ADD98041

SEQ ID NO: 210463 - RNA, 1410 nt, Artificial Sequence; identical to SEQ ID NO: 208810
  derived and/or modified CDS sequence (opt5) from neuraminidase__InfluenzaA__ADD98051

SEQ ID NO: 210464 - RNA, 1410 nt, Artificial Sequence; identical to SEQ ID NO: 208810
  derived and/or modified CDS sequence (opt5) from neuraminidase__InfluenzaA__ADD98061

SEQ ID NO: 210465 - RNA, 1410 nt, Artificial Sequence; identical to SEQ ID NO: 208810
  derived and/or modified CDS sequence (opt5) from neuraminidase__InfluenzaA__ADD98071

SEQ ID NO: 210466 - RNA, 1410 nt, Artificial Sequence; identical to SEQ ID NO: 208810
  derived and/or modified CDS sequence (opt5) from neuraminidase__InfluenzaA__ADD98081

SEQ ID NO: 210467 - RNA, 1410 nt, Artificial Sequence; identical to SEQ ID NO: 208810
  derived and/or modified CDS sequence (opt5) from neuraminidase__InfluenzaA__ADD98091

SEQ ID NO: 210468 - RNA, 1410 nt, Artificial Sequence; identical to SEQ ID NO: 209636
  derived and/or modified CDS sequence (opt5) from neuraminidase__InfluenzaA__ADD98101

SEQ ID NO: 210469 - RNA, 1410 nt, Artificial Sequence
  derived and/or modified CDS sequence (opt5) from neuraminidase__InfluenzaA__ADD98111
augaaccccaaucagaagaucauuaccaucggcagcgugugcaugacaauugggauggccaaccugauccuccaaauuggaaauaucaucuccauuuggaucucucacagcauucagcugggcaaccagaaucagaucgagacguguaaccaauccgucauuaccuacgaaaauaacacauggguuaaucagaccuaugugaacaucucuaauacaaacuucgcugccgggcagagcguggucuccgugaaacuugcgggaaauucuagccugugcccuguuuccggcugggcuauuuacagcaaggacaacucuaucagaaucggguccaaaggagauguguuugucauucgggagccguucaucagcuguucuccccucgaaugccgcaccuuuuuccugacacagggcgcccuucugaaugacaagcauuccaacggcaccauuaaagauagaagcccuuaucggacgcucaugucuugucccaucggggaggugccuucccccuacaacagccgcuuugaauccguugccuggucugcuagcgccugccacgacggaauuaauuggcugaccaucggcaucuccgggccugauaacggagcuguggccguccugaaguauaauggcauuaucacagacaccauuaagagcuggagaaacaauauccuccggacacaagagucugagugugcgugcgugaacggguccuguuucaccgugaugacggauggaccgagcgacggccaggccucuuacaaaauuuuucgcaucgaaaagggcaaaaucgucaagagcguugagaugaaugcucccaacuaucauuacgaagagugcuccuguuacccugauucuagcgagauuacaugcgugugcagagacaauuggcacggguccaaccggcccugggugagcuucaaucagaaccuggaauaucagaucggauacauuuguucuggcauccuuggggauaauccucgccccaacgacaaaaccggauccugcggcccggucagcucuaauggggccaacggagugaagggcuuuuccuucaaguauggcaacgggguuuggauuggaagaacaaaaagcaucuccucucggaauggcuuugagaugauuugggauccuaacggguggaccggaaccgacaauaacuucagcaucaagcaagacaucgugggcauuaaugaaugguccggguacucuggcagcuuuguccagcaucccgagcugacaggacucgauuguauccgcccuugcuucuggguggaacugauuagaggccggcccaaagagaacacgaucuggaccuccgggagcucuauuuccuucuguggaguuaauagcgacacagugggcuggucuuggcccgauggggcugagcuuccuuuuaccaucgacaaguga

SEQ ID NO: 210470 - RNA, 1410 nt, Artificial Sequence; identical to SEQ ID NO: 208810
  derived and/or modified CDS sequence (opt5) from neuraminidase__InfluenzaA__ADD98121

SEQ ID NO: 210471 - RNA, 1410 nt, Artificial Sequence; identical to SEQ ID NO: 208810
  derived and/or modified CDS sequence (opt5) from neuraminidase__InfluenzaA__ADD98131

SEQ ID NO: 210472 - RNA, 1410 nt, Artificial Sequence; identical to SEQ ID NO: 208810
  derived and/or modified CDS sequence (opt5) from neuraminidase__InfluenzaA__ADD98141

SEQ ID NO: 210473 - RNA, 1410 nt, Artificial Sequence; identical to SEQ ID NO: 208810
  derived and/or modified CDS sequence (opt5) from neuraminidase__InfluenzaA__ADD98151

SEQ ID NO: 210474 - RNA, 1410 nt, Artificial Sequence
  derived and/or modified CDS sequence (opt5) from neuraminidase__InfluenzaA__ADD98161
augaaccccaaucagaagaucauuaccaucggcagcgugugcaugacaauugggauggccaaccugauccuccaaauuggaaauaucaucuccauuuggaucucucacacgauucagcugggcaaccagaaucagaucgagaccuguaaccaaagcgucauuacauacgaaaauaacaccuggguuaaucagacauaugugaacaucuccaauaccaacuucgcugccgggcagucuguggucagcgugaaacuugcgggaaauuccucucugugcccuguuagcggcugggcuauuuacuccaaggacaacagcaucagaaucgggucuaaaggagauguguuugucauucgggagccguucaucuccuguagcccccucgaaugccgcacauuuuuccugacccagggcgcccuucugaaugacaagcauucuaacggcacgauuaaagauagauccccuuaucggacccucaugagcugucccaucggggaggugccuucucccuacaacucccgcuuugaaagcguugccugguccgcuucugccugccacgacggaauuaauuggcugacaaucggcaucagcgggccugauaacggagcuguggccguccugaaguauaauggcauuaucaccgacacaauuaaguccuggagaaacaauauccuccggacccaagagagcgagugugcgugcgugaacgggucuuguuucacggugaugacagauggaccguccgacggccaggccagcuacaaaauuuuucgcaucgaaaagggcaaaaucgucaagucuguugagaugaaugcucccaacuaucauuacgaagagugcagcuguuacccugauuccucugagauuaccugcgugugcagagacaauuggcacgggagcaaccggcccuggguguccuucaaucagaaccuggaauaucagaucggauacauuuguagcggcaucuuuggggauaauccucgccccaacgacaaaacaggaucuugcggcccggucuccagcaauggggccaacggagugaagggcuucucuuuuaaguauggcaacgggguuuggauuggaagaaccaaauccaucagcucccggaauggcuucgagaugauuugggauccuaacggguggacccgcacagacaauaacuuuucuaucaagcaagacaucgugggaauuaaugaauggagcggcuacuccgggucuuucguccagcaucccgagcuuacgggccuggauuguaucagaccuugcuucuggguggaacucauucggggacgccccaaagagaacaccaucuggacaagcggcuccagcauuucuuuuugugggguuaauuccgacaccgugggauggagcuggcccgauggcgcugagcugccuuucacaaucgacaaguga

SEQ ID NO: 210475 - RNA, 1410 nt, Artificial Sequence
  derived and/or modified CDS sequence (opt5) from neuraminidase__InfluenzaA__ADD98171
augaaccccaaucagaagaucauuaucauuggcagcgugugcaugaccaucgggauggccaaccugauucuccaaaucggaaauaucauuuccaucuggauuucucacagcauccagcugggcaaccagaaucagauugagacauguaaccaauccgucaucacguacgaaaauaacaccuggguuaaucagacauaugugaacauuucuaauaccaacuucgcugccgggcagacaguggucagcgugaaacuugcgggaaauuccucucugugcccuguuagcggcugggcuaucuacuccaaggacaacagcaucagaauugggucuaaaggagauguguuugucauccgggagccguucauuuccuguagcccccucgaaugccgcaccuuuuuccugacacagggcgcccuucugaaugacaagcauucuaacggcaccaucaaagauagauccccuuaucggacgcucaugagcugucccauuggggaggugccuucucccuacaacucccgcuuugaaagcguugccugguccgcuucugccugccacgacggaaucaauuggcugaccaucggcauuagcgggccugauaacggagcuguggccguccugaaguauaauggcaucauuacagacaccaucaaguccuggagaaacaauauucuccggacacaagagagcgagugugcgugcgugaacgggucuuguuucaccgugaugacggauggaccguccgacggccaggccagcuacaaaaucuuucgcaucgaaaagggcaaaauugucaagucuguugagaugaaugcucccaacuaucauuacgaagagugcagcuguuacccugauuccucugagaucacaugcgugugcagagacaauuggcacgggagcaaccggcccuggguguccuucaaucagaaccuggaauaucagauuggauacaucuguagcggcauuuuuggggauaauccucgcucuaacgacaaaaccggauccugcggccccgucagcucuaauggggccaacggagugaagggcuucuccuuuaaguauggcaacgggguuuggaucggaagaacaaaaagcauuuccucucggaauggcuucgagaugaucugggauccgaacggguggaccggaaccgacaauaacuuuagcaucaagcaagacauugugggcaucaaugaaugguccggguacucuggcagcuucguccagcauccugagcuuacaggacuggauuguauucgccccugcuucuggguggaacucaucagaggccggccuaaagagaacacgauuuggaccuccgggagcucuaucuccuuuuguggaguuaauagcgacacagugggcuggucuuggcccgauggggcugagcugcccuucaccaucgacaaguga

SEQ ID NO: 210476 - RNA, 1410 nt, Artificial Sequence
  derived and/or modified CDS sequence (opt5) from neuraminidase__InfluenzaA__ADD98181
augaaccccaaucagaagaucauuaccaucggcagcgugugcaugacaauugggauggccaaccugauccuccaaauuggaaauaugaucuccaucuggauuucucacagcauccagcuggagaaccagaaucagauugaaacguguaaccaauccgucaucaccuacgagaauaacacauggguuaaucagaccuaugugaacauuucuaauacaaacuucgcugccggccagagcguggucuccgugaaacuugcgggaaauucuagccugugcccuguuuccgggugggcuaucuacagcaaggacaacucuauuagaaucggcuccaaaggggauguguuugucauccgggaaccguucauuagcuguucuccccucgagugccgcaccuuuuuccugacacagggagcccuucugaaugacaagcauuccaacggcaccaucaaagauagaagcccuuaucggacgcucaugucuugucccauuggcgaagugccuucccccuacaacagccgcuuugaguccguugccuggucugcuagcgccugccacgacgggaucaauuggcugaccauuggaaucuccggcccugauaacggggcuguggccguccugaaguauaauggaaucauuacagacaccaucaagagcuggagaaacaauauucuccggacacaagagucugaaugugcgugcgugaacggcuccuguuucaccgugaugacggaugggccgagcgacggacaggccucuuacaaaaucuuucgcauugagaagggcaaaaucgucaagagcguugaaaugaaugcucccaacuaucauuacgaggagugcuccuguuacccugauucuagcgaaaucacaugcgugugcagagacaauuggcacggcuccaaccggcccugggugagcuucaaucagaaccuggaguaucagauuggguacaucuguucuggaauuuuuggcgauaauccucgccccaacgacaaaaccggguccugcggaccggucagcucuaauggcgccaacggggugaagggauucuccuuuaaguauggcaacggcguuuggaucgggagaacaaaaagcauuuccucucggaauggauucgaaaugaucugggauccuaacggcuggaccgggaccgacaauaacuuuagcauuaagcaagacaucgugggaaucaaugagugguccggcuacucugggagcuucguccagcaucccgaacuuacaggccuggauuguauucgcccuugcuucuggguggagcucaucagaggacggcccaaagagaacacgauuuggaccuccggcagcucuaucuccuuuugugggguuaauagcgacacagugggauggucuuggcccgauggcgcugaacugccuuucaccauugacaaguga

SEQ ID NO: 210477 - RNA, 1410 nt, Artificial Sequence; identical to SEQ ID NO: 208810
  derived and/or modified CDS sequence (opt5) from neuraminidase__InfluenzaA__ADD98201

SEQ ID NO: 210478 - RNA, 1410 nt, Artificial Sequence; identical to SEQ ID NO: 208810
  derived and/or modified CDS sequence (opt5) from neuraminidase__InfluenzaA__ADD98211

SEQ ID NO: 210479 - RNA, 1410 nt, Artificial Sequence; identical to SEQ ID NO: 210033
  derived and/or modified CDS sequence (opt5) from neuraminidase__InfluenzaA__ADE20324

SEQ ID NO: 210480 - RNA, 1410 nt, Artificial Sequence; identical to SEQ ID NO: 210033
  derived and/or modified CDS sequence (opt5) from neuraminidase__InfluenzaA__ADE20334

SEQ ID NO: 210481 - RNA, 1410 nt, Artificial Sequence; identical to SEQ ID NO: 210033
  derived and/or modified CDS sequence (opt5) from neuraminidase__InfluenzaA__ADE20344

SEQ ID NO: 210482 - RNA, 1410 nt, Artificial Sequence; identical to SEQ ID NO: 210033
  derived and/or modified CDS sequence (opt5) from neuraminidase__InfluenzaA__ADE20354

SEQ ID NO: 210483 - RNA, 1410 nt, Artificial Sequence; identical to SEQ ID NO: 210033
  derived and/or modified CDS sequence (opt5) from neuraminidase__InfluenzaA__ADE20378

SEQ ID NO: 210484 - RNA, 1410 nt, Artificial Sequence; identical to SEQ ID NO: 210033
  derived and/or modified CDS sequence (opt5) from neuraminidase__InfluenzaA__ADE20391

SEQ ID NO: 210485 - RNA, 1410 nt, Artificial Sequence; identical to SEQ ID NO: 210033
  derived and/or modified CDS sequence (opt5) from neuraminidase__InfluenzaA__ADE20631

SEQ ID NO: 210486 - RNA, 1410 nt, Artificial Sequence; identical to SEQ ID NO: 210033
  derived and/or modified CDS sequence (opt5) from neuraminidase__InfluenzaA__ADE20641

SEQ ID NO: 210487 - RNA, 1410 nt, Artificial Sequence
  derived and/or modified CDS sequence (opt5) from neuraminidase__InfluenzaA__ADE20651
augaaccccaaucagaagaucauuaccaucggcagcgugugcaugacaauugggauggccaaccugauccuccaaauuggaaauaucaucuccauuuggaucucucacagcauucagcugggcaaccagaaucagaucgagacguguaaccaauccgucauuaccuacgaaaauaacacauggguuaaucagaccuaugugaacaucucuaauacaaacuucgcugccgggcagagcguggucuccgugaaacuuguuggaaauucuagccugugcccuguguccggcugggcgauuuacagcaaggacaacucugucagaaucggguccaaaggagauguguuuguuauccgggagccguucauuagcuguucuccccucgaaugccgcaccuuuuuccugacacagggcgcccuucugaaugacaagcauuccaacggcaccaucaaagauagaagcccuuaucggacgcucaugucuugucccauuggggaggugccuucccccuacaacagccgcuuugaauccgucgcuuggucugccagcgcuugccacgacggaaucaauuggcugaccauuggcaucuccgggccugauaacggagccguggcugugcugaaguauaauggcaucauuacagacaccaucaagagcuggagaaacaauauucuccggacacaagagucugagugugccugcgucaacggguccuguuucaccguuaugacggauggaccgagcgacggccaggcgucuuacaaaaucuuucgcauugaaaagggcaaaaucgucaagagcguggagaugaaugcccccaacuaucauuacgaagagugcuccuguuacccugauucuagcgagaucacaugcgugugcagagacaauuggcacggguccaaccggcccugggugagcuucaaucagaaccuggaauaucagauuggauacaucuguucuggcauuuuuggggauaauccucgccccaacgacaaaaccggauccugcggcccgguuagcucuaauggggcuaacggagugaagggcuucuccuuuaaguauggcaacggggucuggaucggaagaacaaaaagcauuuccucucggaauggcuucgagaugaucugggauccuaacggguggaccggaaccgacaauaacuuuagcauuaagcaagacaucgugggcaucaaugaaugguccggguacucuggcagcuucguucagcaucccgagcuuacaggacuggauuguauucgcccuugcuucuggguggaacucaucagaggccggcccaaagagaacacgauuuggaccuccgggagcucuaucuccuuuuguggagucaauagcgacacagugggcuggucuuggcccgauggggccgagcugccuuucaccauugacaaguga

SEQ ID NO: 210488 - RNA, 1410 nt, Artificial Sequence; identical to SEQ ID NO: 210033
  derived and/or modified CDS sequence (opt5) from neuraminidase__InfluenzaA__ADE20661

SEQ ID NO: 210489 - RNA, 1410 nt, Artificial Sequence; identical to SEQ ID NO: 210033
  derived and/or modified CDS sequence (opt5) from neuraminidase__InfluenzaA__ADE20671

SEQ ID NO: 210490 - RNA, 1410 nt, Artificial Sequence; identical to SEQ ID NO: 210033
  derived and/or modified CDS sequence (opt5) from neuraminidase__InfluenzaA__ADE20681

SEQ ID NO: 210491 - RNA, 1410 nt, Artificial Sequence
  derived and/or modified CDS sequence (opt5) from neuraminidase__InfluenzaA__ADE20701
augaaccccaaucagaagaucauuaccaucggcagcgugugcaugacaauugggauggccaaccugauccuccaaauuggaaauaucaucuccauuuggaucucucacagcauucagcugggcaaccagaaucagaucgagacguguaaccaauccgucauuaccuacgaaaauaacacauggguuaaucagaccuaugugaacaucucuaauacaaacuucgcugccgggcagagcguggucuccgugaaacuugcgggaaauucuagccugugcccuguuuccggcugggcuauuuacagcaaggacaacucugugagaaucggguccaaaggagaugucuuugugauccgggagccguucauuagcuguucuccccucgaaugccgcaccuuuuuccugacacagggcgcccuucugaaugacaagcauuccaacggcaccaucaaagauagaagcccuuaucggacgcucaugucuugucccauuggggagguuccuucccccuacaacagccgcuuugaauccguggccuggucugcuagcgccugccacgacggaaucaauuggcugaccauuggcaucuccgggccugauaacggagcugucgccgugcugaaguauaauggcgugaucacagacaccauuaagagcuggagaaacaauauccuccggacacaagagucugagugugcgugcgucaacggguccuguuucaccguuaugacggauggaccgagcaauggccaggccucuuacaaaauuuuucgcaucgaaaagggcaaaauugucaagagcguggagaugaacgcucccaauuaucauuacgaagagugcuccuguuacccugacucuagcgagaucacaugcgugugcagagauaacuggcacggguccaaucggcccugggugagcuucaaccagaaucuggaauaucagaucggauacauuuguucuggcaucuuuggggacaacccucgccccaaugauaaaaccggauccugcggcccgguuagcucuaacggggccaacggagugaagggcuucuccuuuaaguauggcaauggggucuggauuggaagaacaaaaagcaucuccucucggaacggcuucgagaugauuugggacccuaauggguggaccggaaccgauaacaauuuuagcaucaagcaagacauugugggcaucaacgaaugguccggguacucuggcagcuucguucagcaucccgagcuuacaggacuggacuguauccgcccuugcuucuggguggaacucauuagaggccggcccaaagagaauacgaucuggaccuccgggagcucuauuuccuuuuguggagucaacagcgauacagugggcuggucuuggcccgacggggcugagcugccuuucaccaucgauaaguga

SEQ ID NO: 210492 - RNA, 1410 nt, Artificial Sequence; identical to SEQ ID NO: 210033
  derived and/or modified CDS sequence (opt5) from neuraminidase__InfluenzaA__ADE20711

SEQ ID NO: 210493 - RNA, 1410 nt, Artificial Sequence
  derived and/or modified CDS sequence (opt5) from neuraminidase__InfluenzaA__ADE20721
augaaccccaaucagaagaucauuaccaucggcagcgugugcaugacaauugggauggccaaccugauccuccaaauuggaaauaucaucuccauuuggaucucucacagcauucagcugggcaaccagaaucagaucgagacguguaaccaauccgucauuaccuacgaaaauaacacauggguuaaucagaccuaugugaacaucucuaauacaaacuucgcugccgggcagagcguggucuccgugaaacuuguuggaaauucuagccugugcccuguguccggcugggcgauuuacagcaaggacaacucugucagaaucggguccaaaggagauguguuuguuauccgggagccguucauuagcuguucuccccucgaaugccgcaccuuuuuccugacacagggcgcccuucugaaugacaagcauuccaacggcaccaucaaagauagaagcccuuaucggacgcucaugucuugucccauuggggaggugccuucccccuacaacagccgcuuugaauccgucgcuuggucugccagcgcuugccacgacggaaucaauuggcugaccauuggcaucuccgggccugauaacggagccguggcugugcugaaguauaauggcaucauuacagacaccaucaagagcuggagaaacaauauucuccggacacaagagucugagugugccugcgucaacggguccuguuucaccguuaugacggauggaccgagcaauggccaggcgucuuacaaaaucuuucgcauugaaaagggcaaaaucgucaagagcguggagaugaacgcccccaauuaucauuacgaagagugcuccuguuacccugacucuagcgagaucacaugcgugugcagagauaacuggcacggguccaaucggcccugggugagcuucaaccagaaucuggaauaucagauuggauacaucuguucuggcauuuuuggggacaacccucgccccaaugauaaaaccggauccugcggcccgguuagcucuaacggggcuaacggagugaagggcuucuccuuuaaguauggcaauggggucuggaucggaagaacaaaaagcauuuccucucggaacggcuucgagaugaucugggacccuaauggguggaccggaaccgauaacaauuuuagcauuaagcaagacaucgugggcaucaacgaaugguccggguacucuggcagcuucguucagcaucccgagcuuacaggacuggacuguauucgcccuugcuucuggguggaacucaucagaggccggcccaaagagaauacgauuuggaccuccgggagcucuaucuccuuuuguggagucaacagcgauacagugggcuggucuuggcccgacggggccgagcugccuuucaccauugaucgcuga

SEQ ID NO: 210494 - RNA, 1410 nt, Artificial Sequence; identical to SEQ ID NO: 210491
  derived and/or modified CDS sequence (opt5) from neuraminidase__InfluenzaA__ADE20731

SEQ ID NO: 210495 - RNA, 1410 nt, Artificial Sequence; identical to SEQ ID NO: 210033
  derived and/or modified CDS sequence (opt5) from neuraminidase__InfluenzaA__ADE20741

SEQ ID NO: 210496 - RNA, 1410 nt, Artificial Sequence; identical to SEQ ID NO: 210033
  derived and/or modified CDS sequence (opt5) from neuraminidase__InfluenzaA__ADE20751

SEQ ID NO: 210497 - RNA, 1410 nt, Artificial Sequence; identical to SEQ ID NO: 210491
  derived and/or modified CDS sequence (opt5) from neuraminidase__InfluenzaA__ADE20761

SEQ ID NO: 210498 - RNA, 1410 nt, Artificial Sequence; identical to SEQ ID NO: 210491
  derived and/or modified CDS sequence (opt5) from neuraminidase__InfluenzaA__ADE20781

SEQ ID NO: 210499 - RNA, 1410 nt, Artificial Sequence; identical to SEQ ID NO: 208810
  derived and/or modified CDS sequence (opt5) from neuraminidase__InfluenzaA__ADE20791

SEQ ID NO: 210500 - RNA, 1410 nt, Artificial Sequence; identical to SEQ ID NO: 208810
  derived and/or modified CDS sequence (opt5) from neuraminidase__InfluenzaA__ADE20801

SEQ ID NO: 210501 - RNA, 1410 nt, Artificial Sequence; identical to SEQ ID NO: 208810
  derived and/or modified CDS sequence (opt5) from neuraminidase__InfluenzaA__ADE20811

SEQ ID NO: 210502 - RNA, 1410 nt, Artificial Sequence; identical to SEQ ID NO: 208810
  derived and/or modified CDS sequence (opt5) from neuraminidase__InfluenzaA__ADE20821

SEQ ID NO: 210503 - RNA, 1410 nt, Artificial Sequence; identical to SEQ ID NO: 208810
  derived and/or modified CDS sequence (opt5) from neuraminidase__InfluenzaA__ADE20831

SEQ ID NO: 210504 - RNA, 1410 nt, Artificial Sequence; identical to SEQ ID NO: 208810
  derived and/or modified CDS sequence (opt5) from neuraminidase__InfluenzaA__ADE20841

SEQ ID NO: 210505 - RNA, 1410 nt, Artificial Sequence; identical to SEQ ID NO: 208810
  derived and/or modified CDS sequence (opt5) from neuraminidase__InfluenzaA__ADE20851

SEQ ID NO: 210506 - RNA, 1410 nt, Artificial Sequence; identical to SEQ ID NO: 210426
  derived and/or modified CDS sequence (opt5) from neuraminidase__InfluenzaA__ADE20861

SEQ ID NO: 210507 - RNA, 1410 nt, Artificial Sequence; identical to SEQ ID NO: 208810
  derived and/or modified CDS sequence (opt5) from neuraminidase__InfluenzaA__ADE20871

SEQ ID NO: 210508 - RNA, 1410 nt, Artificial Sequence; identical to SEQ ID NO: 210422
  derived and/or modified CDS sequence (opt5) from neuraminidase__InfluenzaA__ADE20881

SEQ ID NO: 210509 - RNA, 1410 nt, Artificial Sequence; identical to SEQ ID NO: 208810
  derived and/or modified CDS sequence (opt5) from neuraminidase__InfluenzaA__ADE20891

SEQ ID NO: 210510 - RNA, 1410 nt, Artificial Sequence; identical to SEQ ID NO: 208810
  derived and/or modified CDS sequence (opt5) from neuraminidase__InfluenzaA__ADE20901

SEQ ID NO: 210511 - RNA, 1410 nt, Artificial Sequence; identical to SEQ ID NO: 208810
  derived and/or modified CDS sequence (opt5) from neuraminidase__InfluenzaA__ADE20911

SEQ ID NO: 210512 - RNA, 1410 nt, Artificial Sequence; identical to SEQ ID NO: 208810
  derived and/or modified CDS sequence (opt5) from neuraminidase__InfluenzaA__ADE20921

SEQ ID NO: 210513 - RNA, 1410 nt, Artificial Sequence
  derived and/or modified CDS sequence (opt5) from neuraminidase__InfluenzaA__ADE20931
augaaccccaaucagaagaucauuaccaucggcagcgugugcaugacaauugggauggccaaccugauccuccaaauuggaaauaucaucuccauuuggaucucucacagcauucagcugggcaaccagaaucagaucgagacguguaaccaauccgucauuaccuacgaaaauaacacauggguuaaucagaccuaugugaacaucucuaauacaaacuucgcugccgggcagagcguggucuccgugaaacuugcgggaaauucuagccugugcccuguuuccggcugggcuauuuacagcaaggacaacucuaucagaaucggguccaaaggagauguguuugucauucgggagccguucaucagcuguucuccccucgaaugccgcaccuuuuuccugacacagggcgcccuucugaaugacaagcauuccaacggcaccauuaaagauagaagcccuuaucggacgcucaugucuugucccaucggggaggugccuucccccuacaacagccgcuuugaauccguugccuggucugcuagcgccugccacgacggaauuaauuggcugaccaucggcaucuccgggccugauaacggagcuguggccguccugaaguauaauggcauuaucacagacaccauuaagagcuggagaaacaauauccuccggacacaagagucugagugugcgugcgugaacggguccuguuucaccgugaugacggauggaccgagcgacggccaggccucuuacaaaauuuuucgcaucgaaaagggcaaaaucgucaagagcguugagaugaaugcucccaacuaucauuacgaagagugcuccuguuacccugauucuagcgagauuacaugcgugugcagagacaauuggcacggguccaaccggcccugggugagcuucaaucagaaccuggaauaucagaucggauacauuuguucuggcaucuuuggggauaauccucgccccaacgacaaaaccggauccugcggcccgguccuuagcaauggggccaacggagugaagggcuucucuuuuaaguauggcaacgggguuuggauuggaagaacaaaauccaucggcagccggaauggguucgagaugauuugggauccuaacggauggaccggcaccgacaauaacuuuuccaucaagcaagacaucguggggauuaaugaauggucuggcuacagcggauccuucguccagcaucccgagcugacaggccucgauuguauccgcccuugcuucuggguggaacugauuagagggcggcccaaagagaacacgaucuggaccucuggaagcuccauuagcuuuuguggcguuaauucugacacaguggggugguccuggcccgauggagcugagcuuccuuucaccaucgacaaguga

SEQ ID NO: 210514 - RNA, 1410 nt, Artificial Sequence; identical to SEQ ID NO: 208810
  derived and/or modified CDS sequence (opt5) from neuraminidase__InfluenzaA__ADE20941

SEQ ID NO: 210515 - RNA, 1410 nt, Artificial Sequence
  derived and/or modified CDS sequence (opt5) from neuraminidase__InfluenzaA__ADE20951
augaaccccaaucagaagaucauuaccaucggcagcgugugcaugacaauugggauggccaaccugauccuccaaauuggaaauaucaucuccauuuggaucucucacagcauucagcugggcaaccagaaucagaucgagacguguaaccaauccgucauuaccuacgaaaauaacacauggguuaaucagaccuaugugaacaucucuaauacaaacuucgcugccgggcagagcguggucuccgugaaacuugcgggaaauucuagccugugcccuguuuccggcugggcuauuuacagcaaggacaacucuaucagaaucggguccaaaggagauguguuugucauucgggagccguucaucagcuguucuccccucgaaugccgcaccuuuuuccugacacagggcgcccuucugaaugacaagcauuccaacggcaccauuaaagauagaagcccuuaucggacgcucaugucuugucccaucggggaggugccuucccccuacaacagccgcuuugaauccguugccuggucugcuagcgccugccacgacggaauuaauuggcugaccaucggcaucuccgggccugauaacggagcuguggccguccugaaguauaauggcauuaucacagacaccauuaagagcuggagaaacaauauccuccggacacaagagucugagugugcgugcgugaacggguccuguuucaccgugaugacggauggaccgagcgacggccaggccucuuacaaaauuuuucgcaucgaaaagggcaaaaucgucaagagcguugagaugaaugcucccaacuaucauuacgaagagugcuccuguuacccugauucuagcgagauuacaugcgugugcagagacaauuggcacggguccaaccggcccugggugagcuucaaucagaaccuggaauaucagaucggauacauuuguucuggcaucuuuggggauaauccucgccccaacgacaaaaccggauccugcggcccggucagcucuaauggggccaacggagugaagggcuucuccuuuaaguauggcaacgggguuuggauuggaagaacaaaaagcaucuccucucggaauggcuucgagaugauuugggauccuaacggguggaccggaaccgacaauaacuuuagcaucaagcaagacguggucggcaucaaugaaugguccggguacucuggcagcuucgugcagcaucccgagcuuacaggacuggauuguauucgcccuugcuucuggguugaacucaucagaggccggcccaaagagaacacgauuuggaccuccgggagcucuaucuccuuuuguggagugaauagcgacacagucggcuggucuuggcccgauggggcugagcugccuuucaccauugacaaguga

SEQ ID NO: 210516 - RNA, 1410 nt, Artificial Sequence
  derived and/or modified CDS sequence (opt5) from neuraminidase__InfluenzaA__ADE20961
augaaccccaaucagaagaucauuaccaucggcagcgugugcaugacaauugggauggccaaccugauccuccaaauuggaaauaucaucuccauuuggaucucucacagcauucagcugggcaaccagaaucagaucgagacguguaaccaauccgucauuaccuacgaaaauaacacauggguuaaucagaccuaugugaacaucucuaauacaaacuucgcugccgggcagagcguggucuccgugaaacuugcgggaaauucuagccugugcccuguuuccggcugggcuauuuacagcaaggacaacucuaucagaaucggguccaaaggagauguguuugucauucgggagccguucaucagcuguucuccccucgaaugccgcaccuuuuuccugacacagggcgcccuucugaaugacaagcauuccaacggcaccauuaaagauagaagcccuuaucggacgcucaugucuugucccaucggggaggugccuucccccuacaacagccgcuuugaauccguugccuggucugcuagcgccugccacgacggaauuaauuggcugaccaucggcaucuccgggccugauaacggagcuguggccguccugaaguauaaugacauuaucacagauaccauuaagagcuggagaaacaauauccuccggacacaagagucugagugugcgugcgugaacggcuccuguuucaccgugaugacggacgggccgagcgauggacaggccucuuacaaaauuuuucgcaucgaaaagggcaaaaucgucaagagcguugagaugaaugcucccaacuaucauuacgaagagugcuccuguuacccugacucuagcgagauuacaugcgugugcagagauaauuggcacggcuccaaccggcccugggugagcuucaaucagaaccuggaauaucagaucggguacauuuguucuggaaucuuuggcgacaauccucgccccaacgauaaaaccggguccugcggaccggucagcucuaauggcgccaacggggugaagggauucuccuuuaaguauggcaacggcguuuggauugggagaacaaaaagcaucuccucucggaauggauucgagaugauuugggacccuaacggcuggaccgggaccgacaauaacuuuagcaucaagcaagauaucgugggaauuaaugaaugguccggcuacucugggagcuucguccagcaucccgagcuuacaggccuggacuguauccgcccuugcuucuggguggaacucauuagaggacggcccaaagagaacacgaucuggaccuccggcagcucuauuuccuuuugugggguuaauagcgauacagugggauggucuuggcccgacggcgcugagcugccuuucaccaucgauaaguga

SEQ ID NO: 210517 - RNA, 1410 nt, Artificial Sequence; identical to SEQ ID NO: 208810
  derived and/or modified CDS sequence (opt5) from neuraminidase__InfluenzaA__ADE20971

SEQ ID NO: 210518 - RNA, 1410 nt, Artificial Sequence; identical to SEQ ID NO: 210426
  derived and/or modified CDS sequence (opt5) from neuraminidase__InfluenzaA__ADE20981

SEQ ID NO: 210519 - RNA, 1410 nt, Artificial Sequence; identical to SEQ ID NO: 208810
  derived and/or modified CDS sequence (opt5) from neuraminidase__InfluenzaA__ADE20991

SEQ ID NO: 210520 - RNA, 1410 nt, Artificial Sequence
  derived and/or modified CDS sequence (opt5) from neuraminidase__InfluenzaA__ADE21001
augaaccccaaucagaagaucauuaccaucggcagcgugugcaugacaauugggauggccaaccugauccuccaaauuggaaauaucaucuccauuuggaucucucacacgauucagcugggcaaccagaaucagaucgagaccuguaaccaaagcgucauuacauacgaaaauaacaccuggguuaaucagacauaugugaacaucuccaauaccaacuucgcugccgggcagucuguggucagcgugaaacuugcgggaaauuccucucugugcccuguuagcggcugggcuauuuacuccaaggacaacagcaucagaaucgggucuaaaggagauguguuuauuauccgggagccguucauuuccuguagcccccucgaaugccgcacauuuuuccugacccagggcgcccuucugaaugacaagcauucuaacggcacgaucaaagauagauccccuuaucggacccucaugagcugucccauuggggaggucccuucucccuacaacucccgcuuugaaagcguggccugguccgcuucugccugccacgacggaaucaauuggcugacaaucggcauuagcgggccugauaacggagcuguugccgugcugaaguauaauggcaucauuaccgacacaaucaaguccuggagaaacaauauucuccggacccaagagagcgagugugcgugcgucaacgggucuuguuucacggugaugacagauggaccguccgacggccaggccagcuacaaaaucuuucgcaucgaaaagggcaaaauugugaagucugucgagaugaaugcucccaacuaucauuacgaagagugcagcuguuacccugauuccucugagauuaccugcguuugcagagacaauuggcacgggagcaaccggcccuggguguccuucaaucagaaccuggaauaucagaucggauacaucuguagcggcauuuuuggggauaauccucgccccaacgacaaaacaggaucuugcggcccgguguccagcaauggggccaacggagucaagggcuucucuuuuaaguauggcaacgggguguggaucggaagaaccaaauccauuagcucccggaauggcuucgagaugaucugggauccuaacggguggaccggaacagacaauaacuuuucuaucaagcaagacauuguuggcaucaaugaauggagcggguacuccggcucuuucgugcagcaucccgagcuuacgggacuggauuguauucgcccuugcuucugggucgaacucaucagaggccggcccaaagagaacaccauuuggacaagcggguccagcaucucuuuuuguggaguuaauuccgacaccgugggcuggagcuggcccgauggggcugagcugccuuucacaaucgacaaguga

SEQ ID NO: 210521 - RNA, 1410 nt, Artificial Sequence; identical to SEQ ID NO: 208810
  derived and/or modified CDS sequence (opt5) from neuraminidase__InfluenzaA__ADE21011

SEQ ID NO: 210522 - RNA, 1410 nt, Artificial Sequence; identical to SEQ ID NO: 208810
  derived and/or modified CDS sequence (opt5) from neuraminidase__InfluenzaA__ADE21021

SEQ ID NO: 210523 - RNA, 1410 nt, Artificial Sequence; identical to SEQ ID NO: 210459
  derived and/or modified CDS sequence (opt5) from neuraminidase__InfluenzaA__ADE21031

SEQ ID NO: 210524 - RNA, 1410 nt, Artificial Sequence
  derived and/or modified CDS sequence (opt5) from neuraminidase__InfluenzaA__ADE21041
augaaccccaaucagaagaucauuaccaucggcagcgugugcaugacaauugggauggccaaccugauccuccaaauuggaaauaucaucuccauuuggaucucucacagcauucagcugggcaaccagaaucagaucgagacguguaaccaauccgucauuaccuacgaaaauaacacauggguuaaucagaccuaugugaacaucucuaauacaaacuucgcugccgggcagagcguggucuccgugaaacuugcgggaaauucuagccugugcccuguuuccggcugggcuauuuacagcaaggacaacucuaucagaaucggguccaaaggagauguguuugucauucgggagccguucaucagcuguucuccccucgaaugccgcaccuuuuuccugacacagggcgcccuucugaaugacaagcauuccaacggcaccauuaaagauagaagcccuuaucggacgcucaugucuugucccaucggggaggugccuucccccuacaacagccgcuuugaauccguugccuggucugcuagcgccugccacgacggaauuaauuggcugaccaucggcaucuccgggccugauaacggagcuguggccguccugaaguauaauggcauuaucacagacaccauuaagagcuggagaaacaauauccuccggacacaagagucugagugugcgugcgugaacggguccuguuucaccgugaugacggauggaccgagcgacggccaggccucuuacaaaauuuuucgcaucgaaaagggcaaaaucgucaagagcauugagaugaaugcucccaacuaucauuacgaagagugcuccuguuacccugauucuagcgagaucacaugcguuugcagagacaauuggcacggguccaaccggcccugggugagcuucaaucagaaccuggaauaucagauuggauacaucuguucuggcauuuuuggggauaauccucgccccaacgacaaaaccggauccugcggcccggugagcucuaauggggccaacggagucaagggcuucuccuuuaaguauggcaacgggguguggaucggaagaacaaaaagcauuuccucucggaauggcuucgagaugaucugggauccuaacggguggaccggaaccgacaauaacuuuagcaucaagcaagacauuguuggcaucaaugaaugguccggguacucuggcagcuucgugcagcaucccgagcuuacaggacuggauuguauucgcccuugcuucugggucgaacucaucagaggccggcccaaagagaacacgauuuggaccuccgggagcucuaucuccuuuuguggagugaauagcgacacaguuggcuggucuuggcccgauggggcugagcugccuuucaccaucgacaaguga

SEQ ID NO: 210525 - RNA, 1410 nt, Artificial Sequence; identical to SEQ ID NO: 208810
  derived and/or modified CDS sequence (opt5) from neuraminidase__InfluenzaA__ADE21051

SEQ ID NO: 210526 - RNA, 1410 nt, Artificial Sequence
  derived and/or modified CDS sequence (opt5) from neuraminidase__InfluenzaA__ADE21071
augaaccccaaucagaagaucauuaccaucggcagcgugugcaugacaauugggauggccaaccugauccuccaaauuggaaauaucaucuccauuuggaucucucacagcauucagcugggcaaccagaaucagaucgagacguguaaccaauccgucauuaccuacgaaaauaacacauggguuaaucagaccuaugugaacaucucuaauacaaacuucgcugccgggcagagcguggucuccgugaaacuugcgggaaauucuagccugugcccuguuaacggcugggcuauuuacuccaaggacaauagcaucagaaucgggucuaaaggagauguguuugucauucgggagccguucaucuccuguagcccccucgaaugccgcaccuuuuuccugacacagggcgcccuucugaacgacaagcauucuaacggcaccauuaaagauagauccccuuaucggacgcucaugagcugucccaucggggaggugccuucucccuacaauucccgcuuugaaagcguugccugguccgcuucugccugccacgacggaauuaacuggcugaccaucggcaucagcgggccugauaauggagcuguggccguccugaaguauaacggcauuaucacagacaccauuaaguccuggagaaauaacauccuccggacacaagagagcgagugugcgugcgugaaugggucuuguuucaccgugaugacggauggaccguccgacggccaggccagcuacaaaauuuuucgcaucgaaaagggcaaaaucgucaagucuguugagaugaacgcucccaauuaucauuacgaagagugcagcuguuacccugauuccucugagauuacaugcgugugcagagacaacuggcacgggagcaaucggcccuggguguccuucaaccagaaucuggaauaucagaucggauacauuuguagcggcaucuuuggggauaacccucgccccaaugacaaaaccggaucuugcggcccggucuccagcaacggggccaacggagugaagggcuucucuuuuaaguauggcaaugggguuuggauuggaagaacaaaauccaucagcucccggaacggcuucgagaugauuugggauccuaauggguggaccggaaccgacaacaaguuuucuaucaaacaagacaucgugggcauuaaugaauggagcggguacuccggcucuuucguccagcaucccgagcuuacaggacuggauuguauccgcccuugcuucuggguggaacucauuagaggccggcccaaggagaacacgaucuggaccagcggguccagcauuucuuuuuguggaguuaauuccgacacagugggcuggagcuggcccgauggggcugagcugccuuucaccaucgacaaauga

SEQ ID NO: 210527 - RNA, 1413 nt, Artificial Sequence; identical to SEQ ID NO: 208704
  derived and/or modified CDS sequence (opt5) from neuraminidase__InfluenzaA__ADE28752

SEQ ID NO: 210528 - RNA, 1413 nt, Artificial Sequence; identical to SEQ ID NO: 209533
  derived and/or modified CDS sequence (opt5) from neuraminidase__InfluenzaA__ADE28763

SEQ ID NO: 210529 - RNA, 1410 nt, Artificial Sequence; identical to SEQ ID NO: 210033
  derived and/or modified CDS sequence (opt5) from neuraminidase__InfluenzaA__ADE28773

SEQ ID NO: 210530 - RNA, 1410 nt, Artificial Sequence; identical to SEQ ID NO: 210033
  derived and/or modified CDS sequence (opt5) from neuraminidase__InfluenzaA__ADE28783

SEQ ID NO: 210531 - RNA, 1410 nt, Artificial Sequence; identical to SEQ ID NO: 210491
  derived and/or modified CDS sequence (opt5) from neuraminidase__InfluenzaA__ADE28803

SEQ ID NO: 210532 - RNA, 1410 nt, Artificial Sequence; identical to SEQ ID NO: 208810
  derived and/or modified CDS sequence (opt5) from neuraminidase__InfluenzaA__ADE28813

SEQ ID NO: 210533 - RNA, 1410 nt, Artificial Sequence; identical to SEQ ID NO: 208810
  derived and/or modified CDS sequence (opt5) from neuraminidase__InfluenzaA__ADE28823

SEQ ID NO: 210534 - RNA, 1410 nt, Artificial Sequence
  derived and/or modified CDS sequence (opt5) from neuraminidase__InfluenzaA__ADE28843
augaaccccaaucagaagaucauuaccaucggcagcgugugcaugacaauugggauggccaaccugauccuccaaauuggaaauaucaucuccauuuggaucucucacagcauucagcugggcaaccagaaucagaucgagacguguaaccaauccgucauuaccuacgaaaauaacacauggguuaaucagaccuaugugaacaucucuaauacaaacuucgcugccgggcagagcguggucuccgugaaacuugcgggaaauucuagccugugcccuguuuccggcugggcuauuuacagcaaggacaacucugugagaaucggguccaaaggagaugucuuugugauccgggagccguucauuagcuguucuccccucgaaugccgcaccuuuuuccugacacagggcgcccuucugaaugacaagcauuccaacggcaccaucaaagauagaagcccuuaucggacgcucaugucuugucccguuggggaggugccuucccccuacaacagccgcuuugaauccgucgccuggucugcuagcgccugccacgacggaauuaauuggcugaccaucggcauuuccgggccugauaacggagcuguggccgugcugaaguauaauggcaucaucacagacaccauuaagagcuggagaaacaauauccuccggacacaagagucugagugugcgugcgucaacggguccuguuucaccguuaugacggauggaccgagcaauggccaggccucuuacaaaauuuuucgcaucgaaaagggcaaaauugucaagagcguggagaugaacgcucccaauuaucauuacgaagagugcuccuguuacccugacucuagcgagaucacaugcgugugcagagauaacuggcacggguccaaucggcccugggugagcuucaaccagaaucuggaauaucagaucggauacauuuguucuggcaucuuuggggacaacccucgccccaaugauaaaaccggauccugcggcccgguuagcucuaacggggccaacggagugaagggcuucuccuuuaaguauggcaauggggucuggauuggaagaacaaaaagcaucuccucucggaacggcuucgagaugauuugggacccuaauggguggaccggaaccgauaacaauuuuagcaucaagcaagacauugugggcaucaacgaaugguccggguacucuggcagcuucguucagcaucccgagcuuacaggacuggacuguauccgcccuugcuucuggguggaacucauuagaggccggcccaaagagaauacgaucuggaccuccgggagcucuauuuccuuuuguggagucaacagcgauacagugggcuggucuuggcccgacggggcugagcugccuuucaccaucgauaaguga

SEQ ID NO: 210535 - RNA, 1410 nt, Artificial Sequence
  derived and/or modified CDS sequence (opt5) from neuraminidase__InfluenzaA__ADE28853
augaaccccaaucagaagaucauuaccaucgugagcgucugcaugacaauuggcauggccaaccugauccuccaaauugggaauaucaucuccauuuggaucucucacagcauucagcugggaaaccagaaucagaucgagacguguaaccaauccguuauuaccuacgaaaauaacacaugggugaaucagaccuaugugaacaucucuaauacaaacuucgcugccggccagagcgucguguccguuaaacuugcggggaauagcagccugugcccuguguccggaugggcuauuuacagcaaggacaacucugucagaaucggcuccaaaggggauguguuuguuauccgggagccguucauuagcuguucuccccucgaaugccgcaccuuuuuccugacacagggagcccuucugaaugacaagcauuccaacggcaccaucaaagauagaagcccuuaucggacgcucaugucuugucccauuggcgaggugccuucccccuacaacagccgcuuugaauccgucgccuggucugcuagcgccugccacgacgggaucaauuggcugaccauuggaaucuccggcccugauaacggggcuguggccgugcugaaguauaauggaaucauuacagacaccaucaagagcuggagaaacaauauucuccggacacaagagucugagugugcgugcgucaacggcuccuguuucaccguuaugacggaugggccgagcaauggacaggccucuuacaaaaucuuucgcauugaaaagggcaaaaucgugaagucuguggagaugaacgcucccaauuaucauuacgaagagugcuccuguuacccugacucuagcgagaucacaugcgucugcagagauaacuggcacggcuccaaucggcccugggugagcuucaaccagaaucuggaauaucagauuggguacaucuguucuggaauuuuuggcgacaacccucgccccaaugauaaaaccggguccugcggaccgguuagcucuaacggcgccaacggggugaagggauucuccuuuaaguauggcaauggcgucuggaucgggagaacaaaaagcauuuccucucggaacggauucgagaugaucugggacccuaauggcuggaccgggaccgauaacaauuuuagcauuaagcaagacaucgugggaaucaacgaaugguccggcuacucugggagcuucguucagcaucccgagcuuacaggccuggacuguauucgcccuugcuucuggguggaacucaucagaggacggcccaaagagaauacgauuuggaccuccggcagcucuaucuccuuuuguggggucaacagcgauacagugggauggucuuggcccgacggcgcugagcugccuuucaccauugauaaguga

SEQ ID NO: 210536 - RNA, 1410 nt, Artificial Sequence; identical to SEQ ID NO: 210534
  derived and/or modified CDS sequence (opt5) from neuraminidase__InfluenzaA__ADE28884

SEQ ID NO: 210537 - RNA, 1410 nt, Artificial Sequence
  derived and/or modified CDS sequence (opt5) from neuraminidase__InfluenzaA__ADE28894
augaaccccaaucagaagaucauuaccaucggcagcgugugcaugacaauugggauggccaaccugauccuccaaauuggaaauaucaucuccauuuggaucucucacagcguccagcugggcaaccagaaucagauugagacguguaaccaauccguuaucaccuacgaaaauaacacaugggugaaucagaccuaugugaacauuucuaauacaaacuucgcugccgggcagagcgucguguccguuaaacuugcgggaaauucuagccugugcccuguguccggcugggcuaucuacagcaaggacaacucugucagaauuggguccaaaggagauguguuuguuauccgggagccguucaucagcuguucuccccucgaaugccgcaccuuuuuccugacacagggcgcccuucugaaugacaagcauuccaacggcaccauuaaagauagaagcccuuaucggacgcucaugucuugucccaucggggaggugccuucccccuacaacagccgcuuugaauccgucgccuggucugcuagcgccugccacgacggaauuaauuggcugaccaucggcauuuccgggccugauaacggagcuguggccgugcugaaguauaauggcaucaucacagacaccauuaagagcuggagaaacaauauccuccggacacaagagucugagugugcgugcgucaacggguccuguuucaccguuaugacggauggaccgagcaauggccaggccucuuacaaaauuuuucgcaucgaaaagggcaaaauugucaagagcguggagaugaacgcucccaauuaucauuacgaagagugcuccuguuacccugacucuagcgagaucacaugcgugugcagagauaacuggcacggguccaaucggcccugggugagcuucaaccagaaucuggaauaucagaucggauacauuuguucuggcaucuuuggggacaacccucgccccaaugauaaaaccggauccugcggcccgguuagcucuaacggggccaacggagugaagggcuucuccuuuaaguauggcaauggggucuggauuggaagaacaaaaagcaucuccucucggaacggcuucgagaugauuugggacccuaauggguggaccggaaccgauaacaauuuuagcaucaagcaagacauugugggcaucaacgaaugguccggguacucuggcagcuucguucagcaucccgagcuuacaggacuggacuguauccgcccuugcuucuggguggaacucauuagaggccggcccaaagagaauacgaucuggaccuccgggagcucuauuuccuuuuguggagucaacagcgauacagugggcuggucuuggcccgacggggcugagcugccuuucaccaucgauaaguga

SEQ ID NO: 210538 - RNA, 1410 nt, Artificial Sequence; identical to SEQ ID NO: 210458
  derived and/or modified CDS sequence (opt5) from neuraminidase__InfluenzaA__ADE28904

SEQ ID NO: 210539 - RNA, 1410 nt, Artificial Sequence; identical to SEQ ID NO: 208810
  derived and/or modified CDS sequence (opt5) from neuraminidase__InfluenzaA__ADE28914

SEQ ID NO: 210540 - RNA, 1410 nt, Artificial Sequence; identical to SEQ ID NO: 208810
  derived and/or modified CDS sequence (opt5) from neuraminidase__InfluenzaA__ADE28924

SEQ ID NO: 210541 - RNA, 1410 nt, Artificial Sequence
  derived and/or modified CDS sequence (opt5) from neuraminidase__InfluenzaA__ADE28934
augaaccccaaucagaagaucauuaccaucggcagcgugugcaugacaauugggauggccaaccugauccuccaaauuggaaauaucaucuccauuuggaucucucacagcauucagcugggcaaccagaaucagaucgagacguguaaccaauccgucauuaccuacgaaaauaacacauggguuaaucagaccuaugugaacaucucuaauacaaacuucgcugccgggcagagcguggucuccgugaaacuugcgggaaauucuagccugugcccuguuuccggcugggcuauuuacagcaaggacaacucuaucagaaucggguccaaaggagauguguuugucauucgggagccguucaucagcuguucuccccucgaaugccgcaccuuuuuccugacacagggcgcccuucugaaugacaagcauuccaacggcaccauuaaagauagaagcccuuaucggacgcucaugucuugucccaucggggaggugccuucccccuacaacagccgcuuugaauccguugccuggucugcuagcgccugccacgacggaauuaauuggcugaccaucggcaucuccgggccugauaacggagcuguggccguccugaaguauaauggcauuaucacagacaccauuaagagcuggagaaacaauauccuccggacacaagagucugagugugcgugcauuaacggguccuguuucaccgugaugacggauggaccgagcgacggccaggccucuuacaaaaucuuucgcaucgaaaagggcaaaauugucaagagcguggagaugaaugcucccaacuaucauuacgaagagugcuccuguuacccugauucuagcgagaucacaugcguuugcagagacaauuggcacggguccaaccggcccugggugagcuucaaucagaaccuggaauaucagauuggauacaucuguucuggcauuuuuggggauaauccucgccccaacgacaaaaccggauccugcggcccggugagcucuaauggggccaacggagucaagggcuucuccuuuaaguauggcaacgggguguggaucggaagaacaaaaagcauuuccucucggaauggcuucgagaugaucugggauccuaacggguggaccggaaccgacaauaacuuuagcaucaagcaagacauuguuggcaucaaugaaugguccggguacucuggcagcuucgugcagcaucccgagcuuacaggacuggauuguauucgcccuugcuucugggucgaacucaucagaggccggcccaaagagaacacgauuuggaccuccgggagcucuaucuccuuuuguggagugaauagcgacacaguuggcuggucuuggcccgauggggcugagcugccuuucaccaucgacaaguga

SEQ ID NO: 210542 - RNA, 1410 nt, Artificial Sequence; identical to SEQ ID NO: 208810
  derived and/or modified CDS sequence (opt5) from neuraminidase__InfluenzaA__ADE28954

SEQ ID NO: 210543 - RNA, 1410 nt, Artificial Sequence
  derived and/or modified CDS sequence (opt5) from neuraminidase__InfluenzaA__ADE28964
augaaccccaaucagaagaucauuaccaucggcagcgugugcaugacaauugggauggccaaccugauccuccaaauuggaaauaucaucuccauuuggaucucucacagcauucagcugggcaaccagaaucagaucgagacguguaaccaauccgucauuaccuacgaaaauaacacauggguuaaucagaccuaugugaacaucucuaauauuaacuucgcugccgggcagagcguggucuccgugaaacuugcgggaaauucuagccugugcccuguuuccggcugggcuaucuacagcaaggacaacucuaucagaauuggguccaaaggagauguguuugucauccgggagccguucauuagcuguucuccccucgaaugccgcacauuuuuccugacccagggcgcccuucugaaugacaagcauuccaacggcacaaucaaagauagaagcccuuaucggacccucaugucuugucccauuggggaggugccuucccccuacaacagccgcuuugaauccguugccuggucugcuagcgccugccacgacggaaucaauuggcugacgaucggcauuuccgggccugauaacggagcuguggccguccugaaguauaauggcaucauuaccgacacaaucaagagcuggagaaacaauauucuccggacccaagagucugagugugcgugcgugaacggguccuguuucacagugaugaccgauggaccgagcgacggccaggccucuuacaaaaucuuucgcaucgaaaagggcaaaauugucaagagcguugagaugaaugcucccaacuaucauuacgaagagugcuccuguuacccugauucuagcgagaucacgugcgugugcagagacaauuggcacggguccaaccggcccugggugagcuucaaucagaaccuggaauaucagauuggauacaucuguucuggcauuuuuggggauaauccucgccccaacgacaaaacaggauccugcggcccggucagcucuaauggggccaacggagugaagggcuucuccuuuaaguauggcaacgggguuuggaucggaagaaccaaaagcauuuccucucggaauggcuucgagaugaucugggauccuaacggguggacaggaaccgacaauaacuuuagcaucaagcaagacauugugggcaucaaugaaugguccggguacucuggcagcuucguccagcaucccgagcuuaccggacuggauuguauucgcccuugcuucuggguggaacucaucagaggccggcccaaagagaacacaauuuggacguccgggagcucuaucuccuuuuguggaguuaauagcgacaccgugggcuggucuuggcccgauggggcugagcugccuuucacaaucgacaaguga

SEQ ID NO: 210544 - RNA, 1410 nt, Artificial Sequence; identical to SEQ ID NO: 208810
  derived and/or modified CDS sequence (opt5) from neuraminidase__InfluenzaA__ADE28974

SEQ ID NO: 210545 - RNA, 1410 nt, Artificial Sequence
  derived and/or modified CDS sequence (opt5) from neuraminidase__InfluenzaA__ADE29004
augaaccccaaucagaagaucauuaccaucggcagcgugugcaugacaauugggcuggccaaccucauccugcaaauuggaaauaucaucuccauuuggaucucucacagcauucagcuuggcaaccagaaucagaucgagacguguaaccaauccgucauuaccuacgaaaauaacacauggguuaaucagaccuaugugaacaucucuaauacaaacuucgcugccgggcagagcguggucuccgugaaacuggcgggaaauucuagccucugcccuguuuccggcugggcuauuuacagcaaggacaacucugugagaaucggguccaaaggagaugucuuugugauccgggagccguucauuagcuguucuccccuggaaugccgcaccuuuuuccuuacacagggcgcccugcucaaugacaagcauuccaacggcaccaucaaagauagaagcccuuaucggacgcugaugucuugucccauuggggagguuccuucccccuacaacagccgcuuugaauccguggccuggucugcuagcgccugccacgacggaaucaauuggcugaccauuggcaucuccgggccugauaacggagcugucgccgugcucaaguauaauggcaucauuacagacaccaucaagagcuggagaaacaauauucugcggacacaagagucugagugugcgugcgugaacggguccuguuucaccgucaugacggauggaccgagcgacggccaggccucuuacaaaaucuuucgcauugaaaagggcaaaaucguuaagagcguggagaugaaugcucccaacuaucauuacgaagagugcuccuguuacccugauucuagcgagaucacaugcgugugcagagacaauuggcacggguccaaccggcccugggucagcuucaaucagaaccuugaauaucgcauuggauacaucuguucuggcauuuuuggggauaauccuagacccaacgacaaaaccggauccugcggcccggugagcucuaauggggccaacggaguuaagggcuucuccuuuaaguauggcaacgggguguggaucggacggacaaaaagcauuuccucucgcaauggcuucgagaugaucugggauccuaacggguggaccggaaccgacaagaauuuuagcauuaaacaggacaucgucggcaucaacgaaugguccggguacucuggcagcuucgugcaacaucccgagcugacaggacucgauuguauuagaccuugcuucuggguugaacugauccggggccgccccaaggagaauacgauuuggaccuccgggagcucuaucuccuuuuguggagugaacagcgacacagucggcuggucuuggcccgauggggcugagcuuccuuucaccauugacaaauga

SEQ ID NO: 210546 - RNA, 1410 nt, Artificial Sequence; identical to SEQ ID NO: 208810
  derived and/or modified CDS sequence (opt5) from neuraminidase__InfluenzaA__ADE29014

SEQ ID NO: 210547 - RNA, 1410 nt, Artificial Sequence
  derived and/or modified CDS sequence (opt5) from neuraminidase__InfluenzaA__ADE29024
augaaccccaaucagaagaucauuaccaucggcagcgugugcaugacaauugggauggccaaccugauccuccaaauuggaaauaucaucuccauuuggaucucucacagcauucagcugggcaaccagaaucagaucgagacguguaaccaauccgucauuaccuacgaaaauaacacauggguuaaucagaccuaugugaacaucucuaauacaaacuucgcugccgggcagagcguggucuccgugaaacuugcgggaaauucuagccugugcccuguuuccggcugggcuauuuacagcaaggacaacucuaucagaaucggguccaaaggagauguguuugucauucgggagccguucaucagcuguucuccccucgaaugccgcaccuuuuuccugacacagggcgcccuucugaaugacaagcauuccaacggcaccauuaaagauagaagcccuuaucggacgcucaugucuugucccaucggggaggugccuucccccuacaacagccgcuuugaauccguugccuggucugcuagcgccugccacgacggaauuaauuggcugaccaucggcaucuccgggccugauaacggagcuguggccguccugaaguauaauggcauuaucacagacaccauuaagagcuggaaaaacaauauccucagaacacaagagucugagugugcgugcgugaacggguccuguuucaccgugaugacggauggaccgagcgacggccaggccucuuacaagauuuuucggaucgaaaaaggcaagaucgucaaaagcguugagaugaaugcucccaacuaucauuacgaagagugcuccuguuacccugauucuagcgagauuacaugcgugugccgcgacaauuggcacggguccaacagacccugggugagcuucaaucagaaccuggaauaucagaucggauacauuuguucuggcaucuuuggggauaauccucggcccaacgacaagaccggauccugcggcccggucagcucuaauggggccaacggagugaagggcuucuccuuuaaauauggcaacgggguuuggauuggacgcacaaagagcaucuccucuagaaauggcuucgagaugauuugggauccuaacggguggaauggaaccgacaacaauuuuagcaucaaacaagacaucgugggcauuaacgaaugguccggguacucuggcagcuucguccagcaucccgagcuuaccggacuggauuguauccggccuugcuucuggguggaacucauucgcggcagacccaaggagaauacaaucuggacguccgggagcucuauuuccuuuuguggaguuaacagcgacaccgugggcuggucuuggcccgauggggcugagcugccuuucacaaucgacaaauga

SEQ ID NO: 210548 - RNA, 1410 nt, Artificial Sequence; identical to SEQ ID NO: 208810
  derived and/or modified CDS sequence (opt5) from neuraminidase__InfluenzaA__ADE29034

SEQ ID NO: 210549 - RNA, 1410 nt, Artificial Sequence; identical to SEQ ID NO: 208810
  derived and/or modified CDS sequence (opt5) from neuraminidase__InfluenzaA__ADE29044

SEQ ID NO: 210550 - RNA, 1410 nt, Artificial Sequence; identical to SEQ ID NO: 208810
  derived and/or modified CDS sequence (opt5) from neuraminidase__InfluenzaA__ADE29054

SEQ ID NO: 210551 - RNA, 1410 nt, Artificial Sequence; identical to SEQ ID NO: 210098
  derived and/or modified CDS sequence (opt5) from neuraminidase__InfluenzaA__ADE29064

SEQ ID NO: 210552 - RNA, 1410 nt, Artificial Sequence
  derived and/or modified CDS sequence (opt5) from neuraminidase__InfluenzaA__ADE29087
augaaccccaaucagaagaucauuaccaucggcagcgugugcaugacaauugggauggccaaccugauccuccaaauuggaaauaucaucuccauuuggaucucucacagcauucagcugggcaaccagaaucagaucgagacguguaaccaauccgucauuaccuacgaaaauaacacauggguuaaucagaccuaugugaacaucucuaauacaaacuucgcugccgggcagagcguggucuccgugaaacuugcgggaaauucuagccugugcccuguuuccggcugggcuauuuacagcaaggacaacucugugagaaucggguccaaaggagaugucuuugugauccgggagccguucauuagcuguucuccccucgaaugcaagaccuuuuuccugacacagggcgcccuucugaaugacaaacauuccaacggcaccaucaaggaucgcagcccuuauagaacgcucaugucuugucccauuggggagguuccuucccccuacaacagccgguuugaauccguggccuggucugcuagcgccugccacgacggaaucaauuggcugaccauuggcaucuccgggccugauaacggagcugucgccgugcugaaguauaauggcaucauuacagacaccaucaaaagcuggcgcaacaauauucucagaacacaagagucugagugugcgugcgugaacggguccuguuucaccgucaugacggauggaccgagcaauggccaggccucuuacaagaucuuucggauugaaaaaggcaagaucguuaaaagcguggagaugaacgcucccaauuaucauuacgaagagugcuccuguuacccugacucuagcgagaucacaugcgugugccgcgauaacuggcacggguccaauagacccugggucagcuucaaccagaaucuggaauaucagauuggauacaucuguucuggcauuuuuggggacaacccucggcccaaugauaagaccggauccugcggcccggugagcucuaacggggccaacggaguuaagggcuucuccuuuaaauauggcaaugggguguggaucggacgcacaaagagcauuuccucuagaaacggcuucgagaugaucugggacccuaauggguggaccggaaccgauaacaauuuuagcauuaaacaagacaucgucggcaucaacgaaugguccggguacucuggcagcuucgugcagcaucccgagcuuacaggacuggacuguauucggccuugcuucuggguugaacucauccgcggcagacccaaggagaauacgauuuggaccuccgggagcucuaucuccuuuuguggagugaacagcgauacagucggcuggucuuggcccgacggggcugagcugccuuucaccauugauaaauga

SEQ ID NO: 210553 - RNA, 1410 nt, Artificial Sequence; identical to SEQ ID NO: 208800
  derived and/or modified CDS sequence (opt5) from neuraminidase__InfluenzaA__ADE29097

SEQ ID NO: 210554 - RNA, 1410 nt, Artificial Sequence; identical to SEQ ID NO: 209677
  derived and/or modified CDS sequence (opt5) from neuraminidase__InfluenzaA__ADE34194

SEQ ID NO: 210555 - RNA, 1410 nt, Artificial Sequence; identical to SEQ ID NO: 208671
  derived and/or modified CDS sequence (opt5) from neuraminidase__InfluenzaA__ADE34205

SEQ ID NO: 210556 - RNA, 1410 nt, Artificial Sequence
  derived and/or modified CDS sequence (opt5) from neuraminidase__InfluenzaA__ADE34216
augaaccccaaucagaagaucauuaccaucggcagcgugucccugacaauuucuacgaucugcuucuuuaugcaaauugccauccucgucaccacaguuacccugcacuucaaacaguacgaguuuaacagcccuccgaauaaccaggugaugcuuugugaacccacaaucauugagagaaauaucaccgaaauuguguaucugacaaacaccacgaucgagaaggaaauuugcccuaaacucgcugaguaccggaauugguccaagccccagugugacaucaccggguucgccccuuuuucuaaagauaacagcauucgccuguccgcgggaggcgacaucugggucacaagagagcccuaugugucuugcgauccugacaaguguuaccaauucgcucuugggcagggaaccacacugaauaacguucauagcaauaacaccgugcgggaucgcacgccguauagaacacuccugaugaaugaacugggcguccccuuucaccucgggaccaaacaggugugcaucgccugguccucuagcuccugucaugacggaaaggccuggcugcacguuugcauuacaggcgaugacaagaacgcuaccgccagcuucaucuacaauggccggcuuguggauucugucguguccuggagcaaagacauucugcgcacccaggagucugaaugugugugcaucaacgggacauguacggucguuaugaccgauggauccgcuagcggcaaggccgacacaaaaauucucuuuaucgaggaggggaagaucgugcauaccuccacacugucuggaagcgcgcaacacguggaagagugcuccugcuauccuagauaccccggcguccggugugugugccgcgauaacuggaaggggagcaauagaccuauuguugacaucaacauuaaagaccacucuaucguguccagcuacgucuguucuggacuugugggcgauacgccccggaagaaugacagcuccucuagcucccauugccuggauccgaacaaugaagagggcgggcacggaguuaaaggcugggccuucgacgaugggaacgacguguggaugggacgcaccauuagcgaaaagucuagacucggcuaugagacauuuaaagucaucgaggggugguccaauccuaagagcaaacugcagaucaaccgccaggugauugucgaucggggaaauagaucuggcuacuccggcaucuucagcguggaagggaaguccuguauuaaccggugcuuuuauguugagcugaucagaggacgcaaggaagagaccgaagugcucuggaccucuaauagcauugucguguucuguggcacauccgggaccuacggaacaggcucuuggcccgacggggcuaacaucaaucugaugccuauuuga

SEQ ID NO: 210557 - RNA, 1410 nt, Artificial Sequence; identical to SEQ ID NO: 209677
  derived and/or modified CDS sequence (opt5) from neuraminidase__InfluenzaA__ADE34227

SEQ ID NO: 210558 - RNA, 1410 nt, Artificial Sequence; identical to SEQ ID NO: 209677
  derived and/or modified CDS sequence (opt5) from neuraminidase__InfluenzaA__ADE34238

SEQ ID NO: 210559 - RNA, 1410 nt, Artificial Sequence
  derived and/or modified CDS sequence (opt5) from neuraminidase__InfluenzaA__ADE34260
augaaccccaaucagaagaucauuaccaucggcagcgugucccugacaauuucuacgaucugcuucuuuaugcaaauugccauccucaucaccacagucacccugcacuucaaacaguacgaguuuaacagcccuccgaauaaccagguuaugcuuugugaacccacaauuaucgagagaaauauuaccgaaaucguguaucugacaaacaccacgauugagaaggaaaucugcccuaaacucgcugaguaccggaauugguccaagccccagugugacauuaccggguucgccccuuuuucuaaagauaacagcauccgccuguccgcgggaggcgacaucugggugacaagagagcccuaugucucuugcgauccugacaaguguuaccaauucgcucuugggcagggaaccacacugaauaacgugcauagcaauaacaccguucgggaucgcacgccguauagaacacuccugaugaaugaacugggcgugcccuuucaccucgggaccaagcaggucugcauugccugguccucuagcuccugucaugacggaaaagccuggcugcacgugugcaucacaggcgaugacaagaacgcuaccgccagcuucauuuacaauggccggcuuguugauucuguggucuccuggagcaaagagauccugcgcacccaggaaucugagugugugugcauuaacgggacauguacgguggucaugaccgacggauccgcuagcggcaaggccgauacaaaaauccucuuuaucgaggaagggaagauuguucauaccuccacacugucuggaagcgcgcaacacguggaggaaugcuccugcuauccuagauaccccggcgugcggugugucugccgcgacaacuggaaggggagcaauagaccuaucguggauauuaacaucaaagaccacucuauuguuuccagcuacguguguucuggacuugucggcgacacgccccggaagaaugauagcuccucuagcucccauugccuggacccgaacaaugaggaaggcgggcacggagugaaaggcugggccuucgaugacgggaacgauguuuggaugggacgcaccaucagcgagaagucuagacucggcuaugagacauuuaaagugaucgaagggugguccaauccuaagagcaaacugcagauuaaccggcaggucaucguggaccgcggaaauagaucuggcuacuccggcauuuucagcgucgaggggaaguccuguaucaaccggugcuuuuauguggaacugauuagaggacgcaaggaggaaaccgagguucucuggaccucuaauagcaucguggucuucuguggcacauccgggaccuacggaacaggcucuuggcccgauggggcugacauuaaccugaugagcaucuga

SEQ ID NO: 210560 - RNA, 1410 nt, Artificial Sequence; identical to SEQ ID NO: 209677
  derived and/or modified CDS sequence (opt5) from neuraminidase__InfluenzaA__ADE34271

SEQ ID NO: 210561 - RNA, 1410 nt, Artificial Sequence; identical to SEQ ID NO: 208810
  derived and/or modified CDS sequence (opt5) from neuraminidase__InfluenzaA__ADE45502

SEQ ID NO: 210562 - RNA, 1410 nt, Artificial Sequence; identical to SEQ ID NO: 208810
  derived and/or modified CDS sequence (opt5) from neuraminidase__InfluenzaA__ADE45504

SEQ ID NO: 210563 - RNA, 1410 nt, Artificial Sequence; identical to SEQ ID NO: 208810
  derived and/or modified CDS sequence (opt5) from neuraminidase__InfluenzaA__ADE45506

SEQ ID NO: 210564 - RNA, 1410 nt, Artificial Sequence; identical to SEQ ID NO: 208810
  derived and/or modified CDS sequence (opt5) from neuraminidase__InfluenzaA__ADE45508

SEQ ID NO: 210565 - RNA, 1410 nt, Artificial Sequence; identical to SEQ ID NO: 208810
  derived and/or modified CDS sequence (opt5) from neuraminidase__InfluenzaA__ADE45510

SEQ ID NO: 210566 - RNA, 1410 nt, Artificial Sequence; identical to SEQ ID NO: 208810
  derived and/or modified CDS sequence (opt5) from neuraminidase__InfluenzaA__ADE45512

SEQ ID NO: 210567 - RNA, 1410 nt, Artificial Sequence
  derived and/or modified CDS sequence (opt5) from neuraminidase__InfluenzaA__ADE45514
augaaccccaaucagaagaucauuaccaucggcagcgugugcaugacaauugggauggccaaccugauccuccaaauuggaaauaucaucuccauuuggaucucucacagcauucagcugggcaaccagaaucagaucgagacguguaaccaauccauuaucaccuacgaaaauaacacaugggucaaucagaccuauguuaacauuucuaauacaaacuucgcugccgggcagagcgugguguccgucaaacuugcgggaaauucuagccugugcccuguguccggcugggcuaucuacagcaaggacaacucuaucagaauuggguccaaaggagauguuuuugugauccgggagccguucauuagcuguucuccccucgaaugccgcaccuuuuuccugacacagggcgcccuucugaaugacaagcauuccaacggcaccaucaaagauagaagcccuuaucggacgcucaugucuugucccauuggggaggucccuucccccuacaacagccgcuuugaauccguggccuggucugcuagcgccugccacgacggaaucaauuggcugaccaucggcauuuccgggccugauaacggagcuguugccgugcugaaguauaauggcaucauuacagacaccaucaagagcuggagaaacaauauucuccggacacaagagucugagugugcgugcgucaacggguccuguuucaccgugaugacggauggaccgagcgacggccaggccucuuacaaaaucuuucgcaucgaaaagggcaaaauugucaagagcguggagaugaaugcucccaacuaucauuacgaagagugcuccuguuacccugauucuagcgagaucacaugcguuugcagagacaauuggcacggguccaaccggcccugggugagcuucaaucagaaccuggaauaucagauuggauacaucuguucuggcauuuuuggggauaauccucgccccaacgacaaaaccggauccugcggcccggugagcucuaauggggccaacggagucaagggcuucuccuuucaauauggcaacgggguguggaucggaagaacaaagagcauuuccucucggaauggcuucgagaugaucugggauccuaacggguggaccggaaccgacaauaacuuuagcaucaaacaggacauuguuggcaucaaugaaugguccggguacucuggcagcuucgugcagcaucccgagcuuacaggacuggauuguauucgcccuugcuucugggucgaacucaucagaggccggcccaaggagaacacgauuuggaccuccgggagcucuaucuccuuuuguggagugaauagcgacacaguuggcuggucuuggcccgauggggcugagcugccuuucaccaucgacaaauga

SEQ ID NO: 210568 - RNA, 1410 nt, Artificial Sequence
  derived and/or modified CDS sequence (opt5) from neuraminidase__InfluenzaA__ADE45516
augaaccccaaucagaagaucauuaccaucggcagcgugugcaugacaauugggauggccaaccugauccuccaaauuggaaauaucaucuccauuuggaucucucacagcauucagcugggcaaccagaaucagaucgagacguguaaccaauccgucauuaccuacgaaaauaacacauggguuaaucagaccuaugugaacaucucuaauacaaacuucgcugccgggcagagcguggucuccgugaaacuugcgggaaauucuagccugugcccuguuuccggcugggcuauuuacagcaaggacaacucuaucagaaucggguccaaaggagauguguuugucauucgggagccguucaucagcuguucuccccucgaaugccgcaccuuuuuccugacacagggcgcccuucugaaugacaagcauuccaacggcaccauuaaagauagaagcccuuaucggacgcucaugucuugucccaucggggaggugccuucccccuacaacagccgcuuugaauccguugccuggucugcuagcgccugccacgacggaauuaauuggcugaccaucggcaucuccgggccugauaacggagcuguggccguccugaaguauaauggcauuaucacagacaccauuaagagcuggagaaacaauauccuccggacacaagagucugagugugcgugcgugaacggguccuguuucaccgugaugacggauggaccgagcgacggccaggccucuuacaaaauuuuucgcaucgaaaagggcaaaaucgucaagagcguugagaugaaugcucccaacuaucauuacgaagagugcuccuguuacccugauucuagcgagauuacaugcgugugcagagacaauuggcacggguccaaccggcccugggugagcuucaaucagaaccuggaauaucagaucggauacauuuguucuggcaucuuuggggauaauccucgccccaacgacaaaaccggauccugcggcccggucagcucuaauggggccaacggagugaagggcuucuccuuuaaguauggcaacgggguuuggauuggaagaacaaaaagcaucucccuucggaauggcuucgagaugauuugggauccuaacggguggaccggaaccgacaauaacuuuucuaucaagcaagacaucgugggcauuaaugaauggagcggguacuccggcucuuucguccagcaucccgagcugacaggacucgauuguauccgcccuugcuucuggguggaacugauuagaggccggcccaaagagaacacgaucuggaccagcggguccagcauuucuuuuuguggaguuaauuccgacacagugggcuggagcuggcccgauggggcugagcuuccuuucaccaucgacaaguga

SEQ ID NO: 210569 - RNA, 1410 nt, Artificial Sequence
  derived and/or modified CDS sequence (opt5) from neuraminidase__InfluenzaA__ADF10069
augaaccccaaucagaagaucauuaccaucggcagcgugugcaugacaauugggauggccaaccugauccuccaaauuggaaauaucaucuccauuuggaucucucacagcauucagcugggcaaccagaaucagaucgagacguguaaccaauccgucauuaccuacgaaaauaacacauggguuaaucagaccuaugugaacaucucuaauacaaacuucgcugccgggcagagcguggucuccgugaaacuugcgggaaauucuagccugugcccuguuuccggcugggcuauuuacagcaaggacaacucuaucagaaucggguccaaaggagauguguuugucauucgggagccguucaucagcuguucuccccucgaaugccgcaccuuuuuccugacacagggcacccuucugaaugacaagcauuccaacggcacgauuaaagauagaagcccuuaucggacccucaugucuugucccaucggggaggugccuucccccuacaacagccgcuuugaauccguugccuggucugccagcgcuugccacgacggaauuaauuggcugacaaucggcaucuccgggccugauaacggagccguggcuguccugaaguauaauggcauuaucaccgacacaauuaagagcuggagaaacaauauccuccggacccaagagucugagugugccugcgugaacggguccuguuucacggugaugacagauggaccgagcgacggccaggcgucuuacaaaauuuuucgcaucgaaaagggcaaaaucgucaagagcguugagaugaaugcccccaacuaucauuacgaagagugcuccuguuacccugauucuagcgagauuaccugcgugugcagagacaauuggcacggguccaaccggcccugggugagcuucaaucagaaccuggaauaucagaucggauacauuuguucuggcaucuuuggggauaauccucgccccaacgacaaaacaggauccugcggcccggucagcucuaauggggcuaacggagugaagggcuucuccuuuaaguauggcaacgggguuuggauuggaagaaccaaaagcaucuccucucggaauggcuucgagaugauuugggauccuaacggguggaccggaacagacaauaacuuuagcaucaagcaagacaucgugggcauuaaugaaugguccggguacucuggcagcuucguccagcaucccgagcuuacgggacuggauuguauccgcccuugcuucuggguggaacucauuagaggccggcccaaagagaacaccaucuggacauccgggagcucuauuuccuuuuguggaguuaauagcgacaccgugggcuggucuuggcccgauggggccgagcugccuuucacaaucgacaaguga

SEQ ID NO: 210570 - RNA, 1410 nt, Artificial Sequence; identical to SEQ ID NO: 208810
  derived and/or modified CDS sequence (opt5) from neuraminidase__InfluenzaA__ADF10079

SEQ ID NO: 210571 - RNA, 1410 nt, Artificial Sequence; identical to SEQ ID NO: 208810
  derived and/or modified CDS sequence (opt5) from neuraminidase__InfluenzaA__ADF10089

SEQ ID NO: 210572 - RNA, 1410 nt, Artificial Sequence; identical to SEQ ID NO: 208810
  derived and/or modified CDS sequence (opt5) from neuraminidase__InfluenzaA__ADF10099

SEQ ID NO: 210573 - RNA, 1410 nt, Artificial Sequence
  derived and/or modified CDS sequence (opt5) from neuraminidase__InfluenzaA__ADF10109
augaaccccaaucagaagaucauuaccaucggcagcgugugcaugacaauugggauggccaaccugauccuccaaauuggaaauaucaucuccauuuggaucucucacagcauucagcugggcaaccagaaucagaucgagacguguaaccaauccgucauuaccuacgaaaauaacacauggguuaaucagaccuaugugaacaucucuaauacaaacuucgcugccgggcagagcguggucuccgugaaacuugcgggaaauucuagccugugcccuguuuccggcugggcuauuuacagcaaggacaacucuaucagaaucggguccaaaggagauguguuugucauucgggagccguucaucagcuguucuccccucgaaugccgcaccuuuuuccugacacagggcgcccuucugaaugacaagcauuccaacggcaccauuaaagauagaagcccuuaucggacgcucaugucuugucccaucggggaggugccuucccccuacaacagccgcuuugaauccguugccuggucugcuagcgccugccacgacggaauuaauuggcugaccaucggcaucuccgggccugauaacggagcuguggccguccugaaguauaauggcauuaucacagacaccauuaagagcuggagaaacaauauccuccggacacaagagucugagugugcgugcgugaacggguccuguuucaccgugaugacggauggaccgagcgacggccaggccucuuacaaaauuuuucgcaucgaaaagggcaaaaucgucaagagcguugagaugaaugcucccaacuauuacuacgaagagugcuccuguuauccugauucuagcgagauuacaugcgugugcagagacaauuggcauggguccaaccggcccugggugagcuucaaucagaaccuggaauaccagaucggauauauuuguucuggcaucuuuggggauaauccucgccccaacgacaaaaccggaaauugcggcccggucuccagcaacggggccaacggagugaagggcuucucuuuuaaguacggcaaugggguuuggauuggaagaacaaaauccaucagcucccggaacggcuucgagaugauuugggauccuaauggguggaccggaaccgacaacaauuuuucuaucaagcaagacaucgugggcauuaacgaauggagcggguauuccggcucuuucguccagcaccccgagcuuacaggacuggauuguauccgcccuugcuucuggguggaacucauuagaggccggcccaaagagaauacgaucuggaccagcggguccagcauuucuuuuuguggaguuaacuccgacacagugggcuggagcuggcccgauggggcugagcugccuuucaccaucgacaaguga

SEQ ID NO: 210574 - RNA, 1410 nt, Artificial Sequence; identical to SEQ ID NO: 208810
  derived and/or modified CDS sequence (opt5) from neuraminidase__InfluenzaA__ADF10129

SEQ ID NO: 210575 - RNA, 1410 nt, Artificial Sequence; identical to SEQ ID NO: 210240
  derived and/or modified CDS sequence (opt5) from neuraminidase__InfluenzaA__ADF10146

SEQ ID NO: 210576 - RNA, 1410 nt, Artificial Sequence
  derived and/or modified CDS sequence (opt5) from neuraminidase__InfluenzaA__ADF10166
augaaccccaaucagaagaucauuaccaucggcagcgugugcaugauuaucgggauggccaaccugauucuccaaaucggaaauaucauuuccaucuggauuucucacagcauccagcugggcaaccagaaucagauugagacauguaaccaauccgucaucacguacgaaaauaacaccuggguuaaucagacauaugugaacauuucuaauaccaacuucgcugccgggcagagcguggucuccgugaaacuugcgggaaauucuagccugugcccuguuuccggcugggcuaucuacagcaaggacaacucuaucagaauuggguccaaaggagauguguuugucauccgggagccguucauuagcuguucuccccucgaaugccgcacauuuuuccugacccagggcgcccuucugaaugacaagcauuccaacggcacaaucaaagauagaagcccuuaucggacccucaugucuugucccauuggggaggugccuucccccuacaacagccgcuuugaauccguugccuggucugcuagcgccugccacgacggaaucaauuggcugacgaucggcauuuccgggccugauaacggagcuguggccguccugaaguauaauggcaucauuaccgacacaaucaagagcuggagaaacaauauucuccggacccaagagucugagugugcgugcgugaacggguccuguuucacagugaugaccgauggaccgagcgacggccaggccucuuacaaaaucuuucgcaucgaaaagggcaaaauugucaagagcguugagaugaaugcucccaacuaucauuacgaagagugcuccuguuacccugauucuagcgagaucacgugcgugugcagagacaauuggcacggguccaaccggcccugggugagcuucaaucagaaccuggaauaucagauuggauacaucuguucuggcauuuuuggggauaauccucgccccaacgacaaaacaggauccugcggcccggucagcucuaauggggccaacggagugaagggcuucuccuuuaaguauggcaacgggguuuggaucggaagaaccaaaagcauuuccucucggaagggcuucgagaugaucugggauccuaauggguggacaggaaccgacaacaauuuuagcaucaaacaagacauugugggcaucaacgaaugguccggguacucuggcagcuucguccagcaucccgagcuuaccggacuggauuguauucgcccuugcuucuggguggaacucaucagaggccggcccaaggagaauacaauuuggacguccgggagcucuaucuccuuuuguggaguuaacagcgacaccgugggcuggucuuggcccgauggggcugagcugccuuucacaaucgacaaauga

SEQ ID NO: 210577 - RNA, 1410 nt, Artificial Sequence; identical to SEQ ID NO: 210576
  derived and/or modified CDS sequence (opt5) from neuraminidase__InfluenzaA__ADF10176

SEQ ID NO: 210578 - RNA, 1410 nt, Artificial Sequence; identical to SEQ ID NO: 210576
  derived and/or modified CDS sequence (opt5) from neuraminidase__InfluenzaA__ADF10192

SEQ ID NO: 210579 - RNA, 1410 nt, Artificial Sequence; identical to SEQ ID NO: 208810
  derived and/or modified CDS sequence (opt5) from neuraminidase__InfluenzaA__ADF10247

SEQ ID NO: 210580 - RNA, 1410 nt, Artificial Sequence; identical to SEQ ID NO: 210576
  derived and/or modified CDS sequence (opt5) from neuraminidase__InfluenzaA__ADF10290

SEQ ID NO: 210581 - RNA, 1410 nt, Artificial Sequence
  derived and/or modified CDS sequence (opt5) from neuraminidase__InfluenzaA__ADF10304
augaaccccaaucagaagaucauuaccaucggcagcgugugcaugacaauugggauggccaaccugauccuccaaauuggaaauaucaucuccauuuggaucucucacagcauucagcugggcaaccagaaucagaucgagacguguaaccaauccgucauuaccuacgaaaauaacacauggguuaaucagaccuaugugaacaucucuaauacaaacuucgcugccgggcagagcguggucuccgugaaacuugcgggaaauucuagccugugcccuguuuccggcugggcuauuuacagcaaggacaacucuaucagaaucggguccaaaggagauguguuugucauucgggagccguucaucagcuguucuccccucgaaugccgcaccuuuuuccugacacagggcgcccuucugaaugacaagcauuccaacggcaccauuaaagauagaagcccuuaucggacgcucaugucuugucccaucggggaggugccuucccccuacaacagccgcuuugaauccguugccuggucugcuagcgccugccacgacggaauuaauuggcugaccaucggcaucuccgggccugauaacggagcuguggccguccugaaguauaauggcauuaucacagacaccauuaagagcuggagaaacaauauccuccggacacaagagucugagugugcgugcgugaacggguccuguuucaccgugaugacggauggaccgagcgacggccaggccucuuacaaaauuuuucgcaucgaaaagggcaaaaucgucaagagcguugagaugaaugcucccaacuaucauuacgaagagugcuccuguuacccugauucuagcgagauuacaugcgugugcagagacaauuggcacggguccaaccggcccugggugagcuucaaucagaaccuggaauaucagaucggauacauuuguucuggcaucuuuggggauaauccucgccccaacgacaaaaccggauccugcggcccggucagcucuaauggggccaacggagugaagggcuucuccuuuaaguauggcaacgggguuuggauuggaagaacaaaaagcaucuccucucggaauggcuucgagaugauuugggauccuaacggguggaccggaaccgacaauaacuuuagcaucaagcaagacaucgugggcauuaaugaaugguccggguacucuggcagcuucguccagcaucccgagcuuacaggacuggauuguauccgcccuugcuucuggguggaacucauuagaggccggcccaaagagaacacgaucuggaccuccgggagcucuauuuccuuuuguggaguuaauagcgacacagugggcuggucuuggcccgauggggcuggacugccuuucaccaucgacaaguga

SEQ ID NO: 210582 - RNA, 1410 nt, Artificial Sequence; identical to SEQ ID NO: 208810
  derived and/or modified CDS sequence (opt5) from neuraminidase__InfluenzaA__ADF10340

SEQ ID NO: 210583 - RNA, 1410 nt, Artificial Sequence; identical to SEQ ID NO: 208810
  derived and/or modified CDS sequence (opt5) from neuraminidase__InfluenzaA__ADF10361

SEQ ID NO: 210584 - RNA, 1410 nt, Artificial Sequence; identical to SEQ ID NO: 210576
  derived and/or modified CDS sequence (opt5) from neuraminidase__InfluenzaA__ADF10371

SEQ ID NO: 210585 - RNA, 1410 nt, Artificial Sequence; identical to SEQ ID NO: 210576
  derived and/or modified CDS sequence (opt5) from neuraminidase__InfluenzaA__ADF10407

SEQ ID NO: 210586 - RNA, 1410 nt, Artificial Sequence; identical to SEQ ID NO: 208810
  derived and/or modified CDS sequence (opt5) from neuraminidase__InfluenzaA__ADF10472

SEQ ID NO: 210587 - RNA, 1410 nt, Artificial Sequence; identical to SEQ ID NO: 210576
  derived and/or modified CDS sequence (opt5) from neuraminidase__InfluenzaA__ADF10616

SEQ ID NO: 210588 - RNA, 1410 nt, Artificial Sequence; identical to SEQ ID NO: 210576
  derived and/or modified CDS sequence (opt5) from neuraminidase__InfluenzaA__ADF10688

SEQ ID NO: 210589 - RNA, 1410 nt, Artificial Sequence; identical to SEQ ID NO: 210576
  derived and/or modified CDS sequence (opt5) from neuraminidase__InfluenzaA__ADF10726

SEQ ID NO: 210590 - RNA, 1410 nt, Artificial Sequence; identical to SEQ ID NO: 208810
  derived and/or modified CDS sequence (opt5) from neuraminidase__InfluenzaA__ADF10773

SEQ ID NO: 210591 - RNA, 1410 nt, Artificial Sequence
  derived and/or modified CDS sequence (opt5) from neuraminidase__InfluenzaA__ADF10837
augaaccccaaucagaagaucauuaccaucggcagcgugugcaugacaauugggauggccaaccugauccuccaaauuggaaauaucaucuccauuuggaucucucacagcauucagcugggcaaccagaaucagaucgagacguguaaccaauccgucauuaccuacgaaaauaacacauggguuaaucagaccuaugugaacaucucuaauacaaacuucgcugccgggcagagcguggucuccgugaaacuugcgggaaauucuagccugugcccuguuuccggcugggcuauuuacagcaaggacaacucuaucagaaucggguccaaaggagauguguuugucauucgggagccguucaucagcuguucuccccucgaaugccgcaccuuuuuccugacacagggcgcccuucugaaugacaagcauuccaacggcaccauuaaagauagaagcccuuaucggacgcucaugucuugucccaucggggaggugccuucccccuacaacagccgcuuugaauccguugccuggucugcuagcgccugccacgacggaauuaauuggcugaccaucggcaucuccgggccugauaacggagcuguggccguccugaaguauaauggcauuaucacagacaccauuaagagcuggaaaaacaauauccucagaacacaagagucugagugugcgugcgugaacggguccuguuucaccgugaugacggauggaccgagcgacggccaggccucuuacaagauuuuucggaucgaaaaaggcaagaucgucaaaagcguugagaugaaugcucccaacuaucauuacgaagagugcuccuguuacccugauucuagcgagauuacaugcgugugccgcgacaauuggcacggguccaacagacccugggugagcuucaaucagaaccuggaauaucagaucggauacauuuguucuggcaucuuuggggauaauccucggcccaacgacaagaccggauccugcggcccggucagcucuaauggggccaacggagugaagggcuucuccuuuaaauauggcaacgggguuuggauuggacgcacaaagagcaucuccucuagaaauggcuucgagaugauuugggauccuaacggguggaccggaaccgacaauaacuuuagcaucaaacaagacaucgugggcauuaaugaaugguccggguacucuggcagcuucguccagcaucccgagcuuacaggacuggauuguauccggccuugcuucuggguggaacucauucgcggcagacccaaggagaacacgaucuggaccuccgggagcucuauuuccuuuuguggaguuaauagcgacacagugggcuggucuuggcccgauggggcugagcugccuuucaccaucgacaaauga

SEQ ID NO: 210592 - RNA, 1410 nt, Artificial Sequence; identical to SEQ ID NO: 208810
  derived and/or modified CDS sequence (opt5) from neuraminidase__InfluenzaA__ADF10889

SEQ ID NO: 210593 - RNA, 1410 nt, Artificial Sequence; identical to SEQ ID NO: 208810
  derived and/or modified CDS sequence (opt5) from neuraminidase__InfluenzaA__ADF10947

SEQ ID NO: 210594 - RNA, 1410 nt, Artificial Sequence; identical to SEQ ID NO: 208810
  derived and/or modified CDS sequence (opt5) from neuraminidase__InfluenzaA__ADF11010

SEQ ID NO: 210595 - RNA, 1410 nt, Artificial Sequence
  derived and/or modified CDS sequence (opt5) from neuraminidase__InfluenzaA__ADF27355
augaaccccaaucagaagaucauuaccaucggcagcgugugcaugacaauugggauggccaaccugauccuccaaauuggaaauaucaucuccauuuggaucucucacagcauucagcugggcaaccagaaucagaucgagacguguaaccaauccgucauuaccuacgaaaauaacacauggguuaaucagaccuaugugaacaucucuaauacaaacuucgcugccgggcagagcguggucuccgugaaacuugcgggaaauucuagccugugcccuguuuccggcugggcuauuuacagcaaggacaacucuaucagaaucggguccaaaggagauguguuugucauucgggagccguucaucagcuguucuccccucgaaugccgcaccuuuuuccugacacagggcgcccuucugaaugacaagcauuccaacggcaccauuaaagauagaagcccuuaucggacgcucaugucuugucccaucggggaggugccuucccccuacaacagccgcuuugaauccguugccuggucugcuagcgccugccacgacggaauuaauuggcugaccaucggcaucuccgggccugauaacggagcuguggccguccugaaguauaauggcauuaucacagacaccauuaagagcuggagaaacaauauccuccggacacaagagucugagugugcgugcgugaacggguccuguuucaccgugaugacggauggaccgagcgacggccaggccucuuacaaaauuuuucgcaucgaaaagggcaaaaucgucaagagcguugagaugaaugcucccaacuaucauuacgaagagugcuccuguuacccugauucuagcgagauuacaugcgugugcagagacaauuggcacggguccaaccggcccugggugagcuucaaucagaaccuggaauaucagaucggauacauuuguucuggcaucuuuggggauaauccucgccccaacgacaaaaccggauccugcggcccggucagcucuaauggggccaacggagugaagggcuucuccuuuaaguauggcaacgggguuuggaugggaagaacaaaaagcauuuccucucggaauggcuucgagaugaucugggauccuaacggguggaccggaaccgacaauaacuuuagcauuaagcaagacaucgugggcaucaaugaaugguccggguacucuggcagcuucguccagcaucccgagcuuacaggacuggauuguauucgcccuugcuucuggguggaacucaucagaggccggcccaaagagaacacgauuuggaccuccgggagcucuaucuccuuuuguggaguuaauagcgacacagugggcuggucuuggcccgauggggcugagcugccuuucaccauugacaaguga

SEQ ID NO: 210596 - RNA, 1410 nt, Artificial Sequence
  derived and/or modified CDS sequence (opt5) from neuraminidase__InfluenzaA__ADF27356
augaaccccaaucagaagaucauuaccaucggcagcgugugcaugacaauugggauggccaaccugauccuccaaauuggaaauaucaucuccauuuggaucucucacagcauucagcugggcaaccagaaucagaucgagacguguaaccaaaaugucauuaccuacgaaaacaauacauggguuaaccagaccuaugugaauaucuccaacacaaauuucgcugccgggcagucuguggucagcgugaaacuugcgggaaacuccucucugugcccuguuagcggcugggcuauuuacuccaaggacaauagcaucagaaucgggucuaaaggagauguguuugucauucgggagccguucaucuccuguagcccccucgaaugccgcaccuuuuuccugacacagggcgcccuucugaacgacaagcauucuaacggcaccauuaaagauagauccccuuaucggacgcucaugagcugucccaucggggaggugccuucucccuacaauucccgcuuugaaagcguugccugguccgcuucugccugccacgacggaauuaacuggcugaccaucggcaucagcgggccugauaauggagcuguggccguccugaaguauaacggcauuaucacagacaccauuaaguccuggagaaauaacauccuccggacacaagagagcgagugugcgugcgugaaugggucuuguuucaccgugaugacggauggaccguccgacggccaggccagcuacaaaauuuuucgcaucgaaaagggcaaaaucgucaagucuguugagaugaacgcucccaauuauuacuacgaagagugcagcuguuauccugauuccucugagauuacaugcgugugcagagacaacuggcaugggagcaaucggcccuggguguccuucaaccagaaucuggaauaccagaucggauauauuuguagcggcaucuuuggggauaacccucgccccaaugacaaaaccggaucuugcggcccggucuccagcaacggggccaacggagugaagggcuucucuuuuaaguacggcaaugggguuuggauuggaagaacaaaauccaucagcucccggaacggcuucgagaugauuugggauccuaauggguggaccggaaccgacaacaauuuuucuaucaagcaagacaucgugggcauuaacgaauggagcggguauuccggcucuuucguccagcaccccgagcuuacaggacuggauuguauccgcccuugcuucuggguggaacucauuagaggccggcccaaagagaauacgaucuggaccagcggguccagcauuucuuuuuguggaguuaacuccgacacagugggcuggagcuggcccgauggggcugagcugccuuucaccaucgacaaguga

SEQ ID NO: 210597 - RNA, 1410 nt, Artificial Sequence; identical to SEQ ID NO: 209164
  derived and/or modified CDS sequence (opt5) from neuraminidase__InfluenzaA__ADF27357

SEQ ID NO: 210598 - RNA, 1410 nt, Artificial Sequence; identical to SEQ ID NO: 209164
  derived and/or modified CDS sequence (opt5) from neuraminidase__InfluenzaA__ADF27358

SEQ ID NO: 210599 - RNA, 1410 nt, Artificial Sequence; identical to SEQ ID NO: 209164
  derived and/or modified CDS sequence (opt5) from neuraminidase__InfluenzaA__ADF27360

SEQ ID NO: 210600 - RNA, 1410 nt, Artificial Sequence; identical to SEQ ID NO: 208810
  derived and/or modified CDS sequence (opt5) from neuraminidase__InfluenzaA__ADF27361

SEQ ID NO: 210601 - RNA, 1410 nt, Artificial Sequence; identical to SEQ ID NO: 208810
  derived and/or modified CDS sequence (opt5) from neuraminidase__InfluenzaA__ADF27362

SEQ ID NO: 210602 - RNA, 1410 nt, Artificial Sequence; identical to SEQ ID NO: 208810
  derived and/or modified CDS sequence (opt5) from neuraminidase__InfluenzaA__ADF27363

SEQ ID NO: 210603 - RNA, 1410 nt, Artificial Sequence; identical to SEQ ID NO: 209164
  derived and/or modified CDS sequence (opt5) from neuraminidase__InfluenzaA__ADF27364

SEQ ID NO: 210604 - RNA, 1410 nt, Artificial Sequence; identical to SEQ ID NO: 208810
  derived and/or modified CDS sequence (opt5) from neuraminidase__InfluenzaA__ADF27365

SEQ ID NO: 210605 - RNA, 1410 nt, Artificial Sequence; identical to SEQ ID NO: 209164
  derived and/or modified CDS sequence (opt5) from neuraminidase__InfluenzaA__ADF27366

SEQ ID NO: 210606 - RNA, 1410 nt, Artificial Sequence; identical to SEQ ID NO: 208810
  derived and/or modified CDS sequence (opt5) from neuraminidase__InfluenzaA__ADF27382

SEQ ID NO: 210607 - RNA, 1410 nt, Artificial Sequence; identical to SEQ ID NO: 208810
  derived and/or modified CDS sequence (opt5) from neuraminidase__InfluenzaA__ADF27392

SEQ ID NO: 210608 - RNA, 1410 nt, Artificial Sequence; identical to SEQ ID NO: 208810
  derived and/or modified CDS sequence (opt5) from neuraminidase__InfluenzaA__ADF27402

SEQ ID NO: 210609 - RNA, 1410 nt, Artificial Sequence; identical to SEQ ID NO: 210591
  derived and/or modified CDS sequence (opt5) from neuraminidase__InfluenzaA__ADF27422

SEQ ID NO: 210610 - RNA, 1410 nt, Artificial Sequence
  derived and/or modified CDS sequence (opt5) from neuraminidase__InfluenzaA__ADF27432
augaaccccaaucagaagaucauuaccaucggcagcgugugcgucacaauugggauggccaaccugauccuccaaauuggaaauaucaucuccauuuggaucucucacagcauucagcugggcaaccagaaucagaucgagacguguaaccaauccguuauuaccuacgaaaauaacacaugggugaaucagaccuaugugaacaucucuaauacaaacuucgcugccgggcagagcgucguguccguuaaacuugcgggaaauucuagccugugcccuguguccggcugggcuauuuacagcaaggacaacucuaucagaaucggguccaaaggagaugucuuugugauucgggagccguucaucagcuguucuccccucgaaugccgcaccuuuuuccugacacagggcgcccuucugaaugacaagcauuccaacggcaccauuaaagauagaagcccuuaucggacgcucaugucuugucccaucggggagguuccuucccccuacaacagccgcuuugaauccguggccuggucugcuagcgccugccacgacggaauuaauuggcugaccaucggcaucuccgggccugauaacggagcugucgccgugcugaaguauaauggcauuaucacagacaccauuaagagcuggagaaacaauauccuccggacacaagagucugagugugcgugcgugaacggguccuguuucaccgucaugacggauggaccgagcgacggccaggccucuuacaaaauuuuucgcaucgaaaagggcaaaaucguuaagagcguggagaugaaugcucccaacuaucauuacgaagagugcuccuguuacccugauucuagcgagauuacaugcgugugcagagacaauuggcacggguccaaccggcccugggucagcuucaaucagaaccuggaauaucagaucggauacauuuguucuggcaucuuuggggauaauccucgccccaacgacaaaaccggauccugcggcccggugagcucuaauggggccaacggaguuaagggcuucuccuuuaaguauggcaacgggguguggauuggaagaacaaaaagcaucuccucucggaauggcuucgagaugauuugggauccuaacggguggaccggaaccgacaauaacuuuagcaucaagcaagacaucgucggcauuaaugaaugguccggguacucuggcagcuucgugcagcaucccgagcuuacaggacuggauuguauccgcccuugcuucuggguugaacucauuagaggccggcccaaagagaacacgaucuggaccuccgggagcucuauuuccuuuuguggagugaauagcgacacagucggcuggucuuggcccgauggggcugagcugccuuucaccaucgacaaguga

SEQ ID NO: 210611 - RNA, 1410 nt, Artificial Sequence
  derived and/or modified CDS sequence (opt5) from neuraminidase__InfluenzaA__ADF27442
augaaccccaaucagaagaucauuaccaucggcagcgugugcaugacaauugggauggccaaccugauccuccaaauuggaaauaucaucuccauuuggaucucucacagcauucagcuggagaaccagaaucagaucgaaacguguaaccaauccgucauuaccuacgagaauaacacauggguuaaucagaccuaugugaacaucucuaauacaaacuucgcugccggccagagcguggucuccgugaaacuugcgggaaauucuagccugugcccuguuuccgggugggcuauuuacagcaaggacaacucuaucagaaucggcuccaaaggggauguguuugucauucgggaaccguucaucagcuguucuccccucgagugccgcaccuuuuuccugacacagggagcccuucugaaugacaagcauuccaacggcaccauuaaagauagaagcccuuaucggacgcucaugucuugucccaucggcgaagugccuucccccuacaacagccgcuuugaguccguugccuggucugcuagcgccugccacgacgggauuaauuggcugaccaucggaaucuccggcccugauaacggggcuguggccguccugaaguauaauggaauuaucacagacaccauuaagagcuggagaaacaauauccuccggacacaagagucugaaugugcgugcgugaacggcuccuguuucaccgugaugacggaugggccgagcgacggacaggccucuuacaaaauuuuucgcaucgagaagggcaaaaucgucaagagcguugaaaugaaugcucccaacuaucauuacgaggagugcuccuguuacccugauucuagcgaaauuacaugcgugugcagagacaauuggcacggcuccaaccggcccugggugagcuucaaucagaaccuggaguaucagaucggguacauuuguucuggaaucuuuggcgauaauccucgccccaacgacaaaaccggguccugcggaccggucagcucuaauggcgccaacggggugaagggauucuccuuuaaguauggcaacggcguuuggauugggagaacaaaaagcaucuccucucggaauggauucgaaaugauuugggauccuaacggcuggaccgggaccgacaauaacuuuagcaucaagcaagacaucgugggaauuaaugagugguccggcuacucugggagcuucguccagcaucccgaacuuacaggccuggauuguauccgcccuugcuucuggguggagcucauuagaggacggcccaaagagaacacgaucuggaccuccggcagcucuauuuccuuuugugggguuaauagcgacacagugggauggucuuggcccgauggcgcugaacugccuuucaccaucgacaaguga

SEQ ID NO: 210612 - RNA, 1410 nt, Artificial Sequence
  derived and/or modified CDS sequence (opt5) from neuraminidase__InfluenzaA__ADF27462
augaaccccaaucagaagaucauuaccaucggcagcgugugcaugacaauugggauggccaaccugauccuccaaauuggaaauaucaucuccauuuggaucucucacagcauucagcugggcaaccagaaucagaucgaggcuuguaaccaauccgucauuacguacgaaaauaacaccuggguuaaucagacauaugugaacaucucuaauaccaacuucgccgcggggcagagcguggucuccgugaaacuugcuggaaauucuagccugugcccuguuuccggcugggccguguacagcaaggacaacucuauuagaaucggguccaaaggagaugucuuugugauccgggagccguucauuagcuguucuccccucgaaugccgcacauuuuuccugacccagggcgcccuucugaaugacaagcauuccaacggcacaaucaaagauagaagcccuuaucggacccucaugucuugucccauuggggagguuccuucccccuacaacagccgcuuugaauccguggcuuggucugccagcgcuugccacgacggaaucaauuggcugacgauuggcaucuccgggccugauaacggagccgucgcggugcugaaguauaauggcaucauuaccgacacaaucaagagcuggagaaacaauauucuccggacccaagagucugagugugccugcgugaacggguccuguuucacagucaugaccgauggaccgagcgacggccaggcuucuuacaaaaucuuucgcauugaaaagggcaaaaucguuaagagcguggagaugaaugcccccaacuaucauuacgaagagugcuccuguuacccugauucuagcgagaucacgugcgugugcagagacaauuggcacggguccaaccggcccugggucagcuucaaucagaaccuggaauaucagauuggauacaucuguucuggcauuuuuggggauaauccucgccccaacgacaaaacaggauccugcggcccggugagcucuaauggggcuaacggaguuaagggcuucuccuuuaaguauggcaacgggguguggaucggaagaaccaaaagcauuuccucucggaauggcuucgagaugaucugggauccuaacggguggacaggaaccgacaauaacuuuagcauuaagcaagacaucgucggcaucaaugaaugguccggguacucuggcagcuucgugcagcaucccgagcuuaccggacuggauuguauucgcccuugcuucuggguugaacucaucagaggccggcccaaagagaacacaauuuggacguccgggagcucuaucuccuuuuguggagugaauagcgacaccgucggcuggucuuggcccgauggggccgagcugccuuucacaauugacaaguga

SEQ ID NO: 210613 - RNA, 1410 nt, Artificial Sequence; identical to SEQ ID NO: 208810
  derived and/or modified CDS sequence (opt5) from neuraminidase__InfluenzaA__ADF27472

SEQ ID NO: 210614 - RNA, 1410 nt, Artificial Sequence
  derived and/or modified CDS sequence (opt5) from neuraminidase__InfluenzaA__ADF27482
augaaccccaaucagaagaucauuaccaucggcagcgugugcaugacaauugggauggccaaccugauccuccaaauuggaaauaucaucuccauuuggaucucucacagcauucagcugggcaaccagaaucaggucgagacguguaaccaauccaucauuaccuacgaaaauaacacauggguuaaucagaccuaugugaacaucucuaauacaaacuucgcugccgggcagagcguggucuccgugaaacuugcgggaaauucuagccugugcccuguuuccggcugggcuauuuacagcaaggacaacucuaucagaaucggguccaaaggagauguguuugucauucgggagccguucaucagcuguucuccccucgaaugccgcaccuuuuuccugacacagggcgcccuucugaaugacaagcauuccaacggcaccauuaaagauagaagcccuuaucggacgcucaugucuugucccaucggggaggugccuucccccuacaacagccgcuuugaauccguugccuggucugcuagcgccugccacgacggaauuaauuggcugaccaucggcaucuccgggccugauaacggagcuguggccguccugaaguauaauggcauuaucacagacaccauuaagagcuggagaaacaauauccuccggacacaagagucugagugugcgugcgugaacggguccuguuucaccgugaugacggauggaccgagcgacggccaggccucuuacaaaauuuuucgcaucgaaaagggcaaaaucgucaagagcguugagaugaaugcucccaacuaucauuacgaagagugcuccuguuacccugauucuagcgagauuacaugcgugugcagagacaauuggcacggguccaaccggcccugggugagcuucaaucagaaccuggaauaucagaucggauacauuuguucuggcaucuuuggggauaauccucgccccaacgacaaaaccggauccugcggcccggucagcucuaauggggccaacggagugaagggcuucuccuuuaaguauggcaacgggguuuggauuggaagaacaaaaagcaucuccucucggaauggcuucgagaugauuugggauccuaacggguggaccggaaccgacaauaacuuuagcaucaagcaagacaucgugggcauuaaugaaugguccggguacucuggcagcuucguccagcaucccgagcuuacaggacuggauuguauccgcccuugcuucuggguggaacucauuagaggccggcccaaagagaacacgaucuggaccuccgggagcucuauuuccuuuuguggaguuaauagcgacacagugggcuggucuuggcccgauggggcugagcugccuuucaccaucgacaaguga

SEQ ID NO: 210615 - RNA, 1410 nt, Artificial Sequence
  derived and/or modified CDS sequence (opt5) from neuraminidase__InfluenzaA__ADF27492
augaaccccaaucagaagaucauuaccaucggcagcgugugcaugacaauugggauggccaaccugauccuccaaauuggaaauaucaucuccauuuggaucucucacagcauucagcugggcaaccagaaucagaucgagccuuguaaccaauccgucauuacguacgaaaauaacaccuggguuaaucagacauaugugaacaucucuaauaccaacuucgcugccgggcagagcguggucuccgugaaacuugcgggaaauucuagccugugcccgguuuccggcugggcuauuuacagcaaggacaacucuaucagaaucggguccaaaggagauguguuugucauucgggagcccuucaucagcuguucuccucucgaaugccgcacauuuuuccugacccagggcgcccuucugaaugacaagcauuccaacggcacaauuaaagauagaagccccuaucggacccucaugucuuguccuaucggggaggugcccuccccuuacaacagccgcuuugaauccguugccuggucugcuagcgccugccacgacggaauuaauuggcugacgaucggcaucuccgggccggauaacggagcuguggccguccugaaguauaauggcauuaucaccgacacaauuaagagcuggagaaacaauauccuccggacccaagagucugagugugcgugcgugaacggguccuguuucacagugaugaccgauggacccagcgacggccaggccucuuacaaaauuuuucgcaucgaaaagggcaaaaucgucaagagcauugagaugaaugcuccuaacuaucauuacgaagagugcuccuguuaccccgauucuagcgagaucacgugcguuugcagagacaauuggcacggguccaaccggccuugggugagcuucaaucagaaccuggaauaucagauuggauacaucuguucuggcauuuuuggggauaauccccgcccgaacgacaaaacaggauccugcggcccugugagcucuaauggggccaacggagucaagggcuucuccuuuaaguauggcaacgggguguggaucggaagaaccaaaagcauuuccucucggaauggcuucgagaugaucugggaucccaacggguggacaggaaccgacaauaacuuuagcaucaagcaagacauuguuggcaucaaugaaugguccggguacucuggcagcuucgugcagcauccugagcuuaccggacuggauuguauucgccccugcuucugggucgaacucaucagaggccggcccaaagagaacacaguguggacguccgggagcucuauuuccuuuuguggaguuaauagcgacaccgugggcuggucuuggccugauggggcugagcugccguucacaaucgacaaguga

SEQ ID NO: 210616 - RNA, 1410 nt, Artificial Sequence; identical to SEQ ID NO: 208810
  derived and/or modified CDS sequence (opt5) from neuraminidase__InfluenzaA__ADF27502

SEQ ID NO: 210617 - RNA, 1410 nt, Artificial Sequence; identical to SEQ ID NO: 208810
  derived and/or modified CDS sequence (opt5) from neuraminidase__InfluenzaA__ADF27512

SEQ ID NO: 210618 - RNA, 1410 nt, Artificial Sequence
  derived and/or modified CDS sequence (opt5) from neuraminidase__InfluenzaA__ADF27522
augaaccccaaucagaagaucauuaccaucggcagcgugugcaugacaauugggauggccaaccugauccuccaaauuggaaauaucaucuccauuuggaucucucacagcauucagcugggcaaccagaaucagaucgagacguguaaccaauccgucauuaccuacgaaaauaacacauggguuaaucagaccuaugugaacaucucuaauacaaacuucgcugccgggcagagcguggucuccgugaaacuugcgggaaauucuagccugugcccuguuuccggcugggcuauuuacagcaaggacaacucuaucagaaucggguccaaaggagauguguuugucauucgggagccguucaucagcuguucuccccucgaaugccgcaccuuuuuccugacacagggcgcccuucugaaugacaagcauuccaacggcaccauuaaagauagaagcccuuaucggacgcucaugucuugucccaucggggaggugccuucccccuacaacagccgcuuugaauccguugccuggucugcuagcgccugccacgacggaauuaauuggcugaccaucggcaucuccgggccugauaacggagcuguggccguccugaaguauaauggcauuaucacagacaccauuaagagcuggagaaacaauauccuccggacacaagagucugagugugcgugcgugaacggguccuguuucaccgugaugacggauggaccgagcgacggccaggccucuuacaaaauuuuucgcaucgaaaagggcaaaaucgucaagagcguugagaugaaugcucccaacuaucauuacgaagagugcuccuguuacccugauucuagcgagauuacaugcgugugcagagacaauuggcacggguccaaccggcccugggugagcuucaaucagaaccuggaauaucagaucggauacauuuguucuggcaucuuuggggauaauccucgccccaacgacaaaaccggauccugcggcccggucagcucuaauggggccaacggagugaagggcuucuccuuuaaguauggcaacgggguuuggauuggaagaaucaaaagcauuuccucucggaauggcuucgagaugaucugggauccuaacggguggacaggaaccgacaauaacuuuagcaucaagcaagacauugugggcaucaaugaaugguccggguacucuggcagcuucguccagcaucccgagcuuaccggacuggauuguauucgcccuugcuucuggguggaacucaucagaggccggcccaaagagaacacaauuuggacguccgggagcucuaucuccuuuuguggaguuaauagcgacaccgugggcuggucuuggcccgauggggcugagcugccuuucacaaucgacaaguga

SEQ ID NO: 210619 - RNA, 1410 nt, Artificial Sequence; identical to SEQ ID NO: 208810
  derived and/or modified CDS sequence (opt5) from neuraminidase__InfluenzaA__ADF27532

SEQ ID NO: 210620 - RNA, 1410 nt, Artificial Sequence
  derived and/or modified CDS sequence (opt5) from neuraminidase__InfluenzaA__ADF27542
augaaccccaaucagaagaucauuaccaucggcagcgugugcaugacaauugggauggccaaccugauccuccaaauuggaaauaucaucuccauuuggaucucucacagcauucagcugggcaaccagaaucagaucgagacguguaaccaauccgucauuaccuacgaaaauaacacauggguuaaucagaccuaugugaacaucucuaauacaaacuucgcugccgggcagagcguggucuccgugaaacuugcgggaaauucuagccugugcccuguuuccggcugggcuauuuacagcaaggacaacucugugagaaucggguccaaaggagaugucuuugugauccgggagccguucauuagcuguucuccccucgaaugccgcaccuuuuuccugacacagggcgcccuucugaaugacaagcauuccaacggcaccaucaaagauagaagcccuuaucggacgcucaugucuugucccauuggggagguuccuucccccuacaacagccgcuuugaauccguggccuggucugcuagcgccugccacgacggaaucaauuggcugaccauuggcaucuccgggccugauaacggagcugucgccgugcugaaguauaauggcaucauuacagacaccaucaagagcuggagaaacaauauucuccggacacaagagucugagugugcgugcgugaacggguccuguuucaccgucaugacggauggaccgagcgacggccaggccucuuacaaaaucuuucgcauugaaaagggcaaaaucguuaagagcguggagaugaaugcucccaacuaucauuacgaagagugcuccuguuacccugauucuagcgagaucacaugcgugugcagagacaauuggcacggguccaaccggcccugggucagcuucaaucagaaccuggaauaucgcauuggauacaucuguucuggcauuuuuggggauaauccuagacccaacgacaaaaccggauccugcggcccggugagcucuaauggggccaacggaguuaagggcuucuccuuuaaguauggcaacgggguguggaucggacggacaaaaagcauuuccucucgcaauggcuucgagaugaucugggauccuaacggguggaccggaaccgacaauaacuuuagcauuaagcaggacaucgucggcaucaaugaaugguccggguacucuggcagcuucgugcaacaucccgagcuuacaggacuggauuguauuagaccuugcuucuggguugaacucauccggggccgccccaaagagaacacgauuuggaccuccgggagcucuaucuccuuuuguggagugaauagcgacacagucggcuggucuuggcccgauggggcugagcugccuuucaccauugacaaguga

SEQ ID NO: 210621 - RNA, 1410 nt, Artificial Sequence
  derived and/or modified CDS sequence (opt5) from neuraminidase__InfluenzaA__ADF27552
augaaccccaaucagaagaucauuaccaucggcagcgugugcaugacaauugggcuggccaaccucauccugcaaauuggaaauaucaucuccauuugggucucucacagcauccagcuuggcaaccagaaucagauugagacguguaaccaauccguuaucaccuacgaaaauaacacaugggugaaucagaccuaugugaacauuucuaauacaaacuucgcugccgggcagagcgucguguccguuaaacuggcgggaaauucuagccucugcccuguguccggcugggcuaucuacagcaaggacaacucugucagaauuggguccaaaggagauguguuuguuauccgggagccguucaucagcuguucuccccuggaaugccgcaccuuuuuccuuacacagggcgcccugcucaaugacaagcauuccaacggcaccauuaaagauagaagcccuuaucggacgcugaugucuugucccaucggggaggugccuucccccuacaacagccgcuuugaauccgucgccuggucugcuagcgccugccacgacggaauuaauuggcugaccaucggcauuuccgggccugauaacggagcuguggccgugcucaaguauaauggcaucaucacagacaccauuaagagcuggagaaacaauauccugcggacacaagagucugagugugcgugcgucaacggguccuguuucaccguuaugacggauggaccgagcgacggccaggccucuuacaaaauuuuucgcaucgaaaagggcaaaauugucaagagcguggagaugaaugcucccaacuaucauuacgaagagugcuccuguuacccugauucuagcgagaucacaugcgugugcagagacaauuggcacggguccaaccggcccugggugagcuucaaucagaaccuugaauaucgcaucggauacauuuguucuggcaucuuuggggauaauccuagacccaacgacaaaaccggauccugcggcccgguuagcucuaauggggccaacggagugaagggcuucuccuuuaaguauggcaacggggucuggauuggacggacaaaaagcaucuccucucgcaauggcuucgagaugauuugggauccuaacggguggaccggaaccgacaagaauuuuagcaucaaacaggacauugugggcaucaacgaaugguccggguacucuggcagcuucguucaacaucccgagcugacaggacucgauuguaucagaccuugcuucuggguggaacugauucggggccgccccaaggagaauacgaucuggaccuccgggagcucuauuuccuuuuguggagucaacagcgacacagugggcuggucuuggcccgauggggcugagcuuccuuucaccaucgacaaauga

SEQ ID NO: 210622 - RNA, 1410 nt, Artificial Sequence; identical to SEQ ID NO: 209636
  derived and/or modified CDS sequence (opt5) from neuraminidase__InfluenzaA__ADF27562

SEQ ID NO: 210623 - RNA, 1410 nt, Artificial Sequence; identical to SEQ ID NO: 208810
  derived and/or modified CDS sequence (opt5) from neuraminidase__InfluenzaA__ADF27572

SEQ ID NO: 210624 - RNA, 1410 nt, Artificial Sequence
  derived and/or modified CDS sequence (opt5) from neuraminidase__InfluenzaA__ADF27582
augaaccccaaucagaagaucauuaccaucggcagcgugugcaugacaauugggauggccaaccugauccuccaaauuggaaauaucaucuccauuuggaucucucacagcauucagcugggcaaccagaaucagaucgagacguguaaccaauccgucauuaccuacgaaaauaacacauggguuaaucagaccuaugugaacaucucuaauacaaacuucgcugccgggcagagcguggucuccgugaaacuugcgggaaauucuagccugugcccuguuuccggcugggcuauuuacagcaaggacaacucuaucagaaucggguccaaaggagauguguuugucauucgggagccguucaucagcuguucuccccucgaaugccgcaccuuuuuccugacacagggcgcccuucugaaugacaagcauuccaacggcaccauuaaagauagaagcccuuaucggacgcucaugucuugucccaucggggaggugccuucccccuacaacagccgcuuugaauccguugccuggucugcuagcgccugccacgacggaauuaauuggcugaccaucggcaucuccgggccugauaacggagcuguggccguccugaaguauaauggcauuaucacagacaccauuaagagcuggagaaacaauauccuccggacacaagagucugagugugcgugcgugaacggguccuguuucaccgugaugacggauggaccgagcgacggccaggccucuuacaaaauuuuucgcaucgaaaagggcaaaaucgucaagagcguugagaugaaugcucccaacuaucauuacgaagagugcuccuguuacccugauucuagcgagauuacaugcgugugcagagacaauuggcacggguccaaccggcccugggugagcuucaaucagaaccuggaauaucgcaucggauacauuuguucuggcaucuuuggggauaauccuagacccaacgacaaaaccggauccugcggcccggucagcucuaauggggccaacggagugaagggcuucuccuuuaaguauggcaacgggguuuggauuggacggacaaaaagcaucuccucucgcaauggcuucgagaugauuugggauccuaacggguggaccggaaccgacaauaacuuuagcaucaagcaggacaucgugggcauuaaugaaugguccggguacucuggcagcuucguccaacaucccgagcuuacaggacuggauuguaucagaccuugcuucuggguggaacucauucggggccgccccaaagagaacacgaucuggaccuccgggagcucuauuuccuuuuguggaguuaauagcgacacagugggcuggucuuggcccgauggggcugagcugccuuucaccaucgacaaguga

SEQ ID NO: 210625 - RNA, 1410 nt, Artificial Sequence; identical to SEQ ID NO: 208810
  derived and/or modified CDS sequence (opt5) from neuraminidase__InfluenzaA__ADF27592

SEQ ID NO: 210626 - RNA, 1410 nt, Artificial Sequence
  derived and/or modified CDS sequence (opt5) from neuraminidase__InfluenzaA__ADF27602
augaaccccaaucagaagaucauuaccaucggcagcgugugcaugacaauugggauggccaaccugauccuccaaauuggaaauaucaucuccauuuggaucucucacagcauucagcugggcaaccagaaucagaucgagacguguaaccaauccgucauuaccuacgaaaauaacacauggguuaaucagaccuaugugaacaucucuaauacaaacuucgcugccgggcagagcguggucuccgugaaacuugcgggaaauucuagccugugcccuguuuccggcugggcuauuuacagcaaggacaacucuaucagaaucggguccaaaggagauguguuugucauucgggagccguucaucagcuguucuccccucgaaugccgcaccuuuuuccugacacagggcgcccuucugaaugacaagcauuccaacggcaccauuaaagauagaagcccuuaucggacgcucaugucuugucccaucggggaggugccuucccccuacaacagccgcuuugaauccguugccuggucugcuagcgccugccacgacggaauuaauuggcugaccaucggcaucuccgggccugauaacggagcuguggccguccugaaguauaauggcauuaucacagacaccauuaagagcuggagaaacaauauccuccggacacaagagucugagugugcgugcgugaacggguccuguuucaccgugaugacggauggaccgagcgacggccaggccucuuacaaaauuuuucgcaucgaaagaggcaagaucgucaaaagcguugagaugaaugcucccaacuaucauuacgaagagugcuccuguuacccugauucuagcgagauuacaugcgugugccgggacaauuggcacggguccaaccgccccugggugagcuucaaucagaaccuggaauaucagaucggauacauuuguucuggcaucuuuggggauaauccuagacccaacgacaagaccggauccugcggcccggucagcucuaauggggccaacggagugaaaggcuucuccuuuaaguauggcaacgggguuuggauuggacggacaaagagcaucuccucucgcaauggcuucgagaugauuugggauccuaacggguggaccggaaccgacaauagcuuuuccaucaaacaagacaucgugggcauuaacgaauggucuggguacagcggcuccuucguccagcaucccgagcuuacaggacuggauuguaucagaccuugcuucuggguggaacucauucggggccgccccaaggagaauacgaucuggaccagcgggucuuccauuagcuuuuguggaguuaacucugacacagugggcugguccuggcccgauggggcugagcugccuuucaccaucgacaaauga

SEQ ID NO: 210627 - RNA, 1410 nt, Artificial Sequence; identical to SEQ ID NO: 208810
  derived and/or modified CDS sequence (opt5) from neuraminidase__InfluenzaA__ADF27612

SEQ ID NO: 210628 - RNA, 1410 nt, Artificial Sequence; identical to SEQ ID NO: 210098
  derived and/or modified CDS sequence (opt5) from neuraminidase__InfluenzaA__ADF27622

SEQ ID NO: 210629 - RNA, 1410 nt, Artificial Sequence; identical to SEQ ID NO: 210545
  derived and/or modified CDS sequence (opt5) from neuraminidase__InfluenzaA__ADF27632

SEQ ID NO: 210630 - RNA, 1410 nt, Artificial Sequence; identical to SEQ ID NO: 208810
  derived and/or modified CDS sequence (opt5) from neuraminidase__InfluenzaA__ADF27642

SEQ ID NO: 210631 - RNA, 1410 nt, Artificial Sequence; identical to SEQ ID NO: 208810
  derived and/or modified CDS sequence (opt5) from neuraminidase__InfluenzaA__ADF27652

SEQ ID NO: 210632 - RNA, 1410 nt, Artificial Sequence
  derived and/or modified CDS sequence (opt5) from neuraminidase__InfluenzaA__ADF27662
augaaccccaaucagaagaucauuaccaucggcagcgugugcaugacaauugggauggccaaccugauccuccaaauuggaaauaucaucuccauuuggaucucucacagcauucagcugggcaaccagaaucagaucgagacguguaaccaauccgucauuaccuacgaaaauaacacauggguuaaucagaccuaugugaacaucucuaauacaaacuucgcugccgggcagagcguggucuccgugaaacuugcgggaaauucuagccugugcccuguuuccggcugggcuauuuacagcaaggacaacucugugagaaucggguccaaaggagaugucuuugugauccgggagccguucauuagcuguucuccccucgaaugccgcaccuuuuuccugacacagggcgcccuucugaaugacaagcauuccaacggcaccaucaaagauagaagcccuuaucggacgcucaugucuugucccauuggggagguuccuucccccuacaacagccgcuuugaauccguggccuggucugcuagcgccugcaaugacggaaucaacuggcugaccauuggcaucuccgggccugauaauggagcugucgccgugcugaaguauaacggcaucauuacagacaccaucaagagcuggagaaauaacauucuccggacacaagagucugagugugcgugcgugaauggguccuguuucaccgucaugacggauggaccgagcgacggccaggccucuuacaaaaucuuucgcauugaaaagggcaaaaucguuaagagcguggagaugaacgcucccaauuaucacuacgaagagugcuccuguuacccugauucuagcgagaucacaugcgugugcagagacaacuggcauggguccaaucggcccugggucagcuucaaccagaaucuggaauaucgcauuggauacaucuguucuggcauuuuuggggauaacccuagacccaaugacaaaaccggauccugcggcccggugagcucuaacggggccaacggaguuaagggcuucuccuuuaaguauggcaaugggguguggaucggacggacaaaaagcauuuccucucgcaacggcuucgagaugaucugggauccuaauggguggaccggaaccgacaacaauuuuagcauuaagcaggacaucgucggcaucaacgaaugguccggguacucuggcagcuucgugcaacaccccgagcuuacaggacuggauuguauuagaccuugcuucuggguugaacucauccggggccgccccaaagagaauacgauuuggaccuccgggagcucuaucuccuuuuguggagugaacagcgacacagucggcuggucuuggcccgauggggcugagcugccuuucaccauugacaaguga

SEQ ID NO: 210633 - RNA, 1410 nt, Artificial Sequence; identical to SEQ ID NO: 208810
  derived and/or modified CDS sequence (opt5) from neuraminidase__InfluenzaA__ADF27672

SEQ ID NO: 210634 - RNA, 1410 nt, Artificial Sequence; identical to SEQ ID NO: 208810
  derived and/or modified CDS sequence (opt5) from neuraminidase__InfluenzaA__ADF27682

SEQ ID NO: 210635 - RNA, 1410 nt, Artificial Sequence; identical to SEQ ID NO: 208810
  derived and/or modified CDS sequence (opt5) from neuraminidase__InfluenzaA__ADF27692

SEQ ID NO: 210636 - RNA, 1410 nt, Artificial Sequence; identical to SEQ ID NO: 208810
  derived and/or modified CDS sequence (opt5) from neuraminidase__InfluenzaA__ADF27702

SEQ ID NO: 210637 - RNA, 1410 nt, Artificial Sequence; identical to SEQ ID NO: 208810
  derived and/or modified CDS sequence (opt5) from neuraminidase__InfluenzaA__ADF27712

SEQ ID NO: 210638 - RNA, 1410 nt, Artificial Sequence; identical to SEQ ID NO: 210098
  derived and/or modified CDS sequence (opt5) from neuraminidase__InfluenzaA__ADF27788

SEQ ID NO: 210639 - RNA, 1410 nt, Artificial Sequence; identical to SEQ ID NO: 210053
  derived and/or modified CDS sequence (opt5) from neuraminidase__InfluenzaA__ADF27798

SEQ ID NO: 210640 - RNA, 1410 nt, Artificial Sequence; identical to SEQ ID NO: 210545
  derived and/or modified CDS sequence (opt5) from neuraminidase__InfluenzaA__ADF27808

SEQ ID NO: 210641 - RNA, 1410 nt, Artificial Sequence
  derived and/or modified CDS sequence (opt5) from neuraminidase__InfluenzaA__ADF27818
augaaccccaaucagaagaucauuaccaucggcagcgugugcaugacaauugggauggccaaccugauccuccaaauuggaaauaucaucuccauuuggaucucucacagcauucagcugggcaaccagaaucagaucgagacguguaaccaauccgucauuaccuacgaaaauaacacauggguuaaucagaccuaugugaacaucucuaauacaaacuucgcugccgggcagagcguggucuccgugaaacuugcgggaaauucuagccugugcccuguuuccggcugggcuauuuacagcaaggacaacucuaucagaaucggguccaaaggagauguguuugucauucgggagccguucaucagcuguucuccccucgaaugccgcaccuuuuuccugacacagggcgcccuucugaaugacaagcauuccaacggcaccauuaaagauagaagcccuuaucggacgcucaugucuugucccaucggggaggugccuucccccuacaacagccgcuuugaauccguugccuggucugcuagcgccugccacgacggaauuaauuggcugaccaucggcaucuccgggccugauaacggagcuguggccguccugaaguauaauggcauuaucacagacaccauuaagagcuggagaaacaauauccuccggacacaagagucugagugugcgugcgugaacggguccuguuucaccauuaugacggauggaccgagcgacggccaggccucuuacaaaaucuuucgcaucgaaaagggcaaaauugucaagagcguggagaugaaugcucccaacuaucauuacgaagagugcuccuguuacccugauucuagcgagaucacaugcguuugcagagacaauuggcacggguccaaccggcccugggugagcuucaaucagaaccuggaauaucagauuggauacaucuguucuggcauuuuuggggauaauccucgccccaacgacaaaaccggauccugcggcccggugagcucuaauggggccaacggagucaagggcuucuccuuuaaguauggcaacgggguguggaucggaagaacaaaaagcauuaauucccggaacggcuucgagaugaucugggauccuaauggguggaccggaaccgacaacaauuuuucuaucaagcaagacauuguuggcaucaacgaauggagcggguacuccggcucuuucgugcagcaucccgagcuuacaggacuggauuguauucgcccuugcuucugggucgaacucaucagaggccggcccaaagagaauacgauuuggaccagcggguccagcaucucuuuuuguggagugaacuccgacacaguuggcuggagcuggcccgauggggcugagcugccuuucaccaucgacaaguga

SEQ ID NO: 210642 - RNA, 1410 nt, Artificial Sequence; identical to SEQ ID NO: 208810
  derived and/or modified CDS sequence (opt5) from neuraminidase__InfluenzaA__ADF27838

SEQ ID NO: 210643 - RNA, 1410 nt, Artificial Sequence; identical to SEQ ID NO: 208810
  derived and/or modified CDS sequence (opt5) from neuraminidase__InfluenzaA__ADF27848

SEQ ID NO: 210644 - RNA, 1410 nt, Artificial Sequence
  derived and/or modified CDS sequence (opt5) from neuraminidase__InfluenzaA__ADF27858
augaaccccaaucagaagaucauuaccaucggcagcgugugcaugacaauugggauggccaaccugauccuccaaauuggaaauaucaucuccauuuggaucucucacagcauucagcugggcaaccagaaucagaucgagacguguaaccaauccgucauuaccuacgaaaauaacacauggguuaaucagaccuaugugaacaucucuaauacaaacuucgcugccgggcagagcguggucuccgugaaacuugcgggaaauucuagccugugcccuguuuccggcugggcuauuuacagcaaggacaacucuaucagaaucggguccaaaggagauguguuugucauucgggagccguucaucagcuguucuccccucgaaugccgcaccuuuuuccugacacagggcgcccuucugaaugacaagcauuccaacggcaccauuaaagauagaagcccuuaucggacgcucaugucuugucccaucggggaggugccuucccccuacaacagccgcuuugaauccguugccuggucuagcuccgcuugccacgacggaauuaauuggcugaccaucggcaucagcgggccugauaacggagccguggcuguccugaaguauaauggcauuaucacagacaccauuaagucuuggagaaacaauauccuccggacacaagaguccgagugugccugcgugaacgggagcuguuucaccgugaugacggauggaccgucugacggccaggcgagcuacaaaauuuuucgcaucgaaaagggcaaaaucgucaaguccguugagaugaaugcccccaacuaucauuacgaagagugcucuuguuacccugauagcuccgagauuacaugcgugugcagagacaauuggcacgggagcaaccggcccugggugucuuucaaucagaaccuggaauaucagaucggauacauuuguuccggcaucuuuggggauaauccucgccccaacgacaaaaagggaagcugcggcccggucucuuccaauggggcuaacggagugaagggcuucagcuuuaaauauggcaacgggguuuggauuggaagaaccaaguccaucucuagccggaauggcuucgagaugauuugggauccuaacggguggacaggaaccgacaauaacuuuuccaucaaacaagacaucgugggcauuaaugaauggucuggguacagcggcuccuucguccagcaucccgagcuuaccggacuggauuguauccgcccuugcuucuggguggaacucauuagaggccggcccaaggagaacacaaucuggacgagcgggucuuccauuagcuuuuguggaguuaauggcgacaccgugggguggucuuggcccgauggagccgagcugccuuucacaaucgacaaauga

SEQ ID NO: 210645 - RNA, 1410 nt, Artificial Sequence
  derived and/or modified CDS sequence (opt5) from neuraminidase__InfluenzaA__ADF27878
augaaccccaaucagaagaucauuaccaucggcagcgugugcaugacaauugggauggccaaccugauccuccaaauuggaaauaucaucuccauuuggaucucucacagcauucagcugggcaaccagaaucagaucgagacguguaaccaauccgucauuaccuacgaaaauaacacauggguuaaucagaccuaugugaacaucucuaauacaaacuucgcugccgggcagagcguggucuccgugaaacuugcgggaaauucuagccugugcccuguuuccggcugggcuauuuacagcaaggacaacucuaucagaaucggguccaaaggagauguguuugucauucgggagccguucaucagcuguucuccccucgaaugccgcaccuuuuuccugacacagggcgcccuucugaaugacaagcauuccaacggcaccauuaaagauagaagcccuuaucggacgcucaugucuugucccaucggggaggugccuucccccuacaacagccgcuuugaauccguugccuggucugcuagcgccugccacgacggaauuaauuggcugaccaucggcaucuccgggccugauaacggagcuguggccguccugaaguauaauggcauuaucacagacaccauuaagagcuggagaaacaauauccuccggacacaagagucugagugugcgugcgugaacggguccuguuucaccgugaugacggauggaccgagcgacggccaggccucuuacaaaauuuuucgcaucgaaaagggcaaaaucgucaagagcguugagaugaaugcucccaacuaucauuacgaagagugcuccuguuacccugauucuagcgagauuacaugcgugugcagagacaauuggcacggguccaaccggcccugggugagcuucaaucagaaccuggaauaucagaucggauacauuuguucuggcaucuuuggggauaauccucgccccaacgacaaaaagggauccugcggcccggucagcucuaauggggccaacggagugaagggcuucuccuuuaaauauggcaacgggguuuggauuggaagaaccaagagcaucuccucucggaauggcuucgagaugauuugggauccuaacggguggacaggaaccgacaauaacuuuagcaucaaacaagacaucgugggcauuaaugaaugguccggguacucuggcagcuucguccagcaucccgagcuuaccggacuggauuguauccgcccuugcuucuggguggaacucauuagaggccggcccaaggagaacacaaucuggacguccgggagcucuauuuccuuuuguggaguuaauggcgacaccgugggguggagcuggcccgauggagcugagcugccuuucacaaucgacaaauga

SEQ ID NO: 210646 - RNA, 1410 nt, Artificial Sequence; identical to SEQ ID NO: 210098
  derived and/or modified CDS sequence (opt5) from neuraminidase__InfluenzaA__ADF27888

SEQ ID NO: 210647 - RNA, 1410 nt, Artificial Sequence; identical to SEQ ID NO: 208810
  derived and/or modified CDS sequence (opt5) from neuraminidase__InfluenzaA__ADF27898

SEQ ID NO: 210648 - RNA, 1410 nt, Artificial Sequence; identical to SEQ ID NO: 210098
  derived and/or modified CDS sequence (opt5) from neuraminidase__InfluenzaA__ADF27908

SEQ ID NO: 210649 - RNA, 1410 nt, Artificial Sequence; identical to SEQ ID NO: 210098
  derived and/or modified CDS sequence (opt5) from neuraminidase__InfluenzaA__ADF27918

SEQ ID NO: 210650 - RNA, 1410 nt, Artificial Sequence
  derived and/or modified CDS sequence (opt5) from neuraminidase__InfluenzaA__ADF27938
augaaccccaaucagagaaucauuaccaucggcagcgugugcaugacaauugggauggccaaccugauccuccaaauuggaaauaucaucuccauuuggaucucucacagcauucagcugggcaaccagaaucagaucgagacguguaaccaauccgucauuaccuacgaaaauaacacauggguuaaucagaccuaugugaacaucucuaauacaaacuucgcugccgggcagagcguggucuccgugaaacuugcgggaaauucuagccugugcccuguuuccggcugggcuauuuacagcaaggacaacucuauccggaucggguccaagggagauguguuugucauucgcgagccguucaucagcuguucuccccucgaaugcagaaccuuuuuccugacacagggcgcccuucugaaugacaaacauuccaacggcaccauuaaggaucggagcccuuaucgcacgcucaugucuugucccaucggggaggugccuucccccuacaacagcagauuugaauccguugccuggucugcuagcgccugccacgacggaauuaauuggcugaccaucggcaucuccgggccugauaacggagcuguggccguccugaaauauaauggcauuaucacagacaccauuaagagcuggcggaacaauauccuccgcacacaagagucugagugugcgugcgugaacggguccuguuucaccgugaugacggauggaccgagcgacggccaggccucuuacaagauuuuuagaaucgaaaaaggcaagaucgucaaaagcguugagaugaaugcucccaacuaucauuacgaagagugcuccuguuacccugauucuagcgagauuacaugcgugugccgggacaauuggcacggguccaaccgccccugggugagcuucaaucagaaccuggaauaucagaucggauacauuuguucuggcaucuuuggggauaauccuagacccaacgacaagaccggauccugcggcccggucagcucuaauggggccaacggagugaaaggcuucuccuuuaaguauggcaacgggguuuggauuggacggacaaagagcaucuccucucgcaauggcuucgagaugauuugggauccuaacggguggaccggaaccgacaauaacuuuagcaucaaacaagacaucgugggcauuaaugaaugguccggguacucuggcagcuucguccagcaucccgagcuuacaggacuggauuguaucagaccuugcuucuggguggaacucauucggggccgccccaaggagaacacgaucuggaccuccgggagcucuauguccuuuuguggaguuaauagcgacacagugggcuggucuuggcccgauggggcugagcugccuuucaccauugacaaauga

SEQ ID NO: 210651 - RNA, 1410 nt, Artificial Sequence; identical to SEQ ID NO: 208810
  derived and/or modified CDS sequence (opt5) from neuraminidase__InfluenzaA__ADF27948

SEQ ID NO: 210652 - RNA, 1410 nt, Artificial Sequence; identical to SEQ ID NO: 210098
  derived and/or modified CDS sequence (opt5) from neuraminidase__InfluenzaA__ADF27958

SEQ ID NO: 210653 - RNA, 1410 nt, Artificial Sequence; identical to SEQ ID NO: 208810
  derived and/or modified CDS sequence (opt5) from neuraminidase__InfluenzaA__ADF27968

SEQ ID NO: 210654 - RNA, 1410 nt, Artificial Sequence; identical to SEQ ID NO: 210098
  derived and/or modified CDS sequence (opt5) from neuraminidase__InfluenzaA__ADF27978

SEQ ID NO: 210655 - RNA, 1410 nt, Artificial Sequence
  derived and/or modified CDS sequence (opt5) from neuraminidase__InfluenzaA__ADF27988
augaaccccaaucagaagaucauuaccaucggcagcgugugcaugacaauugggcuggccaaccucauccugcaaauuggaaauaucaucuccauuuggaucucucacagcauucagcuuggcaaccagaaucagaucgagacguguaaccaauccgucauuucuuacgaaaauaacaccuggguuaaucagacauaugugaacaucagcaauaccaacuucgcugccgggcaguccguggucucugugaaacuggcgggaaauagcucccucugcccuguuagcggcugggcuauuuacucuaaggacaacuccgugagaaucgggagcaaaggagaugucuuugugauccgggagccguucauuucuuguagcccccuggaaugccgcacauuuuuccuuacccagggcgcccugcucaaugacaagcauuccaacggcacaaucaaagauagaucuccuuaucggacccugauguccugucccauuggggagguuccuagccccuacaacucccgcuuugaaucuguggccuggagcgcuuccgccugccacgacggaaucaauuggcugacgauuggcaucagcgggccugauaacggagcugucgccgugcucaaguauaauggcaucauuaccgacacaaucaagucuuggagaaacaauauucugcggacccaagaguccgagugugcgugcgugaacgggagcuguuucacagucaugaccgauggaccgucugacggccaggccagcuacaaaaucuuucgcauugaaaagggcaaaaucguuaaguccguggagaugaaugcucccaacuaucauuacgaagagugcucuuguuacccugauagcuccgagaucacgugcgugugcagagacaauuggcacgggagcaaccggcccugggucucuuucaaucagaaccuugaauaucgcauuggauacaucuguuccggcauuuuuggggauaauccuagacccaacgacaaaacaggaagcugcggcccggugucuuccaauggggccaacggaguuaagggcuucagcuuuaaguauggcaacgggguguggaucggacggaccaaauccauuucuagccgcaauggcuucgagaugaucugggauccuaacggguggacaggaaccgacaagaauuuuuccauuaaacaggacaucgucggcaucaacgaauggucuggguacagcggcuccuucgugcaacaucccgagcugaccggacucgauuguauuagaccuugcuucuggguugaacugauccggggccgccccaaggagaauacaauuuggacgagcgggucuuccaucagcuuuuguggagugaacucugacaccgucggcugguccuggcccgauggggcugagcuuccuuucacaauugacaaauga

SEQ ID NO: 210656 - RNA, 1410 nt, Artificial Sequence; identical to SEQ ID NO: 208810
  derived and/or modified CDS sequence (opt5) from neuraminidase__InfluenzaA__ADF27998

SEQ ID NO: 210657 - RNA, 1410 nt, Artificial Sequence; identical to SEQ ID NO: 208810
  derived and/or modified CDS sequence (opt5) from neuraminidase__InfluenzaA__ADF28008

SEQ ID NO: 210658 - RNA, 1410 nt, Artificial Sequence; identical to SEQ ID NO: 209697
  derived and/or modified CDS sequence (opt5) from neuraminidase__InfluenzaA__ADF28018

SEQ ID NO: 210659 - RNA, 1410 nt, Artificial Sequence; identical to SEQ ID NO: 208810
  derived and/or modified CDS sequence (opt5) from neuraminidase__InfluenzaA__ADF28028

SEQ ID NO: 210660 - RNA, 1410 nt, Artificial Sequence
  derived and/or modified CDS sequence (opt5) from neuraminidase__InfluenzaA__ADF28038
augaaccccaaucagaagaucauuaccaucggcagcgugugcaugacaauugggauggccaaccugauccuccaaauuggaaauaucaucuccauuuggaucucucacagcauucagcugggcaaccagaaucagaucgagacguguaaccaauccgucauuaccuacgaaaauaacacauggguuaaucagaccuaugugaacaucucuaauacaaacuucgcuaccgggcagcuuguggucagcgugaaacuggccggaaauuccucucucugcccuguuagcggcugggcgauuuacuccaaggacaacagcaucagaaucgggucuaaaggagauguguuugucauucgggagccguucaucuccuguagcccccuggaaugccgcacauuuuuccuuacccagggcgcucugcucaaugacagacauucuaacggcacgauuaaggaucgguccccuuaucgcacccugaugagcugucccaucggggaggugccuucucccuacaacuccagauuugaaagcguugccugguccgccucugcuugccacgacggaauuaauuggcugacaaucggcaucagcgggccugauaacggagccguggcuguccucaaauauaauggcauuaucaccgacacaauuaaguccuggcggaacaauauccugcgcacccaagagagcgagugugccugcgugaacgggucuuguuucacggugaugacagauggaccguccgacggccaggcgagcuacaagauuuuuagaaucgaaaaaggcaagaucgucaaaucuguugagaugaaugcccccaacuaucauuacgaagagugcagcuguuacccugauuccucugagauuaccugcgugugccgggacaauuggcacgggagcaaccgccccuggguguccuucaaucagaaccuugaauaucagaucggauacauuuguagcggcaucuuuggggauaauccuagacccaacgacaagacaggaucuugcggcccggucuccagcaauggggcuaacggagugaaaggcuucucuuuuaaguauggcaacgggguuuggauuggacggaccaaguccaucagcucccgcaauggcuucgagaugauuugggauccuaacggguggaccggaacagacaauaacuuuucuaucaaacaagacaucgugggcauuaaugaauggagcggguacuccggcucuuucguccagcaucccgagcugacgggacucgauuguaucagaccuugcuucuggguggaacugauucggggccgccccaaggagaacaccaucuggacaagcggguccagcauuucuuuuuguggaguuaauuccgacaccgugggcuggagcuggcccgauggggccgagcuuccuuucacaaucgacaaauga

SEQ ID NO: 210661 - RNA, 1410 nt, Artificial Sequence; identical to SEQ ID NO: 208810
  derived and/or modified CDS sequence (opt5) from neuraminidase__InfluenzaA__ADF28048

SEQ ID NO: 210662 - RNA, 1410 nt, Artificial Sequence; identical to SEQ ID NO: 208810
  derived and/or modified CDS sequence (opt5) from neuraminidase__InfluenzaA__ADF28058

SEQ ID NO: 210663 - RNA, 1410 nt, Artificial Sequence
  derived and/or modified CDS sequence (opt5) from neuraminidase__InfluenzaA__ADF28068
augaaccccaaucagaagaucauuaccaucggcagcgugugcaugacaauugggauggccaaccugauccuccaaauuggaaauaucaucuccauuuggaucucucacagcauucagcugggcaaccagaaucagaucgagacguguaaccaauccgucauuaccuacgaaaauaacacauggguuaaucagaccuaugugaacaucucuaauacaaacuucgcugccgggcagagcguggucuccgugaaacuugcgggaucuagcucccugugcccuguuagcggcugggcuauuuacucuaaggacaauuccaucagaaucgggagcaaaggagauguguuugucauucgggagccguucaucucuuguucccaucucgaaugccgcaccuuuuuccugacacagggcgcccuucugaacgacaagcacagcaauggcaccauuaaagauagaucucccuaucggacgcucauguccuguccuaucggggaggugcccagcccuuacaacucccgcuuugaaucuguugccuggagcgcuuccgccugccaugacggaauuaacuggcugaccaucggcaucagcgggcccgauaauggagcuguggccguccugaaguauaacggcauuaucacagacaccauuaagucuuggagaaauaacauccuccggacacaagaguccgagugugcgugcgugaaugggagcuguuucaccgugaugacggauggaccuucugacggccaggccagcuacaaaauuuuucgcaucgaaaagggcaaaaucgucaaguccguugagaugaacgcuccgaauuaucacuacgaagagugcucuuguuaccccgauagcuccgagauuacaugcgugugcagagacaacuggcaugggagcaaucggccuugggugucuuucaaccagaaucuggaauaucagaucggauacauuuguuccggcaucuuuggggauaacccccgcccuaaugacaaaaagggaagcugcggccccgucucuuccaacggggccaauggagugaagggcuucagcuuuaaauauggcaacgggguuuggauuggaagaaccaaguccaucucuagccggaacggcuucgagaugauuugggauccgaauggguggacaggaaccgacaacaauuuuuccaucaaacaagacaucgugggcauuaacgaauggucuggguacagcggcuccuucguccagcacccugagcuuaccggacuggauuguauccgccccugcuucuggguggaacucauuagaggccggccuaaggagaauacaaucuggacgagcgggucuuccauuagcuuuuguggaguuaacucugacaccgugggcugguccuggcccgauggggcugagcugcccuucacaaucgacaaauga

SEQ ID NO: 210664 - RNA, 1410 nt, Artificial Sequence; identical to SEQ ID NO: 208810
  derived and/or modified CDS sequence (opt5) from neuraminidase__InfluenzaA__ADF28078

SEQ ID NO: 210665 - RNA, 1410 nt, Artificial Sequence; identical to SEQ ID NO: 208810
  derived and/or modified CDS sequence (opt5) from neuraminidase__InfluenzaA__ADF28088

SEQ ID NO: 210666 - RNA, 1410 nt, Artificial Sequence; identical to SEQ ID NO: 210272
  derived and/or modified CDS sequence (opt5) from neuraminidase__InfluenzaA__ADF28110

SEQ ID NO: 210667 - RNA, 1410 nt, Artificial Sequence; identical to SEQ ID NO: 208810
  derived and/or modified CDS sequence (opt5) from neuraminidase__InfluenzaA__ADF28120

SEQ ID NO: 210668 - RNA, 1410 nt, Artificial Sequence; identical to SEQ ID NO: 208810
  derived and/or modified CDS sequence (opt5) from neuraminidase__InfluenzaA__ADF29919

SEQ ID NO: 210669 - RNA, 1410 nt, Artificial Sequence; identical to SEQ ID NO: 209947
  derived and/or modified CDS sequence (opt5) from neuraminidase__InfluenzaA__ADF42692

SEQ ID NO: 210670 - RNA, 1410 nt, Artificial Sequence; identical to SEQ ID NO: 208810
  derived and/or modified CDS sequence (opt5) from neuraminidase__InfluenzaA__ADF42702

SEQ ID NO: 210671 - RNA, 1410 nt, Artificial Sequence; identical to SEQ ID NO: 210645
  derived and/or modified CDS sequence (opt5) from neuraminidase__InfluenzaA__ADF42712

SEQ ID NO: 210672 - RNA, 1410 nt, Artificial Sequence; identical to SEQ ID NO: 208810
  derived and/or modified CDS sequence (opt5) from neuraminidase__InfluenzaA__ADF42722

SEQ ID NO: 210673 - RNA, 1410 nt, Artificial Sequence; identical to SEQ ID NO: 210098
  derived and/or modified CDS sequence (opt5) from neuraminidase__InfluenzaA__ADF42732

SEQ ID NO: 210674 - RNA, 1410 nt, Artificial Sequence; identical to SEQ ID NO: 208810
  derived and/or modified CDS sequence (opt5) from neuraminidase__InfluenzaA__ADF42742

SEQ ID NO: 210675 - RNA, 1410 nt, Artificial Sequence; identical to SEQ ID NO: 208800
  derived and/or modified CDS sequence (opt5) from neuraminidase__InfluenzaA__ADF58339

SEQ ID NO: 210676 - RNA, 1410 nt, Artificial Sequence; identical to SEQ ID NO: 208810
  derived and/or modified CDS sequence (opt5) from neuraminidase__InfluenzaA__ADF58348

SEQ ID NO: 210677 - RNA, 1410 nt, Artificial Sequence; identical to SEQ ID NO: 208810
  derived and/or modified CDS sequence (opt5) from neuraminidase__InfluenzaA__ADF58350

SEQ ID NO: 210678 - RNA, 1410 nt, Artificial Sequence; identical to SEQ ID NO: 208810
  derived and/or modified CDS sequence (opt5) from neuraminidase__InfluenzaA__ADF58352

SEQ ID NO: 210679 - RNA, 1410 nt, Artificial Sequence
  derived and/or modified CDS sequence (opt5) from neuraminidase__InfluenzaA__ADF80459
augaaccccaaucagaagaucauuaccaucggcagcgugugcaugacaauugggauggccaaccugauccuccaaauuggaaauaucaucuccauuuggaucucucacagcauucagcugggcaaccagaaucagaucgagacguguaaccaauccgucauuaccuacgaaaauaacacauggguuaaucagaccuaugugaacaucucuaauacaaacuucgcugccgggcagagcguggucuccgugaaacuugcgggaaauucuagccugugcccuguuuccggcugggcuauuuacagcaaggacaacucuaucagaaucggguccaaaggagauguguuugucauucgggagccguucaucagcuguucuccccucgaaugccgcaccuuuuuccugacacagggcgcccuucugaaugacaagcauuccaacggcaccauuaaagauagaagcccuuaucggacgcucaugucuugucccaucggggaggugccuucccccuacaacagccgcuuugaauccguugccuggucugcuagcgccugccacgacggaauuaauuggcugaccaucggcaucuccgggccugauaacggagcuguggccguccugaaguauaauggcauuaucacagacaccauuaagagcuggagaaacaauauccuccggacacaagagucugagugugcgugcgugaacggguccuguuucaccgugaugacggauggaccgagcgacggccaggccucuuacaaaauuuuucgcaucgaaaagggcaaaaucgucaagagcguugagaugaaugcucccaacuauuacuacgaagagugcuccuguuauccugauucuagcgagauuacaugcgugugcagagacaauuggcauggguccaaccggcccugggugaccuucaaucagaaccuggaauaccagaucggauauauuuguagcggcaucuuuggggauaauccucgccccaacgacaaaacaggaucuugcggcccggucuccagcaauggggccaacggagugaagggcuucucuuuuaaguacggcaacgggguuuggauuggaagaaccaaauccaucagcucccggaauggcuucgagaugauuugggauccuaacggguggaccggaacagacaauaacuuuucuaucaagcaagacaucgugggcauuaaugaauggagcggguauuccggcucuuucguccagcaccccgagcuuacgggacuggauuguauccgcccuugcuucuggguggaacucauuagaggccggcccaaagagaacaccguuuggacaagcggguccagcaucucuuuuuguggagucaauuccgacaccgugggcuggagcuggcccgauggggcugagcugccuuucacaauugacaaguga

SEQ ID NO: 210680 - RNA, 1410 nt, Artificial Sequence
  derived and/or modified CDS sequence (opt5) from neuraminidase__InfluenzaA__ADF80503
augaaccccaaucagaagaucauuaccaucggcagcgugugcaugacaauugggauggccaaccugauccuccaaauuggaaauaucacguccaucuggauuucucacagcauccagcugggcaaccagaaucagauugagaccuguaaccaauccgucaucacauacgaaaauaacaccuggguuaaucagacauaugugaacauuucuaauaccaacuucgcugccgggcagagcguggucuccgugaaacuugcgggaaauucuagccugugcccuguuuccggcugggcuaucuacagcaaggacaacucuauuagaaucggguccaaaggagauguguuugucauccgggagccguucauuagcuguucuccccucgaaugccgcacauuuuuccugacccagggcgcccuucugaaugacaagcauuccaacggcacgaucaaagauagaagcccuuaucggacccucaugucuugucccauuggggaggugccuucccccuacaacagccgcuuugaauccguugccuggucugcuagcgccugccacgacggaaucaauuggcugacaauuggcaucuccgggccugauaacggagcuguggccguccugaaguauaauggcaucauuaccgacacaaucaagagcuggagaaacaauauucuccggacccaagagucugagugugcgugcgugaacggguccuguuucacggugaugacagauggaccgagcgacggccaggccucuuacaaaaucuuucgcauugaaaagggcaaaaucgucaagagcguugagaugaaugcucccaacuauuacuacgaagagugcuccuguuauccugauucuagcgagauuaccugcgugugcagagacaauuggcauggguccaaccggcccugggugagcuucaaucagaaccuggaauaccagaucggauauaucuguucuggcauuuuuggggauaauccucgccccaacgacaaaacaggauccugcggcccggucagcucuaauggggccaacggagugaagggcuucuccuuuaaguacggcaacgggguuuggaucggaagaaccaaaagcauuuccucucggaauggcuucgagaugaucugggauccuaacggguggaccggaacagacaauaacuuuagcauuaagcaagacaucgugggcaucaaugaaugguccggguauucuggcagcuucguccagcaccccgagcuuacgggacuggauuguauucgcccuugcuucuggguggaacucaucagaggccggcccaaagagaacaccauuuggacauccgggagcucuaucuccuuuuguggaguuaauagcgacaccgugggcuggucuuggcccgauggggcugagcugccuuucacaauugacaaguga

SEQ ID NO: 210681 - RNA, 1410 nt, Artificial Sequence
  derived and/or modified CDS sequence (opt5) from neuraminidase__InfluenzaA__ADF83744
augaaccccaaucagaagaucauuaccaucggcagcgugucccugacaauuucuacgaucugcuucuuuaugcaaauugccauccucaucaccacagucacccugcacuucaaacaguacgaguuuaacagcccuccgaauaaccagguuaugcuuugugaacccacaauuaucgagaagaauauuaccgaaaucguguaucugacaaacaccacgauugagaaagaaaucugcccuaagcucgcugaguacagaaauugguccaaaccccagugugacauuaccggguucgccccuuuuucuaaggauaacagcauccggcuguccgcgggaggcgacaucugggugacacgcgagcccuaugucucuugcgauccugacaaguguuaccaauucgcucuugggcagggaaccacacugaauaacgugcauagcaauaacaccguuagagaucggacgccguaucgcacacuccugaugaaugaacugggcgugcccuuucaccucgggaccaaacaggucugcauugccugguccucuagcuccugucaugacggaaaggccuggcugcacgugugcaucacaggcgaugacaaaaacgcuaccgccagcuucauuuacaauggcagacuuguugauucuguggucuccuggagcaaggagauccugcggacccaggaaucugagugugugugcauuaacgggacauguacgguggucaugaccgacggauccgcuagcggcaaagccgauacaaagauccucuuuaucgaggaagggaagauuguucauaccuccacacugucuggaagcgcgcaacacguggaggaaugcuccugcuauccucgcuaccccggcgugagaugugucugccgggacaacuggaaagggagcaaucgcccuaucguggauauuaacaucaaggaccacucuauuguuuccagcuacguguguucuggacuugucggcgacacccccagaaagaaugauagcuccucuagcucccauugccuggacccgaacaaugaggaaggcgggcacggagugaaaggcugggccuucgaugacgggaacgauguuuggaugggacggacgaucagcgagaaaucucgccucggcuaugagacauuuaaggugaucgaagggugguccaauccuaaaagcaagcugcagauuaacagacaggucaucguggaccggggaaaucgcucuggcuacuccggcauuuucagcgucgaggggaaguccuguaucaacagaugcuuuuauguggaacugauucggggaagaaaagaggaaaccgagguucucuggaccucuaauagcaucguggucuucuguggcacauccgggaccuacggaacaggcucuuggcccgauggggcugacauuaaccugaugccuaucuga

SEQ ID NO: 210682 - RNA, 1410 nt, Artificial Sequence; identical to SEQ ID NO: 209664
  derived and/or modified CDS sequence (opt5) from neuraminidase__InfluenzaA__ADF83755

SEQ ID NO: 210683 - RNA, 1410 nt, Artificial Sequence
  derived and/or modified CDS sequence (opt5) from neuraminidase__InfluenzaA__ADF83766
augaaccccaaucagaagaucauuaccaucggcagcgugugcaugacaauugggauggccaaccugauccuccaaauuggaaauaucaucuccauuuggaucucucacagcauucagcugggcaaccagaaucagacggagaccuguaaccaauccgucaucacauacgaaaauaacaccuggguuaaucagacauaugugaacauuucuaauaccaacuucgcugccgggcagagcguggucuccgugaaacuugcgggaaauucuagccugugcccuguuuccggcugggcuaucuacagcaaggacaacucuauuagaaucggguccaaaggagauguguuugucauccgggagccguucauuagcuguucuccccucgaaugccgcacauuuuuccugacccagggcgcccuucugaaugacaagcauuccaacggcacgaucaaagauagaagcccuuaucggacccucaugucuugucccauuggggaggugccuucccccuacaacagccgcuuugaauccguugccuggucugcuagcgccugccacgacggaaucaauuggcugacaauuggcaucuccgggccugauaacggagcuguggccguccugaaguauaauggcaucauuaccgacacaaucaagagcuggagaaacaauauucuccggacccaagagucugagugugcgugcgugaacggguccuguuucacggugaugacagauggaccgagcgacggccaggccucuuacaaaaucuuucgcauugaaaagggcaaaaucgucaagagcguugagaugaaugcucccaacuaucauuacgaagagugcuccuguuacccugauucuagcgagauuaccugcgugugcagagacaauuggcacggguccaaccggcccugggugagcuucaaucagaaccuggaauaucagaucggauacaucuguucuggcauuuuuggggauaauccucgccccaacgacaaaacaggauccugcggcccggucagcucuaauggggccaacggagugaagggcuucuccuuuaaguaugauaacggcguuuggaucgggagaaccaaaagcauuuccucucggaauggauucgagaugaucugggacccuaacggcuggaccgggacagacaauaacuuuagcauuaagcaagauaucgugggaaucaaugaaugguccggcuacucugggagcuucguccagcaucccgagcuuacgggccuggacuguauucgcccuugcuucuggguggaacucaucagaggacggcccaaagagaacaccauuuggacauccggcagcucuaucuccuuuugugggguuaauagcgauaccgugggauggucuuggcccgacggcgcugagcugccuuucacaauugauaaguga

SEQ ID NO: 210684 - RNA, 1410 nt, Artificial Sequence; identical to SEQ ID NO: 208810
  derived and/or modified CDS sequence (opt5) from neuraminidase__InfluenzaA__ADF83776

SEQ ID NO: 210685 - RNA, 1410 nt, Artificial Sequence
  derived and/or modified CDS sequence (opt5) from neuraminidase__InfluenzaA__ADF83786
augaaccccaaucagaagaucauuaccaucggcagcgugugcaugacaauugggauggccaaccugauccuccaaauuggaaauaucaucuccauuuggaucucucacagcauucagcugggcaaccagaaucagaucgagacguguaaccaauccgucauuaccuacgaaaauaacacauggguuaaucagaccuaugugaacaucucuaauacaaacuucgcugccgggcagagcguggucuccgugaaacuugcgggaaauucuagccugugcccuguuuccggcugggcuauuuacagcaaggacaacucuaucagaaucggguccaaaggagauguguuugucauucgggagccguucaucagcuguucuccccucgaaugccgcaccuuuuuccugacacagggcgcccuucugaaugacaagcauuccaacggcaccauuaaagauagaagcccuuaucggacgcucaugucuugucccaucggggaggugccuucccccuacaacagccgcuuugaauccguugccuggucugcuagcgccugccacgacggaauuaauuggcugaccaucggcaucuccgggccugauaacggagcuguggccguccugaaguauaauggcauuaucacagacaccauuaagagcuggagaaacaauauccuccggacacaagagucugagugugcgugcgugaacggguccuguuucaccgugaugacggauggaccgagcgacggccaggccucuuacaaaauuuuucgcaucgaaaagggcaaaaucgucaagagcguugagaugaaugcucccaacuaucauuacgaagagugcuccuguuacccugauucuagcgagauuacaugcgugugcagagacaauuggcacggguccaaccggcccugggugagcuucaaucagaaccuggaauaucagaucggauacauuuguucuggcaucuuuggggauaauccucgccccaacgacaaaaccggauccugcggcccggucagcucuaauggggccaacggagugaagggcuucuccuuuaaguauggcaacgggguuuggauuggaagaacaaaaagcaucuccucucggaauggcuucgagaugauuugggauccuaacggguggaccggaaccgacaauaacuuuagcaucaagcaagacaucgugggcauuaaugaaugguccggguacucuggcagcuucguccagcaucccgagcuuacaggacuggauuguauccgcccuugcuucuggguggaacucauuagaggccggcccaaagagaacacgaucuggaccuccgggagcucuauuuccuuuuguggaguuaauggcgacacagugggguggagcuggcccgauggagcugagcugccuuucaccaucgacaaguga

SEQ ID NO: 210686 - RNA, 1410 nt, Artificial Sequence
  derived and/or modified CDS sequence (opt5) from neuraminidase__InfluenzaA__ADF83796
augaaccccaaucagaagaucauuaccaucggcagcgugugcaugacaauugggauggccaaccugauccuccaaauuggaaauaucaucuccauuuggaucucucacagcauucagcugggcaaccagaaucagaucgagacguguaaccaauccgucauuaccuacgaaaauaacacauggguuaaucagaccuaugugaacaucucuaauacaaacuucgcugccgggcagagcguggucuccgugaaacuugcgggaaauucuagccugugcccuguuuccggcugggcuauuuacagcaaggacaacucuaucagaaucggguccaaaggagauguguuugucauucgggagccguucaucagcuguucuccccucgaaugccgcaccuuuuuccugacacagggcgcccuucugaaugacaagcauuccaacggcaccauuaaagauagaagcccuuaucggacgcucaugucuugucccaucggggaggugccuucccccuacaacagccgcuuugaauccguugccuggucugcuagcgccugccacgacggaauuaauuggcugaccaucggcaucuccgggccugauaacggagcuguggccguccugaaguauaauggcauuaucacagacaccauuaagagcuggagaaacaauauccuccggacacaagagucugagugugcgugcgugaacggguccuguuucaccgugaugacggauggaccgagcgacggccaggccucuuacaaaauuuuucgcaucgaaaagggcaaaaucgucaagagcguugagaugaaugcucccaacuaucauuacgaagagugcuccuguuacccugauucuagcgagauuacaugcgugugcagagacaauuggcacggguccaaccggcccugggugagcuucaaucagaaccuggaauaucagaucggauacauuuguucuggcaucuuuggggauaauccucgccccaacgacaaaaccggauccugcggcccggucagcucuaauggggccaacggagugaagggcuucuccuuuaaguauggcaacgggguuuggauuggaagaacaaaaagcaucuccucucggaauggcuucgagaugauuugggauccuaacggguggaccggaaccgacaauaacuuuagcaucaagcaagacaucgugcgcauuaaugaaugguccggcuacucugggagcuucguccagcaucccgagcuuacaggccuggauuguaucagaccuugcuucuggguggaacucauucggggacgccccaaagagaacacgaucuggaccuccggcagcucuauuuccuuuugugggguuaauagcgacacagugggauggucuuggcccgauggcgcugagcugccuuucaccaucgacaaguga

SEQ ID NO: 210687 - RNA, 1410 nt, Artificial Sequence; identical to SEQ ID NO: 208810
  derived and/or modified CDS sequence (opt5) from neuraminidase__InfluenzaA__ADF83806

SEQ ID NO: 210688 - RNA, 1410 nt, Artificial Sequence; identical to SEQ ID NO: 210323
  derived and/or modified CDS sequence (opt5) from neuraminidase__InfluenzaA__ADF83816

SEQ ID NO: 210689 - RNA, 1410 nt, Artificial Sequence; identical to SEQ ID NO: 208810
  derived and/or modified CDS sequence (opt5) from neuraminidase__InfluenzaA__ADF83826

SEQ ID NO: 210690 - RNA, 1410 nt, Artificial Sequence; identical to SEQ ID NO: 208810
  derived and/or modified CDS sequence (opt5) from neuraminidase__InfluenzaA__ADF83836

SEQ ID NO: 210691 - RNA, 1410 nt, Artificial Sequence; identical to SEQ ID NO: 208810
  derived and/or modified CDS sequence (opt5) from neuraminidase__InfluenzaA__ADF83846

SEQ ID NO: 210692 - RNA, 1410 nt, Artificial Sequence; identical to SEQ ID NO: 208810
  derived and/or modified CDS sequence (opt5) from neuraminidase__InfluenzaA__ADF83856

SEQ ID NO: 210693 - RNA, 1410 nt, Artificial Sequence; identical to SEQ ID NO: 210161
  derived and/or modified CDS sequence (opt5) from neuraminidase__InfluenzaA__ADF83866

SEQ ID NO: 210694 - RNA, 1410 nt, Artificial Sequence; identical to SEQ ID NO: 210591
  derived and/or modified CDS sequence (opt5) from neuraminidase__InfluenzaA__ADF83876

SEQ ID NO: 210695 - RNA, 1410 nt, Artificial Sequence; identical to SEQ ID NO: 210241
  derived and/or modified CDS sequence (opt5) from neuraminidase__InfluenzaA__ADF83888

SEQ ID NO: 210696 - RNA, 1410 nt, Artificial Sequence
  derived and/or modified CDS sequence (opt5) from neuraminidase__InfluenzaA__ADF83898
augaaccccaaucagaagaucauuaccaucggcagcgugugcaugacaauugggauggccaaccugauccuccaaauuggaaauaucaucuccauuuggaucucucacccuauucagcugggcaaccagaaucagaucgagacguguaaccaaagcgucauuaccuacgaaaauaacacauggguuaaucagaccuaugugaacaucuccaauacaaacuucgcugccgggcagucuguggucagcgugaaacuugcgggaaauuccucucugugcccgguuagcggcugggcuauuuacuccaaggacaacagcaucagaaucgggucuaaaggagauguguuugucauucgggagcccuucaucuccuguagcccucucgaaugccgcaccuuuuuccugacacagggcgcccuucugaaugacaagcauucuaacggcaccauuaaagauagaucccccuaucggacgcucaugagcuguccuaucggggaggugcccucuccuuacaacucccgcuuugaaagcguugccugguccgcuucugccugccacgacggaauuaauuggcugaccaucggcaucagcgggccggauaacggagcuguggccguccugaaguauaauggcauuaucacagacaccauuaaguccuggagaaacaauauccuccggacacaagagagcgagugugcgugcgugaacgggucuuguuucaccgugaugacggauggacccuccgacggccaggccagcuacaaaauuuuucgcaucgaaaagggcaaaaucgucaagucuguugagaugaaugcuccuaacuaucauuacgaagagugcagcuguuaccccgauuccucugagauuacaugcgugugcagagacaauuggcacgggagcaaccggccuuggguguccuucaaucagaaccuggaauaucagaucggauacauuuguagcggcaucuuuggggauaauccccgcccgaacgacaaaaccggaucuugcggcccugucuccagcaauggggccaacggagugaagggcuucucuuuuaaguauggcaacgggguuuggauuggaagaacaaaauccaucagcucccggaauggcuucgagaugauuugggaucccaacggguggaccggaaccgacaauaacuuuucuaucaagcaagacaucgugggcauuaaugaauggagcggguacuccggcucuuucguccagcauccugagcuuacaggacuggauuguauccgccccugcuucuggguggaacucauuagaggccggcccaaagagaacacgaucuggaccagcggguccagcauuucuuuuuguggaguuaauuccgacacagugggcuggagcuggccugauggggcugagcugccguucaccaucgacaaguga

SEQ ID NO: 210697 - RNA, 1410 nt, Artificial Sequence; identical to SEQ ID NO: 208810
  derived and/or modified CDS sequence (opt5) from neuraminidase__InfluenzaA__ADF83908

SEQ ID NO: 210698 - RNA, 1410 nt, Artificial Sequence; identical to SEQ ID NO: 208810
  derived and/or modified CDS sequence (opt5) from neuraminidase__InfluenzaA__ADF83918

SEQ ID NO: 210699 - RNA, 1410 nt, Artificial Sequence; identical to SEQ ID NO: 208810
  derived and/or modified CDS sequence (opt5) from neuraminidase__InfluenzaA__ADF84444

SEQ ID NO: 210700 - RNA, 1410 nt, Artificial Sequence; identical to SEQ ID NO: 208810
  derived and/or modified CDS sequence (opt5) from neuraminidase__InfluenzaA__ADF84462

SEQ ID NO: 210701 - RNA, 1410 nt, Artificial Sequence
  derived and/or modified CDS sequence (opt5) from neuraminidase__InfluenzaA__ADF84472
augaaccccaaucagaagaucauuaccaucggcagcgugugcaugacaauugggauggccaaccugauccuccaaauuggaaauaucaucuccauuuggaucucucacagcauucagcugggcaaccagaaucagaucgagacguguaaccaauccgucauuaccuacgaaaauaacacauggguuaaucagaccuaugugaacaucucuaauacaaacuucgcugccgagcagagcguggucuccgugaaacuugcgggaaauucuagccugugcccuguuuccgggugggcuauuuacagcaaggacaacucuaucagaaucggcuccaaaggggauguguuugucauucgggaaccguucaucagcuguucuccccucgagugccgcaccuuuuuccugacacagggagcccuucugaaugacaagcauuccaacggcaccauuaaagauagaagcccuuaucggacgcucaugucuugucccaucggcgaagugccuucccccuacaacagccgcuuugaguccguugccuggucugcuagcgccugccacgacgggauuaauuggcugaccaucggaaucuccggcccugauaacggggcuguggccguccugaaguauaauggaauuaucacagacaccauuaagagcuggagaaacaauauccuccggacacaagagucugaaugugcgugcgugaacggcuccuguuucaccgugaugacggaugggccgagcgacggacaggccucuuacaaaauuuuucgcaucgagaagggcaaaaucgucaagagcguugaaaugaaugcucccaacuaucauuacgaggagugcuccuguuacccugauucuagcgaaauuacaugcgugugcagagacaauuggcacggcuccaaccggcccugggugagcuucaaucagaaccuggaguaucagaucggguacauuuguucuggaaucuuuggcgauaauccucgccccaacgacaaaaccggguccugcggaccggucagcucuaauggcgccaacggggugaagggauucuccuuuaaguauggcaacggcguuuggauugggagaacaaaaagcaucuccucucggaauggauucgaaaugauuugggauccuaacggcuggaccgggaccgacaauaacuuuagcaucaagcaagacaucgugggaauuaaugagugguccggcuacucugggagcuucguccagcaucccgaacuuacaggccuggauuguauccgcccuugcuucuggguggagcucauuagaggacggcccaaagagaacacgaucuggaccuccggcagcucuauuuccuuuugugggguuaauagcgacacagugggauggucuuggcccgauggcgcugaacugccuuucaccaucgacaaguga

SEQ ID NO: 210702 - RNA, 1410 nt, Artificial Sequence
  derived and/or modified CDS sequence (opt5) from neuraminidase__InfluenzaA__ADF84482
augaaccccaaucagaagaucauuaucauuggcagcgugugcaugaccaucgggauggccaaccugauucuccaaaucggaaauaucauuuccaucuggauuucucacagcauccagcugggcaaccagaaucagauugagacauguaaccaauccgucaucacguacgaaaauaacaccuggguuaaucagacauaugugaacauuucuaauaccaacuucgcugccgggcagagcguggucuccgugaaacuugcgggaaauucuagccugugcccuguuuccggcugggcuaucuacagcaaggacaacucuaucagaauuggguccaaaggagauguguuugucauccgggagccguucauuagcuguucuccccucgaaugccgcacauuuuuccugacccagggcgcccuucugaaugacaagcauuccaacggcacaaucaaagauagaagcccuuaucggacccucaugucuugucccauuggggaggugccuucccccuacaacagccgcuuugaauccguugccuggucugcuagcgccugccacgacggaaucaauuggcugacgaucggcauuuccgggccugauaacggagcuguggccguccugaaguauaauggcaucauuaccgacacaaucaagagcuggagaaacaauauucuccggacccaagagucugagugugcgugcgugaacggguccuguuucacagugaugaccgauggaccgagcgacggccaggccucuuacaaaaucuuucgcaucgaaaagggcaaaauugucaagagcguugagaugaaugcucccaacuaucauuacgaagagugcuccuguuacccugauucuagcgagaucacgugcgugugcagagacaauuggcacggguccaaccggcccugggugagcuucaaucagaaccuggaauaucagauuggauacaucuguucuggcauuuuuggggauaauccucgccccaacgacaaaacaggauccugcggcccggucagcucuaauggggccaacggagugaagggcuucuccuuuaaguauggcaacgggguuuggaucggaagaaccaaaagcauuuccucucggaauggcuucgagaugaucugggauccuaacggguggacaggaaccgacaauaacuuugcuaucaagcaagacauugugggcaucaaugaauggagcggguacuccggcucuuucguccagcaucccgagcuuaccggacuggauuguauucgcccuugcuucuggguggaacucaucagaggccggcccaaagagaacacaauuuggacgagcggguccagcaucucuuuuuguggaguuaauuccgacaccgugagcuggucuuggcccgauggcgccgagcugccuuucacaaucgacaaguga

SEQ ID NO: 210703 - RNA, 1410 nt, Artificial Sequence
  derived and/or modified CDS sequence (opt5) from neuraminidase__InfluenzaA__ADF84492
augaaccccaaucagaagaucauuaccaucggcagcgugugcaugacaauugggauggccaaccugauccuccaaauuggaaauaucaucuccauuuggaucucucacagcauucagcugggcaaccaggaccagaucgagacguguaaucaauccgucauuaccuacgaaaacaauacauggguuaaccagaccuaugugaauaucucuaacacaaauuucgcugccgggcagagcguggucuccgugaaacuugcgggaaacucuagccugugcccuguuuccggcugggcuauuuacagcaaggauaauucuaucagaaucggguccaaaggagacguguuugucauucgggagccguucaucagcuguucuccccucgaaugccgcaccuuuuuccugacacagggcgcccuucugaacgauaagcauuccaauggcaccauuaaagacagaagcccuuaucggacgcucaugucuugucccaucggggaggugccuucccccuacaacagccgcuuugaauccguugccuggucugcuagcgccugccacgauggaauuaacuggcugaccaucggcaucuccgggccugacaauggagcuguggccguccugaaguauaacggcauuaucacagauaccauuaagagcuggagaaauaacauccuccggacacaagagucugagugugcgugcgugaauggguccuguuucaccgugaugacggacggaccgagcgauggccaggccucuuacaaaauuuuucgcaucgaaaagggcaaaaucgucaagagcguugagaugaacgcucccaauuaucauuacgaagagugcuccuguuacccugacucuagcgagauuacaugcgugugcagagauaacuggcacggguccaaucggcccugggugagcuucaaccagaaucuggaauaucagaucggauacauuuguucuggcaucuuuggggacaacccucgccccaaugauaaaaccggauccugcggcccggucagcucuaacggggccaauggagugaagggcuucuccuuuaaguauggcaacgggguuuggauuggaagaacaaaaagcaucuccucucggaacggcuucgagaugauuugggacccuaauggguggaccggaaccgacaacaauuuuagcaucaagcaagauaucgugggcauuaacgaaugguccggguacucuggcagcuucguccagcaucccgagcuuacaggacuggacuguauccgcccuugcuucuggguggaacucauuagaggccggcccaaagagaauacgaucuggaccuccgggagcucuauuuccuuuuguggaguuaacagcgauacagugggcuggucuuggcccgacggggcugagcugccuuucaccaucgauaaguga

SEQ ID NO: 210704 - RNA, 1410 nt, Artificial Sequence; identical to SEQ ID NO: 209917
  derived and/or modified CDS sequence (opt5) from neuraminidase__InfluenzaA__ADF85020

SEQ ID NO: 210705 - RNA, 1410 nt, Artificial Sequence; identical to SEQ ID NO: 208810
  derived and/or modified CDS sequence (opt5) from neuraminidase__InfluenzaA__ADF87155

SEQ ID NO: 210706 - RNA, 1410 nt, Artificial Sequence
  derived and/or modified CDS sequence (opt5) from neuraminidase__InfluenzaA__ADF87165
augaaccccaaucagaagaucauuaucauuggcagcgugugcaugaccaucgggauggccaaccugauucuccaaaucggaaauaucauuuccaucuggauuucucacagcauccagcugggcaaccagaaucagauugagacauguaaccaauccgucaucacguacgaaaauaacaccuggguuaaucagacauaugugaacauuucuaauaccaacuucgcugccgggcagagcguggucuccgugaaacuugcgggaaauucuagccugugcccuguuuccggcugggcuaucuacagcaaggacaacucuaucagaauuggguccaaaggagauguguuugucauccgggagccguucauuagcuguucuccccucgaaugccgcacauuuuuccugacccagggcgcccuucugaaugacaagcauuccaacggcacaaucaaagauagaagcccuuaucggacccucaugucuugucccauuggggaggugccuucccccuacaacagccgcuuugaauccguugccuggucugcuagcgccugccacgacggaaucaauuggcugacgaucggcauuuccgggccugauaacggagcuguggccguccugaaguauaauggcaucauuaccgacacaaucaagagcuggagaaacaauauucuccggacccaagagucugagugugcgugcgugaacggguccuguuucacagugaugaccgauggaccgagcgacggccaggccucuuacaaaaucuuucgcaucgauaagggcaaaauugucaagagcguugaaaugaaugcucccaacuaucauuacgaggaaugcuccuguuacccugacucuagcgagaucacgugcgugugcagagauaauuggcacggguccaaccggcccugggugagcuucaaucagaaccuggaguaucagauuggauacaucuguucuggcauuuuuggggacaauccucgccccaacgauaaaacaggauccugcggcccggucagcucuaauggggccaacggagugaagggcuucuccuuuaaguauggcaacgggguuuggaucggaagaaccaaaagcauuuccucucggaauggcuucgaaaugaucugggacccuaacggguggacaggaaccgacaauaacuuugcuaucaagcaagauauugugggcaucaaugaguggagcggguacuccggcucuuucguccagcaucccgaacuuaccggacuggacuguauucgcccuugcuucuggguggagcucaucagaggccggcccaaagaaaacacaauuuggacgagcggguccagcaucucuuuuuguggaguuaauuccgauaccgugggcuggagcuggcccgacggggccgagcugccuuucacaaucgauaaguga

SEQ ID NO: 210707 - RNA, 1410 nt, Artificial Sequence; identical to SEQ ID NO: 210701
  derived and/or modified CDS sequence (opt5) from neuraminidase__InfluenzaA__ADF87175

SEQ ID NO: 210708 - RNA, 1410 nt, Artificial Sequence; identical to SEQ ID NO: 208810
  derived and/or modified CDS sequence (opt5) from neuraminidase__InfluenzaA__ADF87185

SEQ ID NO: 210709 - RNA, 1410 nt, Artificial Sequence; identical to SEQ ID NO: 210701
  derived and/or modified CDS sequence (opt5) from neuraminidase__InfluenzaA__ADF87195

SEQ ID NO: 210710 - RNA, 1410 nt, Artificial Sequence; identical to SEQ ID NO: 208810
  derived and/or modified CDS sequence (opt5) from neuraminidase__InfluenzaA__ADF87205

SEQ ID NO: 210711 - RNA, 1410 nt, Artificial Sequence; identical to SEQ ID NO: 208810
  derived and/or modified CDS sequence (opt5) from neuraminidase__InfluenzaA__ADF87215

SEQ ID NO: 210712 - RNA, 1410 nt, Artificial Sequence
  derived and/or modified CDS sequence (opt5) from neuraminidase__InfluenzaA__ADF87235
augaaccccaaucagaagaucauuaccaucggcagcgugugcaugacaauugggauggccaaccugauccuccaaauuggaaauaucaucuccauuuggaucucucacagcauucagcugggcaaccagaaucagaucgagacguguaaccaauccgucauuaccuacgaaaauaacacauggguuaaucagaccuaugugaacaucucuaauacaaacuucgcugccgggcagagcguggucuccgugaaacuugcgggaaauucuagccugugcccuguuuccggcugggcuauuuacagcaaggacaacucuaucagaaucggguccaaaggagauguguuugucauucgggagccguucaucagcuguucuccccucgaaugccgcaccuuuuuccugacacagggcgcccuucugaaugacaagcauuccaacggcaccauuaaagauagaagcccuuaucggacgcucaugucuugucccaucggggaggugccuucccccuacaacagccgcuuugaauccguugccuggucugcuagcgccugccacgacggaauuaauuggcugaccaucggcaucuccgggccugauaacggagcuguggccguccugaaguauaauggcauuaucacagacaccauuaagagcuggagaaacaauauccuccggacacaagagucugagugugcgugcgugaacggguccuguuucaccgugaugacggauggaccgagcgacggccaggccucuuacaaaauuuuuaagaucgaaaaaggcaagaucgucaaaagcguugagaugaaugcucccaacuaucauuacgaagagugcuccuguuacccugauucuagcgagauuacaugcgugugccgcgacaauuggcacggguccaacagacccugggugagcuucaaucagaaccuggaauaucagaucggauacauuuguucuggcaucuuuggggauaauccucggcccaacgacaagaccggauccugcggcccggucagcucuaauggggccaacggagugaagggcuucuccuuuaaauauggcaacgggguuuggauuggacgcacaaagagcaucuccucuagaaauggcuucgagaugauuugggauccuaacggguggaccggaaccgacaauaacuuuagcaucaaacaagacaucgugggcauuaaugaaugguccggguacucuggcagcuucguccagcaucccgagcuuacaggacuggauuguauccggccuugcuucuggguggaacucauucgcggcagacccaaggagaacacgaucuggaccuccgggagcucuauuuccuuuuguggaguuaauagcgacacagugggcuggucuuggcccgauggggcugagcugccuuucaccaucgacaaauga

SEQ ID NO: 210713 - RNA, 1410 nt, Artificial Sequence; identical to SEQ ID NO: 210701
  derived and/or modified CDS sequence (opt5) from neuraminidase__InfluenzaA__ADF87245

SEQ ID NO: 210714 - RNA, 1410 nt, Artificial Sequence; identical to SEQ ID NO: 210701
  derived and/or modified CDS sequence (opt5) from neuraminidase__InfluenzaA__ADF87265

SEQ ID NO: 210715 - RNA, 1410 nt, Artificial Sequence
  derived and/or modified CDS sequence (opt5) from neuraminidase__InfluenzaA__ADF87285
augaaccccaaucagaagaucauuaccaucggcagcgugugcauguccauugggauggccaaccugauccuccaaauuggaaauaucaucucuauuuggaucagccacuccauucagcugggcaacaaaaaucagaucgagacauguaaccagucugucauuacguacgaaaauaacaccuggguuaaucaaacauaugugaacaucagcaauaccaacuucgcugccgggcaguccguggucucugugaaacuugcgggaaauagcucccugugcccuguuagcggcugggcuauuuacucuaaggacaacuccaucagaaucgggagcaagggagauguguuugucauucgggagccguucaucucuuguagcccccucgaaugccgcacauuuuuccugacccagggcgcccuucugaaugacaaacauuccaacggcacaauuaaggauagaucuccuuaucggacccucauguccugucccaucggggaggugccuagccccuacaacucccgcuuugaaucuguugccuggagcgcuuccgccugccacgacggaauuaauuggcugacgaucggcaucagcgggccugauaacggagcuguggccguccugaaguauaauggcauuaucaccgacacaauuaaaucuuggagaaacaauauccuccggacccaggaguccgagugugcgugcgugaacgggagcuguuucacagugaugaccgauggaccgucugacggccaagccagcuacaagauuuuucgcaucgaaaaaggcaagaucgucaaauccguugagaugaaugcucccaacuaucauuacgaagagugcucuuguuacccugauagcuccgagauuacgugcgugugcagagacaauuggcacgggagcaaccggcccugggugucuuucaaucagaaccuggaauaucagaucggauacauuuguuccggcaucuuuggggauaauccucgccccaacgacaagaagggaagcugcggcccggucucuuccaauggggccaacggagugaaaggcuucagcuuuaaguauggcaacgggguuuggauuggaagaacaaaauccaucucuagccggaauggcuucgagaugauuugggauccuaacggguggaccggaacagacaauaacuuuuccaucaagcaggacaucgugggcaugaaugaauggucuggguacagcggcuccuucguccaacaucccgagcuuaccggacuggauuguauucgcccuugcuucuggguggaacucaucagaggccggcccaaagagaacaccauuuggacaagcgggucuuccaucagcuuuuguggaguuaauucugacacggugggcugguccuggcccgauggggcugagcugccuuucaccauugacaaguga

SEQ ID NO: 210716 - RNA, 1410 nt, Artificial Sequence; identical to SEQ ID NO: 208810
  derived and/or modified CDS sequence (opt5) from neuraminidase__InfluenzaA__ADF87295

SEQ ID NO: 210717 - RNA, 1410 nt, Artificial Sequence; identical to SEQ ID NO: 208810
  derived and/or modified CDS sequence (opt5) from neuraminidase__InfluenzaA__ADF87305

SEQ ID NO: 210718 - RNA, 1410 nt, Artificial Sequence; identical to SEQ ID NO: 208810
  derived and/or modified CDS sequence (opt5) from neuraminidase__InfluenzaA__ADF87334

SEQ ID NO: 210719 - RNA, 1410 nt, Artificial Sequence; identical to SEQ ID NO: 208810
  derived and/or modified CDS sequence (opt5) from neuraminidase__InfluenzaA__ADF87344

SEQ ID NO: 210720 - RNA, 1410 nt, Artificial Sequence
  derived and/or modified CDS sequence (opt5) from neuraminidase__InfluenzaA__ADF87354
augaaccccaaucagaagaucauuaccaucggcagcgugugcaugacaauugggauggccaaccugauccuccaaauuggaaauaucaucuccauuuggaucucucacagcauucagcugggcaaccagaaucagaucgagacguguaaccaauccgucauuaccuacgaaaauaacacauggguuaaucagaccuaugugaacaucucuaauacaaacuucgcugccgggcagagcguggucuccgugaaacuugcgggaaauucuagccugugcccuguuuccggcugggcuauuuacagcaaggacaacucuaucagaaucggguccaaaggagauguguuugucauucgggagccguucaucagcuguucuccccucgaaugccgcaccuuuuuccugacacagggcgcccuucugaaugacaagcauuccaacggcaccauuaaagauagaagcccuuaucggacgcucaugucuugucccaucggggaggugccuucccccuacaacagccgcuuugaauccguugccuggucugcuagcgccugccacgacggaauuaauuggcugaccaucggcaucuccgggccugauaacggagcuguggccguccugaaguauaauggcauuaucacagacaccauuaagagcuggagaaacaauauccuccggacacaagagucugagugugcgugcgugaacggguccuguuucaccgugaugacggauggaccgagcgacggccaggccucuuacaaaauuuuucgcaucgaaaagggcaaaaucgucaagagcguugagaugaaugcucccaacuaucauuacgaagagugcuccuguuacccugauucuagcgagauuacaugcgugugcagagacaauuggcacggguccaaccggcccugggugagcuucaaucagaaccuggaauaucagaucggauacauuuguucuggcaucuuuggggauaauccucgccccaacgacaaaaccggauccugcggcccggucagcucuaauggggccaacggagugaagggcuucuccuuuaaguauggcaacgggguuuggauuggaagaacaaaaagcaucuccucucggaauggcuucgagaugauuugggauccuaacggguggaccggaaccgacaauuacuuuagcaucaagcaagacaucgugggcauuaacgaaugguccggguauucuggcagcuucguccagcaucccgagcuuacaggacuggauuguauccgcccuugcuucuggguggaacucauuagaggccggcccaaagagaauacgaucuggaccuccgggagcucuauuuccuuuuguggaguuaacagcgacacagugggcuggucuuggcccgauggggcugagcugccuuucaccaucgacaaguga

SEQ ID NO: 210721 - RNA, 1410 nt, Artificial Sequence; identical to SEQ ID NO: 209393
  derived and/or modified CDS sequence (opt5) from neuraminidase__InfluenzaA__ADF87364

SEQ ID NO: 210722 - RNA, 1410 nt, Artificial Sequence; identical to SEQ ID NO: 208810
  derived and/or modified CDS sequence (opt5) from neuraminidase__InfluenzaA__ADF87374

SEQ ID NO: 210723 - RNA, 1410 nt, Artificial Sequence
  derived and/or modified CDS sequence (opt5) from neuraminidase__InfluenzaA__ADF87384
augaaccccaaucagaagaucauuaccaucggcagcgugugcaugacaauugggauggccaaccugauccuccaaauuggaaauaucaucuccauuuggaucucucacagcauucagcugggcaaccagaaucagaucgagacguguaaccaauccauuaucaccuacgaaaauaacacaugggucaaucagaccuauguuaacauuucuaauacaaacuucgcugccgggcagagcgugguguccgucaaacuugcgggaaauucuagccugugcccuguguccggcugggcuaucuacagcaaggacaacucuaucagaauuggguccaaaggagauguuuuugugauccgggagccguucauuagcuguucuccccucgaaugccgcaccuuuuuccugacacagggcgcccuucugaaugacaagcauuccaacggcaccaucaaagauagaagcccuuaucggacgcucaugucuugucccauuggggaggucccuucccccuacaacagccgcuuugaauccguggccuggucugcuagcgccugccacgacggaaucaauuggcugaccaucggcauuuccgggccugauaacggagcuguugccgugcugaaguauaauggcaucauuacagacaccaucaagagcuggagaaacaauauucuccggacacaagagucugagugugcgugcgucaacggguccuguuucaccgugaugacggauggaccgagcgacggccaggccucuuacaaaaucuuucgcaucgaaaagggcaaaauugucaagagcguggagaugaaugcucccaacuaucauuacgaagagugcuccuguuacccugauucuagcgagaucacaugcguuugcagagacaauuggcacggguccaaccggcccugggugagcuucaaucagaaccuggaauaucagauuggauacaucuguucuggcauuuuuggggauaauccucgccccaacgacaaaaccggauccugcggcccggugagcucuaauggggccaacggagucaagggcuucuccuuuaaguauggcaacgggguguggaucggaagaacaaaaagcauuuccucucggaauggcuucgagaugaucugggauccuaacggguggaccggaaccgacaauaacuuuagcaucaagcaagacauuguuggcaucaaugaaugguccggguacucuggcagcuucgugcagcaucccgagcuuacaggacuggauuguauucgcccuugcuucugggucgaacucaucagaggccggcccaaagagaacacgauuuggaccuccgggagcucuaucuccuuuuguggagugaauagcgacacaguuggcuggucuuggcccgauggggcugagcugccuuucaccaucgacaaguga

SEQ ID NO: 210724 - RNA, 1410 nt, Artificial Sequence; identical to SEQ ID NO: 208810
  derived and/or modified CDS sequence (opt5) from neuraminidase__InfluenzaA__ADF97251

SEQ ID NO: 210725 - RNA, 1410 nt, Artificial Sequence; identical to SEQ ID NO: 210053
  derived and/or modified CDS sequence (opt5) from neuraminidase__InfluenzaA__ADF97252

SEQ ID NO: 210726 - RNA, 1410 nt, Artificial Sequence; identical to SEQ ID NO: 208810
  derived and/or modified CDS sequence (opt5) from neuraminidase__InfluenzaA__ADF97253

SEQ ID NO: 210727 - RNA, 1410 nt, Artificial Sequence; identical to SEQ ID NO: 208810
  derived and/or modified CDS sequence (opt5) from neuraminidase__InfluenzaA__ADF97254

SEQ ID NO: 210728 - RNA, 1410 nt, Artificial Sequence
  derived and/or modified CDS sequence (opt5) from neuraminidase__InfluenzaA__ADF97255
augaaccccaaucagaagaucauuaccaucggcagcgugugcaugacaauugggauggccaaccugauccuccaaauuggaaauaucaucuccauuuggaucucucacagcauucagcugggcaaccagaaucagaucgagacguguaaccaauccgucauuaccuacgaaaauaacacauggguuaaucagaccuaugugaacaucucuaauacaaacuucgcugccgggcagagcguggucuccgugaaacuugcgggaaauucuagccugugcccuguuuccggcugggcuauuuacagcaaggacaacucuaucagaaucggguccaaaggagauguguuugucauucgggagccguucaucagcuguucuccccucgaaugccgcaccuuuuuccugacacagggcgcccuucugaaugacaagcauuccaacggcaccauuaaagauagaagcccuuaucggacgcucaugucuugucccaucggggaggugccuucccccuacaacagccgcuuugaauccguugccuggucugcuagcgccugccacgacggaauuaauuggcugaccaucggcaucuccgggccugauaacggagcuguggccguccugaaguauaauggcauuaucacagacaccauuaagagcuggagaaacaauauccuccggacacaagagucugagugugcgugcgugaacggguccuguuucaccgugaugacggauggaccgagcgacggccaggccucuuacaaaauuuuucgcaucgaaaagggcaaaaucgucaagagcguugagaugaaugcucccaacuaucauuacgaagagugcuccuguuacccugauucuagcgagauuacaugcgugugcagagacaauuggcacggguccaaccggcccugggugagcuucaaucagaaccuggaauaucagaucggauacauuuguucuggcaucuuuggggauaauccucgccccaacgacaaaaccggauccugcggcccggucagcucuaauggggccaacggagugaagggcuucuccuuuaaguauggcaacgggguuuggauuggaagaacaaaaagcaucuccucucggaauggcuucgagaugauuugggauccuaacggguggaccggaaccgacaaucauuuuagcaucaagcaagacaucgugggcauuaacgaaugguccggguacucuggcagcuucguccagcaccccgagcuuacaggacuggauuguauccgcccuugcuucuggguggaacucauuagaggccggcccaaagagaauacgaucuggaccuccgggagcucuauuuccuuuuguggaguuaacagcgacacagugggcuggucuuggcccgauggggcugagcugccuuucaccaucgacaaguga

SEQ ID NO: 210729 - RNA, 1410 nt, Artificial Sequence; identical to SEQ ID NO: 208810
  derived and/or modified CDS sequence (opt5) from neuraminidase__InfluenzaA__ADF97256

SEQ ID NO: 210730 - RNA, 1410 nt, Artificial Sequence; identical to SEQ ID NO: 208810
  derived and/or modified CDS sequence (opt5) from neuraminidase__InfluenzaA__ADF97257

SEQ ID NO: 210731 - RNA, 1410 nt, Artificial Sequence; identical to SEQ ID NO: 209164
  derived and/or modified CDS sequence (opt5) from neuraminidase__InfluenzaA__ADF97837

SEQ ID NO: 210732 - RNA, 1410 nt, Artificial Sequence; identical to SEQ ID NO: 208810
  derived and/or modified CDS sequence (opt5) from neuraminidase__InfluenzaA__ADG08120

SEQ ID NO: 210733 - RNA, 1350 nt, Artificial Sequence
  derived and/or modified CDS sequence (opt5) from neuraminidase__InfluenzaA__ADG21408
augaaccccaaucagaagaucauuaccaucggcagcauuugcauggugaucgggauugucucccugaugcuccaaaucggaaacaugaucucuauuuggguuagccacuccauccagacaggcaaucagugucaggacgagccuauuucuaacacgaaauuccugaccgaaaaggccguggcuagcgugacacuugccgggaaucugucccucugcccggucucuggaugggcgguguacagcaaagauaacuccaucagaauuggcagccgcggggacguuuuugugauccgggagcccuucauuucuuguucccaucuggaaugcagaaccuuuuuccuuacacaaggagcucugcucaaugauaagcacagcaacggcaccgucaaagaccggucuccucaucgcacacugauguccugucccgugggcgaggccccuagccccuauaauucuagauuugaauccguugccuggagcgcuuccgccugccacgaugggaccucuuggcugacgaucggaaucagcggcccugacaacggggcuguggccguccucaaguacaauggaauuaucaccgauacaauuaaguccuggcggaacaauaucaugcgcacccaggagagcgagugugcgugcgugaacggcucuuguuucacagugaugaccgacgggccguccagcggacaggccucuuauaaaauuuuuaagauggaaaaaggcaaggucguuaaaagcguggagcuggaugcucccaauuaccauuaugaagagugcuccuguuacccugacgccggcgagaucacgugcgugugcagagauaacuggcacgggucuaaccggcccugggucagcuucaaucagaaccuugaauaucaaaucggauacauuuguuccggcguguuuggggacaauccucgccccaacgauggaacaggcagcugcgggccgguuuucccuaauggagcuuacggcgugaagggcuuuucuuucaaguaugggaacggagucuggaucggcagaaccaaauccacaaauagccggucuggguuugagaugauuugggaccccaacggauggaccggcaccgacuccagcuucuccgugaagcaggauaucguugccauuacagacuggucuggguacagcggcuccuucgugcagcacccugaacugacgggacucgauuguauccgccccugcuuuugggucgagcugaucagaggccggcccaaagaaucuaccauuuggacaagcggguccagcaucucuuucuguggagugaauggcgacaccgucuccuggagcuggccugauggggcggagcuuccguuuacaauugacaaguga

SEQ ID NO: 210734 - RNA, 1350 nt, Artificial Sequence; identical to SEQ ID NO: 209095
  derived and/or modified CDS sequence (opt5) from neuraminidase__InfluenzaA__ADG21409

SEQ ID NO: 210735 - RNA, 1350 nt, Artificial Sequence; identical to SEQ ID NO: 209095
  derived and/or modified CDS sequence (opt5) from neuraminidase__InfluenzaA__ADG21415

SEQ ID NO: 210736 - RNA, 1350 nt, Artificial Sequence; identical to SEQ ID NO: 209095
  derived and/or modified CDS sequence (opt5) from neuraminidase__InfluenzaA__ADG21417

SEQ ID NO: 210737 - RNA, 1350 nt, Artificial Sequence
  derived and/or modified CDS sequence (opt5) from neuraminidase__InfluenzaA__ADG21419
augaaccccaaucagaagaucauuaccaucggcagcauuugcauggugaucgggauugucucccugaugcuccaaaucggaaacaugaucucuauuuggguuagccacuccauccagacaggcaaucagugucaggacgagucuauuagcaacacgaaauuccugaccgaaaaggccguggcuuccgugacacuugccggaaauucuagccugugcccuaucuccgggugggcggucuacagcaaagauaacucuauuagaaucggcucccgcggggacguguuuguuauucgggagccguucaucagcuguucucaucucgaaugcagaaccuuuuuccugacacaaggagcccuucugaaugauaagcacuccaacggcaccgugaaagaccggagcccccaucgcacacucaugucuuguccugucggcgaggcucccuccccuuauaauagcagauuugaauccguggccuggucugcuagcgccugccacgaugggaccuccuggcugacgaucggaauuagcggccccgacaacggggcuguugccgugcugaaguacaauggaaucauuaccgauacaaucaagucuuggcggaacaauauuaugcgcacccaggaguccgagugugcgugcgucaacggcagcuguuucacagugaugaccgacgggccuucuagcggacaggccuccuauaaaaucuuuaagauggaaaaaggcaagguggucaaaucuguugagcucgaugcuccgaauuaccauuaugaagagugcagcuguuaccccgacgccggcgagaucacgugcgugugcagagauaacuggcacggguccaaccggccuugggugagcuucaaucagaaccuggaauaucaaauuggauacaucuguucuggcgucuuuggggacaauccccgcccuaacgauggaacaggcuccugcgggcccguguucccgaauggagcuuacggcguuaagggcuuuagcuucaaguaugggaacggaguguggauuggcagaaccaaaucuacaaauucccggagcggguuugagaugaucugggacccuaacggauggaccggcaccgacuccucuuucagcgucaagcaggauauuguggccaucacagacugguccggguacucuggcagcuucguucagcaccccgaacuuacgggacuggauuguauccgcccuugcuuuuggguggagcucauuagaggccggcccaaagaauccaccaucuggacaagcgggucuuccauuagcuucuguggagucaauggcgacaccgugucuugguccuggcccgauggggcggagcugccuuuuacaaucgacaaguga

SEQ ID NO: 210738 - RNA, 1350 nt, Artificial Sequence
  derived and/or modified CDS sequence (opt5) from neuraminidase__InfluenzaA__ADG21423
augaaccccaaucagaagaucauuaccaucggcagcauuugcauggugaucgggauugucucccugaugcuccaaaucggaaacaugaucucuauuuggguuagccacuccauccagacaggcaaucagugucaggacgagccuauuucuaacacgaaauuccugaccgaaaaggccguggcuagcgugacacuugccggaaauuccucucugugcccgaucagcgggugggcggucuacuccaaagauaacagcauuagaaucggcucucgcggggacguguuuguuauucgggagcccuucaucuccuguagccaucucgaaugcagaaccuuuuuccugacacaaggagcccuucugaaugauaagcacucuaacggcaccgugaaagaccgguccccucaucgcacacucaugagcugucccgucggcgaggcuccuucucccuauaauuccagauuugaaagcguggccugguccgcuucugccugccacgaugggaccagcuggcugacgaucggaauuuccggcccugacaacggggcuguugccgugcugaaguacaauggaaucauuaccgauacaaucaagagcuggcggaacaauauuaugcgcacccaggagucugagugugcgugcgucaacggcuccuguuucacagugaugaccgacgggccgagcucuggacaggccagcuauaaaaucuuuaagauggaaaaaggcaagguggucaaauccguugagcucgaugcucccaauuaccauuaugaagagugcucuuguuacccugacgccggcgagaucacgugcgugugcagagauagcuggcacggguccaaccggcccugggugagcuucaaccagaaucuggaauaucaaauuggauacaucuguucuggcgucuuuggggacaacccucgccccaaugauggaacaggcuccugcgggccgguguucccuaacggagcuuacggcguuaagggcuuuagcuucaaguaugggaauggaguguggauuggcagaaccaaaucuacaaacucccggagcggguuugagaugaucugggaccccaauggauggaccggcaccgacuccucuuucagcgucaagcaggauauuguggccaucacagacugguccggguacucuggcagcuucguucagcacccugaacuuacgggacuggauuguauccgccccugcuuuuggguggagcucauuagaggccggcccaaagaauccaccaucuggacaagcgggucuuccauuagcuucuguggagucaacggcgacaccgugucuugguccuggccugauggggcggagcugccguuuacaaucgacaaguga

SEQ ID NO: 210739 - RNA, 1350 nt, Artificial Sequence
  derived and/or modified CDS sequence (opt5) from neuraminidase__InfluenzaA__ADG21424
augaaccccaaucagaagaucauuaccaucggcagcauuugcauggugaucgggauugccucccugaugcuccaaaucggaaacaugaucucuauuugggucagccacuccauccagacaggcaaucagugucaggacgagucuauuagcaacacgaaauuccugaccgaaaaggcuguugccuccgugacacuugcgggaaauucuagccugugcccuaucuccgggugggcuguguacagcaaagauaacucuauuagaaucggcuccaagggggacgucuuugugauucgggagccguucaucagcuguucucaucucgaaugccgcaccuuuuuccugacacaaggagcccuucugaaugauaaacacuccaacggcaccguuaaggacagaagcccccaucggacacucaugucuuguccugugggcgaggcccccuccccuuauaauagccgcuuugaauccgucgcuuggucugccagcgcuugccacgaugggaccuccuggcugacgaucggaauuagcggccccgacaacggggccguggcgguucugaaguacaauggaaucauuaccgauacaaucaaaucuuggagaaacaauauuaugcggacccaggaguccgagugugccugcgugaacggcagcuguuucacagucaugaccgacgggccuucuagcggacaggcuuccuauaagaucuuuaaaauggaaaagggcaaaguggugaagucugucgagcucgaugccccgaauuaccauuaugaagagugcagcuguuaccccgacgcuggcgagaucacgugcguuugccgcgauaacuggcacggguccaacagaccuugggugagcuucaaucagaaccuggaauaucaaauuggauacaucuguucuggcguguuuggggacaauccccggccuaacgauggaacaggcuccugcgggcccgucuucccgaauggagccuacggcgugaagggcuuuagcuucaaauaugggaacggaguuuggauuggccgcaccaagucuacaaauuccagaagcggguuugagaugaucugggacccuaacggauggaccggcaccgacuccucuuucagcgugaaacaggauauugucgcgaucacagacugguccggguacucuggcagcuucgugcagcaccccgaacuuacgggacuggauuguauccggccuugcuuuuggguugagcucauucgcggcagacccaaggaauccaccaucuggacaagcgggucuuccauuagcuucuguggagugaauggcgacaccgucucuugguccuggcccgauggggccgagcugccuuuuacaaucgacaaauga

SEQ ID NO: 210740 - RNA, 1350 nt, Artificial Sequence
  derived and/or modified CDS sequence (opt5) from neuraminidase__InfluenzaA__ADG21426
augaaccccaaucagaagaucauuaccaucggcagcauuugcauggugaucgggauugucucccugaugcuccaaaucggaaacaugaucucuauuuggguuagccacuccauccagacagagaaucagugucaggacgaaccuauuucuaacacgaaauuccugaccgagaaggccguggcuagcgugacacuugccggcaauuccucucugugcccgaucagcgggugggcggucuacuccaaagauaacagcauuagaaucggaucucggggcgacguguuuguuauucgcgaacccuucaucuccuguagccaucucgagugcagaaccuuuuuccugacacaaggggcccuucugaaugauaagcacucuaacggaaccgugaaagaccgguccccucaucgcacacucaugagcugucccgucggcgaagcuccuucucccuauaauuccagauuugagagcguggccugguccgcuucugccugccacgauggcaccagcuggcugacgaucgggauuuccggaccugacaacggcgcuguugccgugcugaaguacaaugggaucauuaccgauacaaucaagagcuggcggaacaauauuaugcgcacccaggagucugaaugugcgugcgucaacggauccuguuucacagugaugaccgacggcccgagcucugggcaggccagcuauaaaaucuuuaagauggagaaaggaaagguggucaaauccguugaacucgaugcucccaauuaccauuaugaggagugcucuuguuacccugacgccggcgaaaucacgugcgugugcagagauaacuggcacggcagcaaccggcccuggguguccuucaaucagaaccuggaguaucaaauuggguacaucuguagcggagucuuuggcgacaauccucgccccaacgaugggacaggaucuugcggcccgguguucccuaauggggcuuacggaguuaagggcuuuuccuucaaguauggcaacgggguguggauuggaagaaccaaaagcacaaauucucgguccggcuuugaaaugaucugggaccccaacggguggaccggaaccgacagcuccuucucuguccgccaggauauuguggccaucacagacuggagcggcuacuccgggucuuucguucagcacccugagcuuacgggccuggauuguaucagacccugcuuuuggguggaacucauucggggacgccccaaggagagcaccaucuggacauccggcagcucuauuuccuucuguggggucaauggagacaccgugagcuggucuuggccugauggcgcggagcugccguuuacaaucgacaaauga

SEQ ID NO: 210741 - RNA, 1350 nt, Artificial Sequence
  derived and/or modified CDS sequence (opt5) from neuraminidase__InfluenzaA__ADG21428
augaaccccaaucagaagaucauuaccaucggcagcauuugcauggugaucgggauugucucccugaugcuccaaaucggaaacaugaucucuauuuggguuagccacccuauccagacaggcaaucagugucaggacaaaccgauuuccaacacgaaguuccugaccgagaaagccguggcuucugugacacuugccgggaauagcucccugugccccaucucuggaugggcggucuacagcaaggauaacuccauuagaaucggcagccgcggggacguguuuguuauucgggaaccuuucaucucuuguucccaucucgagugcagaaccuuuuuccugacacaaggagcccuucugaaugauaaacacagcaacggcaccgugaaggaccggucuccccaucgcacacucauguccuguccugucggcgaagcucccagcccuuauaauucuagauuugaguccguggccuggagcgcuuccgccugccacgaugggaccucuuggcugacgaucggaauuagcggcccggacaacggggcuguugccgugcugaaguacaauggaaucauuaccgauacaaucaaauccuggcggaacagcauuaugcgcacccaggaaucugagugugcgugcgucaauggcuccuguuucacagugaugaccgacgggcccagcucuggacaggccagcuauaagaucuuuaaaauggagaagggcaaaguggucaaguccguugaacucgaugcuccuaacuaccauuaugaggaaugcucuuguuaccccgacgccggcgagaucacgugcgugugcagagauaauuggcacgggagcaaccggccuuggguguccuucaaccagaaucuggaguaucaaauuggauacaucuguagcggcgucuuuggggacaacccccgcccgaaugauggaacaggcucuugcgggccuguguuccccaacggagcuuacggcguuaagggcuuuuccuucaaauaugggaauggaguguggauuggcagaaccaagagcacaaacucucgguccggguuugaaaugaucugggacccuaauggauggaccggcaccgacagcuccuucucugucaaacaggauauuguggccaucacagacuggagcggguacuccggcucuuucguucagcaccccgagcuuacgggacuggauuguauccgccccugcuuuuggguggaacucauuagaggccggccuaaggagagcaccaucuggacauccgggagcucuauuuccuucuguggagucaacggcgacaccgugagcuggucuuggccggauggggcggaacugcccuuuacaaucgacaaauga

SEQ ID NO: 210742 - RNA, 1350 nt, Artificial Sequence; identical to SEQ ID NO: 209095
  derived and/or modified CDS sequence (opt5) from neuraminidase__InfluenzaA__ADG21430

SEQ ID NO: 210743 - RNA, 1350 nt, Artificial Sequence
  derived and/or modified CDS sequence (opt5) from neuraminidase__InfluenzaA__ADG21432
augaaccccaaucagaagaucauuaccaucggcagcauuugcauggugaucgggauugucucccugaugcuccaaaucggaaacaugaucucuauuuggguuagccacuccauccagacaggcaaucagugucaggacgagccuauuucuaacacgaaauuccugaccgaaaaggccguggcuagcgugacacuugccggaaauuccucucugugcccgaucagcgggugggcggucuacuccaaagauaacagcauuagaaucggcucucgcggggacguguuuguuauucgggagcccuucaucuccuguagccaucucgaaugcagaaccuuuuuccugacacaaggagcccuucugaaugauaagcacucuaacggcaccgugaaagaccgguccccucaucgcacacucaugagcugucccgucggcgaggcuccuucucccuauaauuccagauuugaaagcguggccugguccgcuucugccugccacgaugggaccagcuggcugacgaucggaauuuccggcccugacaacggggcuguugccgugcugaaguacaauggaaucauuaccgauacaaucaagagcuggcggaacaauauuaugcgcacccaggagucugagugugcgugcgucaacggcuccuguuucacagugaugaccgacgggccgagcucuggacaggccagcuauaaaaucuuuaagauggaaaaaggcaagguggucaaauccguugagcucgaugcucccaauuaccauuaugaagagugcucuuguuacccugacgccggcgagaucacgugcgugugcagagauaacuggcacgggagcaaccggcccuggguguccuucaaucagaaccuggaauaucaaauuggauacaucuguagcggcgucuuuggggacaauccucgccccaacgauggaacaggcucuugcgggccgguguucccuaauggagcuuacggcguuaagggcuuuuccuucagauaugggaacggaguguggauuggccggaccaagagcacaaauucucgcuccggguuugagaugaucugggaccccaacggauggaccggcaccgacagcuccuucucugucaaacaggauauuguggccaucacagacuggagcggguacuccggcucuuucguucagcacccugaacuuacgggacuggauuguaucagacccugcuuuuggguggagcucauucggggccgccccaaggaaagcaccaucuggacauccgggagcucuauuuccuucuguggagucaauggcgacaccgugagcuggucuuggccugauggggcggagcugccguuuacaaucgacaaauga

SEQ ID NO: 210744 - RNA, 1350 nt, Artificial Sequence
  derived and/or modified CDS sequence (opt5) from neuraminidase__InfluenzaA__ADG21438
augaaccccaaucagaagaucauuaccaucggcagcauuugcauggugaucgggauugucucccugaugcuccaaaucggaaacaugaucucuauuuggaucagccacuccauucagacaggcaaucagugucaggacgagccuaucucuaacacgaaauuccugaccgaaaaggccguugcuagcgugacacuugccggaaauuccucucugugcccgauuagcgggugggcgguguacuccaaagauaacagcaucagaauuggcucucgcggggacgucuuugugauccgggagcccuucaucuccuguagccaucucgaaugcagaaccuuuuuccugacacaaggagcccuucugaaugauaagcacucuaacggcaccguuaaagaccgguccccucaucgcacacucaugagcugucccgugggcgaggcuccuucucccuauaauuccagauuugaaagcgucgccugguccgcuucugccugccacgaugggaccagcuggcugacgauuggaaucuccggcccugacaacggggcuguggccguucugaaguacaauggaauuaucaccgauacaauuaagagcuggcggaacaauaucaugcgcacccaggagucugagugugcgugcgugaacggcuccuguuucacagucaugaccgacgggccgagcucuggacaggccagcuauaaaaucuuuaagauggaaaaaggcaagguggugaaauccgucgagcucgaugcucccaauuaccauuaugaagagugcucuuguuacccugacgccggcgagauuacgugcguuugcagagauaacuggcacgggagcaaccggcccuggguguccuucaaucagaaccuggaauaucaaaucggauacauuuguagcggcguguuuggggacaauccucgccccaacgauggaacaggcucuugcgggccggucuucccuaauggagcuuacggcgugaagggcuuuuccuucaaguaugggagcggaguuuggaucggcagaaccaaaucuacaaacucccggagcggguuugagaugauuugggaccccaauggauggaccggcaccgacuccucuuucagcgugaagcaggauaucgucgccaucacagacugguccggguacucuggcagcuucgugcagcacccugaacuuacgggacuggauuguauucgccccugcuuuuggguugagcucaucagaggccggcccaaagaauccaccauuuggacaagcgggucuuccaucagcuucuguggagugaacggcgacaccgucucuugguccuggccugauggggcggagcugccguuuacaauugacaaguga

SEQ ID NO: 210745 - RNA, 1350 nt, Artificial Sequence
  derived and/or modified CDS sequence (opt5) from neuraminidase__InfluenzaA__ADG21440
augaaccccaaucagaagaucauuaccaucggcagcauuugcauggugaucgggauugccucccugaugcuccaaaucggaaacaugaucucuauuugggucagccacuccauccagacaggcaaucagugucaggacgagucuauuagcaacacgaaauuccugaccgaaaaggcuguugccuccgugacacuugcgggaaauucuagccugugcccuaucuccgggugggcuguguacagcaaagauaacucuauuagaaucggcucccgcggggacgucuuugugauucgggagccguucaucagcuguucucaucucgaaugcagaaccuuuuuccugacacaaggagcccuucugaaugauaagcacuccaacggcaccguuaaagaccggagcccccaucgcacacucaugucuuguccugugggcgaggcccccuccccuuauaauagcagauuugaauccgucgcuuggucugccagcgcuugccacgaugggaccuccuggcugacgaucggaauuagcggccccgacaacggggccguggcgguucugaaguacaauggaaucauuaccgauacaaucaagucuuggcggaacaauauuaugcgcacccaggaguccgagugugccugcgugaacggcagcuguuucacagucaugaccgacgggccuucuagcggacaggcuuccuauaaaaucuuuaagauggaaaaaggcaagguggugaaaucugucgagcucgaugccccgaauuaccauuaugaagagugcagcuguuaccccgacgcuggcgagaucacgugcguuugcagagauaacuggcacggguccaaccggccuugggugagcuucaaucagaaccuggaauaucaaauuggauacaucuguucuggcguguuuggggacaauccccgcccuaacgauggaacaggcuccugcgggcccgucuucccgaauggagccuacggcgugaagggcuuuagcuucaaguaugggaacggaguuuggauuggcagaaccaaaucuacaaauucccggagcggguuugagaugaucugggacccuaacggauggaccggcaccgacuccucuuucagcgugaagcaggauauugucgcgaucacagacugguccggguacucuggcagcuucgugcagcaccccgaacuuacgggacuggauuguauccgcccuugcuuuuggguugagcucauuagaggccggcccaaagaauccaccaucuggacaagcgggucuuccauuagcuucuguggagugaauggcgacaccgucucuugguccuggcccgauggggccgagcugccuuuuacaaucgacaaguga

SEQ ID NO: 210746 - RNA, 1350 nt, Artificial Sequence; identical to SEQ ID NO: 209095
  derived and/or modified CDS sequence (opt5) from neuraminidase__InfluenzaA__ADG21442

SEQ ID NO: 210747 - RNA, 1350 nt, Artificial Sequence
  derived and/or modified CDS sequence (opt5) from neuraminidase__InfluenzaA__ADG21444
augaaccccaaucagaagaucauuaccaucggcagcauuugcauggugaucgggauugucucccugaugcuccaaaucggaaacaugaucucuauuuggguuagccacuccauccagacaggcaaucagugucaggacgagucuauuagcaacacgaaauuccugaccgaaaaggccgugacauccgugacccuugcuggaaauucuagccugugcccuaucuccgggugggccgucuacagcaaagauaacucuauuagaaucggcucccgcggggacguguuuguuauucgggagccguucaucagcuguucucaucucgaaugcagaacauuuuuccugacccaaggagcgcuucugaaugauaagcacuccaacggcacagugaaagaccggagcccccaucgcacccucaugucuuguccugucggcgaggcucccuccccuuauaauagcagauuugaauccguggccuggucugccagcgcuugccacgaugggacguccuggcugaccaucggaauuagcggccccgacaacggggccguugcugugcugaaguacaauggaaucauuacagauaccaucaagucuuggcggaacaauauuaugcgcacacaggaguccgagugugccugcgucaacggcagcuguuucaccgugaugacggacgggccuucuagcggacaggcguccuauaaaaucuuuaagauggaaaaaggcaagguggucaaaucuguugagcucgaugccccgaauuaccauuaugaagagugcagcuguuaccccgacgcuggcgagaucacaugcgugugcagagauaacuggcacggguccaaccggccuuggauuagcuucaaucagaaccuggaauaucaaaucggauacauuuguucuggcguguuuggggacaauccccgcccuaacgauggaaccggcuccugcgggcccgucuucccgaauggagccuacggcgugaagggcuuuagcuucaaguaugggaacggaguuuggaucggcagaacaaaaucuaccaauucccggagcggguuugagaugauuugggacccuaacggauggaccggcacagacuccucuuucagcgugaagcaggauaucgucgcuaucacggacugguccggguacucuggcagcuucgugcagcaccccgaacuuaccggacuggauuguauucgcccuugcuuuuggguugagcucaucagaggccggcccaaagaauccacaauuuggaccagcgggucuuccaucagcuucuguggagugaauggcgacacagucucuugguccuggcccgauggggccgagcugccuuuuaccauugacaaguga

SEQ ID NO: 210748 - RNA, 1350 nt, Artificial Sequence; identical to SEQ ID NO: 209095
  derived and/or modified CDS sequence (opt5) from neuraminidase__InfluenzaA__ADG21446

SEQ ID NO: 210749 - RNA, 1350 nt, Artificial Sequence
  derived and/or modified CDS sequence (opt5) from neuraminidase__InfluenzaA__ADG21448
augaaccccaaucagaagaucauuaccaucggcagcauuugcauggugaucgggauugucucccugaugcuccaaaucggaaacaugaucucuauuuggguuagccacuccauccagacaggcaaucagugucaggacgagccuauuucuaacacgaaauuccugaccgaaaaggccguggcuagcgugacacuugccggaaauuccucucugugcccgaucagcgggugggcggucuacuccaaagauaacagcauuagaaucggcucucgcggggacguguuuguuauucgggagcccuucaucuccuguagccaucucgaaugcagaaccuuuuuccugacacaaggagcccuucugaaugauaagcacucuaacggcaccgugaaagaccgguccccucaucgcacacucaugagcugucccgucggcgaggcuccuucucccuauaauuccagauuugaaagcguggccugguccgcuucugccugccacgaugggaccagcuggcugacgaucggaauuuccggcccugacaacggggcuguugccgugcugaaguacaauggaaucauuaccgauacaaucaagagcuggcggaacaauauuaugcgcacccaggagucugagugugcgugcgucaacggcuccuguuucacagugaugaccgacgggccgagcucuggacaggccagcuauaaaaucuuuaagauggaaaaaggcaagguggucaaauccguugagcucgaugcucccaauuaccauuaugaagagugcucuuguuacccugacgccggcgagaucacgugcgugugcagagauaacuggcacgggagcaaccggcccuggauuuccuucaaucagaaccuggaauaucaaaucggauacauuuguagcggcguguuuggggacaauccucgccccaacgauggaacaggcucuugcgggccggucuucccuaauggagcuuacggcgugaagggcuuuuccuucaaguaugggaacggaguuuggaucggcagaaccaaaagcacaaauucucgguccggguuugagaugauuugggaccccaacggauggaccggcaccgacagcuccuucucugugaagcaggauaucgucgccaucacagacuggagcggguacuccggcucuuucgugcagcacccugaacuuacgggacuggauuguauucgccccugcuuuuggguugagcucaucagaggccggcccaaagaaagcaccauuuggacauccgggagcucuaucuccuucuguggagugaauggcgacaccgucagcuggucuuggccugauggggcggagcugccguuuacaauugacaaguga

SEQ ID NO: 210750 - RNA, 1350 nt, Artificial Sequence; identical to SEQ ID NO: 210749
  derived and/or modified CDS sequence (opt5) from neuraminidase__InfluenzaA__ADG21450

SEQ ID NO: 210751 - RNA, 1410 nt, Artificial Sequence; identical to SEQ ID NO: 208810
  derived and/or modified CDS sequence (opt5) from neuraminidase__InfluenzaA__ADG27797

SEQ ID NO: 210752 - RNA, 1410 nt, Artificial Sequence
  derived and/or modified CDS sequence (opt5) from neuraminidase__InfluenzaA__ADG27983
augaaccccaaucagaagaucauuaccaucggcagcgugugcaugacaauugggauggccaaccugauccuccaaauuggaaauaucaucuccauuuggaucucucacagcauucagcugggcaaccagaaucagaucgagacguguaaccaauccgucauuaccuacgaaaauaacacauggguuaaucagaccuaugugaacaucucuaauacaaacuucgcugccgggcagagcguggucuccgugaaacuugcgggaaauucuagccugugcccuguuuccggcugggcuauuuacagcaaggacaacucuaucagaaucggguccaaaggagauguguuugucauucgggagccguucaucagcuguucuccccucgaaugccgcaccuuuuuccugacacagggcgcccuucugaaugacaagcauuccaacggcaccauuaaagauagaagcccuuaucggacgcucaugucuugucccaucggggaggugccuucccccuacaacagccgcuuugaauccguugccuggucugcuagcgccugccacgacggaauuaauuggcugaccaucggcaucuccgggccugauaacggagcuguggccguccugaaguauaauggcauuaucacagacaccauuaagagcuggagaaacaauauccuccggacacaagagucugagugugcgugcgugaacggguccuguuucaccgugaugacggauggaccgagcgacggccaggccucuuacaaaauuuuucgcaucgaaaagggcaaaaucgucaagagcguugagaugaaugcucccaaccaucacuaugaagagugcuccuguuacccugauucuagcgagauuacaugcgugugcagagacaauuggcauggguccaaccggcccugggugagcuucaaucagaaccuggaauaccagaucggauauauuuguucuggcaucuuuggggauaauccucgccccaacgacaaaaccggauccugcggcccggucagcucuaauggggccaacggagugaagggcuucuccuuuaaguacggcaacgggguuuggauuggaagaacaaaaagcaucuccucucggaauggcuucgagaugauuugggauccuaacggguggaccggaaccgacaauaacuuuagcaucaagcaagacaucgugggcauuaaugaaugguccggguauucuggcagcuucguccagcaccccgagcuuacaggacuggauuguauccgcccuugcuucuggguggaacucauuagaggccggcccaaagagaacacgaucuggaccuccgggagcucuauuuccuuuuguggaguuaauagcgacacaaugggcuggucuuggcccgauggggcugagcugccuuucaccaucgacaaguga

SEQ ID NO: 210753 - RNA, 1410 nt, Artificial Sequence; identical to SEQ ID NO: 208810
  derived and/or modified CDS sequence (opt5) from neuraminidase__InfluenzaA__ADG27989

SEQ ID NO: 210754 - RNA, 1410 nt, Artificial Sequence; identical to SEQ ID NO: 210752
  derived and/or modified CDS sequence (opt5) from neuraminidase__InfluenzaA__ADG27998

SEQ ID NO: 210755 - RNA, 1410 nt, Artificial Sequence; identical to SEQ ID NO: 209164
  derived and/or modified CDS sequence (opt5) from neuraminidase__InfluenzaA__ADG28013

SEQ ID NO: 210756 - RNA, 1410 nt, Artificial Sequence; identical to SEQ ID NO: 208810
  derived and/or modified CDS sequence (opt5) from neuraminidase__InfluenzaA__ADG42086

SEQ ID NO: 210757 - RNA, 1410 nt, Artificial Sequence; identical to SEQ ID NO: 208810
  derived and/or modified CDS sequence (opt5) from neuraminidase__InfluenzaA__ADG42096

SEQ ID NO: 210758 - RNA, 1410 nt, Artificial Sequence; identical to SEQ ID NO: 210387
  derived and/or modified CDS sequence (opt5) from neuraminidase__InfluenzaA__ADG42106

SEQ ID NO: 210759 - RNA, 1410 nt, Artificial Sequence; identical to SEQ ID NO: 208810
  derived and/or modified CDS sequence (opt5) from neuraminidase__InfluenzaA__ADG42116

SEQ ID NO: 210760 - RNA, 1410 nt, Artificial Sequence; identical to SEQ ID NO: 208810
  derived and/or modified CDS sequence (opt5) from neuraminidase__InfluenzaA__ADG42126

SEQ ID NO: 210761 - RNA, 1410 nt, Artificial Sequence; identical to SEQ ID NO: 208810
  derived and/or modified CDS sequence (opt5) from neuraminidase__InfluenzaA__ADG42136

SEQ ID NO: 210762 - RNA, 1410 nt, Artificial Sequence; identical to SEQ ID NO: 209393
  derived and/or modified CDS sequence (opt5) from neuraminidase__InfluenzaA__ADG42146

SEQ ID NO: 210763 - RNA, 1410 nt, Artificial Sequence; identical to SEQ ID NO: 208810
  derived and/or modified CDS sequence (opt5) from neuraminidase__InfluenzaA__ADG42156

SEQ ID NO: 210764 - RNA, 1410 nt, Artificial Sequence; identical to SEQ ID NO: 208810
  derived and/or modified CDS sequence (opt5) from neuraminidase__InfluenzaA__ADG42166

SEQ ID NO: 210765 - RNA, 1410 nt, Artificial Sequence; identical to SEQ ID NO: 208810
  derived and/or modified CDS sequence (opt5) from neuraminidase__InfluenzaA__ADG42186

SEQ ID NO: 210766 - RNA, 1410 nt, Artificial Sequence; identical to SEQ ID NO: 210701
  derived and/or modified CDS sequence (opt5) from neuraminidase__InfluenzaA__ADG42196

SEQ ID NO: 210767 - RNA, 1410 nt, Artificial Sequence
  derived and/or modified CDS sequence (opt5) from neuraminidase__InfluenzaA__ADG42206
augaaccccaaucagaagaucauuaccaucggcagcgugugcaugacaauugggauggccaaccugauccuccaaauuggaaauaucaucuccauuuggaucucucacagcauucagcugggcaaccagaaucagaucgagacguguaaccaauccgucauuaccuacgaaaauaacacauggguuaaucagaccuaugugaacaucucuaauacaaacuucgcugccgggcagagcguggucuccgugaaacuugcgggaaauucuagccugugcccuguuuccggcugggcuauuuacagcaaggacaacucuaucagaaucggguccaaaggagauguguuugucauucgggagccguucaucagcuguucuccccucgaaugccgcaccuuuuuccugacacagggcgcccuucugaaugacaagcauuccaacggcaccauuaaagauagaagcccuuaucggacgcucaugucuugucccaucggggaggugccuucccccuacaacagccgcuuugaauccguugccuggucugcuagcgccugccacgacggaauuaauuggcugaccaucggcaucuccgggccugauaacggagcuguggccguccugaaguauaauggcauuaucacagacaccauuaagagcuggagaaacaauauccuccggacacaagagucugagugugcgugcgugaacggguccuguuucaccgugaugacggauggaccgagcgacggccaggccucuuacaaaauuuuucgcaucgaaaagggcaaaaucgucaagagcguugagaugaaugcucccaacuaucauuacgaagagugcuccuguuacccugauucuagcaaaauuacaugcgugugcagagacaauuggcacggguccaaccggcccugggugagcuucaaucagaaccuggaguaucagaucggauacauuuguucuggcaucuuuggggauaauccucgccccaacgacaagaccggauccugcggcccggucagcucuaauggggccaacggagugaagggcuucuccuuuaaauauggcaacgggguuuggauuggaagaacaaagagcaucuccucucggaauggcuucgaaaugauuugggauccuaacggguggaccggaaccgacaauaacuuuagcaucaaacaagacaucgugggcauuaaugagugguccggguacucuggcagcuucguccagcaucccgaacuuacaggacuggauuguauccgcccuugcuucuggguggagcucauuagaggccggcccaaggaaaacacgaucuggaccuccgggagcucuauuuccuuuuguggaguuaauagcgacacagugggcuggucuuggcccgauggggcugagcugccuuucaccaucgacaaauga

SEQ ID NO: 210768 - RNA, 1410 nt, Artificial Sequence; identical to SEQ ID NO: 208810
  derived and/or modified CDS sequence (opt5) from neuraminidase__InfluenzaA__ADG42216

SEQ ID NO: 210769 - RNA, 1410 nt, Artificial Sequence; identical to SEQ ID NO: 210161
  derived and/or modified CDS sequence (opt5) from neuraminidase__InfluenzaA__ADG42226

SEQ ID NO: 210770 - RNA, 1410 nt, Artificial Sequence; identical to SEQ ID NO: 208810
  derived and/or modified CDS sequence (opt5) from neuraminidase__InfluenzaA__ADG42236

SEQ ID NO: 210771 - RNA, 1410 nt, Artificial Sequence; identical to SEQ ID NO: 208810
  derived and/or modified CDS sequence (opt5) from neuraminidase__InfluenzaA__ADG42246

SEQ ID NO: 210772 - RNA, 1410 nt, Artificial Sequence; identical to SEQ ID NO: 208810
  derived and/or modified CDS sequence (opt5) from neuraminidase__InfluenzaA__ADG42256

SEQ ID NO: 210773 - RNA, 1410 nt, Artificial Sequence; identical to SEQ ID NO: 208810
  derived and/or modified CDS sequence (opt5) from neuraminidase__InfluenzaA__ADG42276

SEQ ID NO: 210774 - RNA, 1410 nt, Artificial Sequence
  derived and/or modified CDS sequence (opt5) from neuraminidase__InfluenzaA__ADG42296
augaaccccaaucagaagaucauuaccaucggcagcgugugcaugacaauugggauggccaaccugauccuccaaauuggaaauaucaucuccauuuggaucucucacagcauucagcugggcaaccagaaucagaucgagacguguaaccaauccgucauuaccuacgaaaauaacacauggguuaaucagaccuaugugaacaucucuaauacaaacuucgcugccgggcagagcguggucuccgugaaacuugcgggaaauucuagccugugcccuguuuccggcugggcuauuuacagcaaggacaacucuaucagaaucggguccaaaggagauguguuugucauucgggagccguucaucagcuguucuccccucgaaugccgcaccuuuuuccugacacagggcgcccuucugaaugacaagcauuccaacggcaccauuaaagauagaagcccuuaucggacgcucaugucuugucccaucggggaggugccuucccccuacaacagccgcuuugaauccguugccuggucugcuagcgccugccacgacggaauuaauuggcugaccaucggcaucuccgggccugauaacggagcuguggccguccugaaguauaauggcauuaucacagacaccauuaagagcuggagaaacaauauccuccgggcgcaagagucugagugugccugcgugaacggguccuguuucacagugaugaccgauggaccgagcgacggccaggcuucuuacaaaauuuuucgcaucgaaaagggcaaaaucgucaagagcguugagaugaaugcccccaacuaucauuacgaagagugcuccuguuacccugauucuagcgagauuacgugcgugugcagagacaauuggcacggguccaaccggcccugggugagcuucaaucagaaccuggaauaucagaucggauacauuuguucuggcaucuuuggggauaauccucgccccaacgacaaaacaggauccugcggcccggucagcucuaauggggcuaacggagugaagggcuucuccuuuaaguauggcaacgggguuuggauuggaagaaccaaaagcaucuccucucggaauggcuucgagaugauuugggauccuaacggguggacaggaaccgacaauaacuuuagcaucaagcaagacaucgugggcauuaaugaaugguccggguacucuggcagcuucguccagcaucccgagcuuaccggacuggauuguauccgcccuugcuucuggguggaacucauuagaggccggcccaaagagaacacaaucuggacguccgggagcucuauuuccuuuuguggaguuaauagcgacaccgugggcuggucuuggcccgauggggccgagcugccuuucacaaucgacaaguga

SEQ ID NO: 210775 - RNA, 1410 nt, Artificial Sequence; identical to SEQ ID NO: 208810
  derived and/or modified CDS sequence (opt5) from neuraminidase__InfluenzaA__ADG42306

SEQ ID NO: 210776 - RNA, 1410 nt, Artificial Sequence; identical to SEQ ID NO: 208810
  derived and/or modified CDS sequence (opt5) from neuraminidase__InfluenzaA__ADG42316

SEQ ID NO: 210777 - RNA, 1410 nt, Artificial Sequence; identical to SEQ ID NO: 208810
  derived and/or modified CDS sequence (opt5) from neuraminidase__InfluenzaA__ADG42326

SEQ ID NO: 210778 - RNA, 1410 nt, Artificial Sequence
  derived and/or modified CDS sequence (opt5) from neuraminidase__InfluenzaA__ADG42336
augaaccccaaucagaagaucauuaccaucggcagcgugugcaugacaauugggauggccaaccugauccuccaaauuggaaauaucaucuccauuuggaucucucacagcauucagcugggcaaccagaaucagaucgagacguguaaccaauccgucauuaccuacgaaaauaacacauggguuaaucagaccuaugugaacaucucuaauacaaacuucgcugccgggcagagcguggucuccaugaaacuugcgggaaauucuagccugugcccuguguccggcugggcuauuuacagcaaggacaacucuaucagaaucggguccaaaggagauguuuuugugauucgggagccguucaucagcuguucuccccucgaaugccgcaccuuuuuccugacacagggcgcccuucugaaugacaagcauuccaacggcaccauuaaagauagaagcccuuaucggacgcucaugucuugucccaucggggaggucccuucccccuacaacagccgcuuugaauccguggccuggucugcuagcgccugccacgacggaauuaauuggcugaccaucggcaucuccgggccugauaacggagcuguugccgugcugaaguauaauggcauuaucacagacaccauuaagagcuggagaaacaauauccuccggacacaagagucugagugugcgugcgucaacggguccuguuucaccgugaugacggauggaccgagcgacggccaggccucuuacaaaauuuuucgcaucgaaaagggcaaaaucgucaagagcguggagaugaaugcucccaacuaucauuacgaagagugcuccuguuacccugauucuagcgagauuacaugcguuugcagagacaauuggcacggguccaaccggcccugggugagcuucaaucagaaccuggaauaucagaucggauacauuuguucuggcaucuuuggggauaauccucgccccaacgacaaaaccggauccugcggcccggugagcucuaauggggccaacggagucaagggcuucuccuuuaaguauggcaacgggguguggauuggaagaacaaaaagcaucuccucucggaauggcuucgagaugauuugggauccuaacggguggaccggaaccgacaauaaguuuagcaucaaacaagacaucguuggcauuaacgaaugguccggguacucuggcagcuucgugcagcaucccgagcuuacaggacuggauuguauccgcccuugcuucugggucgaacucauuagaggccggcccaaggagaauacgaucuggaccuccgggagcucuauuuccuuuuguggagugaacagcgacacaguuggcuggucuuggcccgauggggcugagcugccuuucaccaucgacaaauga

SEQ ID NO: 210779 - RNA, 1410 nt, Artificial Sequence; identical to SEQ ID NO: 210272
  derived and/or modified CDS sequence (opt5) from neuraminidase__InfluenzaA__ADG42346

SEQ ID NO: 210780 - RNA, 1410 nt, Artificial Sequence; identical to SEQ ID NO: 209987
  derived and/or modified CDS sequence (opt5) from neuraminidase__InfluenzaA__ADG42356

SEQ ID NO: 210781 - RNA, 1410 nt, Artificial Sequence
  derived and/or modified CDS sequence (opt5) from neuraminidase__InfluenzaA__ADG42366
augaaccccaaucagaagaucauuaccaucggcagcgugugcaugacaauugggauggccaaccugauccuccaaauuggaaauaucaucuccauuuggaucucucacagcauucagcugggcaaccagaaucagaucgagacguguaaccaauccgucauuaccuacgaaaauaacacauggguuaaucagaccuaugugaacaucucuaauacaaacuucgcugccgggcagagcguggucuccgugaaacuugcgggaaauucuagccugugcccuguuuccggcugggcuauuuacagcaaggacaacucuaucagaaucggguccaaaggagauguguuugucauucgggagccguucaucagcuguucuccccucgaaugccgcaccuuuuuccugacacagggcgcccuucugaaugacaagcauuccaacggcaccauuaaagauagaagcccuuaucggacgcucaugucuugucccaucggggaggugccuucccccuacaacagccgcuuugaauccguugccuggucugcuagcgccugccacgacggaauuaauuggcugaccaucggcaucuccgggccugauaacggagcuguggccguccugaaguauaauggcauuaucacagacaccauuaagagcuggagaaacaauauccuccggacacaagagucugagugugcgugcgugaacggguccuguuucaccgugaugacggauggaccgagcgacggccaggccucuuacaaaauuuuucgcaucgaaaagggcaaaaucgucaagagcguugagaugaaugcucccaacuaucauuacgaagagugcuccuguuacccugauucuagcgagauuacaugcgugugcagagacaauuggcacggguccaaccggcccuggaucagcuucaaucagaaccuggaauaucagauuggauacaucuguucuggcauuuuuggggauaauccucgccccaacgacaaaaccggauccugcggcccggugagcucuaauggggccaacggagucaagggcuucuccuuuaaguauggcaacgggguguggaucggaagaacaaaaagcauuuccucucggaauggcuucgagaugaucugggauccuaacggguggaccggaaccgacaauaaguuuagcaucaaacaagacauuguuggcaucaacgaaugguccggguacucuggcagcuucgugcagcaucccgagcuuacaggacuggauuguauucgcccuugcuucugggucgaacucaucagaggccggcccaaggagaauacgauuuggaccuccgggagcucuaucuccuuuuguggagugaacagcgacacaguuggcuggucuuggcccgauggggcugagcugccuuucaccaucgacaaauga

SEQ ID NO: 210782 - RNA, 1410 nt, Artificial Sequence; identical to SEQ ID NO: 208810
  derived and/or modified CDS sequence (opt5) from neuraminidase__InfluenzaA__ADG42376

SEQ ID NO: 210783 - RNA, 1410 nt, Artificial Sequence
  derived and/or modified CDS sequence (opt5) from neuraminidase__InfluenzaA__ADG42386
augaaccccaaucagaagaucauuaccaucggcagcgugugcaugacaauugggauggccaaccugauccuccaaauuggaaauaucaucuccauuuggaucucucacagcauucagcugggcaaccagaaucagaucgagacguguaaccaauccgucauuaccuacgaaaauaacacauggguuaaucagaccuaugugaacaucucuaauacaaacuucgcugccgggcagagcguggucuccgugaaauuugcgggaaauucuagccuuugcccuguuuccggcugggcuauuuacagcaaggacaacucuaucagaaucggguccaaaggagauguguucgucauucgggagccguuuaucagcuguucuccccuggaaugccgcaccuucuuucucacacagggcgcccugcuuaaugacaagcauuccaacggcaccauuaaagauagaagcccuuaucggacgcugaugucuugucccaucggggaggugccuucccccuacaacagccgcuucgaauccguugccuggucugcuagcgccugccacgacggaauuaauuggcucaccaucggcaucuccgggccugauaacggagcuguggccguccugaaguauaauggcauuaucacagacaccauuaagagcuggagaaacaauauccugcggacacaagagucugagugugcgugcgugaacggguccuguuuuaccgugaugacggauggaccgaaugacggccaggccagcuacaaaauuuuccgcaucgaaaagggcaaaaucgucaagucuguugagaugaacgcucccaauuaucauuacgaagagugcagcuguuacccugauuccucugagauuacaugcgugugcagagacaacuggcacgggagcaaucggcccuggguguccuuuaaccagaaucucgaauaucagaucggauacauuuguagcggcaucuucggggauaacccucgccccaaugacaaaaccggaucuugcggcccggucuccagcaacggggccaacggagugaagggcuuuucuuucaaguauggcaaugggguuuggauuggaagaacaaaauccaucagcucccggucuggcuuugagaugauuugggauccuaacggguggaccggaaccgacaauaaguucagcaucaaacaagacaucgugggcauuaacgaaugguccggguacucuggcagcuucguccagcaucccgagcugacaggacuugauuguauccgcccuugcuuuuggguggaacugauuagaggccggcccaaggagaauacgaucuggaccuccgggagcucuauuuccuucuguggaguuaacagcgacacagugggcuggucuuggcccgauggggcugagcucccuuuuaccaucgacaaauga

SEQ ID NO: 210784 - RNA, 1410 nt, Artificial Sequence; identical to SEQ ID NO: 210767
  derived and/or modified CDS sequence (opt5) from neuraminidase__InfluenzaA__ADG42396

SEQ ID NO: 210785 - RNA, 1410 nt, Artificial Sequence
  derived and/or modified CDS sequence (opt5) from neuraminidase__InfluenzaA__ADG42406
augaaccccaaucagaagaucauuaccaucggcagcgugugcaugacaauugggauggccaaccugauccuccaaauuggaaauauccuguccacguggaucucucacagcauucagcuuggcaaccagaaucagaucgagaccuguaaccaauccgucauuacauacgaaaauaacaccuggguuaaucagacauaugugaacaucucuaauaccaacuucgcugccgggcagagcguggucuccgugaaacuggcgggaaauucuagccucugcccuguuuccggcugggcuauuuacagcaaggacaacucuaucagaauuggguccaaaggagauguguuugucauccgggagccguucaucagcuguucuccccuggaaugccgcacauuuuuccuuacccagggcgcccugcucaaugacaagcauuccaacggcacgauuaaagauagaagcccuuaucggacccugaugucuugucccaucggggaggugccuucccccuacaacagccgcuuugaauccguugccuggucugcuagcgccugccacgacggaauuaauuggcugacaaucggcauuuccgggccugauaacggagcuguggccguccucaaguauaauggcaucaucaccgacacaauuaagagcuggagaaacaauauccugcggacccaagagucugagugugcgugcgugaacggguccuguuucacggugaugacagauggaccgagcgacggccaggccucuuacaaaauuuuucgcaucgaaaagggcaaaauugucaagagcguugagaugaaugcucccaacuaucauuacgaagagugcuccuguuacccugauucuagcgagauuaccugcgugugcagagacaauuggcacggguccaaccggcccugggugagcuucaaucagaaccuugaauaucagaucggauacaucuguucuggcaucuuuggggauaauccucgccccaacgacaaaaagggauccugcggcccggucagcucuaauggggccaacggagugaagggcuucuccuuuaaauauggcaacgggguuuggauuggaagaacaaagagcaucuccucucggaauggcuucgagaugauuugggauccuaacggguggaccggaaccgacaauaacuuuagcaucaaacaagacauugugggcaucaaugaaugguccggguacucuggcagcuucguccagcaucccgagcugacaggacucgauuguauccgcccuugcuucuggguggaacugauuagaggccggcccaaggagaacacgaucuggaccuccgggagcucuauuuccuuuuguggaguuaauagcgacacagugggcuggucuuggcccgauggggcugagcuuccuuucaccaucgacaaauga

SEQ ID NO: 210786 - RNA, 1410 nt, Artificial Sequence; identical to SEQ ID NO: 209987
  derived and/or modified CDS sequence (opt5) from neuraminidase__InfluenzaA__ADG42426

SEQ ID NO: 210787 - RNA, 1410 nt, Artificial Sequence; identical to SEQ ID NO: 208810
  derived and/or modified CDS sequence (opt5) from neuraminidase__InfluenzaA__ADG42436

SEQ ID NO: 210788 - RNA, 1410 nt, Artificial Sequence
  derived and/or modified CDS sequence (opt5) from neuraminidase__InfluenzaA__ADG42446
augaaccccaaucagaagaucauuaccaucggcagcgugugcaugacaauugggauggccaaccugauccuccaaauuggaaauaucaucuccauuuggaucucucacagcauucagcugggcaaccagaaucagaucgagacguguaaccaauccgucauuaccuacgaaaauaacacauggguuaaucagaccuaugugaacaucucuaauacaaacuucgcugccgggcagagcguggucuccgcgaaacuugcuggaaauucuagccugugcccuguguccggcugggccauuuacagcaaggacaacucuaucagaaucggguccaaaggagauguuuuugugauucgggagccguucaucagcuguucuccccucgaaugccgcaccuuuuuccugacacagggcgcccuucugaaugacaagcauuccaacggcaccauuaaagauagaagcccuuaucggacgcucaugucuugucccaucggggaggucccuucccccuacaacagccgcuuugaauccguggcuuggucugccagcgcuugccacgacggaauuaauuggcugaccaucggcaucuccgggccugauaacggagccguugcggugcugaaguauaauggcauuaucacagacaccauuaagagcuggagaaacaauauccuccggacacaagagucugagugugccugcgucaacggguccuguuucaccgugaugacggauggaccgagcgacggccaggcuucuuacaaaauuuuucgcaucgaaaagggcaaaaucgucaagagcguggagaugaaugcccccaacuaucauuacgaagagugcuccuguuacccugauucuagcgagauuacaugcguuugcagagacaauuggcacggguccaaccggcccugggugagcuucaaucagaaccuggaauaucagaucggauacauuuguucuggcaucuuuggggauaauccucgccccaacgacaaaaccggauccugcggcccggugagcucuaauggggcuaacggagucaagggcuucuccuuuaaguauggcaacgggguguggauuggaagaacaaaaagcaucuccucucggaauggcuucgagaugauuugggauccuaacggguggaccggaaccgacaauaacuuuagcaucaagcaagacaucguuggcauuaaugaaugguccggguacucuggcagcuucgugcagcaucccgagcuuacaggacuggauuguauccgcccuugcuucugggucgaacucauuagaggccggcccaaagagaacacgaucuggaccuccgggagcucuauuuccuuuuguggagugaauagcgacacaguuggcuggucuuggcccgauggggccgagcugccuuucaccaucgacaaguga

SEQ ID NO: 210789 - RNA, 1410 nt, Artificial Sequence
  derived and/or modified CDS sequence (opt5) from neuraminidase__InfluenzaA__ADG42456
augaaccccaaucagaagaucauuaccaucggcagcgugugcaugacaauugggauggccaaccugauccuccaaauuggaaauaucaucuccauuuggaucucucacagcauucagcugggcaaccagaaucagaucgagacguguaaccaauccgucauuaccuacgaaaauaacacauggguuaaucagaccuaugugaacaucucuaauacaaacuucgcugccgggcagagcguggucuccgugaaacuugcgggaaauucuagccugugcccuguuuccggcugggcuauuuacagcaaggacaacucuaucagaaucggguccaaaggagauguguuugucauucgggagccguucaucagcuguucuccccucgaaugccgcaccuuuuuccugacacagggcgcccuucugaaugacaagcauuccaacggcaccauuaaagauagaagcccucaccggacgcucaugucuugucccaucggggaggugccuucccccuauaacagccgcuuugaauccguugccuggucugcuagcgccugccaugacggaauuaauuggcugaccaucggcaucuccgggccugauaacggagcuguggccguccugaaguacaauggcauuaucacagacaccauuaagagcuggagaaacaauauccuccggacacaagagucugagugugcgugcgugaacggguccuguuucaccgugaugacggauggaccgagcgacggccaggccucuuauaaaauuuuucgcaucgaaaagggcaaaaucgucaagagcguugagaugaaugcucccaacuaccacuaugaagagugcuccuguuacccugauucuagcgagauuacaugcgugugcagagacaauuggcauggguccaaccggcccugggugagcuucaaucagaaccuggaauaccagaucggauauauuuguucuggcaucuuuggggauaauccucgccccaacgacaaaaccggauccugcggcccggucagcucuaauggggccaacggagugaagggcuucuccuuuaaguacggcaacgggguuuggauuggaagaacaaaaagcaucuccucucggaauggcuucgagaugauuugggauccuaacggguggaccggaaccgacaauaacuuuagcaucaagcaagacaucgugggcauuaaugaaugguccggguauucuggcagcuucguccagcaccccgagcuuacaggacuggauuguauccgcccuugcuucuggguggaacucauuagaggccggcccaaagagaacacgaucuggaccuccgggagcucuauuuccuuuuguggaguuaauagcgacacagugggcuggucuuggcccgauggggcugagcugccuuucaccaucgacaaguga

SEQ ID NO: 210790 - RNA, 1410 nt, Artificial Sequence; identical to SEQ ID NO: 208810
  derived and/or modified CDS sequence (opt5) from neuraminidase__InfluenzaA__ADG42466

SEQ ID NO: 210791 - RNA, 1410 nt, Artificial Sequence
  derived and/or modified CDS sequence (opt5) from neuraminidase__InfluenzaA__ADG42476
augaaccccaaucagaagaucauuaccaucggcagcgugugcaugacaauugggauggccaaccugauccuccaaauuggaaauaucaucuccauuuggaucucucacagcauucagcugggcaaccagaaucagacggagaccuguaaccaauccgucaucacauacgaaaauaacaccuggguuaaucagacauaugugaacauuucuaauaccaacuucgcugccgggcagagcguggucuccgugaaacuugcgggaaauucuagccugugcccuguuuccggcugggcuaucuacagcaaggacaacucuauuagaaucggguccaaaggagauguguuugucauccgggagccguucauuagcuguucuccccucgaaugccgcacauuuuuccugacccagggcgcccuucugaaugacaagcauuccaacggcacgaucaaagauagaagcccuuaucggacccucaugucuugucccauuggggaggugccuucccccuacaacagccgcuuugaauccguugccuggucugcuagcgccugccacgacggaaucaauuggcugacaauuggcaucuccgggccugauaacggagcuguggccguccugaaguauaauggcaucauuaccgacacaaucaagagcuggagaaacaauauucuccggacccaagagucugagugugcgugcgugaacggguccuguuucacggugaugacagauggaccgagcgacggccaggccucuuacaaaaucuuucgcauugaaaagggcaaaaucgucaagagcguugagaugaaugcucccaacuaucauuacgaagagugcuccuguuacccugauucuagcgagauuaccugcgugugcagagacaauuggcacggguccaaccggcccugggugagcuucaaucagaaccuggaauaucagaucggauacaucuguucuggcauuuuuggggauaauccucgccccaacgacaaaacaggauccugcggcccggucagcucuaauggggccaacggagugaagggcuucuccuuuaaguauggcaacgggguuuggaucggaagaaccaaaagcauuuccucucggaauggcuucgagaugaucugggauccuaacggguggaccggaacagacaauaacuuuagcauuaagcaagacaucgugggcaucaaugaaugguccggguacucuggcagcuucguccagcaucccgagcuuacgggacuggauuguauucgcccuugcuucuggguggaacucaucagaggccggcccaaagagaacaccauuuggacauccgggagcucuaucuccuuuuguggaguuaauagcgacaccgugggcuggucuuggcccgauggggcugagcugccuuucacaauugacaaguga

SEQ ID NO: 210792 - RNA, 1410 nt, Artificial Sequence; identical to SEQ ID NO: 210712
  derived and/or modified CDS sequence (opt5) from neuraminidase__InfluenzaA__ADG42486

SEQ ID NO: 210793 - RNA, 1410 nt, Artificial Sequence; identical to SEQ ID NO: 208810
  derived and/or modified CDS sequence (opt5) from neuraminidase__InfluenzaA__ADG42496

SEQ ID NO: 210794 - RNA, 1410 nt, Artificial Sequence
  derived and/or modified CDS sequence (opt5) from neuraminidase__InfluenzaA__ADG42506
augaaccccaaucagaagaucauuaucauuggcagcgugugcaugaccaucgggauggccaaccugauucuccaaaucggaaauaucauuuccaucuggauuucucacagcauccagcugggcaaccagaaucagauugagacauguaaccaauccaucauuacguacgaaaauaacaccugggucaaucagacauauguuaacaucucuaauaccaacuucgcugccgggcagagcgugguguccgucaaacuugcgggaaauucuagccugugcccuguguccggcugggcuaucuacagcaaggacaacucuauuagaaucggguccaaaggagauguuuuugugauucgggagccguucaucagcuguucuccccucgaaugccgcacauuuuuccugacccagggcgcccuucugaaugacaagcauuccaacggcacaauuaaagauagaagcccuuaucggacccucaugucuugucccaucggggaggucccuucccccuacaacagccgcuuugaauccguggccuggucugcuagcgccugccacgacggaaucaauuggcugacgauuggcaucuccgggccugauaacggagcuguugccgugcugaaguauaauggcauuaucaccgacacaauuaagagcuggagaaacaauauccuccggacccaagagucugagugugcgugcgucaacggguccuguuucacagugaugaccgauggaccgagcgacggccaggccucuuacaaaaucuuucgcauugaaaagggcaaaguggucaagagcguugagaugaaugcucccaacuaucauuacgaagagugcuccuguuacccugauucuagcgagaucacgugcgugugcagagacaauuggcacggguccaaccggcccugggugagcuucaaucagaaccuggaauaucagauuggauacaucuguucuggcauuuuuggggauaauccucgccccaacgacaaaacaggauccugcggcccggucagcucuaauggggccaacggagugaagggcuucuccuuuaaguauggcaacgggguuuggaucggaagaaccaaaagcauuuccucucggaauggcuucgagaugaucugggauccuaacggguggacaggaaccgacaauaacuuuagcaucaagcaagacauugugggcaucaaugaaugguccggguacucuggcagcuucguccagcaucccgagcuuaccggacuggauuguauucgcccuugcuucuggguggaacucaucagaggccggcccaaagagaacacaauuuggacguccgggagcucuaucuccuuuuguggaguuaauagcgacaccgugggcuggucuuggcccgauggggcugagcugccuuucacaaucgacaaguga

SEQ ID NO: 210795 - RNA, 1410 nt, Artificial Sequence; identical to SEQ ID NO: 209985
  derived and/or modified CDS sequence (opt5) from neuraminidase__InfluenzaA__ADG42516

SEQ ID NO: 210796 - RNA, 1410 nt, Artificial Sequence
  derived and/or modified CDS sequence (opt5) from neuraminidase__InfluenzaA__ADG42526
augaaccccaaucagaagaucauuaccaucggcagcgugugcaugacaauugggauggccaaccugauccuccaaauuggaaauaucaucuccauuuggaucucucacagcauucagcugggcaaccagaaucagaucgagacguguaaccaauccgucauuaccuacgaaaauaacacauggguuaaucagaccuaugugaacaucucuaauacaaacuucgcugccgggcagagcguggucuccgugaaacuugcgggaaauucuagccugugcccuguuuccggcugggcuauuuacagcaaggacaacucuaucagaaucggguccaaaggagauguguuugucauucgggagccguucaucagcuguucuccccucgaaugccgcaccuuuuuccugacacagggcgcccuucugaaugacaagcauuccaacggcaccauuaaagauagaagcccuuaucggacgcucaugucuugucccaucggggaggugccuucccccuacaacagccgcuuugaauccguugccuggucugcuagcgccugccacgacggaauuaauuggcugaccaucggcaucuccgggccugauaacggagcuguggccguccugaaguauaauggcauuaucacagacaccauuaagagcuggagaaacaauauccuccggacacaagagucugagugugcgugccugaacggguccuguuucaccgugaugacggauggaccgagcgacggccaggccucuuacaaaauuuuucgcaucgaaaagggcaaaaucgucaagagcguggagaugaaugcucccaacuaucauuacgaagagugcuccuguuacccugauucuagcgagauuacaugcguuugcagagacaauuggcacggguccaaccggcccugggugagcuucaaucagaaccuugaauaucagaucggauacauuuguucuggcaucuuuggggauaauccucgccccaacgacaaaaccggauccugcggcccggugagcucuaauggggccaacggagucaagggcuucuccuuuaaguauggcaacgggguguggauuggaagaacaaaaagcaucuccucucggaauggcuucgagaugauuugggauccuaacggguggaccggaaccgacaauaacuuuagcaucaagcaagacaucguuggcauuaaugaaugguccggguacucuggcagcuucgugcagcaucccgagcugacaggacucgauuguauccgcccuugcuucugggucgaacugauuagaggccggcccaaagagaacacgaucuggaccuccgggagcucuauuuccuuuuguggagugaauagcgacacaguuggcuggucuuggcccgauggggcugagcuuccuuucaccaucgacaaguga

SEQ ID NO: 210797 - RNA, 1410 nt, Artificial Sequence
  derived and/or modified CDS sequence (opt5) from neuraminidase__InfluenzaA__ADG42536
augaaccccaaucagaagaucauuaccaucggcagcgugugcaugacaauugggauggccaaccugauccuccaaauuggaaauaucaucuccauuuggaucucucacagcauucagcugggcaaccagaaucagaucgagacguguaaccaauccgucauuaccuacgaaaauaacacauggguuaaucagaccuaugugaacaucucuaauacaaacuucgcugccgggcagagcguggucuccgugaaacuugcgggaaauucuagccugugcccuguuuccggcugggcuauuuacagcaaggacaacucuaucagaaucggguccaaaggagauguguuugucauucgggagccguucaucagcuguucuccccucgaaugccgcaccuuuuuccugacacagggcgcccuucugaaugacaagcauuccaacggcaccauuaaagauagaagcccuuaucggacgcucaugucuugucccaucggggaggugccuucccccuacaacagccgcuuugaauccguugccuggucugcuagcgccugccacgacggaauuaauuggcugaccaucggcaucuccgggccugauaacggagcuguggccguccugaaguauaauggcauuaucacagacaccauuaagagcuggagaaacaauauccuccggacacaagagucugagugugcgugcgugaacggguccuguuucaccgugaugacggauggaccgagcgacggccaggccucuuacaaaauuuuucgcaucgaaaagggcaaaaucgucaagagcguugagaugaaugcucccaacuaucauuacgaagagugcuccuguuacccugauucuagcgagauuacaugcgugugcagagacaauuggcacggguccaaccggcccugggugagcuucaaucagaaccuggaauaucagaucggauacauuuguucuggcaucuuuggggauaauccucgccccaacgacaaaaccggauccugcggcccggucagcucuaauggggccaacggagugaagggcuucuccuuuaaguauggcaacgggguuuggauuggaagaacaaaaagcaucuccucucggaauggcuucgagaugauuugggauccuaacggguggaccggaaccgacaauaacuuuagcaucaagcaagacaucgugggcauuaaugaaugguccggguacucuggcagcuucguccagcaucccgagcuuacaggacuggauuguauccgcccuugcuucuggguggaacucauuagaggccggcccaaagagaacacgaucuggaccuccgggagcucuauuuccuuuuguggaguuacaagcgacaccgugggcuggucuuggcccgauggggcugagcugccuuucacaaucgacaaguga

SEQ ID NO: 210798 - RNA, 1410 nt, Artificial Sequence; identical to SEQ ID NO: 208810
  derived and/or modified CDS sequence (opt5) from neuraminidase__InfluenzaA__ADG42546

SEQ ID NO: 210799 - RNA, 1410 nt, Artificial Sequence; identical to SEQ ID NO: 208810
  derived and/or modified CDS sequence (opt5) from neuraminidase__InfluenzaA__ADG42556

SEQ ID NO: 210800 - RNA, 1410 nt, Artificial Sequence
  derived and/or modified CDS sequence (opt5) from neuraminidase__InfluenzaA__ADG42566
augaaccccaaucagaagaucauuaccaucggcagcgugugcaugacaauugggauggccaaccugauccuccaaauuggaaauaucaucuccauuuggaucucucacagcauucagcugggcaaccagaaucagaucgagacguguaaccaauccgucauuaccuacgaaaauaacacauggguuaaucagaccuaugugaacaucucuaauacaaacuucgcugccgggcauagcguggucuccgugaaacuugcgggaaauucuagccugugcccuguuuccggcugggcuauuuacagcaaggacaacucuaucagaaucggguccaaaggagauguguuugucauucgggagccguucaucagcuguucuccccucgaaugccgcaccuuuuuccugacacagggcgcccuucugaaugacaagcacuccaacggcaccauuaaagauagaagcccuuaucggacgcucaugucuugucccaucggggaggugccuucccccuacaacagccgcuuugaauccguugccuggucugcuagcgccugccaugacggaauuaauuggcugaccaucggcaucuccgggccugauaacggagcuguggccguccugaaguauaauggcauuaucacagacaccauuaagagcuggagaaacaauauccuccggacacaggagucugagugugcgugcgugaacggguccuguuucaccgugaugacggauggaccgagcgacggccaagccucuuacaaaauuuuucgcaucgaaaagggcaaaaucgucaagagcguugagaugaaugcucccaacuaucacuacgaagagugcuccuguuacccugauucuagcgagauuacaugcgugugcagagacaauuggcauggguccaaccggcccugggugagcuucaaucagaaccuggaauaucagaucggauacauuuguucuggcaucuuuggggauaauccucgccccaacgacaaaaccggauccugcggcccggucagcucuaauggggccaacggagugaagggcuucuccuuuaaguauggcaacgggguuuggauuggaagaacaaaaagcaucuccucucggaauggcuucgagaugauuugggauccuaacggguggaccggaaccgacaauaacuuuagcaucaagcaggacaucgugggcauuaaugaaugguccggguacucuggcagcuucguccaacaccccgagcuuacaggacuggauuguauccgcccuugcuucuggguggaacucauuagaggccggcccaaagagaacacgaucuggaccuccgggagcucuauuuccuuuuguggaguuaauagcgacacagugggcuggucuuggcccgauggggcugagcugccuuucaccaucgacaaguga

SEQ ID NO: 210801 - RNA, 1410 nt, Artificial Sequence
  derived and/or modified CDS sequence (opt5) from neuraminidase__InfluenzaA__ADG42576
augaaccccaaucagaagaucauuaccaucggcagcgugugcaugacaauugggauggccaaccugauccuccaaauuggaaauaucaucuccauuuggaucucucacagcauucagcugggcaaccagaaucagaucgagacguguaaccaauccgucauuaccuacgaaaauaacacauggguuaaucagaccuaugugaacaucucuaauacaaacuucgcugccgggcagagcguggucuccgugaaacuugcgggaaauucuagccugugcccuguuuccggcugggcuauuuacagcaaggacaacucuaucagaaucggguccaaaggagauguguuugucauucgggagccguucaucagcuguucuccccucgaaugccgcaccuuuuuccugacacagggcgcccuucugaaugacaagcauuccaacggcaccauuaaagauagaagcccuuaucggacgcucaugucuugucccaucggggaggugccuucccccuacaacagccgcuuugaauccguugccuggucugcuagcgccugccacgacggaauuaauuggcugaccaucggcaucuccgggccuuauaacggagcuguggccguccugaaguacaauggcauuaucacagauaccauuaagagcuggagaaacaauauccuccggacacaagagucugagugugcgugcgugaacggguccuguuucaccgugaugacggacggaccgagcgauggccaggccucuuauaaaauuuuuaagaucgaaaaaggcaagaucgucaaaagcguugagaugaaugcucccaacuaccauuacgaagagugcuccuguuauccugacucuagcgagauuacaugcgugugccgcgauaauuggcacggguccaacagacccugggugagcuucaaucagaaccuggaauaccagaucggauauauuuguucuggcaucuuuggggacaauccucggcccaacgauaagaccggauccugcggcccggucagcucuaauggggccaacggagugaagggcuucuccuuuaaauacggcaacgggguuuggauuggacgcacaaagagcaucuccucuagaaauggcuucgagaugauuugggacccuaacggguggaccggaaccgauaauaacuuuagcaucaaacaagacaucgugggcauuaaugaaugguccggguauucuggcagcuucguccagcaucccgagcuuacaggacuggacuguauccggccuugcuucuggguggaacucauucgcggcagacccaaggagaacacgaucuggaccuccgggagcucuauuuccuuuuguggaguuaauagcgauacagugggcuggucuuggcccgacggggcugagcugccuuucaccaucgauaaauga

SEQ ID NO: 210802 - RNA, 1410 nt, Artificial Sequence; identical to SEQ ID NO: 208810
  derived and/or modified CDS sequence (opt5) from neuraminidase__InfluenzaA__ADG42586

SEQ ID NO: 210803 - RNA, 1410 nt, Artificial Sequence
  derived and/or modified CDS sequence (opt5) from neuraminidase__InfluenzaA__ADG42606
augaaccccaaucagaagaucauuaccaucggcagcgugugcaugacaauugggauggccaaccugauccuccaaauuggaaauaucaucuccauuuggaucucucacagcauucagcugggcaaccagaaucagaucgagacguguaaccaauccgucauuaccuacgaaaauaacacauggguuaaucagaccuaugugaacaucucuaauacaaacuucgcugccgggcagagcguggucuccgugaaacuugcgggaaauucuagccugugcccuguuuccggcugggcuauuuacagcaaggacaacucuaucagaaucggguccaaaggagauguguuugucauucgggagccguucaucagcuguucuccccucgaaugccgcaccuuuuuccugacacagggcgcccuucugaaugacaagcauuccaacggcaccauuaaagauagaagcccuuaucggacgcucaugucuugucccaucggggaggugccuucccccuacaacagccgcuuugaauccguugccuggucugcuagcgccugccacgacggaauuaauuggcugaccaucggcaucuccgggccugauaacggagcuguggccguccugaaguauaauggcauuaucacagacaccauuaagagcuggagaaacaauauccuccggacacaagagucugagugugcgugcgugaacggguccuguuucaccgugaugacggauggaccgagcgacggccaggccucuuacaaaauuuuucgcaucgaaaagggcaaaaucgucaagagcguugagaugaaugcucccaacuaucauuacgaagagugcuccuguuacccugauucuagcgagauuacaugcgugugcagagacaauuggcacggguccaaccggcccugggugagcuucaaucagaaccuggaauaucagaucggauacauuuguucuggcaucuuuggggauaauccucgccccaacgacaaaaccggauccugcggcccggucagcucuaauggggccaacggagugaagggcuucuccuuuaaguauggcaacgggguuuggauuggaagaacaaaaagcaucuccucucggaauggcuucgagaugauuugggauccuaacggguggaccggaaccgacaauaacuuuagcaucaagcaagacaucgugggcauuaaugaaugguccggguacucuggcagcuucguccagcaucccgagcuuacaggacuggauuguauccgcccuugcuucuggguggaacucauuagaggccggcccaaagagaacacgaucuggaccuccgggagcucuauuuccuuuuguggaguuaauagcgacacagugggcuggucuuggcccgauggggcugagcugccuuucccgaucgacaaguga

SEQ ID NO: 210804 - RNA, 1410 nt, Artificial Sequence
  derived and/or modified CDS sequence (opt5) from neuraminidase__InfluenzaA__ADG42616
augaacagcaaucagaagaucauuaccaucggcuccgugugcaugacaauugggauggccaaccugauccuccaaauuggaaauaucaucucuauuuggaucagccacuccauucagcugggcaaccagaaucagaucgagacguguaaccaaucugucauuaccuacgaaaauaacacauggguuaaucagaccuaugugaacaucagcaauacaaacuucgcugccgggcaguccguggucucugugaaacuugcgggaaauagcucccugugccccguuagcggcugggcuauuuacucuaaggacaacuccaucagaaucgggagcaaaggagauguguuugucauucgggagccuuucaucucuuguuccccgcucgaaugccgcaccuuuuuccugacacagggcgcccuucugaaugacaagcauagcaacggcaccauuaaagauagaucucccuaucggacgcucauguccuguccuaucggggaggugcccagcccuuacaacucccgcuuugaaucuguugccuggagcgcuuccgccugccacgacggaauuaauuggcugaccaucggcaucagcgggcccgauaacggagcuguggccguccugaaguauaauggcauuaucacagacaccauuaagucuuggagaaacaauauccuccggacacaagaguccgagugugcgugcgugaacgggagcuguuucaccgugaugacggauggaccuucugacggccaggccagcuacaaaauuuuucgcaucgaaaagggcaaaaucgucaaguccguugagaugaaugcuccgaacuaucauuacgaagagugcucuuguuaccccgauagcuccgagauuacaugcgugugcagagacaauuggcacgggagcaaccggccuugggugucuuucaaucagaaccuggaauaucagaucggauacauuuguuccggcaucuuuggggauaauccccgcccuaacgacaaaaccggaagcugcggccccgucucuuccaauggggccaacggagugaagggcuucagcuuuaaguauggcaacgggguuuggauuggaagaacaaaauccaucucuagccggaauggcuucgagaugauuugggauccgaacggguggaccggaaccgacaauaacuuuuccaucaagcaagacaucgugggcauuaaugaauggucuggguacagcggcuccuucguccagcauccugagcuuacaggacuggauuguauccgccccugcuucuggguggaacucauuagaggccggccuaaagagaacacgaucuggaccagcgggucuuccauuagcuuuuguggaguuaauucugacacagugggcugguccuggcccgauggggcugagcugcccuucaccaucgacaaguga

SEQ ID NO: 210805 - RNA, 1410 nt, Artificial Sequence; identical to SEQ ID NO: 209393
  derived and/or modified CDS sequence (opt5) from neuraminidase__InfluenzaA__ADG42626

SEQ ID NO: 210806 - RNA, 1410 nt, Artificial Sequence; identical to SEQ ID NO: 210791
  derived and/or modified CDS sequence (opt5) from neuraminidase__InfluenzaA__ADG42636

SEQ ID NO: 210807 - RNA, 1410 nt, Artificial Sequence
  derived and/or modified CDS sequence (opt5) from neuraminidase__InfluenzaA__ADG42646
augaaccccaaucagagaaucauuaccaucggcagcgugugcaugacaauugggauggccaaccugauccuccaaauuggaaauaucaucuccauuuggaucucucacagcauucagcugggcaaccagaaucagaucgagacguguaaccaauccgucauuaccuacgaaaauaacacauggguuaaucagaccuaugugaacaucucuaauacaaacuucgcugccgggcagagcguggucuccgugaaacuugcgggaaauucuagccugugcccuguuuccggcugggcuauuuacagcaaggacaacucuauccggaucggguccaagggagauguguuugucauucgcgagccguucaucagcuguucuccccucgaaugcagaaccuuuuuccugacacagggcgcccuucugaaugacaaacauuccaacggcaccauuaaggaucggagcccuuaucgcacgcucaugucuugucccaucggggaggugccuucccccuacaacagcagauuugaauccguugccuggucugcuagcgccugccacgacggaauuaauuggcugaccaucggcaucuccgggccugauaacggagcuguggccguccugaaauauaauggcauuaucacagacaccauuaagagcuggcggaacaauauccuccgcacacaagagucugagugugcgugcgugaacggguccuguuucaccgugaugacggauggaccgagcgacggccaggccucuuacaagauuuuuagaaucgaaaaaggcaagaucgucaaaagcguugagaugaaugcucccaacuaucauuacgaagagugcuccuguuacccugauucuagcgagauuacaugcgugugccgggacaauuggcacggguccaaccgccccugggugagcuucaaucagaaccuggaauaucagaucggauacauuuguucuggcaucuuuggggauaauccuagacccaacgacaagaccggauccugcggcccggucagcucuaauggggccaacggagugaaaggcuucuccuuuaaguauggcaacgggguuuggauuggacggacaaagagcaucuccucucgcaauggcuucgagaugauuugggauccuaacggguggaccggaaccgacaauaacuuuagcaucaaacaagacaucgugggcauuaaugaaugguccggguacucuggcagcuucguccagcaucccgagcuuacaggacuggauuguaucagaccuugcuucuggguggaacucauucggggccgccccaaggagaacacgaucuggaccuccgggagcucuauuuccuuuuguggaguuaauagcgacacagugggcuggucuuggcccgauggggcugagcugccuuucaccaucgacaaauga

SEQ ID NO: 210808 - RNA, 1410 nt, Artificial Sequence; identical to SEQ ID NO: 208810
  derived and/or modified CDS sequence (opt5) from neuraminidase__InfluenzaA__ADG42656

SEQ ID NO: 210809 - RNA, 1410 nt, Artificial Sequence; identical to SEQ ID NO: 210723
  derived and/or modified CDS sequence (opt5) from neuraminidase__InfluenzaA__ADG42666

SEQ ID NO: 210810 - RNA, 1410 nt, Artificial Sequence
  derived and/or modified CDS sequence (opt5) from neuraminidase__InfluenzaA__ADG42676
augaaccccaaucagaagaucauuaccaucggcagcgugugcaugacaauugggauggccaaccugauccuccaaauuggaaauaucaucuccauuuggaucucucacagcauucagcugggcaaccagaaucagaucgagauuuguaaccaauccgucaucacguacgaaaauaacaccuggguuaaucagacauaugugaacauuucuaauaccaacuucgcugccgggcagagcguggucuccgugaaacuugcgggaaauucuagccugugcccuguuuccggcugggcuaucuacagcaaggacaacucuaucagaauuggguccaaaggagauguguuugucauccgggagccguucauuagcuguucuccccucgaaugccgcacauuuuuccugacccagggcgcccuucugaaugacaagcauuccaacggcacaaucaaagauagaagcccuuaucggacccucaugucuugucccauuggggaggugccuucccccuacaacagccgcuuugaauccguugccuggucugcuagcgccugccacgacggaaucaauuggcugacgaucggcauuuccgggccugauaacggagcuguggccguccugaaguauaauggcaucauuaccgacacaaucaagagcuggagaaacaauauucuccggacccaagagucugagugugcgugcgugaacggguccuguuucacagugaugaccgauggaccgagcgacggccaggccucuuacaaaaucuuucgcaucgaaaagggcaaaauugucaagagcguugagaugaaugcucccaacuaucauuacgaagagugcuccuguuacccugauucuagcgagaucacgugcgugugcagagacaauuggcacggguccaaccggcccugggugagcuucaaucagaaccuggaauaucagauuggauacaucuguucuggcauuuuuggggauaauccucgccccaacgacaaaacaggauccugcggcccggucagcucuaauggggccaacggagugaagggcuucuccuuuaaguauggcaacgggguuuggaucggaagaaccaaaagcauuuccucucggaauggcuucgagaugaucugggauccuaacggguggacaggaaccgacaauaacuuuagcaucaagcaagacauugugggcaucaaugaaugguccggguacucuggcagcuucguccagcaucccgagcuuaccggacuggauuguauucgcccuugcuucuggguggaacucaucagaggccggcccaaagagaacacaauuuggacguccgggagcucuaucuccuuuuguggaguuaauagcgacaccgugggcuggucuuggcccgauggggcugagcugccuuucacaaucgacaaguga

SEQ ID NO: 210811 - RNA, 1410 nt, Artificial Sequence; identical to SEQ ID NO: 208810
  derived and/or modified CDS sequence (opt5) from neuraminidase__InfluenzaA__ADG42686

SEQ ID NO: 210812 - RNA, 1410 nt, Artificial Sequence; identical to SEQ ID NO: 210387
  derived and/or modified CDS sequence (opt5) from neuraminidase__InfluenzaA__ADG42696

SEQ ID NO: 210813 - RNA, 1410 nt, Artificial Sequence; identical to SEQ ID NO: 210591
  derived and/or modified CDS sequence (opt5) from neuraminidase__InfluenzaA__ADG42706

SEQ ID NO: 210814 - RNA, 1410 nt, Artificial Sequence; identical to SEQ ID NO: 208810
  derived and/or modified CDS sequence (opt5) from neuraminidase__InfluenzaA__ADG42716

SEQ ID NO: 210815 - RNA, 1410 nt, Artificial Sequence; identical to SEQ ID NO: 210098
  derived and/or modified CDS sequence (opt5) from neuraminidase__InfluenzaA__ADG42726

SEQ ID NO: 210816 - RNA, 1410 nt, Artificial Sequence; identical to SEQ ID NO: 209393
  derived and/or modified CDS sequence (opt5) from neuraminidase__InfluenzaA__ADG42746

SEQ ID NO: 210817 - RNA, 1410 nt, Artificial Sequence; identical to SEQ ID NO: 210323
  derived and/or modified CDS sequence (opt5) from neuraminidase__InfluenzaA__ADG42756

SEQ ID NO: 210818 - RNA, 1410 nt, Artificial Sequence; identical to SEQ ID NO: 210098
  derived and/or modified CDS sequence (opt5) from neuraminidase__InfluenzaA__ADG42766

SEQ ID NO: 210819 - RNA, 1410 nt, Artificial Sequence; identical to SEQ ID NO: 210098
  derived and/or modified CDS sequence (opt5) from neuraminidase__InfluenzaA__ADG42776

SEQ ID NO: 210820 - RNA, 1410 nt, Artificial Sequence; identical to SEQ ID NO: 210098
  derived and/or modified CDS sequence (opt5) from neuraminidase__InfluenzaA__ADG42796

SEQ ID NO: 210821 - RNA, 1410 nt, Artificial Sequence
  derived and/or modified CDS sequence (opt5) from neuraminidase__InfluenzaA__ADG42806
augaaccccaaucagaagaucauuaccaucggcagcgugugcaugacaauugggauggccaaccugauccuccaaauuggaaauaucaucuccauuuggaucucucacagcauucagcugggcaaccagaaucagaucgagacguguaaccaauccgucauuaccuacgaaaauaacacauggguuaaucagaccuaugugaacaucucuaauacaaacuucgcugccgggcagagcguggucuccgugaaacuugcgggaaauucuagccugugcccuguuuccggcugggcuauuuacagcaaggacaacucuaucagaaucggguccaaaggagauguguuugucauucgggagccguucaucagcuguucuccccucgaaugccgcaccuuuuuccugacacagggcgcccuucugaaugacaagcauuccaacggcaccauuaaagauagaagcccuuaucggacgcucaugucuugucccaucggggaggugccuucccccuacaacagccgcuuugaauccguugccuggucugcuagcgccugccacgacggaauuaauuggcugaccaucggcaucuccgggccugauaacggagcuguggccguccugaaguauaauggcauuaucacagacaccauuaagagcuggagaaacaauauccuccggacacaagagucugagugugcgugcgugaacggguccuguuucaccgugaugacggauggaccgagcgacggccaggccucuuacaaaauuuuucgcaucgaaaagggcaaaaucgucaagagcguugagaugaaugcucccaacuaucauuacgaagagugcuccuguuacccugauucuagcgagauuacaugcgugugcagagacaauuggcacggguccaaccggcccugggugagcuucaaucagaaccuggaauaucagaucggauacauuuguucuggcaucuuuggggauaauccucgccccaacgacaaaaccggauccugcggcccggucagcucuaauggggccaacggagugaagggcuucuccuuuaaguauggcaacgggguuuggauuggaagaacaaaaagcaucuccucucggaauggcuucgagaugauuugggauccuaacggguggaccggaaccgacaauaacuuuagcaucaagcaagacaucgugggcauuaaugaaugguccggguacucuggcagcuucguccagcaucccgagcuuacaggacuggauuguauccgcccuugcuucuggguggaacucauuagaggccggcccaaagagaacacgaucuggaccuccgggagcucuauuuccuuuuguggaguuaauagcgacacagugucuugguccuggcccgauggcgcugagcugccuuucaccaucgacaaguga

SEQ ID NO: 210822 - RNA, 1410 nt, Artificial Sequence; identical to SEQ ID NO: 208810
  derived and/or modified CDS sequence (opt5) from neuraminidase__InfluenzaA__ADG42816

SEQ ID NO: 210823 - RNA, 1410 nt, Artificial Sequence; identical to SEQ ID NO: 208810
  derived and/or modified CDS sequence (opt5) from neuraminidase__InfluenzaA__ADG42826

SEQ ID NO: 210824 - RNA, 1410 nt, Artificial Sequence; identical to SEQ ID NO: 208810
  derived and/or modified CDS sequence (opt5) from neuraminidase__InfluenzaA__ADG42836

SEQ ID NO: 210825 - RNA, 1410 nt, Artificial Sequence; identical to SEQ ID NO: 210426
  derived and/or modified CDS sequence (opt5) from neuraminidase__InfluenzaA__ADG42846

SEQ ID NO: 210826 - RNA, 1410 nt, Artificial Sequence; identical to SEQ ID NO: 208810
  derived and/or modified CDS sequence (opt5) from neuraminidase__InfluenzaA__ADG42856

SEQ ID NO: 210827 - RNA, 1410 nt, Artificial Sequence; identical to SEQ ID NO: 210422
  derived and/or modified CDS sequence (opt5) from neuraminidase__InfluenzaA__ADG42866

SEQ ID NO: 210828 - RNA, 1410 nt, Artificial Sequence; identical to SEQ ID NO: 208810
  derived and/or modified CDS sequence (opt5) from neuraminidase__InfluenzaA__ADG42876

SEQ ID NO: 210829 - RNA, 1410 nt, Artificial Sequence; identical to SEQ ID NO: 210459
  derived and/or modified CDS sequence (opt5) from neuraminidase__InfluenzaA__ADG42886

SEQ ID NO: 210830 - RNA, 1410 nt, Artificial Sequence; identical to SEQ ID NO: 210402
  derived and/or modified CDS sequence (opt5) from neuraminidase__InfluenzaA__ADG42896

SEQ ID NO: 210831 - RNA, 1410 nt, Artificial Sequence; identical to SEQ ID NO: 210402
  derived and/or modified CDS sequence (opt5) from neuraminidase__InfluenzaA__ADG42906

SEQ ID NO: 210832 - RNA, 1410 nt, Artificial Sequence; identical to SEQ ID NO: 208810
  derived and/or modified CDS sequence (opt5) from neuraminidase__InfluenzaA__ADG42916

SEQ ID NO: 210833 - RNA, 1410 nt, Artificial Sequence; identical to SEQ ID NO: 208810
  derived and/or modified CDS sequence (opt5) from neuraminidase__InfluenzaA__ADG42926

SEQ ID NO: 210834 - RNA, 1410 nt, Artificial Sequence; identical to SEQ ID NO: 208810
  derived and/or modified CDS sequence (opt5) from neuraminidase__InfluenzaA__ADG58909

SEQ ID NO: 210835 - RNA, 1410 nt, Artificial Sequence; identical to SEQ ID NO: 208810
  derived and/or modified CDS sequence (opt5) from neuraminidase__InfluenzaA__ADG58910

SEQ ID NO: 210836 - RNA, 1410 nt, Artificial Sequence
  derived and/or modified CDS sequence (opt5) from neuraminidase__InfluenzaA__ADG58913
augaaccccaaucagaagaucauuaccaucggcagcgugugcaugacaauugggauggccaaccugauccuccaaauuggaaauaucaucuccauuuggaucucucacagcauucagcugggcaaccagaaucagaucgagacguguaaccaauccgucauuaccuacgaaaauaacacauggguuaaucagaccuaugugaacaucucuaauacaaacuucgcugccgggcagagcguggucuccgugaaacuugcgggaaauucuagccugugcccuguuuccggcugggcuauuuacagcaaggacaacucuaucagaaucggguccaaaggagauguguuugucauucgggagccguucaucagcuguucuccccucgaaugccgcaccuuuuuccugacacagggcgcccuucugaaugacaagcauuccaacggcaccauuaaagauagaagcccuuaucggacgcucaugucuugucccaucggggaggugccuucccccuacaacagccgcuuugaauccguugccuggucugcuagcgccugccacgacggaauuaauuggcugaccaucggcaucuccgggccugauaacggagcuguggccguccugaaguauaauggcauuaucacagacaccauuaagagcuggagaaacaauauccuccggacacaagagucugagugugcgugcgugaacggguccuguuucaccgugaugacggauggaccgagcgacggccaggccucuuacaaaauuuuucgcaucgaaaagggcaaaaucgucaagagcguugagaugaaugcucccaacuaucauuacgaagagugcuccuguuacccugauucuagcgagauuacaugcgugugcagagacaauuggcacggguccaaccggcccugggugaccuucaaucagaaccuggaauaucagaucggauacauuuguagcggcaucuuuggggauaauccucgccccaacgacaaaacaggaucuugcggcccggucuccagcaauggggccaacggagugaagggcuucucuuuuaaguauggcaacgggguuuggauuggaagaaccaaauccaucagcucccggaauggcuucgagaugauuugggauccuaacggguggaccggaacagacaauaacuuuucuaucaagcaagacaucgugggcauuaaugaauggagcggguacuccggcucuuucguccagcaucccgagcuuacgggacuggauuguauccgcccuugcuucuggauugaacucaucagaggccggcccaaagagaacaccauuuggacaagcggguccagcaucucuuuuuguggaguuaauuccgacaccgugggcuggagcuggcccgauggggcugagcugccuuucacaaucgacaaguga

SEQ ID NO: 210837 - RNA, 1410 nt, Artificial Sequence; identical to SEQ ID NO: 208810
  derived and/or modified CDS sequence (opt5) from neuraminidase__InfluenzaA__ADG58914

SEQ ID NO: 210838 - RNA, 1410 nt, Artificial Sequence; identical to SEQ ID NO: 208810
  derived and/or modified CDS sequence (opt5) from neuraminidase__InfluenzaA__ADG58916

SEQ ID NO: 210839 - RNA, 1410 nt, Artificial Sequence; identical to SEQ ID NO: 208810
  derived and/or modified CDS sequence (opt5) from neuraminidase__InfluenzaA__ADG58917

SEQ ID NO: 210840 - RNA, 1410 nt, Artificial Sequence
  derived and/or modified CDS sequence (opt5) from neuraminidase__InfluenzaA__ADG58918
augaaccccaaucagaagaucauuaccaucggcagcgugugcaugacaauugggauggccaaccugauccuccaaauuggaaauaucaucuccauuuggaucucucacagcauucagcugggcaaccagaaucagaucgagacguguaaccaauccgucauuaccuacgaaaauaacacauggguuaaucagaccuaugugaacaucucuaauacaaacuucgcugccgggcagagcguggucuccgugaaacuugcgggaaauucuagccugugcccuguuuccggcugggcuauuuacagcaaggacaacucuaucagaaucggguccaaaggagauguguuugucauucgggagccguucaucagcuguucuccccucgaaugccgcaccuuuuuccugacacagggcgcccuucugaaugacaagcauuccaacggcaccauuaaagauagaagcccuuaucggacgcucaugucuugucccaucggggaggugccuucccccuacaacagccgcuuugaauccguugccuggucugcuagcgccugccacgacggaauuaauuggcugaccaucggcaucuccgggccugauaacggagcuguggccguccugaaguauaauggcauuaucacagacaccauuaagagcuggagaaacaauauccuccggacacaagagucugagugugcgugcgugaacggguccuguuucaccgugaugacggauggaccgagcgacggccaggccucuuacaaaauuuuucgcaucgaaaagggcaaaaucgucaagagcguugagaugaaugcucccaacuaucauuacgaagagugcuccuguuacccugauucuagcgagauuacaugcgugugcagagacaauuggcacggguccaaccggcccugggugaccuucaaucagaaccuggaauaucagaucggauacauuuguagcggcaucuuuggggauaauccucgccccaacgacaaaacaggaucuugcggcccggucuccagcaauggggccaacggagugaagggcuucucuuuuaaguauggcaacgggguuuggauuggaagaaccaaauccaucagcucccggaauggcuucgagaugauuugggauccuaacggguggaccggaacagacaauaacuuuucuaucaagcaagacaucgugggcauuaaugaauggagcggguacuccggcucuuucguccagcaucccgagcuuacgggacuggauuguauccgcccuugcuucuggguggaacucauuagaggccggcccaaagagaacaccaucuggacaagcggguccagcauuucuuuuuguggaguuaauuccgacaccgugggcuggagcuggcccgauggggcugagcugccuuucacaaucgacaaguga

SEQ ID NO: 210841 - RNA, 1410 nt, Artificial Sequence; identical to SEQ ID NO: 210836
  derived and/or modified CDS sequence (opt5) from neuraminidase__InfluenzaA__ADG58919

SEQ ID NO: 210842 - RNA, 1410 nt, Artificial Sequence; identical to SEQ ID NO: 208965
  derived and/or modified CDS sequence (opt5) from neuraminidase__InfluenzaA__ADG58920

SEQ ID NO: 210843 - RNA, 1410 nt, Artificial Sequence; identical to SEQ ID NO: 208965
  derived and/or modified CDS sequence (opt5) from neuraminidase__InfluenzaA__ADG58921

SEQ ID NO: 210844 - RNA, 1410 nt, Artificial Sequence; identical to SEQ ID NO: 208965
  derived and/or modified CDS sequence (opt5) from neuraminidase__InfluenzaA__ADG58922

SEQ ID NO: 210845 - RNA, 1410 nt, Artificial Sequence; identical to SEQ ID NO: 208965
  derived and/or modified CDS sequence (opt5) from neuraminidase__InfluenzaA__ADG58923

SEQ ID NO: 210846 - RNA, 1410 nt, Artificial Sequence; identical to SEQ ID NO: 208965
  derived and/or modified CDS sequence (opt5) from neuraminidase__InfluenzaA__ADG58924

SEQ ID NO: 210847 - RNA, 1410 nt, Artificial Sequence; identical to SEQ ID NO: 208965
  derived and/or modified CDS sequence (opt5) from neuraminidase__InfluenzaA__ADG58925

SEQ ID NO: 210848 - RNA, 1410 nt, Artificial Sequence; identical to SEQ ID NO: 208965
  derived and/or modified CDS sequence (opt5) from neuraminidase__InfluenzaA__ADG58926

SEQ ID NO: 210849 - RNA, 1410 nt, Artificial Sequence; identical to SEQ ID NO: 208965
  derived and/or modified CDS sequence (opt5) from neuraminidase__InfluenzaA__ADG58927

SEQ ID NO: 210850 - RNA, 1410 nt, Artificial Sequence; identical to SEQ ID NO: 209828
  derived and/or modified CDS sequence (opt5) from neuraminidase__InfluenzaA__ADG58928

SEQ ID NO: 210851 - RNA, 1410 nt, Artificial Sequence; identical to SEQ ID NO: 209828
  derived and/or modified CDS sequence (opt5) from neuraminidase__InfluenzaA__ADG58929

SEQ ID NO: 210852 - RNA, 1410 nt, Artificial Sequence
  derived and/or modified CDS sequence (opt5) from neuraminidase__InfluenzaA__ADG58931
augaaccccaaucagaagaucauuaccaucggcagcgugugcaugacaauugggauggccaaccugauccuccaaauuggaaauacgaucuccaucuggauuaaccacucuauccagcugggcaaucagaaccagauugagaccuguaaucaaagcgucaucacauacgaaaacaauaccuggguuaaccagacauaugugaauauuuccaacaccaauuucgcugccgggcagucuguggucagcgugaaacuugcgggaaacuccucucugugcccuguuagcggcugggcuaucuacuccaaggacaauagcauuagaaucgggucuaaaggagauguguuugucauccgggagccguucauuuccuguagcccccucgaaugccgcacauuuuuccugacccagggcgcccuucugaacgacaagcauucuaacggcacgaucaaagauagauccccuuaucggacccucaugagcugucccauuggggaggugccuucucccuacaauucccgcuuugaaagcguugccugguccgcuucugccugccacgacggaaucaacuggcugacaauuggcaucagcgggccugauaauggagcuguggccguccugaaguauaacggcaucauuaccgacacaaucaaguccuggagaaauaacauucuccggacccaagagagcgagugugcgugcgugaaugggucuuguuucacggugaugacagauggaccguccgacggccaggccagcuacaaaaucuuucgcauugaaaagggcaaaaucgucaagucuguugagaugaacgcucccaauuaucauuacgaagagugcagcuguuacccugauuccucugagauuaccugcgugugcagagacaacuggcacgggagcaaucggcccuggguguccuucaaccagaaucuggaauaucagaucggauacaucuguagcggcauuuuuggggauaacccucgccccaaugacaaaacaggaucuugcggcccggucuccagcaacggggccaacggagugaagggcuucucuuuuaaguauggcaaugggguuuggaucggaagaaccaaauccauuagcucccggaacggcuucgagaugaucugggauccuaauggguggaccggaacagacaacaauuuuucuauuaagcaagacaucgugggcaucaacgaauggagcggguacuccggcucuuucguccagcaucccgagcuuacgggacuggauuguauucgcccuugcuucuggguggaacucaucagaggccggcccaaagagaauaccauuuggacaagcggguccagcaucucuuuuuguggaguuaacuccgacaccgugggcuggagcuggcccgauggggcugagcugccuuucacaauugacaaguga

SEQ ID NO: 210853 - RNA, 1410 nt, Artificial Sequence; identical to SEQ ID NO: 210852
  derived and/or modified CDS sequence (opt5) from neuraminidase__InfluenzaA__ADG58932

SEQ ID NO: 210854 - RNA, 1410 nt, Artificial Sequence; identical to SEQ ID NO: 210852
  derived and/or modified CDS sequence (opt5) from neuraminidase__InfluenzaA__ADG58933

SEQ ID NO: 210855 - RNA, 1410 nt, Artificial Sequence; identical to SEQ ID NO: 210852
  derived and/or modified CDS sequence (opt5) from neuraminidase__InfluenzaA__ADG58934

SEQ ID NO: 210856 - RNA, 1410 nt, Artificial Sequence; identical to SEQ ID NO: 210852
  derived and/or modified CDS sequence (opt5) from neuraminidase__InfluenzaA__ADG58935

SEQ ID NO: 210857 - RNA, 1410 nt, Artificial Sequence; identical to SEQ ID NO: 210852
  derived and/or modified CDS sequence (opt5) from neuraminidase__InfluenzaA__ADG58936

SEQ ID NO: 210858 - RNA, 1410 nt, Artificial Sequence; identical to SEQ ID NO: 210852
  derived and/or modified CDS sequence (opt5) from neuraminidase__InfluenzaA__ADG58937

SEQ ID NO: 210859 - RNA, 1410 nt, Artificial Sequence; identical to SEQ ID NO: 210852
  derived and/or modified CDS sequence (opt5) from neuraminidase__InfluenzaA__ADG58938

SEQ ID NO: 210860 - RNA, 1410 nt, Artificial Sequence
  derived and/or modified CDS sequence (opt5) from neuraminidase__InfluenzaA__ADG59589
augaaccccaaucagaagaucauuaccaucggcagcgugugcaugacaauugggauggccaaccugauccuccaaauuggaaauaucaucuccauuuggaucucucacagcauucagcugggcaaccagaaucagaucgagacguguaaccaauccgucauuaccuacgaaaauaacacauggguuaaucagaccuaugugaacaucucuaauacaaacuucgcugccgggcagagcguggucuccgugaaacuugcgggaaauucuagccugugcccuguuuccggcugggcuauuuacagcaaggacaacucuaucagaaucggguccaaaggagauguguuugucauucgggagccguucaucagcuguucuccccucgaaugccgcaccuuuuuccugacacagggcgcccuucugaaugacaagcauuccaacggcaccauuaaagauagaagcccuuaucggacgcucaugucuugucccaucggggaggugccuucccccuacaacagccgcuuugaauccguugccuggucugcuagcgccugccacgacggaauuaauuggcugaccaucggcaucuccgggccugauaacggagcuauggccgugcugaaguauaauggcauuaucacagacaccauuaagagcuggagaaacaauauccuccggacacaagagucugagugugcgugcgucaacggguccuguuucaccgugaugacggauggaccgagcgacggccaggccucuuacaaaauuuuucgcaucgaaaagggcaaaguggucaagagcguugagaugaaugcucccaacuaucauuacgaagagugcuccuguuacccugauucuagcgagaucacaugcgugugcagagacaauuggcacggguccaaccggcccugggugagcuucaaucagaaccuggaauaucagauuggauacaucuguucuggcauuuuuggggauaauccucgccccaacgacaaaaccggauccugcggcccggucagcucuaauggggccaacggagugaagggcuucuccuuuaaguauggcaacgggguuuggaucggaagaacaaaaagcauuuccucucggaauggcuucgagaugaucugggauccuaacggguggaccggaaccgacaauaacuuuagcauuaagcaagacaucgugggcaucaaugaaugguccggguacucuggcagcuucguccagcaucccgagcuuacaggacuggauuguauucgcccuugcuucuggguggaacucaucagaggccggcccaaagagaacacgauuuggaccuccgggagcucuaucuccuuuuguggaguuaauagcgacacagugggcuggucuuggcccgauggggcugagcugccuuucaccauugacaaguga

SEQ ID NO: 210861 - RNA, 1410 nt, Artificial Sequence; identical to SEQ ID NO: 208810
  derived and/or modified CDS sequence (opt5) from neuraminidase__InfluenzaA__ADG59590

SEQ ID NO: 210862 - RNA, 1410 nt, Artificial Sequence; identical to SEQ ID NO: 208810
  derived and/or modified CDS sequence (opt5) from neuraminidase__InfluenzaA__ADG59591

SEQ ID NO: 210863 - RNA, 1410 nt, Artificial Sequence; identical to SEQ ID NO: 208810
  derived and/or modified CDS sequence (opt5) from neuraminidase__InfluenzaA__ADG59592

SEQ ID NO: 210864 - RNA, 1410 nt, Artificial Sequence; identical to SEQ ID NO: 210712
  derived and/or modified CDS sequence (opt5) from neuraminidase__InfluenzaA__ADG59593

SEQ ID NO: 210865 - RNA, 1410 nt, Artificial Sequence; identical to SEQ ID NO: 209987
  derived and/or modified CDS sequence (opt5) from neuraminidase__InfluenzaA__ADG59594

SEQ ID NO: 210866 - RNA, 1410 nt, Artificial Sequence; identical to SEQ ID NO: 209987
  derived and/or modified CDS sequence (opt5) from neuraminidase__InfluenzaA__ADG59595

SEQ ID NO: 210867 - RNA, 1410 nt, Artificial Sequence
  derived and/or modified CDS sequence (opt5) from neuraminidase__InfluenzaA__ADG59596
augaaccccaaucagaagaucauuaccaucggcagcgugugcaugacaauugggauggccaaccugauccuccaaauuggaaauaucaucuccauuuggaucucucacagcauucagcugggcaaccagaaucagaucgagacguguaaccaauccgucauuaccuacgaaaauaacacauggguuaaucagaccuaugugaacaucucuaauacaaacuucgcugccgggcagagcguggucuccgugaaacuugcgggaaauucuagccugugcccuguuuccggcugggcuauuuacagcaaggacaacucuaucagaaucggguccaaaggagauguguuugucauucgggagccguucaucagcuguucuccccucgaaugccgcaccuuuuuccugacacagggcgcccuucugaaugacaagcauuccaacggcaccauuaaagauagaagcccuuaucggacgcucaugucuugucccaucggggaggugccuucccccuacaacagccgcuuugaauccguugccuggucugcuagcgccugccacgacggaauuaauuggcugaccaucggcaucuccgggccugauaacggagcuguggccguccugaaguauaauggcauuaucacagacaccauuaagagcuggagaaacaauauccuccggacacaagagucugagugugcgugcgugaacggguccuguuucaccgugaugacggauggaccgagcgacggccaggccucuuacaaaauuuuucgcaucgaaaagggcaaaaucgucaagagcguugagaugaaugcucccaacuaucauuacgaagagugcuccuguuacccugauucuagcgagauuacaugcgugugcagagacaauuggcacggguccaaccggcccugggugagcuucaaucagaaccuggaauaucagaucggauacauuuguucuggcaucuuuggggauaauccucgccccaacgacagaaccggauccugcggcccggucagcucuaauggggccaacggagugaaaggcuucuccuuuaaguauggcaacgggguuuggauuggacggacaaagagcaucuccucucgcaauggcuucgagaugauuugggauccuaacggguggaccggaaccgacaauaacuuuagcaucaaacaagacaucgugggcauuaaugaaugguccggguacucuggcagcuucguccagcaucccgagcuuacaggacuggauuguaucagaccuugcuucuggguggaacucauucggggccgccccaaggagaacacgaucuggaccuccgggagcucuauuuccuuuuguggaguuaauagcgacacagugggcuggucuuggcccgauggggcugagcugccuuucaccaucgacaaauga

SEQ ID NO: 210868 - RNA, 1410 nt, Artificial Sequence; identical to SEQ ID NO: 208810
  derived and/or modified CDS sequence (opt5) from neuraminidase__InfluenzaA__ADG59597

SEQ ID NO: 210869 - RNA, 1410 nt, Artificial Sequence; identical to SEQ ID NO: 208810
  derived and/or modified CDS sequence (opt5) from neuraminidase__InfluenzaA__ADG59598

SEQ ID NO: 210870 - RNA, 1410 nt, Artificial Sequence; identical to SEQ ID NO: 209985
  derived and/or modified CDS sequence (opt5) from neuraminidase__InfluenzaA__ADG59599

SEQ ID NO: 210871 - RNA, 1410 nt, Artificial Sequence; identical to SEQ ID NO: 208810
  derived and/or modified CDS sequence (opt5) from neuraminidase__InfluenzaA__ADG59601

SEQ ID NO: 210872 - RNA, 1410 nt, Artificial Sequence; identical to SEQ ID NO: 210712
  derived and/or modified CDS sequence (opt5) from neuraminidase__InfluenzaA__ADG59602

SEQ ID NO: 210873 - RNA, 1410 nt, Artificial Sequence; identical to SEQ ID NO: 210712
  derived and/or modified CDS sequence (opt5) from neuraminidase__InfluenzaA__ADG59603

SEQ ID NO: 210874 - RNA, 1410 nt, Artificial Sequence; identical to SEQ ID NO: 208810
  derived and/or modified CDS sequence (opt5) from neuraminidase__InfluenzaA__ADG59604

SEQ ID NO: 210875 - RNA, 1410 nt, Artificial Sequence; identical to SEQ ID NO: 208810
  derived and/or modified CDS sequence (opt5) from neuraminidase__InfluenzaA__ADG59605

SEQ ID NO: 210876 - RNA, 1410 nt, Artificial Sequence; identical to SEQ ID NO: 209828
  derived and/or modified CDS sequence (opt5) from neuraminidase__InfluenzaA__ADG59606

SEQ ID NO: 210877 - RNA, 1410 nt, Artificial Sequence; identical to SEQ ID NO: 208810
  derived and/or modified CDS sequence (opt5) from neuraminidase__InfluenzaA__ADG59607

SEQ ID NO: 210878 - RNA, 1410 nt, Artificial Sequence; identical to SEQ ID NO: 208810
  derived and/or modified CDS sequence (opt5) from neuraminidase__InfluenzaA__ADG59608

SEQ ID NO: 210879 - RNA, 1410 nt, Artificial Sequence; identical to SEQ ID NO: 209631
  derived and/or modified CDS sequence (opt5) from neuraminidase__InfluenzaA__ADG59609

SEQ ID NO: 210880 - RNA, 1410 nt, Artificial Sequence; identical to SEQ ID NO: 210712
  derived and/or modified CDS sequence (opt5) from neuraminidase__InfluenzaA__ADG59610

SEQ ID NO: 210881 - RNA, 1410 nt, Artificial Sequence; identical to SEQ ID NO: 209828
  derived and/or modified CDS sequence (opt5) from neuraminidase__InfluenzaA__ADG59611

SEQ ID NO: 210882 - RNA, 1410 nt, Artificial Sequence; identical to SEQ ID NO: 210712
  derived and/or modified CDS sequence (opt5) from neuraminidase__InfluenzaA__ADG59612

SEQ ID NO: 210883 - RNA, 1410 nt, Artificial Sequence
  derived and/or modified CDS sequence (opt5) from neuraminidase__InfluenzaA__ADG59613
augaaccccaaucagaagaucauuaccaucggcagcgugugcaugacaauugggaugacgaaccugauccuccaacugggaaauauuaucuccaucuggauuucucacagcauccagcuuggcaaccagaaucagauugagaccuguaaccaauccgucaucacauacgaaaauaacaccuggguuaaucagacauaugugaacauuucuaauaccaacuucgccgcugggcagagcguggucuccgugaaacuggccggaaauucuagccucugcccuguuuccggcugggcgaucuacagcaaggacaacucuauuagaaucggguccaaaggagauguguuugucauccgggagccguucauuagcuguucuccccuggaaugccgcacauuuuuccuuacccagggcgcucugcucaaugacaagcauuccaacggcacgaucaaagauagaagcccuuaucggacccugaugucuugucccauuggggaggugccuucccccuacaacagccgcuuugaauccguugccuggucugccagcgcuugccacgacggaaucaauuggcugacaauuggcaucuccgggccugauaacggagccguggcuguccucaaguauaauggcaucauuaccgacacaaucaagagcuggagaaacaauauucugcggacccaagagucugagugugccugcgugaacggguccuguuucacggugaugacagauggaccgagcgacggccaggcgucuuacaaaaucuuucgcauugaaaagggcaaaaucgucaagagcguugagaugaaugcccccaacuaucauuacgaagagugcuccuguuacccugauucuagcgagauuaccugcgugugcagagacaauuggcacggguccaaccggcccugggugagcuucaaucagaaccuugaauaucagaucggauacaucuguucuggcauuuuuggggauaauccucgccccaacgacaaaacaggauccugcggcccggucagcucuaauggggcuaacggagugaagggcuucuccuuuaaguauggcaacgggguuuggaucggaagaaccaaaagcauuuccucucggaauggcuucgagaugaucugggauccuaacggguggaccggaacagacaauagcuuuuccauuaagcaagacaucgugggcaucaacgaauggucuggguacagcggcuccuucguccagcaucccgagcugacgggacucgauuguauucgcccuugcuucuggguggaacugaucagaggccggcccaaagagaauaccguuuggacaagcgggucuuccauuagcuuuuguggagugaacucugacaccgucggcugguccuggcccgauggggccgagcuuccuuucacaaucgacaaguga

SEQ ID NO: 210884 - RNA, 1410 nt, Artificial Sequence; identical to SEQ ID NO: 209985
  derived and/or modified CDS sequence (opt5) from neuraminidase__InfluenzaA__ADG59614

SEQ ID NO: 210885 - RNA, 1410 nt, Artificial Sequence; identical to SEQ ID NO: 208810
  derived and/or modified CDS sequence (opt5) from neuraminidase__InfluenzaA__ADH01811

SEQ ID NO: 210886 - RNA, 1410 nt, Artificial Sequence; identical to SEQ ID NO: 208810
  derived and/or modified CDS sequence (opt5) from neuraminidase__InfluenzaA__ADH01821

SEQ ID NO: 210887 - RNA, 1410 nt, Artificial Sequence; identical to SEQ ID NO: 208810
  derived and/or modified CDS sequence (opt5) from neuraminidase__InfluenzaA__ADH01831

SEQ ID NO: 210888 - RNA, 1410 nt, Artificial Sequence; identical to SEQ ID NO: 208810
  derived and/or modified CDS sequence (opt5) from neuraminidase__InfluenzaA__ADH01841

SEQ ID NO: 210889 - RNA, 1410 nt, Artificial Sequence; identical to SEQ ID NO: 208810
  derived and/or modified CDS sequence (opt5) from neuraminidase__InfluenzaA__ADH01851

SEQ ID NO: 210890 - RNA, 1410 nt, Artificial Sequence; identical to SEQ ID NO: 208810
  derived and/or modified CDS sequence (opt5) from neuraminidase__InfluenzaA__ADH01861

SEQ ID NO: 210891 - RNA, 1410 nt, Artificial Sequence; identical to SEQ ID NO: 208810
  derived and/or modified CDS sequence (opt5) from neuraminidase__InfluenzaA__ADH01871

SEQ ID NO: 210892 - RNA, 1410 nt, Artificial Sequence; identical to SEQ ID NO: 208810
  derived and/or modified CDS sequence (opt5) from neuraminidase__InfluenzaA__ADH01881

SEQ ID NO: 210893 - RNA, 1410 nt, Artificial Sequence; identical to SEQ ID NO: 208810
  derived and/or modified CDS sequence (opt5) from neuraminidase__InfluenzaA__ADH01891

SEQ ID NO: 210894 - RNA, 1410 nt, Artificial Sequence; identical to SEQ ID NO: 208810
  derived and/or modified CDS sequence (opt5) from neuraminidase__InfluenzaA__ADH01901

SEQ ID NO: 210895 - RNA, 1410 nt, Artificial Sequence; identical to SEQ ID NO: 208810
  derived and/or modified CDS sequence (opt5) from neuraminidase__InfluenzaA__ADH01911

SEQ ID NO: 210896 - RNA, 1410 nt, Artificial Sequence; identical to SEQ ID NO: 208810
  derived and/or modified CDS sequence (opt5) from neuraminidase__InfluenzaA__ADH01921

SEQ ID NO: 210897 - RNA, 1410 nt, Artificial Sequence; identical to SEQ ID NO: 208810
  derived and/or modified CDS sequence (opt5) from neuraminidase__InfluenzaA__ADH01931

SEQ ID NO: 210898 - RNA, 1410 nt, Artificial Sequence; identical to SEQ ID NO: 210701
  derived and/or modified CDS sequence (opt5) from neuraminidase__InfluenzaA__ADH01941

SEQ ID NO: 210899 - RNA, 1410 nt, Artificial Sequence; identical to SEQ ID NO: 208810
  derived and/or modified CDS sequence (opt5) from neuraminidase__InfluenzaA__ADH01951

SEQ ID NO: 210900 - RNA, 1410 nt, Artificial Sequence; identical to SEQ ID NO: 208810
  derived and/or modified CDS sequence (opt5) from neuraminidase__InfluenzaA__ADH01961

SEQ ID NO: 210901 - RNA, 1410 nt, Artificial Sequence
  derived and/or modified CDS sequence (opt5) from neuraminidase__InfluenzaA__ADH01981
augaaccccaaucagaagaucauuaccaucggcagcgccugcaugacaauugggauggcuaaccugauccuccaaauuggaaauaucaucuccauuuggaucucucacagcauucagcugggcaaccagaaucagacggagaccuguaaccaauccgugaucacauacgaaaauaacaccugggucaaucagacauauguuaacauuucuaauaccaacuucgccgcggggcagagcgugguguccgucaaacuugcuggaaauucuagccugugcccuguguccggcugggccaucuacagcaaggacaacucuauuagaaucggguccaaaggagauguuuuugugauccgggagccguucauuagcuguucuccccucgaaugccgcacauuuuuccugacccagggcgcccuucugaaugacaagcauuccaacggcacgaucaaagauagaagcccuuaucggacccucaugucuugucccauuggggaggucccuucccccuacaacagccgcuuugaauccguggcuuggucugccagcgcuugccacgacggaaucaauuggcugacaauuggcaucuccgggccugauaacggagccguugcggugcugaaguauaauggcaucauuaccgacacaaucaagagcuggagaaacaauauucuccggacccaagagucugagugugccugcgucaacggguccuguuucacggugaugacagauggaccgagcgacggccaggcuucuuacaaaaucuuucgcauugaaaagggcaaaaucgucaagagcguggagaugaaugcccccaacuaucauuacgaagagugcuccuguuacccugauucuagcgagauuaccugcguuugcagagacaauuggcacggguccaaccggcccugggugagcuucaaucagaaccuggaauaucagaucggauacaucuguucuggcauuuuuggggauaauccucgccccaacgacaaaacaggauccugcggcccggugagcucuaauggggcuaacggagucaagggcuucuccuuuaaguauggcaacgggguguggaucggaagaaccaaaagcauuuccucucggaauggcuucgagaugaucugggauccuaacggguggaccggaacagacaauaacuuuagcauuaagcaagacaucguuggcaucaaugaaugguccggguacucuggcagcuucgugcagcaucccgagcuuacgggacuggauuguauucgcccuugcuucugggucgaacucaucagaggccggcccaaagagaacaccauuuggacauccgggagcucuaucuccuuuuguggagugaauagcgacaccguuggcuggucuuggcccgauggggccgagcugccuuucacaauugacaaguga

SEQ ID NO: 210902 - RNA, 1410 nt, Artificial Sequence; identical to SEQ ID NO: 210098
  derived and/or modified CDS sequence (opt5) from neuraminidase__InfluenzaA__ADH01991

SEQ ID NO: 210903 - RNA, 1410 nt, Artificial Sequence; identical to SEQ ID NO: 210767
  derived and/or modified CDS sequence (opt5) from neuraminidase__InfluenzaA__ADH02011

SEQ ID NO: 210904 - RNA, 1410 nt, Artificial Sequence; identical to SEQ ID NO: 209987
  derived and/or modified CDS sequence (opt5) from neuraminidase__InfluenzaA__ADH02021

SEQ ID NO: 210905 - RNA, 1410 nt, Artificial Sequence; identical to SEQ ID NO: 208810
  derived and/or modified CDS sequence (opt5) from neuraminidase__InfluenzaA__ADI24510

SEQ ID NO: 210906 - RNA, 1410 nt, Artificial Sequence; identical to SEQ ID NO: 208810
  derived and/or modified CDS sequence (opt5) from neuraminidase__InfluenzaA__ADI24516

SEQ ID NO: 210907 - RNA, 1410 nt, Artificial Sequence; identical to SEQ ID NO: 208810
  derived and/or modified CDS sequence (opt5) from neuraminidase__InfluenzaA__ADI24518

SEQ ID NO: 210908 - RNA, 1410 nt, Artificial Sequence; identical to SEQ ID NO: 208810
  derived and/or modified CDS sequence (opt5) from neuraminidase__InfluenzaA__ADI24522

SEQ ID NO: 210909 - RNA, 1410 nt, Artificial Sequence; identical to SEQ ID NO: 208810
  derived and/or modified CDS sequence (opt5) from neuraminidase__InfluenzaA__ADI24524

SEQ ID NO: 210910 - RNA, 1410 nt, Artificial Sequence; identical to SEQ ID NO: 208810
  derived and/or modified CDS sequence (opt5) from neuraminidase__InfluenzaA__ADI24526

SEQ ID NO: 210911 - RNA, 1410 nt, Artificial Sequence; identical to SEQ ID NO: 208810
  derived and/or modified CDS sequence (opt5) from neuraminidase__InfluenzaA__ADI24528

SEQ ID NO: 210912 - RNA, 1410 nt, Artificial Sequence; identical to SEQ ID NO: 208810
  derived and/or modified CDS sequence (opt5) from neuraminidase__InfluenzaA__ADI24530

SEQ ID NO: 210913 - RNA, 1410 nt, Artificial Sequence
  derived and/or modified CDS sequence (opt5) from neuraminidase__InfluenzaA__ADI24532
augaaccccaaucagaagaucauuaccaucggcagcgugugcaugacaauugggauggccaaccugauccuccaaauuggaaauaucaucuccauuuggaucucucacagcauucagcugggcaaccagaaucagaucgagacguguaaccaauccgucauuaccuacgaaaauaacacauggguuaaucagaccuaugugaacaucucuaauacaaacuucgcugccgggcagagcguggucuccgugaaacuugcgggaaauucuagccugugcccuguuuccggcugggcuauuuacagcaaggacaacucuaucagaaucggguccaaaggagauguguuugucauucgggagccguucaucagcuguucuccccucgaaugccgcaccuuuuuccugacacagggcgcccuucugaaugacaagcauuccaacggcaccauuaaagauagaagcccuuaucggacgcucaugucuugucccaucggggaggugccuucccccuacaacagccgcuuugaauccguugccuggucugcuagcgccugccacgacggaauuaauuggcugaccaucggcaucuccgggccugauaacggagcuguggccguccugaaguauaauggcauuaucacagacaccauuaagagcuggagaaacaauauccuccggacacaagagucugagugugcgugcgugaacggguccuguuucaccgugaugacggauggaccgagcgacggccaggccucuuacaaaauuuuucgcaucgaaaagggcaaaaucgucaagagcguugagaugaaugcucccaacuaucauuacgaagagugcuccuguuacccugauucuagcgagauuacaugcgugugcagagacaauuggcacggguccaaccggcccugggugagcuucaaucagaaccuggaauaucagaucggauacauuuguucuggcaucuuuggggauaauccucgccccaacgacaaaaccggauccugcggcccggucucuagcuccggggccaauggagugaagggcuucagcuuuaaguauggcaacgggguuuggauuggaagaacaaaauccaucucuagccggaacggcuucgagaugauuugggauccuaauggguggaccggaaccgacaacaauuuuuccaucaagcaagacaucgugggcauuaacgaauggucuggguacagcggcuccuucguccagcaucccgagcuuacaggacuggauuguauccgcccuugcuucuggguggaacucauuagaggccggcccaaagagaauacgaucuggaccagcgggucuuccauuagcuuuuguggaguuaacucugacacagugggcugguccuggcccgauggggcugagcugccuuucaccaucgacaaguga

SEQ ID NO: 210914 - RNA, 1410 nt, Artificial Sequence; identical to SEQ ID NO: 208810
  derived and/or modified CDS sequence (opt5) from neuraminidase__InfluenzaA__ADI24538

SEQ ID NO: 210915 - RNA, 1410 nt, Artificial Sequence; identical to SEQ ID NO: 208810
  derived and/or modified CDS sequence (opt5) from neuraminidase__InfluenzaA__ADI24548

SEQ ID NO: 210916 - RNA, 1410 nt, Artificial Sequence; identical to SEQ ID NO: 208810
  derived and/or modified CDS sequence (opt5) from neuraminidase__InfluenzaA__ADI24556

SEQ ID NO: 210917 - RNA, 1410 nt, Artificial Sequence; identical to SEQ ID NO: 208810
  derived and/or modified CDS sequence (opt5) from neuraminidase__InfluenzaA__ADI24558

SEQ ID NO: 210918 - RNA, 1410 nt, Artificial Sequence; identical to SEQ ID NO: 208810
  derived and/or modified CDS sequence (opt5) from neuraminidase__InfluenzaA__ADI24560

SEQ ID NO: 210919 - RNA, 1410 nt, Artificial Sequence; identical to SEQ ID NO: 208810
  derived and/or modified CDS sequence (opt5) from neuraminidase__InfluenzaA__ADI24562

SEQ ID NO: 210920 - RNA, 1410 nt, Artificial Sequence; identical to SEQ ID NO: 208810
  derived and/or modified CDS sequence (opt5) from neuraminidase__InfluenzaA__ADI24564

SEQ ID NO: 210921 - RNA, 1410 nt, Artificial Sequence; identical to SEQ ID NO: 208810
  derived and/or modified CDS sequence (opt5) from neuraminidase__InfluenzaA__ADI24566

SEQ ID NO: 210922 - RNA, 1410 nt, Artificial Sequence; identical to SEQ ID NO: 208810
  derived and/or modified CDS sequence (opt5) from neuraminidase__InfluenzaA__ADI24568

SEQ ID NO: 210923 - RNA, 1410 nt, Artificial Sequence; identical to SEQ ID NO: 208810
  derived and/or modified CDS sequence (opt5) from neuraminidase__InfluenzaA__ADI24570

SEQ ID NO: 210924 - RNA, 1410 nt, Artificial Sequence; identical to SEQ ID NO: 208810
  derived and/or modified CDS sequence (opt5) from neuraminidase__InfluenzaA__ADI24572

SEQ ID NO: 210925 - RNA, 1410 nt, Artificial Sequence; identical to SEQ ID NO: 208810
  derived and/or modified CDS sequence (opt5) from neuraminidase__InfluenzaA__ADI24574

SEQ ID NO: 210926 - RNA, 1410 nt, Artificial Sequence; identical to SEQ ID NO: 208810
  derived and/or modified CDS sequence (opt5) from neuraminidase__InfluenzaA__ADI24576

SEQ ID NO: 210927 - RNA, 1410 nt, Artificial Sequence; identical to SEQ ID NO: 208810
  derived and/or modified CDS sequence (opt5) from neuraminidase__InfluenzaA__ADI24580

SEQ ID NO: 210928 - RNA, 1410 nt, Artificial Sequence; identical to SEQ ID NO: 209985
  derived and/or modified CDS sequence (opt5) from neuraminidase__InfluenzaA__ADI24582

SEQ ID NO: 210929 - RNA, 1410 nt, Artificial Sequence
  derived and/or modified CDS sequence (opt5) from neuraminidase__InfluenzaA__ADI24584
augaaccccaaucagaagaucauuaccaucggcagcgugugcaugacaauugggauggccaaccugauccuccaaauuggaaauaucaucuccauuuggaucucucacagcauucagcugggcaaccagaaucagaucgagacguguaaccaauccgucauuaccuacgaaaauaacacauggguuaaucagaccuaugugaacaucucuaauacaaacuucgcugccgggcagagcguggucccugugaaacuugcgggaaauuccucucugugcccgguuaacggcugggcuauuuacagcaaggacaauuccaucagaaucgggagcaaaggagauguguuugucauucgggagcccuucaucucuuguuccccucucgaaugccgcaccuuuuuccugacacagggcgcccuucugaacgacaagcauagcaacggcaccauuaaagauagaucucccuaucggacgcucauguccuguccuaucggggaggugcccagcccuuacaauucucgcuuugaauccguugccuggagcgcuuccgccugccacgacggaauuaacuggcugaccaucggcaucucugggccggauaauggagcuguggccguccugaaguauaacggcauuaucacagacaccauuaagagcuggagaaauaacauccuccggacacaagaguccgagugugcgugcgugaaugggagcuguuucaccgugaugacggauggacccucugacggccaggccuccuacaaaauuuuucgcaucgaaaagggcaaaaucgucaagagcguugagaugaacgcuccuaauuaucauuacgaagagugcucuuguuaccccgauagcuccgagauuacaugcgugugcagagacaacuggcacgggucuaaucggccuugggugagcuucaaccagaaucuggaauaucagaucggauacauuuguuccggcaucuuuggggauaacccccgcccgaaugacaaaaccggaagcugcggcccugucucuuccaacggggccaacggagugaagggcuucagcuuuaaguauggcaaugggguuuggauuggaagaacaaaaucuaucuccagccggaacggcuucgagaugauuugggaucccaauggguggaccggaaccgacaacaauuuuuccaucaagcaagacaucgugggcauuaacgaauggucuggguacagcggcuccuucguccagcauccugagcuuacaggacuggauuguauccgccccugcuucuggguggaacucauuagaggccggcccaaagagaauacgaucuggaccucugggagcuccauuagcuuuuguggaguuaacucugacacagugggcugguccuggccugauggggcugagcugccguucaccaucgacaaguga

SEQ ID NO: 210930 - RNA, 1410 nt, Artificial Sequence; identical to SEQ ID NO: 209164
  derived and/or modified CDS sequence (opt5) from neuraminidase__InfluenzaA__ADI24592

SEQ ID NO: 210931 - RNA, 1410 nt, Artificial Sequence; identical to SEQ ID NO: 208810
  derived and/or modified CDS sequence (opt5) from neuraminidase__InfluenzaA__ADI24598

SEQ ID NO: 210932 - RNA, 1410 nt, Artificial Sequence; identical to SEQ ID NO: 208810
  derived and/or modified CDS sequence (opt5) from neuraminidase__InfluenzaA__ADI24604

SEQ ID NO: 210933 - RNA, 1410 nt, Artificial Sequence; identical to SEQ ID NO: 208810
  derived and/or modified CDS sequence (opt5) from neuraminidase__InfluenzaA__ADI24620

SEQ ID NO: 210934 - RNA, 1410 nt, Artificial Sequence; identical to SEQ ID NO: 208810
  derived and/or modified CDS sequence (opt5) from neuraminidase__InfluenzaA__ADI24622

SEQ ID NO: 210935 - RNA, 1410 nt, Artificial Sequence; identical to SEQ ID NO: 209164
  derived and/or modified CDS sequence (opt5) from neuraminidase__InfluenzaA__ADI46780

SEQ ID NO: 210936 - RNA, 1410 nt, Artificial Sequence
  derived and/or modified CDS sequence (opt5) from neuraminidase__InfluenzaA__ADI46789
augaaccccaaucagaagaucauuaccaucggcagcgugugcaugacaauugggauggccaaccugaugcuccaaaucggaaauauuaucuccaucuggauuucucacagcauccagcugggcaaccagaaucagauugagacguguaaccaauccgucaucaccuacgaaaauaacacauggguuaaucagaccuaugugaacauuucuaauacaaacuucgcugccgggcagagcguggucuccgugaaacuugcgggaaauucuagccugugcccuguuuccggcugggcuaucuacagcaaggacaacucugugagaauuggguccaaaggagaugucuuugugauccgggagccguucaucagcuguucuccccucgaaugccgcaccuuuuuccugacacagggcgcccuucugaaugacaagcauuccaacggcaccauuaaagauagaagcccuuaucggacgcucaugucuugucccaucggggagguuccuucccccuacaacagccgcuuugaauccguggccuggucugcuagcgccugccacgacggaauuaauuggcugaccaucggcauuuccgggccugauaacggagcugucgccgugcugaaguauaauggcaucaucacagacaccauuaagagcuggagaaacaauauccuccggacacaagagucugagugugcgugcgugaacggguccuguuucaccgucaugacggauggaccgagcaaugaacaggccucuuacaaaauuuuucgcaucgagaagggcaaaauuguuaagagcguggaaaugaacgcucccaauuaucauuacgaggagugcuccuguuacccugacucuagcgaaaucacaugcgugugcagagauaacuggcacggcuccaaucggcccugggucagcuucaaccagaaucuggaguaucagaucggguacauuuguucuggaaucuuuggcgacaacccucgccccaaugauaaaaccggguccugcggaccggugagcucuaacggcgccaacgggguuaagggauucuccuuuaaguauggcaauggcguguggauugggagaacaaaaagcaucuccucucggaacggauucgaaaugauuugggacccuaauggcuggaccgggaccgauaacaauuuuagcaucaagcaagacauugucggaaucaacgagugguccggcuacucugggagcuucgugcagcaucccgaacuuacaggccuggacuguauccgcccuugcuucuggguugagcucauuagaggacggcccaaagagaauacgaucuggaccuccggcagcucuauuuccuuuuguggggugaacagcgauacagucggauggucuuggcccgacggcgcugaacugccuuucaccaucgauaaguga

SEQ ID NO: 210937 - RNA, 1410 nt, Artificial Sequence; identical to SEQ ID NO: 208810
  derived and/or modified CDS sequence (opt5) from neuraminidase__InfluenzaA__ADI48185

SEQ ID NO: 210938 - RNA, 1410 nt, Artificial Sequence; identical to SEQ ID NO: 208810
  derived and/or modified CDS sequence (opt5) from neuraminidase__InfluenzaA__ADI48187

SEQ ID NO: 210939 - RNA, 1410 nt, Artificial Sequence; identical to SEQ ID NO: 208810
  derived and/or modified CDS sequence (opt5) from neuraminidase__InfluenzaA__ADI48189

SEQ ID NO: 210940 - RNA, 1410 nt, Artificial Sequence; identical to SEQ ID NO: 208810
  derived and/or modified CDS sequence (opt5) from neuraminidase__InfluenzaA__ADI48191

SEQ ID NO: 210941 - RNA, 1410 nt, Artificial Sequence; identical to SEQ ID NO: 208810
  derived and/or modified CDS sequence (opt5) from neuraminidase__InfluenzaA__ADI48193

SEQ ID NO: 210942 - RNA, 1410 nt, Artificial Sequence; identical to SEQ ID NO: 208810
  derived and/or modified CDS sequence (opt5) from neuraminidase__InfluenzaA__ADI48195

SEQ ID NO: 210943 - RNA, 1410 nt, Artificial Sequence
  derived and/or modified CDS sequence (opt5) from neuraminidase__InfluenzaA__ADI48197
augaaccccaaucagaagaucauuaccaucggcagcgugugcaugacaauugggauggccaaccugauccuccaaauuggaaauaucaucuccauuuggaucucucacagcauucaguucggcaaccagaaucagaucgagacguguaaccaauccgucauuaccuacgaaaauaacacauggguuaaucagaccuaugugaacaucucuaauacaaacuuugcugccgggcagagcguggucuccgugaaacuggcgggaaauucuagccuuugcccuguuuccggcugggcuauuuacagcaaggacaacucuaucagaaucggguccaaaggagauguguucgucauucgggagccguuuaucagcuguucuccccuggaaugccgcaccuucuuucucacacagggcgcccugcuuaaugacaagcauuccaacggcaccauuaaagauagaagcccuuaucggacgcugaugucuugucccaucggggaggugccuucccccuacaacagccgcuucgaauccguugccuggucugcuagcgccugccacgacggaauuaauuggcucaccaucggcaucuccgggccugauaacggagcuguggccguccugaaguauaauggcauuaucacagacaccauuaagagcuggagaaacaauauccugcggacacaagagucugagugugcgugcgugaacggguccuguuuuaccgugaugacggauggaccgagcgacggccaggccucuuacaaaauuuuccgcaucgaaaagggcaaaaucgucaagagcguugagaugaaugcucccaacuaucauuacgaagagugcuccuguuacccugauucuagcgagauuacaugcgugugcagagacaauuggcacggguccaaccggcccugggugagcuuuaaucagaaccucgaauaucagaucggauacauuuguucuggcaucuucggggauaauccucgccccaacgacaaaaccggauccugcggcccggucagcucuaauggggccaacggagugaagggcuuuuccuucaaguauggcaacgggguuuggauuggaagaacaaaaagcaucuccucucggaauggcuuugagaugauuugggauccuaacggguggaccggaaccgacaauaacuucagcaucaagcaagacaucgugggcauuaaugaaugguccggguacucuggcagcuucguccagcaucccgagcugacaggacuugauuguauccgcccuugcuuuuggguggaacugauuagaggccggcccaaagagaacacgaucuggaccuccgggagcucuauuuccuucuguggaguuaauagcgacacagugggcuggucuuggcccgauggggcugagcucccuuuuaccaucgacaaguga

SEQ ID NO: 210944 - RNA, 1410 nt, Artificial Sequence; identical to SEQ ID NO: 208810
  derived and/or modified CDS sequence (opt5) from neuraminidase__InfluenzaA__ADI48199

SEQ ID NO: 210945 - RNA, 1410 nt, Artificial Sequence; identical to SEQ ID NO: 208810
  derived and/or modified CDS sequence (opt5) from neuraminidase__InfluenzaA__ADI48201

SEQ ID NO: 210946 - RNA, 1410 nt, Artificial Sequence; identical to SEQ ID NO: 208810
  derived and/or modified CDS sequence (opt5) from neuraminidase__InfluenzaA__ADI48203

SEQ ID NO: 210947 - RNA, 1410 nt, Artificial Sequence
  derived and/or modified CDS sequence (opt5) from neuraminidase__InfluenzaA__ADI48205
augaaccccaaucagaagaucauuaccaucggcagcgugugcaugacaauugggauggccaaccugauccuccaaauuggaaauaucaucuccauuuggaucucucacagcauucagcugggcaaccagaaucagaucgagacguguaaccaauccgucauuaccuacgaaaauaacacauggguuaaucagaccuaugugaacaucucuaauacaaacuucgcugccgggcagagcguggucuccgugaaacuugcgggaaauucuagccugugcccuguuuccggcugggcuauuuacagcaaggacaacucuaucagaaucggguccaaaggagauguguuugucauucgggagccguucaucagcuguucucaucucgaaugccgcaccuuuuuccugacacagggcgcccuucugaaugacaagcacuccaacggcaccauuaaagauagaagccccuaucggacgcucaugucuuguccuaucggggaggugcccuccccuuacaacagccgcuuugaauccguugccuggucugcuagcgccugccaugacggaauuaauuggcugaccaucggcaucuccgggcccgauaacggagcuguggccguccugaaguauaauggcauuaucacagacaccauuaagagcuggagaaacaauauccuccggacacaagagucugagugugcgugcgugaacggguccuguuucaccgugaugacggauggaccuagcgacggccaggccucuuacaaaauuuuucgcaucgaaaagggcaaaaucgucaagagcguugagaugaaugcuccgaacuaucacuacgaagagugcuccuguuaccccgauucuagcgagauuacaugcgugugcagagacaauuggcauggguccaaccggccuugggugagcuucaaucagaaccuggaauaucagaucggauacauuuguucuggcaucuuuggggauaauccccgcccuaacgacaaaaccggauccugcggccccgucagcucuaauggggccaacggagugaagggcuucuccuuuaaguauggcaacgggguuuggauuggaagaacaaaaagcaucuccucucggaauggcuucgagaugauuugggauccgaacggguggaccggaaccgacaauaacuuuagcaucaagcaagacaucgugggcauuaaugaaugguccggguacucuggcagcuucguccagcacccugagcuuacaggacuggauuguauccgccccugcuucuggguggaacucauuagaggccggccuaaagagaacacgaucuggaccuccgggagcucuauuuccuuuuguggaguuaauagcgacacagugggcuggucuuggcccgauggggcugagcugcccuucaccaucgacaaguga

SEQ ID NO: 210948 - RNA, 1410 nt, Artificial Sequence; identical to SEQ ID NO: 208810
  derived and/or modified CDS sequence (opt5) from neuraminidase__InfluenzaA__ADI48207

SEQ ID NO: 210949 - RNA, 1410 nt, Artificial Sequence; identical to SEQ ID NO: 208810
  derived and/or modified CDS sequence (opt5) from neuraminidase__InfluenzaA__ADI48209

SEQ ID NO: 210950 - RNA, 1410 nt, Artificial Sequence; identical to SEQ ID NO: 208810
  derived and/or modified CDS sequence (opt5) from neuraminidase__InfluenzaA__ADI48211

SEQ ID NO: 210951 - RNA, 1410 nt, Artificial Sequence; identical to SEQ ID NO: 208810
  derived and/or modified CDS sequence (opt5) from neuraminidase__InfluenzaA__ADI48213

SEQ ID NO: 210952 - RNA, 1410 nt, Artificial Sequence; identical to SEQ ID NO: 208810
  derived and/or modified CDS sequence (opt5) from neuraminidase__InfluenzaA__ADI48215

SEQ ID NO: 210953 - RNA, 1410 nt, Artificial Sequence; identical to SEQ ID NO: 208810
  derived and/or modified CDS sequence (opt5) from neuraminidase__InfluenzaA__ADI48217

SEQ ID NO: 210954 - RNA, 1410 nt, Artificial Sequence; identical to SEQ ID NO: 208810
  derived and/or modified CDS sequence (opt5) from neuraminidase__InfluenzaA__ADI48219

SEQ ID NO: 210955 - RNA, 1410 nt, Artificial Sequence; identical to SEQ ID NO: 208810
  derived and/or modified CDS sequence (opt5) from neuraminidase__InfluenzaA__ADI48221

SEQ ID NO: 210956 - RNA, 1410 nt, Artificial Sequence; identical to SEQ ID NO: 208810
  derived and/or modified CDS sequence (opt5) from neuraminidase__InfluenzaA__ADI48625

SEQ ID NO: 210957 - RNA, 1410 nt, Artificial Sequence; identical to SEQ ID NO: 208810
  derived and/or modified CDS sequence (opt5) from neuraminidase__InfluenzaA__ADI48635

SEQ ID NO: 210958 - RNA, 1410 nt, Artificial Sequence; identical to SEQ ID NO: 208810
  derived and/or modified CDS sequence (opt5) from neuraminidase__InfluenzaA__ADI48655

SEQ ID NO: 210959 - RNA, 1410 nt, Artificial Sequence; identical to SEQ ID NO: 208810
  derived and/or modified CDS sequence (opt5) from neuraminidase__InfluenzaA__ADI48665

SEQ ID NO: 210960 - RNA, 1410 nt, Artificial Sequence
  derived and/or modified CDS sequence (opt5) from neuraminidase__InfluenzaA__ADI48675
augaaccccaaucagaagaucauuaccaucggcagcgugugcaugacaauugggauggccaaccugauccuccaaauuggaaauaucaucuccauuuggaucucucacagcauucagcugggcaaccagaaucagaucgagacguguaaccaauccgucauuaccuacgaaaauaacacauggguuaaucagaccuaugugaacaucucuaauacaaacuucgcugccgggcagagcguggucuccgugaaacuugcgggaaauucuagccugugcccuguuuccggcugggcuauuuacagcaaggacaacucuaucagaaucggguccaaaggagauguguuugucauucgggagccguucaucagcuguucuccccucgaaugccgcaccuuuuuccugacacagggcgcccuucugaaugacaagcauuccaacggcaccauuaaagauagaagcccuuaucggacgcucaugucuugucccaucggggaggugccuucccccuacaacagccgcuuugaauccguugccuggucugcuagcgccugccacgacggaauuaauuggcugaccaucggcaucuccgggccugauaacggagcuguggccguccugaaguauaauggcauuaucacagacaccauuaagagcuggagaaacaauauccuccggacacaagagucugagugugcgugcgugaacggguccuguuucaccgugaugacggauggaccgagcgacggccaggccucuuacaaaauuuuucgcaucgaaaagggcaaaaucgucaagagcguugagaugaaugcucccaacuaucauuacgaagagugcuccuguuacccugauucuagcgagauuacaugcgugugcagagacaauuggcacggguccaaccggcccugggugagcuucaaucagaaccuggaauaucagaucggauacauuuguucuggcaucuuuggggauaauccucgccccaacgacaaaaccggauccugcggcccggucagcucuaauggggccaacggagugaagggcuucuccuuuaaguauggcaacgggguuuggauuggaagaacaaaaagcaucuccucucggaauggcuucgagaugauuugggauccuaacggguggaccggaaccgacaauaacuuuagcaucaagcaagacaucgugggcauuaaugaaugguccggguacucuggcagcuucguccagcaucccgagcuuacaggacuggauuguauccgcccuugcuucuggguggaacucauuagaggccggcugaaagagaacacgaucuggaccuccgggagcucuauuuccuuuuguggaguuaauagcgacacagugggcuggucuuggcccgauggggcugagcuucccuucaccaucgacaaguga

SEQ ID NO: 210961 - RNA, 1410 nt, Artificial Sequence
  derived and/or modified CDS sequence (opt5) from neuraminidase__InfluenzaA__ADI48685
augaaccccaaucagaagaucauuaccaucggcagcgugugcaugacaauugggauggccaaccugauccuccaaauuggaaauaucaucuccauuuggaucucucacagcauucagcugggcaaccagaaucagaucgagacguguaaccaauccgucauuaccuacgaaaauaacacauggguuaaucagaccuaugugaacaucucuaauacaaacuucgcugccgggcagagcguggucuccgugaaacuugcgggaaauucuagccugugcccuguuuccggcugggcuauuuacagcaaggacaacucuaucagaaucggguccaaaggagauguguuugucauucgggagccguucaucagcuguucuccccucgaaugccgcaccuuuuuccugacacagggcgcccuucugaaugacaagcauuccaacggcaccauuaaagauagaagcccuuaucggacgcucaugucuugucccaucggggaggugccuucccccuacaacagccgcuuugaauccguugccuggucugcuagcgccugccacgacggaauuaauuggcugaccaucggcaucuccgggccugauaacggagcuguggccguccugaaguauaauggcauuaucacagacaccauuaagagcuggagaaacaauauccuccggacacaagagucugagugugcgugcgugaacggggccuguuucaccgugaugacggauggaccguccgacggccaggcuagcuacaaaauuuuucgcaucgaaaagggcaaaaucgucaagucuguugagaugaaugcccccaacuaucauuacgaagagugcagcuguuacccugauuccucugagauuacaugcgugugcagagacaauuggcacgggagcaaccggcccuggguguccuucaaucagaaccuggaauaucagaucggauacauuuguagcggcaucuuuggggauaauccucgccccaacgacaaaaccggaucuugcggcccggucuccagcaauggggcuaacggagugaagggcuucucuuuuaaguauggcaacgggguuuggauuggaagaacaaaauccaucagcucccggaauggcuucgagaugauuugggauccuaacggguggaccggaaccgacaauaacuuuucuaucaagcaagacaucgugggcauuaaugaauggagcggguacuccggcucuuucguccagcaucccgagcuuacaggacuggauuguauccgcccuugcuucuggguggaacucauuagaggccggcccaaagagaacacgaucuggaccagcggguccagcauuucuuuuuguggaguuaauuccgacacagugggcuggagcuggcccgauggggccgagcugccuuucaccaucgacaaguga

SEQ ID NO: 210962 - RNA, 1410 nt, Artificial Sequence; identical to SEQ ID NO: 208810
  derived and/or modified CDS sequence (opt5) from neuraminidase__InfluenzaA__ADI48695

SEQ ID NO: 210963 - RNA, 1410 nt, Artificial Sequence; identical to SEQ ID NO: 208800
  derived and/or modified CDS sequence (opt5) from neuraminidase__InfluenzaA__ADI48705

SEQ ID NO: 210964 - RNA, 1410 nt, Artificial Sequence; identical to SEQ ID NO: 208810
  derived and/or modified CDS sequence (opt5) from neuraminidase__InfluenzaA__ADI48715

SEQ ID NO: 210965 - RNA, 1410 nt, Artificial Sequence; identical to SEQ ID NO: 208810
  derived and/or modified CDS sequence (opt5) from neuraminidase__InfluenzaA__ADI48725

SEQ ID NO: 210966 - RNA, 1410 nt, Artificial Sequence; identical to SEQ ID NO: 208810
  derived and/or modified CDS sequence (opt5) from neuraminidase__InfluenzaA__ADI48735

SEQ ID NO: 210967 - RNA, 1410 nt, Artificial Sequence; identical to SEQ ID NO: 208810
  derived and/or modified CDS sequence (opt5) from neuraminidase__InfluenzaA__ADI48745

SEQ ID NO: 210968 - RNA, 1410 nt, Artificial Sequence
  derived and/or modified CDS sequence (opt5) from neuraminidase__InfluenzaA__ADI48755
augaaccccaaucagaagaucauuaccaucggcagcgugugcaugacaauugggauggccaaccugauccuccaaauuggaaauaucaucuccauuuggaucucucacagcauucagcugggcaaccagaaucagaucgagacguguaaccaauccgucauuaccuacgaaaauaacacauggguuaaucagaccuaugugaacaucucuaauacaaacuucgcugccgggcagagcguggucuccgugaaacuugcgggaaauucuagccugugcccuguuuccggcugggcuauuuacagcaaggacaacucuaucagaaucggguccaaaggagauguguuugucauucgggagccguucaucagcuguucuccccucgaaugccgcaccuuuuuccugacacagggcgcccuucugaaugacaagcauuccaacggcaccauuaaagauagaagcccuuaucggacgcucaugucuugucccaucggggaggugccuucccccuacaacagccgcuuugaauccguugccuggucugcuagcgccugccacgacggaauuaauuggcugaccaucggcaucuccgggccugauaacggagcuguggccguccugaaguauaauggcauuaucagcgacacaauuaagucuuggagaaacaauauccuccggacccaagaguccgagugugcgugcgugaacgggagcuguuucacagugaugaccgauggaccgucugacggccaggccagcuacaaaauuuuucgcaucgaaaagggcaaaaucgucaaguccguugagaugaaugcucccaacuaucauuacgaagagugcucuuguuacccugauagcuccgagauuacgugcgugugcagagacaauuggcacgggagcaaccggcccugggugucuuucaaucagaaccuggaauaucagaucggauacauuuguuccggcaucuuuggggauaauccucgccccaacgacaaaacaggaagcugcggcccggucucuuccaauggggccaacggagugaagggcuucagcuuuaaguauggcaacgggguuuggauuggaagaaccaaauccaucucuagccggaauggcuucgagaugauuugggauccuaacggguggacaggaaccgacaauaacuuuuccaucaagcaagacaucgugggcauuaaugaauggucuggguacagcggcuccuucguccagcaucccgagcuuaccggacuggauuguauccgcccuugcuucuggguggaacucauuagaggccggcccaaagagaacacaaucuggacgagcgggucuuccauuagcuuuuguggaguuaauucugacaccgugggcugguccuggcccgauggggcugagcugccuuucacaaucgacaaguga

SEQ ID NO: 210969 - RNA, 1410 nt, Artificial Sequence; identical to SEQ ID NO: 208810
  derived and/or modified CDS sequence (opt5) from neuraminidase__InfluenzaA__ADI48765

SEQ ID NO: 210970 - RNA, 1410 nt, Artificial Sequence; identical to SEQ ID NO: 208810
  derived and/or modified CDS sequence (opt5) from neuraminidase__InfluenzaA__ADI48775

SEQ ID NO: 210971 - RNA, 1410 nt, Artificial Sequence; identical to SEQ ID NO: 208810
  derived and/or modified CDS sequence (opt5) from neuraminidase__InfluenzaA__ADI48785

SEQ ID NO: 210972 - RNA, 1410 nt, Artificial Sequence; identical to SEQ ID NO: 208810
  derived and/or modified CDS sequence (opt5) from neuraminidase__InfluenzaA__ADI48795

SEQ ID NO: 210973 - RNA, 1410 nt, Artificial Sequence; identical to SEQ ID NO: 208810
  derived and/or modified CDS sequence (opt5) from neuraminidase__InfluenzaA__ADI49032

SEQ ID NO: 210974 - RNA, 1410 nt, Artificial Sequence; identical to SEQ ID NO: 208810
  derived and/or modified CDS sequence (opt5) from neuraminidase__InfluenzaA__ADI49243

SEQ ID NO: 210975 - RNA, 1410 nt, Artificial Sequence; identical to SEQ ID NO: 208810
  derived and/or modified CDS sequence (opt5) from neuraminidase__InfluenzaA__ADI49263

SEQ ID NO: 210976 - RNA, 1410 nt, Artificial Sequence; identical to SEQ ID NO: 208810
  derived and/or modified CDS sequence (opt5) from neuraminidase__InfluenzaA__ADI49273

SEQ ID NO: 210977 - RNA, 1410 nt, Artificial Sequence; identical to SEQ ID NO: 208810
  derived and/or modified CDS sequence (opt5) from neuraminidase__InfluenzaA__ADI49283

SEQ ID NO: 210978 - RNA, 1410 nt, Artificial Sequence; identical to SEQ ID NO: 208810
  derived and/or modified CDS sequence (opt5) from neuraminidase__InfluenzaA__ADI49315

SEQ ID NO: 210979 - RNA, 1410 nt, Artificial Sequence; identical to SEQ ID NO: 208810
  derived and/or modified CDS sequence (opt5) from neuraminidase__InfluenzaA__ADI49325

SEQ ID NO: 210980 - RNA, 1410 nt, Artificial Sequence; identical to SEQ ID NO: 208810
  derived and/or modified CDS sequence (opt5) from neuraminidase__InfluenzaA__ADI49335

SEQ ID NO: 210981 - RNA, 1410 nt, Artificial Sequence
  derived and/or modified CDS sequence (opt5) from neuraminidase__InfluenzaA__ADI49345
augaaccccaaucagaagaucauuaccaucggcagcgugugcaugacaauugggauggccaaccugauccuccaaauuggaaauaucaucuccauuuggaucucucacagcauucagcugggcaaccagaaucagaucgagacguguaaccaauccgucauuaccuacgaaaauaacacauggguuaaucagaccuaugugaacaucucuaauacaaaccuugcugccgggcagagcguggucuccgugaaacuggcgggaaauucuagccucugcccuguuuccggcugggcuauuuacagcaaggacaacucuaucagaaucggguccaaaggagauguguucgucauucgggagccguuuaucagcuguucuccccuggaaugccgcaccuucuuucuuacacagggcgcccugcucaaugacaagcauuccaacggcaccauuaaagauagaagcccuuaucggacgcugaugucuugucccaucggggacgugccuucccccuacaacagccgcuucgaguccguugccuggucugcuagcgccugccacgauggaauuaauuggcugaccaucggcaucuccgggccugacaacggagcuguggccguccucaaguauaauggcauuaucacagauaccauuaagagcuggagaaacaauauccugcggacacaagaaucugagugugcgugcgugaacggguccuguuuuaccgugaugacggacggaccgagcgauggccaggccucuuacaaaauuuuccgcaucgagaagggcaaaaucgucaagagcguugaaaugaaugcucccaacuaucauuacgaggaaugcuccuguuacccugacucuagcgagauuacaugcgugugcagagauaauuggcacggguccaaccggcccugggugagcuuuaaucagaaccuugaguaucagaucggauacauuuguucuggcaucuucggggacaauccucgccccaacgauaaaaccggauccugcggcccggucagcucuaauggggccaacggagugaagggcuuuuccuucaaguauggcaacgggguuuggauuggaagaacaaaaagcaucuccucucggaauggcuuugaaaugauuugggacccuaacggguggaccggaaccgacaauaacuucagcaucaagcaagauaucgugggcauuaaugagugguccggguacucuggcagcuuuguccagcaucccgaacugacaggacucgacuguauccgcccuugcuucuggguggagcugauuagaggccggcccaaagaaaacacgaucuggaccuccgggagcucuauuuccuucuguggaguuaauagcgauacagugggcuggucuuggcccgacggggcugagcuuccuuuuaccaucgauaaguga

SEQ ID NO: 210982 - RNA, 1410 nt, Artificial Sequence; identical to SEQ ID NO: 208810
  derived and/or modified CDS sequence (opt5) from neuraminidase__InfluenzaA__ADI49355

SEQ ID NO: 210983 - RNA, 1410 nt, Artificial Sequence; identical to SEQ ID NO: 208810
  derived and/or modified CDS sequence (opt5) from neuraminidase__InfluenzaA__ADI49365

SEQ ID NO: 210984 - RNA, 1410 nt, Artificial Sequence; identical to SEQ ID NO: 208810
  derived and/or modified CDS sequence (opt5) from neuraminidase__InfluenzaA__ADI49375

SEQ ID NO: 210985 - RNA, 1410 nt, Artificial Sequence; identical to SEQ ID NO: 208810
  derived and/or modified CDS sequence (opt5) from neuraminidase__InfluenzaA__ADI49385

SEQ ID NO: 210986 - RNA, 1410 nt, Artificial Sequence
  derived and/or modified CDS sequence (opt5) from neuraminidase__InfluenzaA__ADI49395
augaaccccaaucagaagaucauuaccaucggcagcgugugcaugacaauugggauggccaaccugauccuccaaauuggaaauaugaucuccaucuggauuucucacagcauccagcugggcaaccagaaucagauugagacguguaaccaauccgucaucaccuacgaaaauaacacauggguuaaucagaccuaugugaacauuucuaauacaaacuucgcugccgggcagagcguggucuccgugaaacuugcgggaaauucuagccugugcccuguuuccggcugggcuaucuacagcaaggacaacucuauuagaaucggguccaaaggagauguguuugucauccgggagccguucauuagcuguucuccccucgaaugccgcaccuuuuuccugacacagggcgcccuucugaaugacaagcauuccaacggcaccaucaaagauagaagcccuuaucggacgcucaugucuugucccauuggggaggugccuucccccuacaacagccgcuuugaauccguugccuggucugcuagcgccugccacgacggaaucaauuggcugaccauuggcaucuccgggccugauaacggagcuguggccguccugaaguauaauggcaucauuacagacaccaucaagagcuggagaaacaauauucuccggacacaagagucugagugugcgugcgugaacggguccuguuucaccgugaugacggauggaccgagcgacggccaggccucuuacaaaaucuuucgcauugaaaagggcaaaaucgucaagagcguugagcugaaugcucccaacuaucauuacgaagagugcuccuguuacccugauucuagcgagaucacaugcgugugcagagacaauuggcacggguccaaccggcccugggugagcuucaaucagaaccuugaauaucagauuggauacaucuguucuggcauuuuuggggauaauccucgccccaacgacaaaaccggauccugcggcccggucagcucuaauggggccaacggagugaagggcuucuccuuuaaguauggcaacgggguuuggaucggaagaacaaaaagcauuuccucucggaauggcuucgagaugaucugggauccuaacggguggaccggaaccgacaauaacuuuagcauuaagcaagacaucgugggcaucaaugaaugguccggguacucuggcagcuucguccagcaucccgagcugacaggacucgauuguauucgcccuugcuucuggguggaacugaucagaggccggcccaaagagaacacgauuuggaccuccgggagcucuaucuccuuuuguggaguuaauagcgacacagugggcuggucuuggcccgauggggcugagcuuccuuucaccauugacaaguga

SEQ ID NO: 210987 - RNA, 1410 nt, Artificial Sequence; identical to SEQ ID NO: 208810
  derived and/or modified CDS sequence (opt5) from neuraminidase__InfluenzaA__ADI49720

SEQ ID NO: 210988 - RNA, 1410 nt, Artificial Sequence; identical to SEQ ID NO: 208810
  derived and/or modified CDS sequence (opt5) from neuraminidase__InfluenzaA__ADI49730

SEQ ID NO: 210989 - RNA, 1410 nt, Artificial Sequence; identical to SEQ ID NO: 208810
  derived and/or modified CDS sequence (opt5) from neuraminidase__InfluenzaA__ADI49740

SEQ ID NO: 210990 - RNA, 1410 nt, Artificial Sequence; identical to SEQ ID NO: 208810
  derived and/or modified CDS sequence (opt5) from neuraminidase__InfluenzaA__ADI49750

SEQ ID NO: 210991 - RNA, 1410 nt, Artificial Sequence; identical to SEQ ID NO: 208810
  derived and/or modified CDS sequence (opt5) from neuraminidase__InfluenzaA__ADI49760

SEQ ID NO: 210992 - RNA, 1410 nt, Artificial Sequence; identical to SEQ ID NO: 208840
  derived and/or modified CDS sequence (opt5) from neuraminidase__InfluenzaA__ADI49780

SEQ ID NO: 210993 - RNA, 1410 nt, Artificial Sequence; identical to SEQ ID NO: 208800
  derived and/or modified CDS sequence (opt5) from neuraminidase__InfluenzaA__ADI49790

SEQ ID NO: 210994 - RNA, 1410 nt, Artificial Sequence; identical to SEQ ID NO: 208810
  derived and/or modified CDS sequence (opt5) from neuraminidase__InfluenzaA__ADI49821

SEQ ID NO: 210995 - RNA, 1410 nt, Artificial Sequence; identical to SEQ ID NO: 208800
  derived and/or modified CDS sequence (opt5) from neuraminidase__InfluenzaA__ADI50029

SEQ ID NO: 210996 - RNA, 1410 nt, Artificial Sequence
  derived and/or modified CDS sequence (opt5) from neuraminidase__InfluenzaA__ADI52830
augaaccccaaucagaagaucauuaccaucggcagcgugugcaugacaauugggauggccaaccugauccuccaaauuggaaauaucaucuccauuuggaucucucacagcauucagcugggcaaccagaaucagaucgagacguguaaccaauccgucauuaccuacgaaaauaacacauggguuaaucagaccuaugugaacaucucuaauacaaacuucgcugccgggcagagcguggucuccgugaaacuugcgggaaauucuagccugugcccuguuuccggcugggcuauuuacagcaaggacaacucugugagaaucggguccaaaggagaugucuuugugauccgggagccguucauuagcuguucuccccucgaaugccgcaccuuuuuccugacacagggcgcccuucugaaugacaagcauuccaacggcaccaucaaagauagaagcccuuaucggacgcucaugucuugucccauuggggagguuccuucccccuacaacagccgcuuugaauccguggccuggucugcuagcgccugccacgacggaaucaauuggcugaccauuggcaucuccgggccugauaacggagcugucgccgugcugaaguauaauggcaucauuacagacaccaucaagagcuggagaaacaauauucuccggacacaagagucugagugugcgugcgugaacggguccuguuucaccgucaugacggauggaccgagcgacggccaggccucuuacaaaaucuuucgcauugaaaagggcaaaaucguuaagagcguggagaugaaugcucccaacuaucauuacgaagagugcuccuguuacccugauucuagcgagaucacaugcgugugcagagacaauuggcacggguccaaccggcccugggucagcuucaaucagaaccuggaauaucagauuggauacaucuguucuggcauuuuuggggauaauccucgccccaacgacaaaaccggauccugcggcccggugagcucuaauggggccaacggaguuaagggcuucuccuuuaaguauggcaacgggguguggaucggaagaacaaaaagcauuuccucucggaauggcuucgagaugaucugggauccuaacggguggaccggaaccgacaauaacuuuagcauuaagcaagacaucgucggcaucaaugaaugguccggguacucuggcagcuucgugcagcaucccgagcuuacaggacuggauuguauucgcccuugcuucuggguugaacucaucagaggccggcccaaagagaacacgauuuggaccuccgggagcucuaucuccuuuuguggagugaauagcgacacagucggcuggucuuggcccgauggggacgagcugccuuucaccauugauaaguga

SEQ ID NO: 210997 - RNA, 1410 nt, Artificial Sequence
  derived and/or modified CDS sequence (opt5) from neuraminidase__InfluenzaA__ADI52831
augaaccccaaucagaagaucauuaccaucggcagcgugugcaugacaauugggauggccaaccugauccuccaaauuggaaauaucaucuccauuuggaucucucacagcauucagcugggcaaccagaaucagaucgagacguguaaccaauccgucauuaccuacgaaaauaacacauggguuaaucagaccuaugugaacaucucuaauacaaacuucgcugccgggcagagcguggucuccgugaaacuugcgggaaauucuagccugugcccuguuuccggcugggcuauuuacagcaaggacaacucuaucagaaucggguccaaaggagauguguuugucauucgggagccguucaucagcuguucuccccucgaaugccgcaccuuuuuccugacacagggcgcccuucugaaugacaagcauuccaacggcaccauuaaagauagaagcccuuaucggacgcucaugucuugucccaucggggaggugccuucccccuacaacagccgcuuugaauccguugccuggucugcuagcgccugccacgacggaauuaauuggcugaccaucggcaucuccgggccugauaacggagcuguggccguccugaaguauaauggcauuaucacagacaccauuaagagcuggagaaacaauauccuccggacacaagagucugagugugcgugcgugaacggguccuguuucaccgugaugacggauggaccgagcgacggccaggccucuuacaaaauuuuucgcaucgaaaagggcaaaaucgucaagagcguugagaugaaugcucccaacuaucauuacgaagagugcuccuguuacccugauucuagcgagauuacaugcgugugcagagacaauuggcacggguccaaccggcccugggugagcuucaaucagaaccuggaauaucagaucggauacauuuguucuggcaucuuuggggauaauccucgccccaacgacaaaaccggauccugcggcccggucagcucuaauggggccaacggagugaagggcuucuccuuuaaguauggcaacgggguuuggauuggaagaacaaaaagcguguccucucggaauggcuucgagaugaucugggauccuaacggguggaccggaaccgacaauaacuuuagcauuaagcaagacaucgucggcaucaaugaaugguccggguacucuggcagcuucgugcagcaucccgagcuuacaggacuggauuguauucgcccuugcuucuggguugaacucaucagaggccggcccaaagagaacacgauuuggaccuccgggagcucuaucuccuuuuguggagugaauagcgacacagucggcuggucuuggcccgauggggcugagcugccuuucaccauugacaaguga

SEQ ID NO: 210998 - RNA, 1410 nt, Artificial Sequence; identical to SEQ ID NO: 208810
  derived and/or modified CDS sequence (opt5) from neuraminidase__InfluenzaA__ADI52832

SEQ ID NO: 210999 - RNA, 1410 nt, Artificial Sequence
  derived and/or modified CDS sequence (opt5) from neuraminidase__InfluenzaA__ADI52833
augaaccccaaucagaagaucauuaccaucggcagcgugugcaugacaauugggauggccaaccugauccuccaaauuggaaauaucaucuccauuuggaucucucacagcauucagcugggcaaccagaaucagaucgagacguguaaccaauccgucauuaccuacgaaaauaacacauggguuaaucagaccuaugugaacaucucuaauacaaacuucgcugccgggcagagcguggucuccgugaaacuugcgggaaauucuagccugugcccuguuuccggcugggcuauuuacagcaaggacaacucuaucagaaucggguccaaaggagauguguuugucauucgggagccguucaucagcuguucuccccucgaaugccgcaccuuuuuccugacacagggcgcccuucugaaugacaagcauuccaacggcaccauuaaagauagaagcccuuaucggacgcucaugucuugucccaucggggaggccccuucccccuacaacagccgcuuugaauccguggcuuggucugccagcgcuugccacgacggaauuaauuggcugaccaucggcaucuccgggccugauaacggagccguugcggugcugaaguauaauggcauuaucacagacaccauuaagagcuggagaaacaauauccuccggacacaagagucugagugugccugcgucaacggguccuguuucaccgugaugacggauggaccgagcgacggccaggcuucuuacaaaauuuuucgcaucgaaaagggcaaaaucgucaagagcguggagaugaaugcccccaacuaucauuacgaagagugcuccuguuacccugauucuagcgagauuacaugcguuugcagagacaauuggcacggguccaaccggcccugggugagcuucaaucagaaccuggaauaucagaucggauacauuuguucuggcaucuuuggggauaauccucgccccaacgacaaaaccggauccugcggcccggugagcucuaauggggcuaacggagucaagggcuucuccuuuaaguauggcaacgggguguggauuggaagaacaaaaagcaucuccucucggaauggcuucgagaugauuugggauccuaacggguggaccggaaccgacaauaacuuuagcaucaagcaagacaucguuggcauuaaugaaugguccggguacucuggcagcuucgugcagcaucccgagcuuacaggacuggauuguauccgcccuugcuucugggucgaacucauuagaggccggcccaaagagaacacgaucuggaccuccgggagcucuauuuccuuuuguggagugaauagcgacacaguuggcuggucuuggcccgauggggccgagcugccuuucaccaucgacaaguga

SEQ ID NO: 211000 - RNA, 1413 nt, Artificial Sequence; identical to SEQ ID NO: 209533
  derived and/or modified CDS sequence (opt5) from neuraminidase__InfluenzaA__ADI75821

SEQ ID NO: 211001 - RNA, 1410 nt, Artificial Sequence; identical to SEQ ID NO: 209977
  derived and/or modified CDS sequence (opt5) from neuraminidase__InfluenzaA__ADI75832

SEQ ID NO: 211002 - RNA, 1413 nt, Artificial Sequence
  derived and/or modified CDS sequence (opt5) from neuraminidase__InfluenzaA__ADI75854
augaaccccaaucagaagaucauuaccaucggcagcauuuccaucgccauugggaucaucucucugaugcuccaaauuggaagcaucauuuccaucugggcuucucacagcauucagacaggcucccagaacaauacggggaucugcaaccagagaauuaucaccuacgagaauagcacaugggugaaccauaccuaugucaauaucaacaauacaaacguuguggccggagaagacaaaaccagcgugacacuggcgggcaauuccagccuuuguucuauuuccgggugggcuaucuacaccaaggauaacagcauucggaucggaucuaaaggcgacgucuucgugauucgcgagccuuuuaucuccugcagccaccuggaauguagaacguucuuucucacccaaggcgcccugcuuaaugauaagcauucuaacgggacaguuaaagaccgguccccguaucgcgcccugaugagcugcccccucggagaggcuccuucccccuacaauucuaaguucgaaagcguggccugguccgcuagcgccugucacgauggcaugggguggcugaccaucggaauuucuggcccugacaacggggcggucgccgugcugaaguauaacggaaucauuacaggcaccaucaaauccuggaagaaacagauucucagaacgcaggagagcgagugcguuuguaugaauggcucuugcuuuacaaucaugaccgaugggcccagcaacaaggcugccuccuacaaaaucuucaagauugaaaagggaaaagugacaaagucuaucgagcugaaugcuccuaacuuuuauuacgaagaguguagcugcuacccggacaccggcauugucaugugugugugccgggauaauuggcauggguccaaccgccccugggugagcuucaaucagaaccuugacuaucaaaucggauacauuugcucuggcgucuuuggggauaauccuagacccgaggacggagaaggcuccuguaacccuguuaccguggauggcgccaauggggugaaaggauucagcuauaaguacggcaacggggucuggaucggacggacaaaaucuaaucgccugagaaagggcuuugagaugauuugggaccccaacggguggacgaauaccgacuccgauuucagcgugaaacaggacguuguggcgaucacagauugguccggcuauucuggaucuuuuguccagcacccggaacucaccggccuggacugcauccggccuuguuucuggguggagcuuguucgcgggcugcccagagaaaacacaaccauuuggacguccggaucuagcaucuccuucugcggcgugaacagcgauacagccaauuggucuuggccugacggggcugagcuccccuuuaccauugauaaguga

SEQ ID NO: 211003 - RNA, 1410 nt, Artificial Sequence
  derived and/or modified CDS sequence (opt5) from neuraminidase__InfluenzaA__ADI75876
augaaccccaaucagaagaucauuaccaucggcagcgugucccugacaauuucuacgaucugcuucuuuaugcaaauugccauccucaucaccacagucacccugcacuucaaacaguacgaguuuaacagcccuccgaauaaccagguuaugcuuugugaacccacaauuaucgagagaaauauuaccgaaaucguguaucugacaaacaccacgauugagaaggaagugugcccuaaacucgcugaguaccggaauugguccaagccccagugugacaucaccggguucgccccuuuuucuaaagauaacagcauucgccuguccgcgggaggcgacaucugggucacaagagagcccuaugugucuugcgauccugacaaguguuaccaauucgcucuugggcagggaaccacacugaauaacguucauagcaauaacaccgugcgggaucgcacgccguauagaacacuccugaugaaugaacugggcguccccuuucaccucgggaccaaacaggugugcaucgccugguccucuagcuccugucaugacggaaaggccuggcugcacguuugcauuacaggcgaugacaagaacgcuaccgccagcuucaucuacaauggccggcuuguggauucugucguguccuggagcaaagagauucugcgcacccaggaaucugagugugugugcaucaacgggacauguacggucguuaugaccgacggauccgcuagcggcaaggccgauacaaaaauucucuuuaucgaggaagggaagaucgugcauaccuccacacugucuggaagcgcgcaacacguggaggaaugcuccugcuauccuagauaccccggcguccggugugugugccgcgacaacuggaaggggagcaauagaccuauuguugauaucaacauuaaagaccacucuguggucuccagcuacguguguucuggacuuguuggcgacacgccccggaagaaugauagcuccucuagcucccauugccuggacccgaacaaugaggaaggcgggcacggagugaaaggcugggccuucgaugacgggaacgaugucuggaugggacgcaccaucagcgagaagucuagacucggcuaugagacauuuaaagugauugaagggugguccaaucauaagagcaaacugcagaucaaccggcaggucaucguggaccgcggaaauagaucuggcuacuccggcauuuucagcguugaggggaaguccuguaucaaccggugcuuuuauguggaacugauuagaggacgcaaggaggaaaccgagguccucuggaccucuaauagcaucgugguuuucuguggcacauccgggaccuacggaacaggcucuuggccugauggggcugaccugaaccuuaugcccauuuga

SEQ ID NO: 211004 - RNA, 1410 nt, Artificial Sequence; identical to SEQ ID NO: 209977
  derived and/or modified CDS sequence (opt5) from neuraminidase__InfluenzaA__ADI75887

SEQ ID NO: 211005 - RNA, 1413 nt, Artificial Sequence; identical to SEQ ID NO: 209533
  derived and/or modified CDS sequence (opt5) from neuraminidase__InfluenzaA__ADI75909

SEQ ID NO: 211006 - RNA, 1410 nt, Artificial Sequence; identical to SEQ ID NO: 210556
  derived and/or modified CDS sequence (opt5) from neuraminidase__InfluenzaA__ADI75920

SEQ ID NO: 211007 - RNA, 1413 nt, Artificial Sequence; identical to SEQ ID NO: 209533
  derived and/or modified CDS sequence (opt5) from neuraminidase__InfluenzaA__ADI77352

SEQ ID NO: 211008 - RNA, 1410 nt, Artificial Sequence; identical to SEQ ID NO: 208810
  derived and/or modified CDS sequence (opt5) from neuraminidase__InfluenzaA__ADI77363

SEQ ID NO: 211009 - RNA, 1410 nt, Artificial Sequence; identical to SEQ ID NO: 209987
  derived and/or modified CDS sequence (opt5) from neuraminidase__InfluenzaA__ADI99500

SEQ ID NO: 211010 - RNA, 1410 nt, Artificial Sequence
  derived and/or modified CDS sequence (opt5) from neuraminidase__InfluenzaA__ADI99553
augaaccccaaucagaagaucauuaccaucggcagcgugugcaugacaauugggauggccaaccugauccuccaaauuggaaauaucaucuccauuuggaucucucacagcauucagcugggcaaccagaaucagaucgagacguguaaccaauccgucauuaccuacgaaaauaacacauggguuaaucagaccuaugugaacaucucuaauacaaacuucgcugccgggcagagcguggacuccgucaaacuugcgggaaauucuagccugugcccuguguccggcugggcuauuuacagcaaggauaacucuaucagaaucggguccaaaggagacguuuuugugauucgggagccguucaucagcuguucuccccucgaaugccgcaccuuuuuccugacacagggcgcccuucugaaugauaagcauuccaacggcaccauuaaagacagaagcccuuaucggacgcucaugucuugucccaucggggaggucccuucccccuacaacagccgcuuugaauccguggccuggucugcuagcgccugccacgauggaauuaauuggcugaccaucggcaucuccgggccugacaacggagcuguugccgugcugaaguauaauggcauuaucacagauaccauuaagagcuggagaaacaauauccuccggacacaagagucugagugugcgugcgucaacggguccuguuucaccgugaugacggacggaccgagcgauggccaggccucuuacaaaauuuuucgcaucgaaaagggcaaaaucgucaagagcguggagaugaaugcucccaacuaucauuacgaagagugcuccuguuacccugacucuagcgagauuacaugcguuugcagagauaauuggcacggguccaaccggcccugggugagcuucaaucagaaccuggaauaucagaucggauacauuuguucuggcaucuuuggggacaauccucgccccaacgauaaaaccggauccugcggcccggugagcucuaauggggccaacggagucaagggcuucuccuuuaaguauggcaacgggguguggauuggaagaacaaaaagcaucuccucucggaauggcuucgagaugauuugggacccuaacggguggaccggaaccgacaauaacuuuagcaucaagcaagauaucguuggcauuaaugaaugguccggguacucuggcagcuucgugcagcaucccgagcuuacaggacuggacuguauccgcccuugcuucugggucgaacucauuagaggccggcccaaagagaacacgaucuggaccuccgggagcucuauuuccuuuuguggagugaauagcgauacaguuggcuggucuuggcccgacggggcugagcugccuuucaccaucgauaaguga

SEQ ID NO: 211011 - RNA, 1410 nt, Artificial Sequence
  derived and/or modified CDS sequence (opt5) from neuraminidase__InfluenzaA__ADI99563
augaaccccaaucagaagaucauuaccaucggcagcgugugcaugacaauugggauggccaaccugauccuccaaauuggaaauaucaucuccauuuggaucucucacagcauucagcugggcaaccagaaucagaucgagacguguaaccaauccgucauuaccuacgaaaauaacacauggguuaaucagaccuaugugaacaucucuaauacaaacuucgcugccgggcagagcguggucuccgugaaacuugcgggaaauucuagccugugcccuguuuccggcugggcuauuuacagcaaggacaacucuaucagaaucggguccaaaggagauguguuugucauucgggagccguucaucagcuguucuccccucgaaugccgcaccuuuuuccugacacagggcgcccuucugaaugacaagcauuccaacggcaccauuaaagauagaagcccuuaucggacgcucaugucuugucccaucggggaggugccuucccccuacaacagccgcuuugaauccguugccuggucugcuagcgccugccacgacggaauuaauuggcugaccaucggcaucuccgggccugauaacggagcuguggccguccugaaguauaauggcauuaucacagacaccauuaagagcuggagaaacaauauccuccggacacaagagucugagugugcgugcgugaacggguccuguuucaccgugaugacggauggaccgagcgacggccaggccucuuacaaaauuuuucgcaucgaaaagggcaaaaucgucaagagcguugaggugaaugcucccaacuaucauuacgaagagugcuccuguuacccugauucuagcgagauuacaugcgugugcagagacaauuggcacggguccaaccggcccugggucagcuucaaucagaaccuggaauaucagaucggauacauuuguucuggcaucuuuggggauaauccucgccccaacgacaaaaccggauccugcggcccggugagcucuaauggggccaacggaguuaagggcuucuccuuuaaguauggcaacgggguguggauuggaagaacaaaaagcaucuccucucggaauggcuucgagaugauuugggauccuaacggguggaccggaaccgacaauaacuuuagcaucaagcaagacaucgucggcauuaaugaaugguccggguacucuggcagcuucgugcagcaucccgagcuuacaggacuggauuguauccgcccuugcuucuggguugaacucauuagaggccggcccaaagagaacacgaucuggaccuccgggagcucuauuuccuuuuguggagugaauagcgacacagucggcuggucuuggcccgauggggcugagcugccuuucaccaucgacaaguga

SEQ ID NO: 211012 - RNA, 1410 nt, Artificial Sequence; identical to SEQ ID NO: 211011
  derived and/or modified CDS sequence (opt5) from neuraminidase__InfluenzaA__ADI99573

SEQ ID NO: 211013 - RNA, 1410 nt, Artificial Sequence; identical to SEQ ID NO: 211011
  derived and/or modified CDS sequence (opt5) from neuraminidase__InfluenzaA__ADI99583

SEQ ID NO: 211014 - RNA, 1410 nt, Artificial Sequence; identical to SEQ ID NO: 210161
  derived and/or modified CDS sequence (opt5) from neuraminidase__InfluenzaA__ADI99593

SEQ ID NO: 211015 - RNA, 1410 nt, Artificial Sequence
  derived and/or modified CDS sequence (opt5) from neuraminidase__InfluenzaA__ADI99613
augaaccccaaucagaagaucauuaccaucggcagcgugugcaugacaauugggauggccaaccugauccuccaaauuggaaauaucaucuccauuuggaucucucacagcauucagcugggcaaccagaaucagaucgagacguguaaccaauccgucauuaccuacgaaaauaacacauggguuaaucagaccuaugugaacaucucuaauacaaacuucgcugccgggcagagcguggucuccgugaaacuugcgggaaauucuagccugugcccuguuuccggcugggcuauuuacagcaaggacaacucuaucagaaucggguccaaaggagauguguuugucauucgggagccguucaucagcuguucuccccucgaaugccgcaccuuuuuccugacacagggcgcccuucugaaugacaagcauuccaacggcaccauuaaagauagaagcccuuaucggacgcucaugucuugucccaucggggaggugccuucccccuacaacagccgcuuugaauccguugccuggucugcuagcgccugccacgacggaauuaauuggcugaccaucggcaucuccgggccugauaacggagcuguggccguccugaaguauaauggcauuaucacagacaccauuaagagcuggagaaacaauauccuccggacacaagagucugagugugcgugcgugaacggguccuguuucaccgugaugacggauggaccgagcgacggccaggccucuuacaaaauuuuucgcaucgaaaagggcaaaaucgucaagagcguugagaugaaugcucccaacuaucauuacgaagagugcuccuguuacccugauucuagcgagauuacaugcgugugcagagacaauuggcacggguccaaccggcccugggugagcuucaaucagaaccuggaauaucagaucggauacauuuguucuggcaucuuuggggauaauccucgccccaacgacaaaaccggauccugcggcccggucagcucuaauggggccaacggagugaagggcuucuccuuuaaguauggcaacgggguuuggauuggaagaacaaaaagcaucuccucucggaauggcuucgagaugauuugggauccuaacggguggaccggaaccgacaauaacuuuagcaucaagcaagacaucgugggcauuaaugaaugguccggguacucuggcagcuucguccagcaucccgagcuuacaggacuggauuguauccgcccuugcuucuggguggaacucauuagaggccggcccaaagagaacacgaucuggaccuccgggagcauuaucucuuuuuguggaguuaauuccgacacagugggcuggagcuggcccgauggggcugagcugccuuucaccaucgacaaguga

SEQ ID NO: 211016 - RNA, 1410 nt, Artificial Sequence
  derived and/or modified CDS sequence (opt5) from neuraminidase__InfluenzaA__ADI99623
augaaccccaaucagaagaucauuaccaucggcagcgugugcaugacaauugggauggccaaccugauccuccaaauuggaaauaucaucuccauuuggaucucucacagcauucagcugggcaaccagaaucagaucgagacguguaaccaauccgucauuaccuacgaaaauaacacauggguuaaucagaccuaugugaacaucucuaauacaaacuucgcugccgggcagagcguggucuccaugaaacuugcgggaaauucuagccugugcccuguguccggcugggcuauuuacagcaaggacaacucuaucagaaucggguccaaaggagauguuuuugugauucgggagccguucaucagcuguucuccccucgaaugccgcaccuuuuuccugacacagggcgcccuucugaaugacaagcauuccaacggcaccauuaaagauagaagcccuuaucggacgcucaugucuugucccaucggggaggucccuucccccuacaacagccgcuuugaauccguggccuggucugcuagcgccugccacgacggaauuaauuggcugaccaucggcaucuccgggccugauaacggagcuguugccgugcugaaguauaauggcauuaucacagacaccauuaagagcuggagaaacaauauccuccggacacaagagucugagugugcgugcgucaacggguccuguuucaccgugaugacggauggaccgagcgacggccaggccucuuacaaaauuuuucgcaucgaaaagggcaaaaucgucaagagcguggagaugaaugcucccaacuaucauuacgaagagugcuccuguuacccugauucuaaugagauuacaugcguuugcagagacaacuggcacgggagcaaucggcccuggguguccuucaaccagaaucuggaauaucagaucggauacauuuguagcggcaucuuuggggauaacccucgccccaaugacaaaaccggaucuugcggcccgguguccagcaacggggccaacggagucaagggcuucucuuuuaaguauggcaaugggguguggauuggaagaacaaaauccaucagcucccggaacggcuucgagaugauuugggauccuaauggguggaccggaaccgacaacaauuuuucuaucaagcaagacaucguuggcauuaacgaauggagcggguacuccggcucuuucgugcagcaucccgagcuuacaggacuggauuguauccgcccuugcuucugggucgaacucauuagaggccggcccaaagagaauacgaucuggaccagcggguccagcauuucuuuuuguggagugaacuccgacacaguuggcuggagcuggcccgauggggcugagcugccuuucaccaucgacaaguga

SEQ ID NO: 211017 - RNA, 1410 nt, Artificial Sequence; identical to SEQ ID NO: 210098
  derived and/or modified CDS sequence (opt5) from neuraminidase__InfluenzaA__ADI99633

SEQ ID NO: 211018 - RNA, 1410 nt, Artificial Sequence; identical to SEQ ID NO: 210161
  derived and/or modified CDS sequence (opt5) from neuraminidase__InfluenzaA__ADI99643

SEQ ID NO: 211019 - RNA, 1410 nt, Artificial Sequence; identical to SEQ ID NO: 208810
  derived and/or modified CDS sequence (opt5) from neuraminidase__InfluenzaA__ADI99653

SEQ ID NO: 211020 - RNA, 1410 nt, Artificial Sequence; identical to SEQ ID NO: 208810
  derived and/or modified CDS sequence (opt5) from neuraminidase__InfluenzaA__ADI99663

SEQ ID NO: 211021 - RNA, 1410 nt, Artificial Sequence; identical to SEQ ID NO: 208810
  derived and/or modified CDS sequence (opt5) from neuraminidase__InfluenzaA__ADI99673

SEQ ID NO: 211022 - RNA, 1410 nt, Artificial Sequence; identical to SEQ ID NO: 208810
  derived and/or modified CDS sequence (opt5) from neuraminidase__InfluenzaA__ADI99683

SEQ ID NO: 211023 - RNA, 1410 nt, Artificial Sequence; identical to SEQ ID NO: 210272
  derived and/or modified CDS sequence (opt5) from neuraminidase__InfluenzaA__ADI99703

SEQ ID NO: 211024 - RNA, 1410 nt, Artificial Sequence; identical to SEQ ID NO: 208810
  derived and/or modified CDS sequence (opt5) from neuraminidase__InfluenzaA__ADI99713

SEQ ID NO: 211025 - RNA, 1410 nt, Artificial Sequence; identical to SEQ ID NO: 208810
  derived and/or modified CDS sequence (opt5) from neuraminidase__InfluenzaA__ADI99723

SEQ ID NO: 211026 - RNA, 1410 nt, Artificial Sequence; identical to SEQ ID NO: 208810
  derived and/or modified CDS sequence (opt5) from neuraminidase__InfluenzaA__ADI99733

SEQ ID NO: 211027 - RNA, 1410 nt, Artificial Sequence; identical to SEQ ID NO: 208965
  derived and/or modified CDS sequence (opt5) from neuraminidase__InfluenzaA__ADJ00487

SEQ ID NO: 211028 - RNA, 1410 nt, Artificial Sequence; identical to SEQ ID NO: 208965
  derived and/or modified CDS sequence (opt5) from neuraminidase__InfluenzaA__ADJ00488

SEQ ID NO: 211029 - RNA, 1410 nt, Artificial Sequence; identical to SEQ ID NO: 208965
  derived and/or modified CDS sequence (opt5) from neuraminidase__InfluenzaA__ADJ00489

SEQ ID NO: 211030 - RNA, 1410 nt, Artificial Sequence; identical to SEQ ID NO: 208965
  derived and/or modified CDS sequence (opt5) from neuraminidase__InfluenzaA__ADJ00490

SEQ ID NO: 211031 - RNA, 1410 nt, Artificial Sequence; identical to SEQ ID NO: 208965
  derived and/or modified CDS sequence (opt5) from neuraminidase__InfluenzaA__ADJ00491

SEQ ID NO: 211032 - RNA, 1410 nt, Artificial Sequence; identical to SEQ ID NO: 208810
  derived and/or modified CDS sequence (opt5) from neuraminidase__InfluenzaA__ADJ18160

SEQ ID NO: 211033 - RNA, 1410 nt, Artificial Sequence; identical to SEQ ID NO: 208810
  derived and/or modified CDS sequence (opt5) from neuraminidase__InfluenzaA__ADJ18161

SEQ ID NO: 211034 - RNA, 1410 nt, Artificial Sequence
  derived and/or modified CDS sequence (opt5) from neuraminidase__InfluenzaA__ADJ18162
augauccccaaccagaagauuaucaccauuggcagcgugugcaugacaaucgggauggccaaucugauucuccaaaucggaaacaucauuuccaucuggauuucucacagcauccagcugggcaaucagaaccagauugagacguguaaucaauccgucaucaccuacgaaaacaauacauggguuaaccagaccuaugugaauauuucuaacacaaauuucgcugccgggcagagcguggucuccgugaaacuugcgggaaacucuagccugugcccuguuuccggcugggcuaucuacagcaaggacaauucuaucagaauuggguccaaaggagauguguuugucauccggaagccguucauuagcuguucuccccucgagugccgcaccuuuuuccugacacagggcgcccuucugaacgacaaacauuccaauggcaccaucaaggauagaagcccuuaucggacgcucaugucuugucccauuggggaagugccuucccccuacaacagccgcuuugaguccguugccuggucugcuagcgccugccacgacggaaucaacuggcugaccaucggcauuuccgggccugauaauggagcuguggccguccugaaguauaacggcaucauuacagacaccaucaaaagcuggagaaauaacauucuccggacacaagaaucugagugugcgugcgugaauggguccuguuucaccgugaugacggauggaccgagcgacggccaggccucuuacaagaucuuucgcaucgagaaaggcaagauugucaaaagcguugaaaugaacgcucccaauuaucauuacgaggaaugcuccuguuacccugauucuagcgagaucacaugcgugugcagagacaacuggcacggguccaaucggcccugggugagcuucaaccagaaucuggaguaucagauuggauacaucuguucuggcauuuuuggggauaacccucgccccaaugacaagaccggauccugcggcccggucagcucuaacggggccaauggagugaagggcuucuccuuuaaauauggcaacgggguuuggaucggaagaacaaagagcauuuccucucggaacggcuucgaaaugaucugggauccuaauggguggaccggaaccgacaacaauuuuagcaucaaacaagacauugugggcaucaacgagugguccggguacucuggcagcuucguccagcaucccgaacuuacaggacuggauuguauucgcccuugcuucuggguggagcucaucagaggccggcccaaggaaaauacgauuuggaccuccgggagcucuaucuccuuuuguggaguuaacagcgacacagugggcuggucuuggcccgauggggcugagcugccuuucaccaucgacaaauga

SEQ ID NO: 211035 - RNA, 1410 nt, Artificial Sequence
  derived and/or modified CDS sequence (opt5) from neuraminidase__InfluenzaA__ADJ18164
augaaccccaagcagaaaaucauuaccaucggcagcgugugcaugacaauugggauggccaaucugauccuccaaauuggaaacaucaucuccauuuggaucucucacagcauucagcugggcaaucagaaccagaucgagacguguaaucaauccgucauuaccuacgaaaacaauacauggguuaaccagaccuaugugaauaucucuaacacaaauuucgcugccgggcagagcguggucuccgugaaacuugcgggaaacucuagccugugcuccguuagcggcugggcuauuuacucuaaggacaauuccaucagaaucgggagcaagggagauguguuugucauucgggagccuuucaucucuuguuccccgcucgaaugccgcaccuuuuuccugacacagggcgcccuucugaacgacaaacauagcaauggcaccauuaaggauagaucucccuaucggacgcucauguccuguccuaucggggaggugcccagcccuuacaacucccgcuuugaaucuguugccuggagcgcuuccgccugccacgacggaauuaacuggcugaccaucggcaucagcgggcccgauaauggagcuguggccguccugaaguauaacggcauuaucacagacaccauuaaaucuuggagaaauaacauccuccggacacaagaguccgagugugcgugcgugaaugggagcuguuucaccgugaugacggauggaccuucugacggccaggccagcuacaagauuuuucgcaucgaaaaaggcaagaucgucaaauccguugagaugaacgcuccgaauuaucauuacgaagagugcucuuguuaccccgauagcuccgagauuacaugcgugugcagagacaacuggcacgggagcaaucggccuugggugucuuucaaccagaaucuggaauaucagaucggauacauuuguuccggcaucuuuggggauaacccccgcccuaaugacaagaccggaagcugcggccccgucucuuccaacggggccaauggagugaagggcuucagcuuuaaauauggcaacgggguuuggauuggaagaacaaaguccaucucuagccggaacggcuucgagaugauuugggauccgaauggguggaccggaaccgacaacaauuuuuccaucaaacaagacaucgugggcauuaacgaauggucuggguacagcggcuccuucguccagcauccugagcuuacaggacuggauuguauccgccccugcuucuggguggaacucauuagaggccggccuaaggagaauacgaucuggaccagcgggucuuccauuagcuuuuguggaguuaacucugacacagugggcugguccuggcccgauggggcugagcugcccuucaccaucgacaaauga

SEQ ID NO: 211036 - RNA, 1410 nt, Artificial Sequence; identical to SEQ ID NO: 208810
  derived and/or modified CDS sequence (opt5) from neuraminidase__InfluenzaA__ADJ18166

SEQ ID NO: 211037 - RNA, 1410 nt, Artificial Sequence; identical to SEQ ID NO: 208810
  derived and/or modified CDS sequence (opt5) from neuraminidase__InfluenzaA__ADJ18168

SEQ ID NO: 211038 - RNA, 1410 nt, Artificial Sequence; identical to SEQ ID NO: 208810
  derived and/or modified CDS sequence (opt5) from neuraminidase__InfluenzaA__ADJ18170

SEQ ID NO: 211039 - RNA, 1410 nt, Artificial Sequence
  derived and/or modified CDS sequence (opt5) from neuraminidase__InfluenzaA__ADJ18172
augaaccccaaucagaagaucauuaccaucggcagcgugugcaugacaauugggauggccaaccugauccucagaauuggaaauaucaucuccauuuggaucucucacagcauucaacugggcaaccagaaucagaucgagacguguaaccaguccgucauuaccuacgaaaauaacacauggguuaaucaaaccuaugugaacaucucuaauacaaacuucgcugccgggcagagcguggucuccgugaaacuugcgggaaauucuagccugugcccuguuuccggcugggcuauuuaccggaaggacaacagcauccgcaucgggucuaaaggagauguguuugucauuagagagccguucaucuccuguagcccccucgaaugccggaccuuuuuccugacacagggcgcccuucugaaugacaagcauucuaacggcaccauuaaagaucgcuccccuuauagaacgcucaugagcugucccaucggggaggugccuucucccuacaacucccgguuugaaagcguugccugguccgcuucugccugccacgacggaauuaauuggcugaccaucggcaucagcgggccugauaacggagcuguggccguccugaaguauaauggcauuaucacagacaccauuaaguccuggcgcaacaauauccucagaacacaggagagcgagugugcgugcgugaacgggucuuguuucaccgugaugacggauggaccguccgacggccaagccagcuacaaaauuuuucggaucgaaaagggcaaaaucgucaagucuguugagaugaaugcucccaacuaucauuacgaagagugcagcuguuacccugauuccucugagauuacaugcgugugccgcgacaauuggcacgggagcaacagacccuggguguccuucaaucagaaccuggaauaucagaucggauacauuuguagcggcaucuuuggggauaauccucggcccaacgacaaaaccggaucuugcggcccggucuccagcaauggggccaacggagugaagggcuucucuuuuaaguauggcaacgggguuuggauuggacgcacaaaauccaucagcuccagaaauggcuucgagaugauuugggauccuaacggguggaccggaaccgacaauaacuuuucuaucaagcaggacaucgugggcauuaaugaauggagcggguacuccggcucuuucguccaacaucccgagcuuacaggacuggauuguauccggccuugcuucuggguggaacucauucgcggcagacccaaagagaacacgaucuggaccagcggguccagcauuucuuuuuguggaguuaauuccgacacagugggcuggagcuggcccgauggggcugagcugccuuucaccaucgacaaguga

SEQ ID NO: 211040 - RNA, 1410 nt, Artificial Sequence; identical to SEQ ID NO: 208810
  derived and/or modified CDS sequence (opt5) from neuraminidase__InfluenzaA__ADJ18174

SEQ ID NO: 211041 - RNA, 1410 nt, Artificial Sequence
  derived and/or modified CDS sequence (opt5) from neuraminidase__InfluenzaA__ADJ18176
augaaccccaaucagaagaucauuaccaucggcagcgugugcaugacaauugggauggccaaccugauccuccaaauuggaaauaucaucuccauuuggaucucucugagcauucagcuuggcaaccagaaucagaucgagacguguaaccaauccgucauuaccuacgaaaauaacacauggguuaaucagaccuaugugaacaucucuaauacaaacuucgcugccgggcagagcguggucuccgugaaacuggcgggaaauucuagccucugcccuguuuccggcugggcuauuuacagcaaggacaacucuaucagaaucggguccaaaggagauguguuugucauucgggagccguucaucagcuguucuccccuggaaugccgcaccuuuuuccuuacacagggcgcccugcucaaugacaagcacuccaacggcaccauuaaagauagaagcccuuaucggacgcugaugucuugucccaucggggaggugccuucccccuacaacagccgcuuugaauccguugccuggucugcuagcgccugccaugacggaauuaauuggcugaccaucggcaucuccgggccugauaacggagcuguggccguccucaaguauaauggcauuaucacagacaccauuaagagcuggagaaacaauauccugcggacacaagagucugagugugcgugcgugaacggguccuguuucaccgugaugacggauggaccgagcgacggccaggccucuuacaaaauuuuucgcaucgaaaagggcaaaaucgucaagagcguugagaugaaugcucccaacuaucacuacgaagagugcuccuguuacccugauucuagcgagauuacaugcgugugcagagacaauuggcauggguccaaccggcccugggugagcuucaaucagaaccuugaauaucagaucggauacauuuguucuggcaucuuuggggauaauccucgccccaacgacaaaaccggauccugcggcccggucagcucuaauggggccaacggagugaagggcuucuccuuuaaguauggcaacgggguuuggauuggaagaacaaaaagcaucuccucucggaauggcuucgagaugauuugggauccuaacggguggaccggaaccgacaauaacuuuagcaucaagcaagacaucgugggcauuaaugaaugguccggguacucuggcagcuucguccagcaccccgagcugacaggacucgauuguauccgcccuugcuucuggguggaacugauuagaggccggcccaaagagaacacgaucuggaccuccgggagcucuauuuccuuuuguggaguuaauagcgacacagugggcuggucuuggcccgauggggcugagcuuccuuucaccaucgacaaguga

SEQ ID NO: 211042 - RNA, 1410 nt, Artificial Sequence; identical to SEQ ID NO: 208583
  derived and/or modified CDS sequence (opt5) from neuraminidase__InfluenzaA__ADJ37250

SEQ ID NO: 211043 - RNA, 1410 nt, Artificial Sequence
  derived and/or modified CDS sequence (opt5) from neuraminidase__InfluenzaA__ADJ37252
augaaccccaaucagaagaucauuaccaucggcagcgugucccugacaauuucuacgaucugcuucuuuaugcaaauugccauccucgucaccacaguuacccugcacuucaaacaguacgaguuuaacagcccuccgaauaaccaggugaugcuuugugaacccacaaucauugagagaaauaucaccgaaauuguguaucugacaaacaccacgaucgagaaggaaauuugcccuaaacucgcugaguaccggaauugguccaagccccagugugacaucaccggguucgccccuuuuucuaaagauaacagcauucgccuguccgcgggaggcgacaucugggucacaagagagcccuaugugucuugcgauccugacaaguguuaccaauucgcucuugggcagggaaccacacugaauaacguucauagcaauaacaucgugcgggaucgcaccccguauagaacgcuccugaugaaugaacugggcguccccuuucaccucgggacaaaacaggugugcauugccugguccucuagcuccugucaugacggaaaggccuggcugcacguuugcaucaccggcgaugacaagaacgcuacagccagcuucauuuacaauggccggcuuguggauucugucguguccuggagcaaagacauccugcgcacccaggagucugaaugugugugcauuaacgggaccuguacagucguuaugacggauggauccgcuagcggcaaggccgacaccaaaauccucuuuaucgaggaggggaagauugugcauacauccacccugucuggaagcgcgcaacacguggaagagugcuccugcuauccuagauaccccggcguccggugugugugccgcgauaacuggaaggggagcaauagaccuaucguugacauuaacaucaaagaccacucuauuguguccagcuacgucuguucuggacuugugggcgauacaccccggaagaaugacagcuccucuagcucccauugccuggauccgaacaaugaagagggcgggcacggaguuaaaggcugggccuucgacgaugggaacgacguguggaugggacgcaccaucagcgaaaagucuagacucggcuaugagacguuuaaagucaucgaggggugguccaauccuaagagcaaacugcagauuaaccgccaggugaucgucgaucggggaaauagaucuggcuacuccggcauuuucagcguggaagggaaguccuguaucaaccggugcuuuuauguugagcugauuagaggacgcaaggaagagacagaagugcucuggaccucuaauagcaucgucguguucuguggcaccuccgggacauacggaaccggcucuuggcccgacggggcuaacauuaaucugaugccuaucuga

SEQ ID NO: 211044 - RNA, 1410 nt, Artificial Sequence; identical to SEQ ID NO: 208810
  derived and/or modified CDS sequence (opt5) from neuraminidase__InfluenzaA__ADJ37263

SEQ ID NO: 211045 - RNA, 1410 nt, Artificial Sequence; identical to SEQ ID NO: 208800
  derived and/or modified CDS sequence (opt5) from neuraminidase__InfluenzaA__ADJ37273

SEQ ID NO: 211046 - RNA, 1410 nt, Artificial Sequence; identical to SEQ ID NO: 208810
  derived and/or modified CDS sequence (opt5) from neuraminidase__InfluenzaA__ADJ40447

SEQ ID NO: 211047 - RNA, 1410 nt, Artificial Sequence; identical to SEQ ID NO: 208810
  derived and/or modified CDS sequence (opt5) from neuraminidase__InfluenzaA__ADJ40457

SEQ ID NO: 211048 - RNA, 1410 nt, Artificial Sequence; identical to SEQ ID NO: 210161
  derived and/or modified CDS sequence (opt5) from neuraminidase__InfluenzaA__ADJ40467

SEQ ID NO: 211049 - RNA, 1410 nt, Artificial Sequence
  derived and/or modified CDS sequence (opt5) from neuraminidase__InfluenzaA__ADJ40477
augaaccccaaucagaagaucauuaccaucggcagcgugugcaugacaauugggauggccaaccugauccuccaaauuggaaauaucaucuccauuuggaucucucacagcauucagcugggcaaccagaaucagaucgagacguguaaccaauccgucauuaccuacgaaaauaacacauggguuaaucagaccuaugugaacaucucuaauacaaacuucgcugccgggcagagcguggucuccgugaaacuugcgggaaauucuagccugugcccuguuuccggcugggcuauuuacagcaaggacaacucuaucagaaucggguccaaaggagauguguuugucauucgggagccguucaucagcuguucuccccucgaaugccgcaccuuuuuccugacacagggcgcccuucugaaugacaagcauuccaacggcaccauuaaagauagaagcccuuaucggacgcucaugucuugucccaucggggaggugccuucccccuacaacagccgcuuugaauccguugccuggucugcuagcgccugccacgacggaauuaauuggcugaccaucggcaucuccgggccugauaacggagcuguggccguccugaaguauaauggcauuaucacagacaccauuaagagcuggagaaacaauauccuccggacacaagagucugagugugcgugcgugaacggguccuguuucaccgugaugacggauggaccgagcgacggccaggccucuuacaaaauuuuucgcaucgaaaagggcaaaaucgucaagagcguugagaugaaugcucccaacuauuacuacgaagagugcuccuguuauccugauucuagcgagauuacaugcgugugcagagacaauuggcauggguccaaccggcccugggugagcuucaaucagaaccuggaauaccagaucggauauauuuguucuggcaucuuuggggauaauccucgccccaacgacaaaaccggauccugcggcccggucagcucuaauggggccaacggagugaagggcuucuccuuuaaguacggcaacgggguuuggauuggaagaacaaaaagcaucuccucucggaauggcuucgagaugauuugggauccuaacggguggaccggaaccgacaauaacuuuagcaucaagcaagacaucgugggcauuaaugaaugguccggguauucuggcagcuucguccagcaccccgagcuuacaggacuggauuguauccgcccuugcuucuggguggaacucauuagaggccggcccaaagagaacacgaucuggaccuccgggagcucuauuuccuuuuguggaguuaauagcgacacaaugggcuggucuuggcccgauggggcugagcugccuuucaccaucgacaaguga

SEQ ID NO: 211050 - RNA, 1410 nt, Artificial Sequence; identical to SEQ ID NO: 208810
  derived and/or modified CDS sequence (opt5) from neuraminidase__InfluenzaA__ADJ40487

SEQ ID NO: 211051 - RNA, 1410 nt, Artificial Sequence; identical to SEQ ID NO: 208810
  derived and/or modified CDS sequence (opt5) from neuraminidase__InfluenzaA__ADJ40507

SEQ ID NO: 211052 - RNA, 1410 nt, Artificial Sequence; identical to SEQ ID NO: 208810
  derived and/or modified CDS sequence (opt5) from neuraminidase__InfluenzaA__ADJ40517

SEQ ID NO: 211053 - RNA, 1410 nt, Artificial Sequence; identical to SEQ ID NO: 208810
  derived and/or modified CDS sequence (opt5) from neuraminidase__InfluenzaA__ADJ40527

SEQ ID NO: 211054 - RNA, 1410 nt, Artificial Sequence
  derived and/or modified CDS sequence (opt5) from neuraminidase__InfluenzaA__ADJ40537
augaaccccaaucagaagaucauuaccaucggcagcgugugcaugacaauugggauggccaaccugauccuccaaauuggaaauaucaucuccauuuggaucucucacagcauucagcugggcaaccagaaucagaucgagacguguaaccaauccgucauuaccuacgaaaauaacacauggguuaaucagaccuaugugaacaucucuaauacaaacuucgcugccgggcagagcggaguguccgucaaacuugcgggcaauucuagccugugcccuguguccgggugggcuauuuacagcaaggacaacucuaucagaaucggauccaaaggcgauguuuuugugauucgggagccguucaucagcuguucuccccucgaaugccgcaccuuuuuccugacacagggcgcccuucugaaugacaagcauuccaacgggaccauuaaagauagaagcccuuaucggacgcucaugucuugucccaucggagaggucccuucccccuacaacagccgcuuugaauccguggccuggucugcuagcgccugccacgacggcauuaauuggcugaccaucgggaucuccggaccugauaacggcgcuguugccgugcugaaguauaaugggauuaucacagacaccauuaagagcuggagaaacaauauccuccggacacaagagucugagugugcgugcgucaacggauccuguuucaccgugaugacggauggcccgagcgacggccaggccucuuacaaaauuuuucgcaucgaaaaggggaaaaucgucaagagcguggagaugaaugcucccaacuaucauuacgaagagugcuccuguuacccugauucuagcgagauuacaugcguuugcagagacaauuggcacggauccaaccggcccugggugagcuucaaucagaaccuggaauaucagaucggcuacauuuguucugggaucuuuggagauaauccucgccccaacgacaaaaccggcuccugcgggccggugagcucuaauggagccaacggcgucaagggcuucuccuuuaaguaugggaacggaguguggauuggcagaacaaaaagcaucuccucucggaauggguucgagaugauuugggauccuaacggauggaccggcaccgacaauaacuuuagcaucaagcaagacaucguugggauuaaugaaugguccggcuacucuggcagcuucgugcagcaucccgagcuuacaggacuggauuguauccgcccuugcuucugggucgaacucauuagagggcggcccaaagagaacacgaucuggaccuccggaagcucuauuuccuuuuguggcgugaauagcgacacaguuggguggucuuggcccgauggagcugagcugccuuucaccaucgacaaguga

SEQ ID NO: 211055 - RNA, 1410 nt, Artificial Sequence
  derived and/or modified CDS sequence (opt5) from neuraminidase__InfluenzaA__ADJ40547
augaaccccaaucagaagaucauuaccaucggcagcgugugcaugacaauugggauggccaaccugauccuccaaauuggaaauaucaucuccauuuggaucucucacagcauucagcugggcaaccagaaucagaucgagacguguaaccaauccgucauuaccuacgaaaauaacacauggguuaaucagaccuaugugaacaucucuaauacaaacuucgcugccgggcagagcguggucuccgugaaacuugcgggaaauucuagccugugcccuguuuccggcugggcuauuuacagcaaggacaacucuaucagaaucggguccaaaggagauguguuugucauucgggagccguucaucagcuguucuccccucgaaugccgcaccuuuuuccugacacagggcgcccuucugaaugacaagcauuccaacggcaccauuaaagauagaagcccuuaucggacgcucaugucuugucccaucggggaggugccuucccccuacaacagccgcuuugaauccguugccuggucugcuagcgccugccacgacggaauuaauuggcugaccaucggcaucuccgggccugauaacggagcuguggccguccugaaguauaauggcauuaucacagacaccauuaagagcuggagaaacaauauccuccggacacaagagucugagugugcgugcgugaacggguccuguuucaccgugaugacggauggaccgagcgacggccaggccucuuacaaaauuuuucgcaucgaaaagggcaaaaucauuaagagcgucgagaugaaugcucccaacuaucauuacgaagagugcuccuguuacccugauucuagcgagaucacaugcguuugcagagacaauuggcacggguccaaccggcccugggugagcuucaaucagaaccuggaauaucagauuggauacaucuguucuggcauuuuuggggauaauccucgccccaacgacaaaaccggauccugcggcccggugagcucuaauggggccaacggagucaagggcuucuccuuuaaguauggcaacgggguguggaucggaagaacaaaaagcauuuccucucggaauggcuucgagaugaucugggauccuaacggguggaccggaaccgacaauaacuuuagcaucaagcaagacauuaucggcauuaaugaaugguccggguacucuggcagcuucguucagcaucccgagcuuacaggacuggauuguauccgcccuugcuucuggguggaacucauuagaggccggcccaaagagaacacgaucuggaccuccgggagcucuaucuccuuuuguggagucaauagcgacacagugggcuggucuuggcccgauggggcugagcugccuuucaccauugacaaguga

SEQ ID NO: 211056 - RNA, 1410 nt, Artificial Sequence; identical to SEQ ID NO: 208810
  derived and/or modified CDS sequence (opt5) from neuraminidase__InfluenzaA__ADJ40557

SEQ ID NO: 211057 - RNA, 1410 nt, Artificial Sequence; identical to SEQ ID NO: 208810
  derived and/or modified CDS sequence (opt5) from neuraminidase__InfluenzaA__ADJ40577

SEQ ID NO: 211058 - RNA, 1410 nt, Artificial Sequence; identical to SEQ ID NO: 208810
  derived and/or modified CDS sequence (opt5) from neuraminidase__InfluenzaA__ADJ40587

SEQ ID NO: 211059 - RNA, 1410 nt, Artificial Sequence
  derived and/or modified CDS sequence (opt5) from neuraminidase__InfluenzaA__ADJ40597
augaaccccaaucagaagaucauuaccaucggcagcgugugcaugacaauugggauggccaaccugauccuccaaauuggaaauaucaucuccauuuggaucucucacagcauucagcugggcaaccagaaucagaucgagacguguaaccaauccgucauuaccuacgaaaauaacacauggguuaaucagaccuaugugaacaucucuaauacaaacuucgcugccgggcagagcguggucuccgugaaacuugcgggaaauucuagccugugcccuguuuccggcugggcuauuuacagcaaggacaacucuaucagaaucggguccaaaggagauguguuugucauucgggagccguucaucagcuguucuccccucgaaugccgcaccuuuuuccugacacagggcgcccuucugaaugacaagcauuccaacggcaccauuaaagauagaagcccuuaucggacgcucaugucuugucccaucggggaggugccuucccccuacaacagccgcuuugaauccguugccuggucugcuagcgccugccacgacggaauuaauuggcugaccaucggcaucuccgggccugauaacggagcuguggccguccugaaguauaauggcauuaucacagacaccauuaagagcuggagaaacaauauccuccggacacaagagucugagugugcgugcgugaacggguccuguuucaccgugaugacggauggaccgagcgacggccaggccucuuacaaaauuuuucgcaucgaaaagggcaaaaucgucaagagcguugagaugaaugcucccaacuaucauuacgaagagugcuccuguuacccugauucuagcgagauuacaugcgugugcagagacaauuggcacggguccaaccggcccugggugagcuucaaucagaaccuggaauaucagaucggauacauuuguucuggcaucuuuggggauaauccucgccccaacgacaaaaccggauccugcggcccggucagcucuaauggggccaacggagugaagggcuucuccuuuaaguauggcaacgggguuuggauuggaagaacaaaaagcaucuccucucggaauggcuucgagaugauuugggauccuaacggguggaccggaaccgacaauaacuuucuuaucaagcaagacaucgugggcauuaaugaauggagcggguacuccggcucuuucguccagcaucccgagcugacaggacucgauuguauccgcccuugcuucuggguggaacugauuagaggccggcccaaagagaacacgaucuggaccagcggguccagcauuucuuuuuguggaguuaauuccgacacagugggcuggagcuggcccgauggggcugagcuuccuuucaccaucgacaaguga

SEQ ID NO: 211060 - RNA, 1410 nt, Artificial Sequence; identical to SEQ ID NO: 208810
  derived and/or modified CDS sequence (opt5) from neuraminidase__InfluenzaA__ADJ40607

SEQ ID NO: 211061 - RNA, 1410 nt, Artificial Sequence; identical to SEQ ID NO: 208810
  derived and/or modified CDS sequence (opt5) from neuraminidase__InfluenzaA__ADJ40617

SEQ ID NO: 211062 - RNA, 1410 nt, Artificial Sequence; identical to SEQ ID NO: 209164
  derived and/or modified CDS sequence (opt5) from neuraminidase__InfluenzaA__ADJ40627

SEQ ID NO: 211063 - RNA, 1410 nt, Artificial Sequence; identical to SEQ ID NO: 208810
  derived and/or modified CDS sequence (opt5) from neuraminidase__InfluenzaA__ADJ40637

SEQ ID NO: 211064 - RNA, 1410 nt, Artificial Sequence; identical to SEQ ID NO: 208810
  derived and/or modified CDS sequence (opt5) from neuraminidase__InfluenzaA__ADJ40657

SEQ ID NO: 211065 - RNA, 1410 nt, Artificial Sequence; identical to SEQ ID NO: 208810
  derived and/or modified CDS sequence (opt5) from neuraminidase__InfluenzaA__ADJ40667

SEQ ID NO: 211066 - RNA, 1410 nt, Artificial Sequence; identical to SEQ ID NO: 208810
  derived and/or modified CDS sequence (opt5) from neuraminidase__InfluenzaA__ADJ40677

SEQ ID NO: 211067 - RNA, 1410 nt, Artificial Sequence
  derived and/or modified CDS sequence (opt5) from neuraminidase__InfluenzaA__ADJ41819
augaaccccaaucagaagaucauuaccaucggcagcgugucccugacaauugccacgaucugcuuccucaugcaaauugcuauccuggucaccacaguuacccuucacuuuaaacaguacgaguguucuagcccuccgaacaaucagguggugcccugcgaaccuaucauuaucgagagaaacauuacagaaaucgucuaucugaccaauacaaccauugagaaggaaaucugucccaaacucguggaguaccggaacugguccaagccucagugcaaaauuacgggguucgcccccuuuucuaaggacaauagcauccgccuguccgcgggaggcgauaucuggguuaccagagagccuuaugugucuugugacccggggaagugcuaccaauucgcucuuggacagggcacaacccuggauaacaaacauagcaaugacacaauucacgaucggacccccuaucgcacgcuccugaugaacgaacugggggucccuuuucaucucggaacaagacagguguguaucgccugguccuccucuuccugccacgacggcaaggccuggcugcauguuuguauuaccggcuacgauaaaaaugcuacagccagcuucaucuaugacgggcggcuuguggauucuauuggauccuggagcaagaacauccugcgcacccaggagucugaaugcgucuguaucaaugggaccugcacaguggugaugacggacggcuccgcuagcgagagagccgauaccaaaauucucuuuaucgaggaaggaaagauuguccacaucagcccccugucuggcagcgcgcaacacguugaggaaugcuccuguuacccucgguaccccggggugcgcugcguguguagagacaacuggaagggaagcaaucggccggucguggauauuaacguuaaagacuauucuaucguguccagcuacgucugcucuggccuugugggcgacacaccucgcaagaacgauagaagcuccucuagcuauugucggaaucccaacaaugagaaagggaaccauggaguuaagggcugggccuucgacgaugggaaugacguguggaugggacgcaccaucuccgaagagagcagaucuggcuacgagacauuuaaagucauugggggaugguccaccccuaacagcaagcugcagaucaauagacaggugauugucgauucuggcaaccgguccggcuauagcgggaucuucuccguggaaggaaaaucuugcauuaaucgcuguuuuuacguugagcucauccggggcagagaacaggagacgcgcgugugguggacaagcaacuccauugucguguucugcgggaccucuggaaccuauggcacagggagcuggcccgacggcgcugauaucaaucugaugcccaucuga

SEQ ID NO: 211068 - RNA, 1410 nt, Artificial Sequence; identical to SEQ ID NO: 208810
  derived and/or modified CDS sequence (opt5) from neuraminidase__InfluenzaA__ADJ56642

SEQ ID NO: 211069 - RNA, 1410 nt, Artificial Sequence; identical to SEQ ID NO: 208810
  derived and/or modified CDS sequence (opt5) from neuraminidase__InfluenzaA__ADJ56652

SEQ ID NO: 211070 - RNA, 1410 nt, Artificial Sequence; identical to SEQ ID NO: 208810
  derived and/or modified CDS sequence (opt5) from neuraminidase__InfluenzaA__ADJ80637

SEQ ID NO: 211071 - RNA, 1410 nt, Artificial Sequence; identical to SEQ ID NO: 209828
  derived and/or modified CDS sequence (opt5) from neuraminidase__InfluenzaA__ADJ80647

SEQ ID NO: 211072 - RNA, 1410 nt, Artificial Sequence; identical to SEQ ID NO: 209828
  derived and/or modified CDS sequence (opt5) from neuraminidase__InfluenzaA__ADJ80657

SEQ ID NO: 211073 - RNA, 1410 nt, Artificial Sequence; identical to SEQ ID NO: 208810
  derived and/or modified CDS sequence (opt5) from neuraminidase__InfluenzaA__ADJ80667

SEQ ID NO: 211074 - RNA, 1410 nt, Artificial Sequence; identical to SEQ ID NO: 210723
  derived and/or modified CDS sequence (opt5) from neuraminidase__InfluenzaA__ADJ80677

SEQ ID NO: 211075 - RNA, 1410 nt, Artificial Sequence; identical to SEQ ID NO: 210098
  derived and/or modified CDS sequence (opt5) from neuraminidase__InfluenzaA__ADJ80687

SEQ ID NO: 211076 - RNA, 1410 nt, Artificial Sequence
  derived and/or modified CDS sequence (opt5) from neuraminidase__InfluenzaA__ADJ80697
augaaccccaaucagaagaucauuaccaucggcagcgugugcaugacaauugggauggccaaccugauccuccaaauuggaaauaucaucuccauuuggaucucucacagcauucagcugggcaaccagaaucagaucgagacguguaaccaauccgucauuaccuacgaaaauaacacauggguuaaucagaccuaugugaacaucucuaauacaaacuucgcugccgggcagagcgugauuuccgucaaacuugcgggaaauucuagccugugcccuguguccggcugggcuaucuacagcaaggacaacucuguuagaaucggguccaaaggagauguguuugucauucgggagccguucaucagcuguucuccccucgaaugccgcaccuuuuuccugacacagggcgcccuucugaaugacaagcauuccaacggcaccauuaaagauagaagcccuuaucggacgcucaugucuugucccaucggggaggugccuucccccuacaacagccgcuuugaauccguugccuggucugcuagcgccugccacgacggaauuaauuggcugaccaucggcaucuccgggccugauaacggagcuguggccguccugaaguauaauggcauuaucacagacaccauuaagagcuggagaaacaauauccuccggacacaagagucugagugugcgugcgugaacggguccuguuucaccgugaugacggauggaccgagcgacggccaggccucuuacaaaauuuuucgcaucgaaaagggcaaaaucgucaagagcguugagaugaaugcucccaacuaucauuacgaagagugcuccuguuacccugauucuagcgagauuacaugcgugugcagagacaauuggcacggguccaaccggcccugggugagcuucaaucagaaccuggaauaucagaucggauacauuuguucuggcaucuuuggggauaauccucgccccaacgacaaaaccggauccugcggcccggucagcucuaauggggccaacggagugaagggcuucuccuuuaaguauggcaacgggguuuggauuggaagaacaaaaagcaucuccucucggaauggcuucgagaugauuugggauccuaacggguggaccggaaccgacaauaacuuuagcaucaagcaagacaucgugggcauuaaugaaugguccggguacucuggcagcuucguccagcaucccgagcuuacaggacuggauuguauccgcccuugcuucuggguggaacucauuagaggccggcccaaagagaacacgaucuggaccuccgggagcucuauuuccuuuuguggaguuaauagcgacacagugggcuggucuuggcccgauggggcugagcugccuuucaccaucgacaaguga

SEQ ID NO: 211077 - RNA, 1410 nt, Artificial Sequence
  derived and/or modified CDS sequence (opt5) from neuraminidase__InfluenzaA__ADJ80717
augaaccccaaucagaagaucauuaccaucggcagcgugugcaugacaauugggauggccaaccugauccuccaaauuggaaauaucaucuccauuuggaucucucacagcauucagcugggcaaccagaaucagaucgagacguguaaccaauccgucauuaccuacgaaaauaacacauggguuaaucagaccuaugugaacaucucuaauacaaacuucgcugccgggcagagcguggucuccgugaaacuugcgggaaauucuagccugugcccuguuuccggcugggcuguguacagcaaggacaacucuauuagaaucggguccaaaggagaugucuuugugauccgggagccguucauuagcuguucuccccucgaaugccgcaccuuuuuccugacacagggcgcccuucugaaugacaagcauuccaacggcaccaucaaagauagaagcccuuaucggacgcucaugucuugucccauuggggagguuccuucccccuacaacagccgcuuugaauccguggccuggucugcuagcgccugccacgacggaaucaauuggcugaccauuggcaucuccgggccugauaacggagcugucgccgugcugaaguauaauggcaucauuacagacaccaucaagagcuggagaaacaauauucuccggacacaagagucugagugugcgugcgugaacggguccuguuucaccgucaugacggauggaccgagcgacggccaggccucuuacaaaaucuuucgcauugaaaagggcaaaaucguuaagagcguggagaugaaugcucccaacuaucauuacgaagagugcuccuguuacccugauucuagcgagaucacaugcgugugcagagacaauuggcacggguccaaccggcccugggucagcuucaaucagaaccuggaauaucagauuggauacaucuguucuggcauuuuuggggauaauccucgccccaacgacaaaaccggauccugcggcccggugagcucuaauggggccaacggaguuaagggcuucuccuuuaaguauggcaacgggguguggaucggaagaacaaaaagcauuuccucucggaauggcuucgagaugaucugggauccuaacggguggaccggaaccgacaauaacuuuagcauuaagcaagacaucgucggcaucaaugaaugguccggguacucuggcagcuucgugcagcaucccgagcuuacaggacuggauuguauucgcccuugcuucuggguugaacucaucagaggccggcccaaagagaacacgauuuggaccuccgggagcucuaucuccuuuuguggagugaauagcgacacagucggcuggucuuggcccgauggggcugagcugccuuucaccauugacaaguga

SEQ ID NO: 211078 - RNA, 1410 nt, Artificial Sequence
  derived and/or modified CDS sequence (opt5) from neuraminidase__InfluenzaA__ADJ80727
augaaccccaaucagaagaucauuaccaucggcagcgugugcaugacaauugggauggccaaccugauccuccaaauuggaaauaucaucuccauuuggaucucucacagcauucagcugggcaaccagaaucagaucgagacguguaaccaauccgucauuaccuacgaaaauaacacauggguuaaucagaccuaugugaacaucucuaauacaaacuucgcugccgggcagagcguggucuccgugaaacuugcgggaaauucuagccugugcccuguuuccggcugggugauuuacagcaaggacaacucuaucagaaucggguccaaaggagaugucuuugugauucgggagccguucaucagcuguucuccccucgaaugccgcaccuuuuuccugacacagggcgcccuucugaaugacaagcauuccaacggcaccauuaaagauagaagcccuuaucggacgcucaugucuugucccaucggggagguuccuucccccuacaacagccgcuuugaauccguggcuuggucugccagcgcuugccacgacggaauuaauuggcugaccaucggcaucuccgggccugauaacggagccgucgcugugcugaaguauaauggcauuaucacagacaccauuaagagcuggagaaacaauauccuccggacacaagagucugagugugccugcgugaacggguccuguuucaccgucaugacggauggaccgagcgacggccaggcgucuuacaaaauuuuucgcaucgaaaagggcaaaaucguuaagagcguggagaugaaugcccccaacuaucauuacgaagagugcuccuguuacccugauucuagcgagauuacaugcgugugcagagacaauuggcacggguccaaccggcccugggucagcuucaaucagaaccuggaauaucagaucggauacauuuguucuggcaucuuuggggauaauccucgccccaacgacaaaaccggauccugcggcccggugagcucuaauggggcuaacggaguuaagggcuucuccuuuaaguauggcaacgggguguggauuggaagaacaaaaagcaucuccucucggaauggcuucgagaugauuugggauccuaacggguggaccggaaccgacaauaacuuuagcaucaagcaagacaucgucggcauuaaugaaugguccggguacucuggcagcuucgugcagcaucccgagcuuacaggacuggauuguauccgcccuugcuucuggguugaacucauuagaggccggcccaaagagaacacgaucuggaccuccgggagcucuauuuccuuuuguggagugaauagcgacacagucggcuggucuuggcccgauggggccgagcugccuuucaccaucgacaaguga

SEQ ID NO: 211079 - RNA, 1410 nt, Artificial Sequence; identical to SEQ ID NO: 209577
  derived and/or modified CDS sequence (opt5) from neuraminidase__InfluenzaA__ADJ80737

SEQ ID NO: 211080 - RNA, 1410 nt, Artificial Sequence
  derived and/or modified CDS sequence (opt5) from neuraminidase__InfluenzaA__ADJ80747
augaaccccaaucagaagaucauuaccaucggcagcgugugcaugacaauugggauggccaaccugauccuccaaauuggaaauaucaucuccauuuggaucucucacagcauucagcugggcaaccagaaucagaucgagacguguaaccaauccgucauuaccuacgaaaauaacacauggguuaaucagaccuaugugaacaucucuaauacaaacuucgcugccgggcagagcguggucuccgugaaacuugcgggaucuagcucccugugcccuguuagcggcugggcuauuuacucuaaggacaauuccaucagaaucgggagcaaaggagauguguuugucauucgggagccguucaucucuuguucuccccucgaaugccgcaccuuuuuccugacacagggcgcccuucugaacgacaagcauagcaauggcaccauuaaagauagaucuccuuaucggacgcucauguccugucccaucggggaggugccuagccccuacaacucccgcuuugaaucuguugccuggagcgcuuccgccugccacgacggaauuaacuggcugaccaucggcaucagcgggccugauaauggagcuguggccguccugaaguauaacggcauuaucacagacaccauuaagucuuggagaaauaacauccuccggacacaagaguccgagugugcgugcgugaaugggagcuguuucaccgugaugacggauggaccgucugacggccaggccagcuacaaaauuuuucgcaucgaaagaggcaagaucgucaaauccguugagaugaacgcucccaauuaucauuacgaagagugcucuuguuacccugauagcuccgagauuacaugcgugugccgggacaacuggcacgggagcaaucgccccugggugucuuucaaccagaaucuggaauaucagaucggauacauuuguuccggcaucuuuggggauaacccuagacccaaugacaagaaaggaagcugcggcccggucucuuccaacggggccaauggagugaagggcuucagcuuuaaguauggcaacgggguuuggauuggacggaccaaauccaucucuagccgcaacggcuucgagaugauuugggauccuaauggguggacaggaaccgacaacaauuuuuccaucaagcaagacaucguggaaauuaacgaguggucuggcuacagcggguccuucguccagcaucccgaacuuaccggccuggauuguaucagaccuugcuucuggguggagcucauucggggacgccccaaagagaauacaaucuggacgagcggcuccuccauuagcuuuugugggguuaacucugacaccgugggaugguccuggcccgauggcgcugaacugccuuucacaaucgacaaguga

SEQ ID NO: 211081 - RNA, 1410 nt, Artificial Sequence; identical to SEQ ID NO: 208810
  derived and/or modified CDS sequence (opt5) from neuraminidase__InfluenzaA__ADJ80757

SEQ ID NO: 211082 - RNA, 1410 nt, Artificial Sequence; identical to SEQ ID NO: 208810
  derived and/or modified CDS sequence (opt5) from neuraminidase__InfluenzaA__ADJ80767

SEQ ID NO: 211083 - RNA, 1410 nt, Artificial Sequence; identical to SEQ ID NO: 209393
  derived and/or modified CDS sequence (opt5) from neuraminidase__InfluenzaA__ADJ80777

SEQ ID NO: 211084 - RNA, 1410 nt, Artificial Sequence; identical to SEQ ID NO: 208810
  derived and/or modified CDS sequence (opt5) from neuraminidase__InfluenzaA__ADJ80787

SEQ ID NO: 211085 - RNA, 1410 nt, Artificial Sequence
  derived and/or modified CDS sequence (opt5) from neuraminidase__InfluenzaA__ADJ80797
augaaccccaaucagaagaucauuaccaucggcagcgugugcaugacaauugggauggccaaccugauccuccaaauuggaaauaucaucuccauuuggaucucucacagcauucagcugggcaacaaaaaucagaucgagacguguaaccaguccgucauuaccuacgaaaauaacacauggguuaaucaaaccuaugugaacaucucuaauacaaacuucgcugccgggcagagcguggucuccgugaaacuugcgggaaauucuagccugugcccuguuuccggcugggcuauuuacagcaaggacaacucuaucagaaucggguccaagggagauguguuugucauucgggagccguucaucagcuguucuccccucgaaugccgcaccuuuuuccugacacagggcgcccuucugaaugacaaacauuccaacggcaccauuaaggauagaagcccuuaucggacgcucaugucuugucccaucggggaggugccuucccccuacaacagccgcuuugaauccguugccuggucugcuagcgccugccacgacggaauuaauuggcugaccaucggcaucuccgggccugauaacggagcuguggccguccugaaguauaauggcauuaucacagacaccauuaaaagcuggagaaacaauauccuccggacacaggagucugagugugcgugcgugaacggguccuguuucaccgugaugacggauggaccgagcgacggccaagccucuuacaagauuuuucgcaucgaaaaaggcaagaucgucaaaagcguugagaugaaugcucccaacuaucauuacgaagagugcuccuguuacccugauucuagcgagauuacaugcgugugcagagacaauuggcacggguccaaccggcccugggugagcuucaaucagaaccuggaauaucagaucggauacauuuguucuggcaucuuuggggauaauccucgccccaacgacaagaagggauccugcggcccggucagcucuaauggggccaacggagugaaaggcuucuccuuuaaguauggcaacgggguuuggauuggaagaaccaaaagcaucuccucucggaauggcuucgagaugauuugggauccuaacggguggacaggaaccgacaauaacuuuagcaucaagcaggacaucgugggcauuaaugaaugguccggguacucuggcagcuucguccaacaucccgagcuuaccggacuggauuguauccgcccuugcuucuggguggaacucauuagaggccggcccaaagagaacacaaucuggacguccgggagcucuauuuccuuuuguggaguuaauagcgacaccgugggcuggucuuggcccgauggggcugagcugccuuucacaaucgacaaguga

SEQ ID NO: 211086 - RNA, 1410 nt, Artificial Sequence; identical to SEQ ID NO: 209828
  derived and/or modified CDS sequence (opt5) from neuraminidase__InfluenzaA__ADJ80807

SEQ ID NO: 211087 - RNA, 1410 nt, Artificial Sequence; identical to SEQ ID NO: 208810
  derived and/or modified CDS sequence (opt5) from neuraminidase__InfluenzaA__ADJ80817

SEQ ID NO: 211088 - RNA, 1410 nt, Artificial Sequence; identical to SEQ ID NO: 208810
  derived and/or modified CDS sequence (opt5) from neuraminidase__InfluenzaA__ADJ80827

SEQ ID NO: 211089 - RNA, 1410 nt, Artificial Sequence; identical to SEQ ID NO: 210323
  derived and/or modified CDS sequence (opt5) from neuraminidase__InfluenzaA__ADJ80837

SEQ ID NO: 211090 - RNA, 1410 nt, Artificial Sequence; identical to SEQ ID NO: 210821
  derived and/or modified CDS sequence (opt5) from neuraminidase__InfluenzaA__ADJ80851

SEQ ID NO: 211091 - RNA, 1410 nt, Artificial Sequence
  derived and/or modified CDS sequence (opt5) from neuraminidase__InfluenzaA__ADJ80861
augaaccccaaucagaagaucauuaccaucggcagcgugugcaugacaauugggauggccaaccugauccuccaaauuggaaauaucaucuccauuuggaucucucacagcauucagcugggcaaccagaaucagaucgagacguguaaccaauccgucauuaccuacgaaaauaacacauggguuaaucagaccuaugugaacaucucuaauacaaacuucgcugccgggcagagcguggucuccgugaaacuugcgggaaauucuagccugugcccuguuuccggcugggcuauuuacagcaaggacaacucuaucagaaucggguccaaaggagauguguuugucauucgggagccguucaucagcuguucuccccucgaaugccgcaccuuuuuccugacacagggcgcccuucugaaugacaagcauuccaacggcaccauuaaagauagaagcccuuaucggacgcucaugucuugucccaucggggaggugccuucccccuacaacagccgcuuugaauccguugccuggucugcuagcgccugccacgacggaauuaauuggcugaccaucggcaucuccgggccugauaacggagcuguggccguccugaaguauaauggcauuaucacagacaccauuaagagcuggagaaacaauauccuccggacacaagagucugagugugcgugcgugaacggguccuguuucaccgugaugacggauggaccgagcgacggccaggccucuuacaaaauuuuucgcaucgaaaagggcaaaaucgucaagagcguugagaugaaugcucccaacuaucauuacgaagagugcuccuguuacccugauucuagcgagauuacaugcgugugcagagacaauuggcacggguccaaccggcccugggugagcuucaaucagaaccuggaauaucagaucggauacauuuguucuggcaucuuuggggauaauccucgccccaacgacaaaaccggauccugcggcccggucagcccuaauggggccaacggagugaagggcuucucuuuuaaguauggcaacgggguuuggauuggaagaacaaaauccaucagcucccggaauggcuucgagaugauuugggaucccaacggguggaccggaaccgacaauaacuuuucuaucaagcaagacaucgugggcauuaaugaauggagcggguacuccggcucuuucguccagcauccugagcuuacaggacuggauuguauccgccccugcuucuggguggaacucauuagaggccggcccaaagagaacacgaucuggaccagcggguccagcauuucuuuuuguggaguuaauuccgacacagugggcuggagcuggccugauggggcugagcugccguucaccaucgacaaguga

SEQ ID NO: 211092 - RNA, 1410 nt, Artificial Sequence; identical to SEQ ID NO: 211085
  derived and/or modified CDS sequence (opt5) from neuraminidase__InfluenzaA__ADJ80871

SEQ ID NO: 211093 - RNA, 1410 nt, Artificial Sequence; identical to SEQ ID NO: 208810
  derived and/or modified CDS sequence (opt5) from neuraminidase__InfluenzaA__ADJ80886

SEQ ID NO: 211094 - RNA, 1410 nt, Artificial Sequence
  derived and/or modified CDS sequence (opt5) from neuraminidase__InfluenzaA__ADJ80896
augaaccccaaucagaagaucauuaccaucggcagcgugugcaugacaauugggauggccaaccugauccuccaaauuggaaauaucaucuccauuuggaucucucacagcauucagcugggcaaccagaaucagaucgagacguguaaccaauccauuaucaccuacgaaaauaacacaugggucaaucagaccuauguuaacauuucuaauacaaacuucgcugccgggcagagcgugguguccgucaaacuuaccggaaauucuagccugugcccuguguccggcugggcgaucuacagcaaggacaacucuaucagaauuggguccaaaggagauguuuuugugauccgggagccguucauuagcuguucuccccucgaaugccgcacauuuuuccugacccagggcgcccuucugaaugacaagcauuccaacggcacgaucaaagauagaagcccuuaucggacccucaugucuugucccauuggggaggucccuucccccuacaacagccgcuuugaauccguggcuuggucugccagcgcuugccacgacggaaucaauuggcugacaaucggcauuuccgggccugauaacggagccguugcugugcugaaguauaauggcaucauuaccgacacaaucaagagcuggagaaacaauauucuccggacccaagagucugagugugccugcgucaacggguccuguuucacggugaugacagauggaccgagcgacggccaggcgucuuacaaaaucuuucgcaucgaaaagggcaaaauugucaagagcguggagaugaaugcccccaacuaucauuacgaagagugcuccuguuacccugauucuagcgagauuaccugcguuugcagagacaauuggcacggguccaaccggcccugggugagcuucaaucagaaccuggaauaucagaucggauacaucuguucuggcauuuuuggggauaauccucgccccaacgacaaaacaggauccugcggcccggugagcucuaauggggcuaacggagucaagggcuucuccuuuaaguauggcaacgggguguggaucggaagaaccaaaagcauuuccucucggaauggcuucgagaugaucugggauccuaacggguggaccggaacagacaauaacuuuagcaucaagcaagacauuguuggcaucaaugaaugguccggguacucuggcagcuucgugcagcaucccgagcuuacgggacuggauuguauucgcccuugcuucugggucgaacucaucagaggccggcccaaagagaacaccauuuggacauccgggagcucuaucuccuuuuguggagugaauagcgacaccguuggcuggucuuggcccgauggggccgagcugccuuucacaaucgacaaguga

SEQ ID NO: 211095 - RNA, 1410 nt, Artificial Sequence
  derived and/or modified CDS sequence (opt5) from neuraminidase__InfluenzaA__ADJ80913
augaaccccaaucagaagaucauuaccaucggcagcgugugcaugacaauugggauggccaaccugauccuccaaauuggaaauaucaucuccauuuggaucucucacagcauucagcugggcaaccagaaucagaucgagacguguaaccaauccgucauuaccuacgaaaauaacacauggguuaaucagaccuaugugaacaucucuaauacaaacuucgcugccgggcagagcguggucuccgugaaacuugcgggaucuagcucccugugcccuguuagcggcugggcuauuuacucuaaggacaauuccaucagaaucgggagcaaaggagauguguuugucauucgggagccguucaucucuuguagcccccucgaaugccgcaccuuuuuccugacacagggcgcccuucugaacgacaagcauuccaauggcaccauuaaagauagaucuccuuaucggacgcucauguccugucccaucggggaggugccuagccccuacaacucccgcuuugaaucuguugccuggagcgcuuccgccugccacgacggaauuaacuggcugaccaucggcaucagcgggccugauaauggagcuguggccguccugaaguauaacggcauuaucacagacaccauuaagucuuggagaaauaacauccuccggacacaagaguccgagugugcgugcgugaaugggagcuguuucaccgugaugacggauggaccgucugacggccaggccagcuacaaaauuuuucgcaucgaaaagggcaaaaucgucaaguccguugagaugaacgcucccaauuaucauuacgaagagugcucuuguuacccugauagcuccgagauuacaugcgugugcagagacaacuggcacgggagcaaucggcccugggugucuuucaaccagaaucuggaauaucagaucggauacauuuguuccggcaucuuuggggauaacccucgccccaaugacaaaaagggaagcugcggcccggucucuuccaacggggccaauggagugaagggcuucagcuuuaaauauggcaacgggguuuggauuggaagaaccaaguccaucucuagccgguccggcuucgagaugauuugggauccuaacggguggacaggaaccgacaauaacuuuucuaucaaacaagacaucgugggcauuaaugaauggagcggguacuccggcagcuucguccagcaucccgagcuuaccggacuggauuguauccgcccuugcuucuggguggaacucauuagaggccggcccaaggagaacacaaucuggacgucuggguccagcauuucuuuuuguggaguuaauuccgacaccgugggcuggagcuggcccgauggggcugagcugccuuucacaaucgacaaauga

SEQ ID NO: 211096 - RNA, 1410 nt, Artificial Sequence; identical to SEQ ID NO: 208810
  derived and/or modified CDS sequence (opt5) from neuraminidase__InfluenzaA__ADJ80930

SEQ ID NO: 211097 - RNA, 1410 nt, Artificial Sequence; identical to SEQ ID NO: 208810
  derived and/or modified CDS sequence (opt5) from neuraminidase__InfluenzaA__ADJ80950

SEQ ID NO: 211098 - RNA, 1410 nt, Artificial Sequence; identical to SEQ ID NO: 210098
  derived and/or modified CDS sequence (opt5) from neuraminidase__InfluenzaA__ADJ80960

SEQ ID NO: 211099 - RNA, 1410 nt, Artificial Sequence; identical to SEQ ID NO: 211085
  derived and/or modified CDS sequence (opt5) from neuraminidase__InfluenzaA__ADJ80970

SEQ ID NO: 211100 - RNA, 1410 nt, Artificial Sequence; identical to SEQ ID NO: 208810
  derived and/or modified CDS sequence (opt5) from neuraminidase__InfluenzaA__ADJ80980

SEQ ID NO: 211101 - RNA, 1410 nt, Artificial Sequence; identical to SEQ ID NO: 211085
  derived and/or modified CDS sequence (opt5) from neuraminidase__InfluenzaA__ADJ80996

SEQ ID NO: 211102 - RNA, 1410 nt, Artificial Sequence
  derived and/or modified CDS sequence (opt5) from neuraminidase__InfluenzaA__ADJ81006
augaaccccaaucagaagaucauuaccaucggcagcgugugcaugacaauugggauggccaaccugauccuccaagucggaaauauuaucuccaucuggauuucucacagcauccagcugggcaaccagaaucagauugagacguguaaccaauccaucauuaccuacgaaaauaacacauggguuaaucagaccuaugugaacaucucuaauacaaacuucgcugccgggcagagcguggucuccgugaaacuugcgggaaauucuagccugugcccuguuuccggcugggcuauuuacagcaaggacaacucuaucagaaucggguccaaaggagauguguuugucauucgggagccguucaucagcuguucuccccucgaaugccgcaccuuuuuccugacacagggcgcccuucugaaugacaagcauuccaacggcaccauuaaagauagaagcccuuaucggacgcucaugucuugucccaucggggaggugccuucccccuacaacagccgcuuugaauccguugccuggucugcuagcgccugccacgacggaauuaauuggcugaccaucggcaucuccgggccugauaacggagcuguggccguccugaaguauaauggcauuaucacagacaccauuaagagcuggagaaacaauauccuccggacacaagagucugagugugcgugcgugaacggguccuguuucaccgugaugacggauggaccgagcgacggccaggccucuuacaaaauuuuucgcaucgaaaagggcaaaaucgucaagagcguugagaugaaugcucccaacuaucauuacgaagagugcuccuguuacccugauucuagcgagauuacaugcgugugcagagacaauuggcacggguccaaccggcccugggugagcuucaaucagaaccuggaauaucagaucggauacauuuguucuggcaucuuuggggauaauccucgccccaacgacaaaaccggauccugcggcccggucagcucuaauggggccaacggagugaagggcuucuccuuuaaguauggcaacgggguuuggauuggaagaacaaaaagcaccuccucucggaauggcuucgagaugaucugggauccuaacggguggaccggaacagacaauaacuuuagcauuaagcaagacaucgugggcaucaaugaaugguccggguacucuggcagcuucguccagcaucccgagcuuacgggacuggauuguauucgcccuugcuucuggguggaacucaucagaggccggcccaaagagaacaccauuuggacauccgggagcucuaucuccuuuuguggaguuaauagcgacaccgugggcuggucuuggcccgauggggcugagcugccuuucacaauugacaaguga

SEQ ID NO: 211103 - RNA, 1410 nt, Artificial Sequence; identical to SEQ ID NO: 210821
  derived and/or modified CDS sequence (opt5) from neuraminidase__InfluenzaA__ADJ81016

SEQ ID NO: 211104 - RNA, 1410 nt, Artificial Sequence; identical to SEQ ID NO: 211010
  derived and/or modified CDS sequence (opt5) from neuraminidase__InfluenzaA__ADJ81026

SEQ ID NO: 211105 - RNA, 1410 nt, Artificial Sequence; identical to SEQ ID NO: 208810
  derived and/or modified CDS sequence (opt5) from neuraminidase__InfluenzaA__ADJ81036

SEQ ID NO: 211106 - RNA, 1410 nt, Artificial Sequence
  derived and/or modified CDS sequence (opt5) from neuraminidase__InfluenzaA__ADJ81046
augaaccccaaucagaagaucauuaccaucggcagcgugugcaugacagucgggauggccaaccugauucuccaaaucggaaauauuaucuccaucuggauuucucacagcauccagcugggcaaccagaaucagauugagacguguaaccaauccguuaucaccuacgaaaauaacacaugggugaaucagaccuaugugaacauuucuaauacaaacuucgcugccgggcagagcgucguguccguuaaacuugcgggaaauucuagccugugcccuguguccggcugggcuaucuacagcaaggacaacucuauuagaaucggguccaaaggagaugucuuugugauccgggagccguucauuagcuguucuccccucgaaugccgcaccuuuuuccugacacagggcgcccuucugaaugacaagcauuccaacggcaccaucaaagauagaagcccuuaucggacgcucaugucuugucccauuggggagguuccuucccccuacaacagccgcuuugaauccguggccuggucugcuagcgccugccacgacggaaucaauuggcugaccauuggcaucuccgggccugauaacggagcugucgccgugcugaaguauaauggcaucauuacagacaccaucaagagcuggagaaacaauauucuccggacacaagagucugagugugcgugcgugaacggguccuguuucaccgucaugacggauggaccgagcgacggccaggccucuuacaaaaucuuucgcauugaaaagggcaaaaucguuaagagcguggagaugaaugcucccaacuaucauuacgaagagugcuccuguuacccugauucuagcgagaucacaugcgugugcagagacaauuggcacggguccaaccggcccugggucagcuucaaucagaaccuggaauaucagauuggauacaucuguucuggcauuuuuggggauaauccucgccccaacgacaaaaccggauccugcggcccggugagcucuaauggggccaacggaguuaagggcuucuccuuuaaguauggcaacgggguguggaucggaagaacaaaaagcauuaauucccggaacggcuucgagaugaucugggauccuaauggguggaccggaaccgacaacaauuuuucuauuaagcaagacaucgucggcacaaacgaauggagcggguacuccggcucuuucgugcagcaucccgagcuuacgggacuggauuguauccgcccuugcuucuggguugaacucauuagaggccggcccaaagagaauaccaucuggacaagcggguccagcauuucuuuuuguggagugaacuccgacaccgucggcuggagcuggcccgauggggcugagcugccuuucacaaucgacaaguga

SEQ ID NO: 211107 - RNA, 1410 nt, Artificial Sequence
  derived and/or modified CDS sequence (opt5) from neuraminidase__InfluenzaA__ADJ81056
augaaccccaaucagaagaucauuaccaucggcagcgugugcaugacaauugggauggccaaccugauccuccaaauuggaaauaucaucuccauuuggaucucucacagcauucagcugggcaaccagaaucagaucgagacguguaaccaauccgucauuaccuacgaaaauaacacauggguuaaucagaccuaugugaacaucucuaauacaaacuucgcugccgggcagagcguggucccugugaaacuugcgggauccucuagccugugcccgguuuccggcugggcuauuuacagcaaggacaauucuaucagaaucggguccaaaggagauguguuugucauucgggagcccuucaucagcuguucuccucucgaaugccgcaccuuuuuccugacacagggcgcccuucugaacgacaagcauuccaauggcaccauuaaagauagaagccccuaucggacgcucaugucuuguccuaucggggaggugcccuccccuuacaacagccgcuuugaauccguugccuggucugcuagcgccugccacgacggaauuaacuggcugaccaucggcaucuccgggccggauaauggagcuguggccguccugaaguauaacggcauuaucacagacaccauuaagagcuggagaaauaacauccuccggacacaagagucugagugugcgugcgugaauggguccuguuucaccgugaugacggauggacccagcgacggccaggccucuuacaaaauuuuucgcaucgaaaagggcaaaaucgucaagagcguugagaugaacgcuccuaauuaucauuacgaagagugcuccuguuaccccgauucuagcgagauuacaugcgugugcagagacaacuggcacggguccaaucggccuugggugagcuucaaccagaaucuggaauaucagaucggauacauuuguucuggcaucuuuggggauaacccccgcccgaaugacaaaaagggauccugcggcccugucagcucuaacggggccaauggagugaagggcuucuccuuuaaauauggcaacgggguuuggauuggaagaaccaagagcaucaacucccggaauggcuucgagaugauuugggaucccaacggguggacaggaaccgacaauaacuuuucuaucaaacaagacaucgugggcauuaaugaauggagcggguacuccggcucuuucguccagcauccugagcuuaccggacuggauuguauccgccccugcuucuggguggaacucauuagaggccggcccaaggagaacacaaucuggacgagcggguccagcauuucuuuuuguggaguuaauuccgacaccgugggcuggagcuggccugauggggcugagcugccguucacaaucgacaaauga

SEQ ID NO: 211108 - RNA, 1410 nt, Artificial Sequence; identical to SEQ ID NO: 210098
  derived and/or modified CDS sequence (opt5) from neuraminidase__InfluenzaA__ADJ81066

SEQ ID NO: 211109 - RNA, 1410 nt, Artificial Sequence; identical to SEQ ID NO: 208671
  derived and/or modified CDS sequence (opt5) from neuraminidase__InfluenzaA__ADJ84775

SEQ ID NO: 211110 - RNA, 1410 nt, Artificial Sequence
  derived and/or modified CDS sequence (opt5) from neuraminidase__InfluenzaA__ADJ88785
augaaccccaaucagaagaucauuaccaucggcagcgugucccugacaauuucuacgaucugcuucuuuaugcaaauugccauccucaucaccacagucacccugcacuucaaacaguacgaguuuaacagcccuccgaauaaccagguuaugcuuugugaacccacaauuaucgagagaaauauuaccgaaaucguguaucugacaaacaccacgauugagaaggaaaucugcccuaaacucgcugaguaccggaauugguccaagccccagugugacauuaccggguucgccccuuuuucuaaagauaacagcauccgccuguccgcgggaggcgacaucugggugacaagagagcccuaugucucuugcgauccugacaaguguuaccaauucgcucuugggcagggaaccacacugaauaacgugcauagcaauaacaccguucgggaucgcacgccguauagaacacuccugaugaaugaacugggcgugcccuuucaccucgggaccaagcaggucugcauugccugguccucuagcuccugucaugacggaaaagccuggcugcacgugugcaucacaggcgaugacaagaacgcuaccgccagcuucauuuacaauggccggcuuguugauucuguggucuccuggagcaaagagauccugcgcacccaggaaucugagugugugugcauuaacgggacauguacgguggucaugaccgacggauccgcuagcggcaaggccgauacaaaaauccucuuuaucgaggaagggaagauuguucauaccuccacacugucuggaagcgcgcaacacguggaggaaugcuccugcuauccuagauaccccggcgugcggugugucugccgcgacaacuggaaggggagcaauagaccuaucguggauauuaacaucaaagaccacucuguuguguccagcuacgucuguucuggacuugugggcgacacgccccggaagaaugauagcuccucuagcucccauugccuggacccgaacaaugaggaaggcgggcacggaguuaaaggcugggccuucgaugacgggaacgauguguggaugggacgcaccauuagcgagaagucuagacucggcuaugagacauuuaaagucaucgaagggugguccaaucauaagagcaaacugcagaucaaccgccaggugauugucgaccggggaaauagaucuggcuacuccggcaucuucagcguggaggggaaguccuguauuaaccggugcuuuuauguugaacugaucagaggacgcaaggaggaaaccgaggugcucuggaccucuaauagcauugucguguucuguggcacauccgggaccuacggaacaggcucuuggccugauggggcugaccugaaccuuaugcccaucuga

SEQ ID NO: 211111 - RNA, 1410 nt, Artificial Sequence; identical to SEQ ID NO: 208810
  derived and/or modified CDS sequence (opt5) from neuraminidase__InfluenzaA__ADK21716

SEQ ID NO: 211112 - RNA, 1410 nt, Artificial Sequence; identical to SEQ ID NO: 208810
  derived and/or modified CDS sequence (opt5) from neuraminidase__InfluenzaA__ADK21726

SEQ ID NO: 211113 - RNA, 1410 nt, Artificial Sequence; identical to SEQ ID NO: 208810
  derived and/or modified CDS sequence (opt5) from neuraminidase__InfluenzaA__ADK21736

SEQ ID NO: 211114 - RNA, 1410 nt, Artificial Sequence
  derived and/or modified CDS sequence (opt5) from neuraminidase__InfluenzaA__ADK21746
augaaccccaaucagaagaucauuaccaucggcagcgugugcaugacaauugggauggccaaccugauccuccaaauuggaaauaucaucuccauuuggaucucucacagcauucagcugggcaaccagaaucagaucgagacguguaaccaauccauuaucaccuacgaacauaauacaugggucaaccagaccuauguuaauauuucuaacacaaauuucgcugccgggcagagcgugguguccgucaaacuugcgggaaacucuagccugugcccuguguccggcugggcuaucuacagcaaggacaauucuaucagaauuggguccaaaggagauguuuuugugauccgggagccguucauuagcuguucuccccucgaaugccgcaccuuuuuccugacacagggcgcccuucugaacgacaagcacuccaauggcaccaucaaagauagaagcccuuaucggacgcucaugucuugucccauuggggaggucccuucccccuacaacagccgcuuugaauccguggccuggucugcuagcgccugccaugacggaaucaacuggcugaccaucggcauuuccgggccugauaauggagcuguugccgugcugaaguauaacggcaucauuacagacaccaucaagagcuggagaaauaacauucuccggacacaagagucugagugugcgugcgucaauggguccuguuucaccgugaugacggauggaccgagcgacggccaggccucuuacaaaaucuuucgcaucgaaaagggcaaaauugugaagucugucgagaugaacgcucccaauuaucacuacgaagagugcuccuguuacccugauucuagcgagaucacaugcguuugcagagacaacuggcauggguccaaucggcccugggugagcuucaaccagaaucuggaauaucagauuggauacaucuguucuggcauuuuuggggauaacccucgccccaaugacaaaaccggauccugcggcccggugagcucuaacggggccaauggagucaagggcuucuccuuuaaguauggcaacgggguguggaucggaagaacaaaaagcauuuccucucggagcggcuucgagaugaucugggauccuaacggguggaccggaaccgacaauaacuuuuccaucaagcaagacauuguuggcaucaaugaauggucuggguacagcggcuccuucgugcagcaccccgagcuuacaggacuggauuguauucgcccuugcuucugggucgaacucaucagaggccggcccgaggagaacacgauuuggaccagcgggucuuccaucagcuuuuguggagugaauagcgacacaguuggcugguccuggcccgauggggcugaacugccuuucaccaucgacaaauga

SEQ ID NO: 211115 - RNA, 1410 nt, Artificial Sequence; identical to SEQ ID NO: 208810
  derived and/or modified CDS sequence (opt5) from neuraminidase__InfluenzaA__ADK21756

SEQ ID NO: 211116 - RNA, 1410 nt, Artificial Sequence; identical to SEQ ID NO: 208810
  derived and/or modified CDS sequence (opt5) from neuraminidase__InfluenzaA__ADK21766

SEQ ID NO: 211117 - RNA, 1410 nt, Artificial Sequence; identical to SEQ ID NO: 210241
  derived and/or modified CDS sequence (opt5) from neuraminidase__InfluenzaA__ADK21776

SEQ ID NO: 211118 - RNA, 1410 nt, Artificial Sequence; identical to SEQ ID NO: 208810
  derived and/or modified CDS sequence (opt5) from neuraminidase__InfluenzaA__ADK21786

SEQ ID NO: 211119 - RNA, 1410 nt, Artificial Sequence; identical to SEQ ID NO: 208810
  derived and/or modified CDS sequence (opt5) from neuraminidase__InfluenzaA__ADK21796

SEQ ID NO: 211120 - RNA, 1410 nt, Artificial Sequence; identical to SEQ ID NO: 208810
  derived and/or modified CDS sequence (opt5) from neuraminidase__InfluenzaA__ADK21806

SEQ ID NO: 211121 - RNA, 1410 nt, Artificial Sequence; identical to SEQ ID NO: 208810
  derived and/or modified CDS sequence (opt5) from neuraminidase__InfluenzaA__ADK21816

SEQ ID NO: 211122 - RNA, 1410 nt, Artificial Sequence; identical to SEQ ID NO: 210788
  derived and/or modified CDS sequence (opt5) from neuraminidase__InfluenzaA__ADK21826

SEQ ID NO: 211123 - RNA, 1410 nt, Artificial Sequence; identical to SEQ ID NO: 210701
  derived and/or modified CDS sequence (opt5) from neuraminidase__InfluenzaA__ADK21836

SEQ ID NO: 211124 - RNA, 1410 nt, Artificial Sequence
  derived and/or modified CDS sequence (opt5) from neuraminidase__InfluenzaA__ADK21846
augaaccccaaucagaagaucauuaccaucggcagcgugugcaugacaauugggauggccaaccugauccuccaaauuggaaauaucaucuccauuuggaucucucacagcauucagcugggcaaccagaaucagaucgagacguguaaccaauccgucauuaccuacgaaaauaacacauggguuaaucagaccuaugugaacaucucuaauacaaacuucgcugccgggcagagcguggucuccgugaaacuugcgggaaauucuagccugugcccuguuuccggcugggcuauuuacagcaaggacaacucuaucagaaucggguccaaaggagauguguuugucauucgggagccguucaucagcuguucuccccucgaaugccgcaccuuuuuccugacacagggcgcccuucugaaugacaagcauuccaacggcaccauuaaagauagaagcccuuaucggacgcucaugucuugucccaucggggaggugccuucccccuacaacagccgcuuugaauccguugccuggucugcuagcgccugccacgacggaauuaauuggcugaccaucggcaucuccgggccugauaacggagcuguggccguccugaaguauaauggcauuaucacagacaccauuaagagcuggagaaacaauauccuccggacacaagagucugagugugcgugcgugaacggguccuguuucaccgugaugacggauggaccgagcgacggccaggccucuuacaaaauuuuucgcaucgaaaagggcaaaaucgucaagagcguugagaugaaugcucccaacuaucauuacgaagagugcuccuguuacccugauucuagcgagauuacaugcgugugcagagacaauuggcacggguccaaccggcccugggugagcuucaaucagaaccuggaauaucagaucggauacauuuguucuggcaucuuuggggauaauccucgccccaacgacaaaaccggauccugcggcccggucagcucuaauggggccaacggagugaagggcuucuccuuuaaguauggcaacgggguuuggauuggaagaacaaaaagcaucuccucucggaauggcuucgagaugauuugggauccuaacggguggaccggaaccgacaauaacuuuagcaugaagcaagacaucgugggcaucaaugaaugguccggguacucuggcagcuucguccagcaucccgagcuuacaggacuggauuguauucgcccuugcuucuggguggaacucaucagaggccggcccaaagagaacacgauuugggcuuccgggagcucuaucuccuuuuguggaguuaauagcgacaccgugggcuggucuuggcccgauggggccgagcugccuuucacaauugacaaguga

SEQ ID NO: 211125 - RNA, 1410 nt, Artificial Sequence; identical to SEQ ID NO: 208810
  derived and/or modified CDS sequence (opt5) from neuraminidase__InfluenzaA__ADK21856

SEQ ID NO: 211126 - RNA, 1410 nt, Artificial Sequence; identical to SEQ ID NO: 208810
  derived and/or modified CDS sequence (opt5) from neuraminidase__InfluenzaA__ADK21866

SEQ ID NO: 211127 - RNA, 1410 nt, Artificial Sequence; identical to SEQ ID NO: 208810
  derived and/or modified CDS sequence (opt5) from neuraminidase__InfluenzaA__ADK21876

SEQ ID NO: 211128 - RNA, 1410 nt, Artificial Sequence; identical to SEQ ID NO: 208810
  derived and/or modified CDS sequence (opt5) from neuraminidase__InfluenzaA__ADK21886

SEQ ID NO: 211129 - RNA, 1410 nt, Artificial Sequence
  derived and/or modified CDS sequence (opt5) from neuraminidase__InfluenzaA__ADK21896
augaaccccaaucagaagaucauuaccaucggcagcgugugcaugacaauugggauggccaaccugauccuccaaauuggaaauaucaucuccauuuggaucucucacagcauucagcugggcaaccagaaucagaucgagacguguaaccaauccgucauuaccuacgaaaauaacacauggguuaaucagaccuaugugaacaucucuaauacaaacuucgcugccgggcagagcguggucuccgugaaacuugcgggaaauucuagccugugcccuguuuccggcugggcuauuuacagcaaggacaacucuaucagaaucggguccaaaggagauguguuugucauucgggagccguucaucagcuguucuccccucgaaugccgcaccuuuuuccugacacagggcgcccuucugaaugacaagcauuccaacggcaccauuaaagauagaagcccuuaucggacgcucaugucuugucccaucggggaggugccuucccccuacaacagccgcuuugaauccguugccuggucugcuagcgccugccacgacggaauuaauuggcugaccaucggcaucuccgggccugauaacggagcuguggccguccugaaguauaauggcauuaucacagacaccauuaagagcuggagaaacaauauccuccggacacaagagucugagugugcgugcgugaacggguccuguuucaccgugaugacggauggaccgagcgacggccaggccucuuacaaaauuuuucgcaucgaaaagggcaaaaucgucaagagcguugagaugaaugcucccaacuaucauuacgaagagugcuccuguuacccugauucuagcgagauuacaugcgugugcagagacaauuggcacggguccaaccggcccugggugagcuucaaucagaaccuggaauaucagaucggauacauuuguucuggcaucuuuggggauaauccucgccccaacgacaaaaccggauccugcggcccggucagcucuaauggggccaacggagugaagggcuucuccuuuaaguauggcaacgggguuuggauuggaagaacaaaaagcaucuccucucggaauggcuucgagaugauuugggauccuaacggguggaccggaaccgacaauaacuuuagcaucaagcaagacaucgugggcacaaaugaaugguccggguacucuggcagcuucguccagcaucccgagcuuacgggacuggauuguauucgcccuugcuucuggguggaacucaucagaggccggcccaaagagaacaccauuuggacauccgggagcucuaucuccuuuuguggaguuagcucugacaccgugggcugguccuggcccgauggggcugagcugccuuucacaauugacaaguga

SEQ ID NO: 211130 - RNA, 1410 nt, Artificial Sequence
  derived and/or modified CDS sequence (opt5) from neuraminidase__InfluenzaA__ADK21906
augaaccccaaucagaagaucauuaccaucggcagcgugugcaugacaauugggauggccaaccugauccuccaaauuggaaauaucaucuccauuuggaucucucacagcauucagcugggcaaccagaaucagaucgagacguguaaccaauccgucauuaccuacgaaaauaacacauggguuaaucagaccuaugugaacaucucuaauacaaacuucgcugccgggcagagcguggucuccgugaaacuugcgggaaauucuagccugugcccuguuuccggcugggcuauuuacagcaaggacaacucuaucagaaucggguccaaaggagauguguuugucauucgggagccguucaucagcuguucuccccucgaaugccgcaccuuuuuccugacacagggcgcccuucugaaugacaagcauuccaacggcaccauuaaagauagaagcccuuaucggacgcucaugucuugucccaucggggaggugccuucccccuacaacagccgcuuugaauccguugccuggucugcuagcgccugccacgacggaauuaauuggcugaccaucggcaucuccgggccugauaacggagcuguggccguccugaaguauaauggcauuaucacagacaccauuaagagcuggagaaacaauauccuccggacacaagagucugagugugcgugcgugaacggguccuguuucaccgugaugacggauggaccgagcgacggccaggccucuuacaaaauuuuucgcaucgaaaagggcaaaaucgucaagagcguugagaugaaugcucccaacuaucauuacgaagagugcuccuguuacccugauucuagcgagauuacaugcgugugcagagacaauuggcacggguccaaccggcccuggaucagcuucaaucagaaccuggaauaucagauuggauacaucuguucuggcauuuuuggggauaauccucgccccaacgacaaaaccggauccugcggcccggugagcucuaauggggccaacggagucaagggcuucuccuuuaaguauggcaacgggguguggaucggaagaacaaaaagcauuggcucccggaauggguucgagaugaucugggauccuaacggauggaccggcaccgacaauaacuuuucuaucaagcaagacauuguugggaucaaugaauggagcggcuacuccggaucuuucgugcagcaucccgagcuuacaggccuggauuguauucgcccuugcuucugggucgaacucaucagagggcggcccaaagagaacacgauuuggaccagcggauccagcaucucuuuuuguggcguuaauuccgacacagugggguggagcuggcccgauggagcugagcugccuuucaccaucgacaaguga

SEQ ID NO: 211131 - RNA, 1410 nt, Artificial Sequence; identical to SEQ ID NO: 208810
  derived and/or modified CDS sequence (opt5) from neuraminidase__InfluenzaA__ADK21916

SEQ ID NO: 211132 - RNA, 1410 nt, Artificial Sequence; identical to SEQ ID NO: 208810
  derived and/or modified CDS sequence (opt5) from neuraminidase__InfluenzaA__ADK21926

SEQ ID NO: 211133 - RNA, 1410 nt, Artificial Sequence; identical to SEQ ID NO: 208810
  derived and/or modified CDS sequence (opt5) from neuraminidase__InfluenzaA__ADK21936

SEQ ID NO: 211134 - RNA, 1410 nt, Artificial Sequence
  derived and/or modified CDS sequence (opt5) from neuraminidase__InfluenzaA__ADK21946
augaaccccaaucagaagaucauuaccaucggcagcgugugcaugacaauugggauggccaaccugauccuccaaauuggaaauaucaucuccauuuggaucucucacagcauucagcugggcaaccagaaucagaucgagacguguaaccaauccgucauuaccuacgaaaauaacacauggguuaaucagaccuaugugaacaucucuaauacaaacuucgcugccgggcagagcguggucuccgugaaacuugcgggaaauucuagccugugcccuguuuccggcugggcuauuuacagcaaggacaacucuaucagaaucggguccaaaggagauguguuugucauucgggagccguucaucagcuguucuccccucgaaugccgcaccuuuuuccugacacagggcgcccuucugaaugacaagcauuccaacggcaccauuaaagauagaagcccuuaucggacgcucaugucuugucccaucggggaggugccuucccccuacaacagccgcuuugaauccguugccuggucugcuagcgccugccacgacggaauuaauuggcugaccaucggcaucuccgggccugauaacggagcuguggccguccugaaguauaauggcauuaucacagacaccauuaagagcuggagaaacaauauccuccggacacaagagucugagugugcgugcgugaacggguccuguuucaccgugaugacggauggaccgagcgacggccaggccucuuacaaaauuuuucgcaucgaaaagggcaaaaucgucaagagcguugagaugaaugcucccaacuaucauuacgaagagugcuccuguuacccugauucuagcgagauuacaugcgugugcagagacaauuggcacggguccaaccggcccugggugagcuucaaucagaaccuggaauaucagaucggauacauuuguucuggcaucuuuggggauaauccucgccccaacgacaaaaccggauccugcggcccggucagcucuaauggggccaacggagugaagggcuucuccuuuaaguauggcaacgggguuuggauuggaagaacaaaaagcaucuccucucggaauggcuucgagaugauuugggauccuaacggguggaccggaaccgacaauaacuuuagcaucaagcaagacaucgugggcauuaaugaaugguccggguacucuggcagcuucguccagcaucccgagcuuacaggaauggauuguauccgcccuugcuucuggguggaacugauuagaggccggcccaaagagaacacgaucuggaccuccgggagcucuauuuccuuuuguggaguuaauagcgacacagugggcuggucuuggcccgauggggcugagcucccuuucaccaucgacaaguga

SEQ ID NO: 211135 - RNA, 1410 nt, Artificial Sequence
  derived and/or modified CDS sequence (opt5) from neuraminidase__InfluenzaA__ADK21956
augaaccccaaucagaagaucauuaccaucggcagcgugugcaugacaauugggauggccaaccugauccuccaaauuggaaauaucaucuccauuuggaucucucacagcauucagcugggcaaccagaaucagaucgagacguguaaccaauccgucauuaccuacgaaaauaacacauggguuaaucagaccuaugugaacaucucuaauacaaacuucgcugccgggcagagcguggucuccgugaaacuugcgggaaauucuagccugugcccuguuuccggcugggcuauuuacagcaaggacaacucuaucagaaucggguccaaaggagauguguuugucauucgggagccguucaucagcuguucuccccucgaaugccgcaccuuuuuccugacacagggcgcccuucugaaugacaagcauuccaacggcaccauuaaagauagaagcccuuaucggacgcucaugucuugucccaucggggaggugccuucccccuacaacagccgcuuugaauccguugccuggucugcuagcgccugccacgacggaauuaauuggcugaccaucggcaucuccgggccugauaacggagcuguggccguccugaaguauaauggcauuaucacagacaccauuaagagcuggagaaacaauauccuccggacacaagagucugagugugcgugcgugaacggguccuguuucaccgugaugacggauggaccgagcgacggccaggccucuuacaaaauuuuuaagaucgaaaaaggcaagaucgucaaaagcguugagaugaaugcucccaacuaucauuacgaagagugcuccuguuacccugauucuagcgagauuacaugcgugugccgcgacaauuggcacggguccaacagacccugggugagcuucaaucagaaccuggaauaucagaucggauacauuuguucuggcaucuuuggggauaauccucggcccaacgacaagaccggauccugcggcccggucagcucuaauggggccaacggagugaagggcuucuccuuuaaauauggcaacgggguuuggauuggacgcacaaagagcaucuccucuagaaauggcuucgagaugauuugggauccuaacggguggaccggaaccgacaauaacuuuagcaucaaacaagacaucgugggcauuaaugaaugguccggguacucuggcagcuucguccagcaucccgagcuuacaggacuggauuguauccggccuugcuucuggguggaacucauucgcggcagacccaaggagaacacgaucuggaccuccgggagcucuauuuccuuuuguggaguuaauagcaacacagugggcuggucuuggcccgacggggcugagcugccuuucaccaucgauaaauga

SEQ ID NO: 211136 - RNA, 1410 nt, Artificial Sequence; identical to SEQ ID NO: 208810
  derived and/or modified CDS sequence (opt5) from neuraminidase__InfluenzaA__ADK32393

SEQ ID NO: 211137 - RNA, 1410 nt, Artificial Sequence; identical to SEQ ID NO: 208810
  derived and/or modified CDS sequence (opt5) from neuraminidase__InfluenzaA__ADK32403

SEQ ID NO: 211138 - RNA, 1410 nt, Artificial Sequence; identical to SEQ ID NO: 208810
  derived and/or modified CDS sequence (opt5) from neuraminidase__InfluenzaA__ADK32413

SEQ ID NO: 211139 - RNA, 1410 nt, Artificial Sequence
  derived and/or modified CDS sequence (opt5) from neuraminidase__InfluenzaA__ADK32423
augaaccccaaucagaagaucauuaccaucggcagcgugugcaugacaauugggaugacgaaccugauccuccaaauuggaaauaucaucuccauuuggaucucucacagcauucagcugggcaaccagaaucagaucgagaccuguaaccaauccgucauuacauacgaaaauaacaccuggguuaaucagacauaugugaacaucucuaauaccaacuucgccgcugggcagagcguggucuccgugaaacuugccggaaauucuagccugugcccuguuuccggcugggcgauuuacagcaaggacaacucuaucagaaucggguccaaaggagauguguuugucauucgggagccguucaucagcuguucuccccucgaaugccgcacauuuuuccugacccagggcgcccuucugaaugacaagcauuccaacggcacgauuaaagauagaagcccuuaucggacccucaugucuugucccaucggggaggugccuucccccuacaacagccgcuuugaauccguugcuuggucugccagcgcuugccacgacggaauuaauuggcugacaaucggcaucuccgggccugauaacggagccguggcuguccugaaguauaauggcauuaucaccgacacaauuaagagcuggagaaacaauauccuccggacccaagagucugagugugccugcgugaacggguccuguuucacggugaugacagauggaccgagcgacggccaggcgucuuacaaaauuuuucgcaucgaaaagggcaaaaucgucaagagcguugagaugaaugcccccaacuaucauuacgaagagugcuccuguuacccugauucuagcgagauuaccugcgugugcagagacaauuggcacggguccaaccggcccugggugagcuucaaucagaaccuggaauaucagaucggauacauuuguucuggcaucuuuggggauaauccucgccccaacgacaaaacaggauccugcggcccggucagcucuaauggggcuaacggagugaagggcuucuccuuuaaguauggcaacgggguuuggauuggaagaaccaaaagcaucuccucucggaauggcuucgagaugauuugggauccuaacggguggaccggaacagacaauaacuuuagcaucaagcaagacaucgugggcauuaaugaaugguccggguacucuggcagcuucguccagcaucccgagcuuacgggacuggauuguauccgcccuugcuucuggguggaacucauuagaggccggcccaaagagaacaccaucuggacauccgggagcucuauuuccuuuuguggaguuaauagcgacaccgugggcuggucuuggcccgauggggccgagcugccuuucacaaucgacaaguga

SEQ ID NO: 211140 - RNA, 1410 nt, Artificial Sequence; identical to SEQ ID NO: 208810
  derived and/or modified CDS sequence (opt5) from neuraminidase__InfluenzaA__ADK32433

SEQ ID NO: 211141 - RNA, 1410 nt, Artificial Sequence; identical to SEQ ID NO: 208810
  derived and/or modified CDS sequence (opt5) from neuraminidase__InfluenzaA__ADK32443

SEQ ID NO: 211142 - RNA, 1410 nt, Artificial Sequence
  derived and/or modified CDS sequence (opt5) from neuraminidase__InfluenzaA__ADK32453
augaaccccaaucagaagaucauuaccaucggcagcgugugcaugacaauugggauggccaaccugauccuccaaauuggaaauaucaucuccauuuggaucucucacagcauucagcugggcaaccagaaucagaucgagacguguaaccaauccgucauuaccuacgaaaauaacacauggguuaaucagaccuaugugaacaucucuaauacaaacuucgcugccgggcagagcguggucuccgugaaacuuucuggaaauagcucccugugcccuguuagcggcugggcgauuuacucuaaggacaacuccgugagaaucgggagcaaaggagaugucuuugugauccgggagccguucauuucuuguagcccccucgaaugccgcaccuuuuuccugacacagggcgcccuucugaaugacaagcauuccaacggcaccaucaaagauagaucuccuuaucggacgcucauguccugucccauuggggagguuccuagccccuacaacucccgcuuugaaucuguggcuuggagcgccuccgcuugccacgacggaaucaauuggcugaccauuggcaucagcgggccugauaacggagccgucgcugugcugaaguauaauggcaucauuacagacaccaucaagucuuggagaaacaauauucuccggacacaagaguccgagugugccugcgugaacgggagcuguuucaccgucaugacggauggaccgucugacggccaggcgagcuacaaaaucuuucgcauugaaaagggcaaaaucguuaaguccguggagaugaaugcccccaacuaucauuacgaagagugcucuuguuacccugauagcuccgagaucacaugcgugugcagagacaauuggcacgggagcaaccggcccugggucucuuucaaucagaaccuggaauaucagauuggauacaucuguuccggcauuuuuggggauaauccucgccccaacgacaaaaccggaagcugcggcccggugucuuccaauggggcuaacggaguuaagggcuucagcuuuaaguauggcaacgggguguggaucggaagaacaaaauccauuucuagccggaauggcuucgagaugaucugggauccuaacggguggaccggaaccgacaauaacuuuuccauuaagcaagacaucgucggcaucaaugaauggucuggguacagcggcuccuucgugcagcaucccgagcuuacaggacuggauuguauucgcccuugcuucuggguugaacucaucagaggccggcccaaagagaacacgauuuggaccagcgggucuuccaucagcuuuuguggagucaauucugacacagugggcugguccuggcccgauggggccgagcugccuuucaccauugacaaguga

SEQ ID NO: 211143 - RNA, 1410 nt, Artificial Sequence
  derived and/or modified CDS sequence (opt5) from neuraminidase__InfluenzaA__ADK32463
augaaccccaaucagaagaucauuaccaucggcagcgugugcaugacaauugggauggccaaccugauccuccaaauuggaaauaucaucuccauuuggaucucucacagcauucagcugggcaaccagaaucagaucgagacguguaaccaauccgucauuaccuacgaaaauaacacauggguuaaucagaccuaugugaacaucucuaauacaaacuucgcugccgggcagagcguggucuccgugaaacuugcgggaaauucuagccugugcccuguuuccggcugggcuauuuacagcaaggacaacucuaucagaaucggguccaaaggagauguguuugucauucgggagccguucaucagcuguucuccccucgaaugccgcaccuuuuuccugacacagggcgcccuuauuaaugacaagcauuccaacggcaccaucaaagauagaagcccuuaucggacgcugaugucuugucccauuggggaggugccuucccccuacaacagccgcuuugaauccguugccuggucugcuagcgccugccacgacggaaucaauuggcucaccaucggcauuuccgggccugauaacggagcuguggccguccugaaguauaauggcaucauuacagacaccaucaagagcuggagaaacaauauucugcggacacaagagucugagugugcgugcgugaacggguccuguuucaccgugaugacggauggaccgagcgacggccaggccucuuacaaaaucuuucgcaucgaaaagggcaaaauugucaagagcguugagaugaaugcucccaacuaucauuacgaagagugcuccuguuacccugauucuagcgagaucacaugcgugugcagagacaauuggcacggguccaaccggcccugggugagcuucaaucagaaccucgaauaucagauuggauacaucuguucuggcauuuuuggggauaauccucgccccaacgacaaaaccggauccugcggcccggucagcucuaauggggccaacggagugaagggcuucuccuuuaaguauggcaacgggguuuggaucggaagaacaaaaagcauuuccucucggaauggcuucgagaugaucugggauccuaacggguggaccggaaccgacaauaacuuuagcaucaagcaagacauugugggcaucaaugaaugguccggguacucuggcagcuucguccagcaucccgagcugacaggacuugauuguauucgcccuugcuucuggguggaacugaucagaggccggcccaaagagaacacgauuuggaccuccgggagcucuaucuccuuuuguggaguuaauagcgacacagugggcuggucuuggcccgauggggcugagcucccuuucaccaucgacaaguga

SEQ ID NO: 211144 - RNA, 1410 nt, Artificial Sequence; identical to SEQ ID NO: 208810
  derived and/or modified CDS sequence (opt5) from neuraminidase__InfluenzaA__ADK32473

SEQ ID NO: 211145 - RNA, 1410 nt, Artificial Sequence; identical to SEQ ID NO: 208810
  derived and/or modified CDS sequence (opt5) from neuraminidase__InfluenzaA__ADK32483

SEQ ID NO: 211146 - RNA, 1410 nt, Artificial Sequence; identical to SEQ ID NO: 208810
  derived and/or modified CDS sequence (opt5) from neuraminidase__InfluenzaA__ADK32493

SEQ ID NO: 211147 - RNA, 1410 nt, Artificial Sequence; identical to SEQ ID NO: 210723
  derived and/or modified CDS sequence (opt5) from neuraminidase__InfluenzaA__ADK32505

SEQ ID NO: 211148 - RNA, 1410 nt, Artificial Sequence
  derived and/or modified CDS sequence (opt5) from neuraminidase__InfluenzaA__ADK32640
augaaccccaaucagaagaucauuaccaucggcagcgugugcaugacaauugggauggccaaccugauccuccaaauuggaaauaucaucuccauuuggaucucucacagcauucagcugggcaaccagaaucagaucgagacguguaaccaauccgucauuaccuacgaaaauaacacauggguuaaucagaccuaugugaacaucucuaauacaaacuucgcugccgggcagagcguggcguccgucaaacuugcuggaaauucuagccugugcccuguguccggcugggccauuuacagcaaggacaacucuaucagaaucggguccaaaggagauguuuuugugauucgggagccguucaucagcuguucuccccucgaaugccgcaccuuuuuccugacacagggcgcccuucugaaugacaagcauuccaacggcaccauuaaagauagaagcccuuaucggacgcucaugucuugucccaucggggaggucccuucccccuacaacagccgcuuugaauccguggcuuggucugccagcgcuugccacgacggaauuaauuggcugaccaucggcaucuccgggccugauaacggagccguugcggugcugaaguauaauggcauuaucacagacaccauuaagagcuggagaaacaauauccuccggacacaagagucugagugugccugcgucaacggguccuguuucaccgugaugacggauggaccgagcgacggccaggcuucuuacaaaauuuuucgcaucgaaaagggcaaaaucgucaagagcguggagaugaaugcccccaacuaucauuacgaagagugcuccuguuacccugauucuagcgagauuacaugcguuugcagagacaauuggcacggguccaaccggcccugggugagcuucaaucagaaccuggaauaucagaucggauacauuuguucuggcaucuuuggggauaauccucgccccaacgacaaaaccggauccugcggcccggugagcucuaauggggcuaacggagucaagggcuucuccuuuaaguauggcaacgggguguggauuggaagaacaaaaagcaucuccucucggaauggcuucgagaugauuugggauccuaacggguggaccggaaccgacaauaacuuuagcaucaagcaagacaucguuggcauuaaugaaugguccggguacucuggcagcuucgugcagcaucccgagcuuacaggacuggauuguauccgcccuugcuucugggucgaacucauuagaggccggcccaaagagaacacgaucuggaccuccgggagcucuauuuccuuuuguggagugaauagcgacacaguuggcuggucuuggcccgauggggccgagcugccuuucaccaucgacaaguga

SEQ ID NO: 211149 - RNA, 1410 nt, Artificial Sequence; identical to SEQ ID NO: 208810
  derived and/or modified CDS sequence (opt5) from neuraminidase__InfluenzaA__ADK32650

SEQ ID NO: 211150 - RNA, 1410 nt, Artificial Sequence; identical to SEQ ID NO: 208810
  derived and/or modified CDS sequence (opt5) from neuraminidase__InfluenzaA__ADK32660

SEQ ID NO: 211151 - RNA, 1410 nt, Artificial Sequence; identical to SEQ ID NO: 208810
  derived and/or modified CDS sequence (opt5) from neuraminidase__InfluenzaA__ADK32670

SEQ ID NO: 211152 - RNA, 1410 nt, Artificial Sequence
  derived and/or modified CDS sequence (opt5) from neuraminidase__InfluenzaA__ADK32680
augaaccccaaucagaagaucauuaccaucggcagcgugugcaugacaauugggauggccaaccugauccuccaaauuggaaauaucaucuccauuuggaucucucacagcauucagcugggcaaccagaaucagaucgagacguguaaccaauccgucauuaccuacaaaaauaacacauggguuaaucagaccuaugugaacaucucuaauacaaacuucgcugccgggcagagcguggucuccgugaaacuugcgggaaauucuagccugugcccuguuuccggcugggcuauuuacagcaaggacaacucuaucagaaucggguccaagggagauguguuugucauucgggaaccguucaucagcuguucuccccucgagugccgcaccuuuuuccugacacagggcgcccuucugaaugacaaacauuccaacggcaccauuaaggauagaagcccuuaucggacgcucaugucuugucccaucggggaagugccuucccccuacaacagccgcuuugaguccguugccuggucugcuagcgccugccacgacggaauuaauuggcugaccaucggcaucuccgggccugauaacggagcuguggccguccugaaguauaauggcauuaucacagacaccauuaaaagcuggagaaacaauauccuccggacacaagaaucugagugugcgugcgugaacggguccuguuucaccgugaugacggauggaccgagcgacggccaggccucuuacaagauuuuucgcaucgagaaaggcaagaucgucaaaagcguugaaaugaaugcucccaacuaucauuacgaggaaugcuccuguuacccugauucuagcgagauuacaugcgugugcagagacaauuggcacggguccaaccggcccugggugagcuucaaucagaaccuggaguaucagaucggauacauuuguucuggcaucuuuggggauaauccucgccccaacgacaagaccggauccugcggcccggucagcucuaauggggccaacggagugaagggcuucuccuuuaaauauggcaacgggguuuggauuggaagaacaaagagcaucuccucucggaauggcuucgaaaugauuugggauccuaacggguggaccggaaccgacaauaacuuuagcaucaaacaagacaucgugggcauuaaugagugguccggguacucuggcagcuucguccagcaucccgaacuuacaggacuggauuguauccgcccuugcuucuggguggagcucauuagaggccggcccaaggaaaacacgaucuggaccuccgggagcucuauuuccuuuuguggaguuaauagcgacacagugggcuggucuuggcccgauggggcugagcugccuuucaccaucgacaaauga

SEQ ID NO: 211153 - RNA, 1410 nt, Artificial Sequence; identical to SEQ ID NO: 208810
  derived and/or modified CDS sequence (opt5) from neuraminidase__InfluenzaA__ADK32690

SEQ ID NO: 211154 - RNA, 1410 nt, Artificial Sequence; identical to SEQ ID NO: 208810
  derived and/or modified CDS sequence (opt5) from neuraminidase__InfluenzaA__ADK32700

SEQ ID NO: 211155 - RNA, 1410 nt, Artificial Sequence; identical to SEQ ID NO: 208810
  derived and/or modified CDS sequence (opt5) from neuraminidase__InfluenzaA__ADK32779

SEQ ID NO: 211156 - RNA, 1410 nt, Artificial Sequence; identical to SEQ ID NO: 208810
  derived and/or modified CDS sequence (opt5) from neuraminidase__InfluenzaA__ADK33614

SEQ ID NO: 211157 - RNA, 1410 nt, Artificial Sequence; identical to SEQ ID NO: 208810
  derived and/or modified CDS sequence (opt5) from neuraminidase__InfluenzaA__ADK33624

SEQ ID NO: 211158 - RNA, 1410 nt, Artificial Sequence; identical to SEQ ID NO: 208810
  derived and/or modified CDS sequence (opt5) from neuraminidase__InfluenzaA__ADK33634

SEQ ID NO: 211159 - RNA, 1410 nt, Artificial Sequence
  derived and/or modified CDS sequence (opt5) from neuraminidase__InfluenzaA__ADK33644
augaaccccaaucagaagaucauuaccaucggcagcgugugcaugacaauugggauggccaaccugauccuccaaauuggaaauaucaucuccauuuggaucucucacagcauucagcugggcaaccagaaucagaucgagacguguaaccaauccgucauuaccuacgaaaauaacacauggguuaaucagaccuaugugaacaucucuaauacaaacuucgcugccgggcagagcguggucuccgugaaacuugcgggaaauucuagccugugcccuguuuccggcugggcuauuuacagcaaggacaacucuaucagaaucggguccaaaggagauguguuugucauucgggagccguucaucagcuguucuccccucgaaugccgcaccuuuuuccugacacagggcgcccuucugaaugacaagcauuccaacggcaccauuaaagauagaagcccuuaucggacgcucaugucuugucccaucggggaggugccuucccccuacaacagccgcuuugaauccguugccuggucugcuagcgccugccacgacggaauuaauuggcugaccaucggcaucuccgggagcgauaacggagcuguggccguccugaaguauaauggcauuaucacagacaccauuaagucuuggagaaacaauauccuccggacacaagaguccgagugugcgugcgugaacgggagcuguuucaccgugaugacggauggaccuucugacggccaggccagcuacaaaauuuuucgcaucgaaaagggcaaaaucgucaaguccguugagaugaaugcuccgaacuaucauuacgaagagugcucuuguuaccccgauagcuccgagauuacaugcgugugcagagacaauuggcacgggagcaaccggccuugggugucuuucaaucagaaccuggaauaucagaucggauacauuuguuccggcaucuuuggggauaauccccgcccuaacgacaaaaccggaagcugcggccccgucucuuccaauggggccaacggagugaagggcuucagcuuuaaguauggcaacgggguuuggauuggaagaacaaaauccaucucuagccggaauggcuucgagaugauuugggauccgaacggguggaccggaaccgacaauaacuuuuccaucaagcaagacaucgugggcauuaaugaauggucuggguacagcggcuccuucguccagcauccugagcuuacaggacuggauuguauccgccccugcuucuggguggaacucauuagaggccggccuaaagagaacacgaucuggaccagcgggucuuccauuagcuuuuguggaguuaauucugacacagugggcugguccuggcccgauggggcugagcugcccuucaccaucgacaaguga

SEQ ID NO: 211160 - RNA, 1410 nt, Artificial Sequence; identical to SEQ ID NO: 210541
  derived and/or modified CDS sequence (opt5) from neuraminidase__InfluenzaA__ADK33654

SEQ ID NO: 211161 - RNA, 1410 nt, Artificial Sequence; identical to SEQ ID NO: 210541
  derived and/or modified CDS sequence (opt5) from neuraminidase__InfluenzaA__ADK33664

SEQ ID NO: 211162 - RNA, 1410 nt, Artificial Sequence; identical to SEQ ID NO: 208810
  derived and/or modified CDS sequence (opt5) from neuraminidase__InfluenzaA__ADK33674

SEQ ID NO: 211163 - RNA, 1410 nt, Artificial Sequence; identical to SEQ ID NO: 208810
  derived and/or modified CDS sequence (opt5) from neuraminidase__InfluenzaA__ADK33684

SEQ ID NO: 211164 - RNA, 1410 nt, Artificial Sequence; identical to SEQ ID NO: 210161
  derived and/or modified CDS sequence (opt5) from neuraminidase__InfluenzaA__ADK33694

SEQ ID NO: 211165 - RNA, 1410 nt, Artificial Sequence; identical to SEQ ID NO: 208810
  derived and/or modified CDS sequence (opt5) from neuraminidase__InfluenzaA__ADK33704

SEQ ID NO: 211166 - RNA, 1410 nt, Artificial Sequence; identical to SEQ ID NO: 208810
  derived and/or modified CDS sequence (opt5) from neuraminidase__InfluenzaA__ADK33714

SEQ ID NO: 211167 - RNA, 1410 nt, Artificial Sequence; identical to SEQ ID NO: 208810
  derived and/or modified CDS sequence (opt5) from neuraminidase__InfluenzaA__ADK33744

SEQ ID NO: 211168 - RNA, 1410 nt, Artificial Sequence
  derived and/or modified CDS sequence (opt5) from neuraminidase__InfluenzaA__ADK33754
augaaccccaaucagaagaucauuaccaucggcagcgugugcaugacaauugggauggccaacuucauccugcaaauuggaaauaucaucuccauuuggaucucucacagcauucagcucggcaaccagaaucagaucgagacguguaaccaauccgucauuaccuacgaaaauaacacauggguuaaucagaccuaugugaacaucucuaauacaaacuuugcugccgggcagagcguggucuccgugaaacuggcgggaaauucuagccuuugcccuguuuccggcugggcuauuuacagcaaggacaacucuaucagaaucggguccaaaggagauguguucgucauucgggagccguuuaucagcuguucuccccuggaaugccgcaccuucuuucucacacagggcgcccugcuuaaugacaagcauuccaacggcaccauuaaagauagaagcccuuaucggacgcugaugucuugucccaucggggaggugccuucccccuacaacagccgcuucgaauccguugccuggucugcuagcgccugccacgacggaauuaauuggcucaccaucggcaucuccgggccugauaacggagcuguggccguccugaaguauaauggcauuaucacagacaccauuaagagcuggagaaacaauauccugcggacacaagagucugagugugcgugcgugaacggguccuguuuuaccgugaugacggauggaccgagcgacggccaggccucuuacaaaauuuuccgcaucgaaaagggcaaaaucgucaagagcguugagaugaaugcucccaacuaucauuacgaagagugcuccuguuacccugauucuagcgagauuacaugcgugugcagagacaauuggcacggguccaaccggcccugggugagcuuuaaucagaaccucgaauaucagaucggauacauuuguucuggcaucuucggggauaauccucgccccaacgacaaaaccggauccugcggcccggucagcucuaauggggccaacggagugaagggcuuuuccuucaaguauggcaacgggguuuggauuggaagaacaaaaagcaucuccucucggaauggcuuugagaugauuugggauccuaacggguggaccggaaccgacaauaacuucagcaucaagcaagacaucgugggcauuaaugaaugguccggguacucuggcagcuucguccagcaucccgagcugacaggacuugauuguauccgcccuugcuuuuggguggaacugauuagaggccggcccaaagagaacacgaucuggaccuccgggagcucuauuuccuucuguggaguuaauagcgacacagugggcuggucuuggcccgauggggcugagcucccuuuuaccaucgacaaguga

SEQ ID NO: 211169 - RNA, 1410 nt, Artificial Sequence
  derived and/or modified CDS sequence (opt5) from neuraminidase__InfluenzaA__ADK33764
augaaccccaaucagaagaucauuaccaucggcagcgugugcaugacaauugggauggccaacuucauccugcaaauuggaaauaucaucuccauuuggaucucucacagcauucagcucggcaaccagaaucagaucgagacguguaaccaauccgucauuaccuacgaaaauaacacauggguuaaucagaccuaugugaacaucucuaauacaaacuuugcugccgggcagagcguggucuccgugaaacuggcgggaaauucuagccuuugcccuguuuccggcugggcuauuuacagcaaggacaacucuaucagaaucggguccaaaggagauguguucgucauucgggagccguuuaucagcuguucuccccuggaaugccgcaccuucuuucucacacagggcgcccugcuuaaugacaagcauuccaacggcaccauuaaagauagaagcccuuaucggacgcugaugucuugucccaucggggaggugccuucccccuacaacagccgcuucgaauccguugccuggucugcuagcgccugccacgacggaauuaauuggcucaccaucggcaucuccgggccugauaacggagcuguggccguccugaaguauaauggcauuaucacagacaccauuaagagcuggagaaacaauauccugcggacacaagagucugagugugcgugcgugaacggguccuguuuuaccgugaugacggauggaccgagcgacggccaggccucuuacaaaauuuuccgcaucgaaaagggcaaaaucgucaagagcguugagaugaaugcucccaacuaucauuacgaagagugcuccuguuacccugauucuagcgagauuacaugcgugugcagagacaauuggcacggguccaaccggcccugggugagcuuuaaucagaaccucgaauaucagaugggauacaucuguucuggcauuuucggggauaauccucgccccaacgacaaaaccggauccugcggcccggucagcucuaauggggccaacggagugaagggcuuuuccuucaaguauggcaacgggguuuggaucggaagaacaaaaagcauuuccucucggaauggcuuugagaugaucugggauccuaacggguggaccggaaccgacaauaacuucagcauuaagcaagacaucgugggcaucaaugaaugguccggguacucuggcagcuucguccagcaucccgagcugacaggacuugauuguauucgcccuugcuuuuggguggaacugaucagaggccggcccaaagagaacacgauuuggaccuccgggagcucuaucuccuucuguggaguuaauagcgacacagugggcuggucuuggcccgauggggcugagcucccuuuuaccauugacaaguga

SEQ ID NO: 211170 - RNA, 1410 nt, Artificial Sequence
  derived and/or modified CDS sequence (opt5) from neuraminidase__InfluenzaA__ADK33774
augaaccccaaucagaagaucauuaccaucggcagcgugugcaugacaauugggauggccaaccugauccuccaaauuggaaauaucaucuccauuuggaucucucacagcauucagcugggcaaccagaaucagaucgagacguguaaccaauccgucauuaccuacgaaaauaacacauggguuaaucagaccuaugugaacaucucuaauacaaacuucgcugccgggcagagcguggucuccgugaaacuuguuggaaauucuagccugugcccuguguccggcugggcgauuuacagcaaggacaacucuaucagaaucggguccaaaggagaugucuuugugauucgggagccguucaucagcuguucuccccucgaaugccgcaccuuuuuccugacacagggcgcccuucugaaugacaagcauuccaacggcaccauuaaagauagaagcccuuaucggacgcucaugucuugucccaucggggagguuccuucccccuacaacagccgcuuugaauccguggcuuggucugccagcgcuugccacgacggaauuaauuggcugaccaucggcaucuccgggccugauaacggagccgucgcugugcugaaguauaauggcauuaucacagacaccauuaagagcuggagaaacaauauccuccggacacaagagucugagugugccugcgugaacggguccuguuucaccgucaugacggauggaccgagcgacggccaggcgucuuacaaaauuuuucgcaucgaaaagggcaaaaucguuaagagcguggagaugaaugcccccaacuaucauuacgaagagugcuccuguuacccugauucuagcgagauuacaugcgugugcagagacaauuggcacggguccaaccggcccugggucagcuucaaucagaaccuggaauaucagaugggauacaucuguucuggcauuuuuggggauaauccucgccccaacgacaaaaccggauccugcggcccggugagcucuaauggggcuaacggaguuaagggcuucuccuuuaaguauggcaacgggguguggaucggaagaacaaaaagcauuuccucucggaauggcuucgagaugaucugggauccuaacggguggaccggaaccgacaauaacuuuagcauuaagcaagacaucgucggcaucaaugaaugguccggguacucuggcagcuucgugcagcaucccgagcuuacaggacuggauuguauucgcccuugcuucuggguugaacucaucagaggccggcccaaagagaacacgauuuggaccuccgggagcucuaucuccuuuuguggagugaauagcgacacagucggcuggucuuggcccgauggggccgagcugccuuucaccauugacaaguga

SEQ ID NO: 211171 - RNA, 1410 nt, Artificial Sequence; identical to SEQ ID NO: 209784
  derived and/or modified CDS sequence (opt5) from neuraminidase__InfluenzaA__ADK33784

SEQ ID NO: 211172 - RNA, 1410 nt, Artificial Sequence; identical to SEQ ID NO: 208810
  derived and/or modified CDS sequence (opt5) from neuraminidase__InfluenzaA__ADK33794

SEQ ID NO: 211173 - RNA, 1410 nt, Artificial Sequence; identical to SEQ ID NO: 208810
  derived and/or modified CDS sequence (opt5) from neuraminidase__InfluenzaA__ADK33804

SEQ ID NO: 211174 - RNA, 1410 nt, Artificial Sequence
  derived and/or modified CDS sequence (opt5) from neuraminidase__InfluenzaA__ADK33814
augaaccccaaucagaagaucauuaccaucggcagcgugugcaugacaauugggauggccaaccugauccuccaaauuggaaauaucaucuccauuuggaucucucacagcauucagcugggcaaccagaaucagaucgagacguguaaccaauccgucauuaccuacgaaaauaacacauggguuaauaaaaccuaugugaacaucucuaauacaaacuucgcugccgggcagagcguggucuccgugaaacuugcgggaaauucuagccugugcccuguuuccggcugggcuauuuacagcaaggacaacucuaucagaaucggguccaagggagauguguuugucauucgggagccguucaucagcuguucuccccucgaaugccgcaccuuuuuccugacacagggcgcccuucugaaugacaaacauuccaacggcaccauuaaggauagaagcccuuaucggacgcucaugucuugucccaucggggaggugccuucccccuacaacagccgcuuugaauccguugccuggucugcuagcgccugccacgacggaauuaauuggcugaccaucggcaucuccgggccugauaacggagcuguggccguccugaaguauaauggcauuaucacagacaccauuaaaagcuggagaaacaauauccuccggacacaggagucugagugugcgugcgugaacggguccuguuucaccgugaugacggauggaccgagcgacggccaagccucuuacaagauuuuucgcaucgaaaaaggcaagaucgucaaaagcguugagaugaaugcucccaacuaucauuacgaagagugcuccuguuacccugauucuagcgagauuacaugcgugugcagagacaauuggcacggguccaaccggcccugggugagcuucaaucagaaccuggaauaucagaugggauacaucuguucuggcauuuuuggggauaauccucgccccaacgacaagaccggauccugcggcccggucagcucuaauggggccaacggagugaagggcuucuccuuuaaauauggcaacgggguuuggaucggaagaacaaagagcauuuccucucggaauggcuucgagaugaucugggauccuaacggguggaccggaaccgacaauaacuuuagcauuaaacaggacaucgugggcaucaaugaaugguccggguacucuggcagcuucguccaacaucccgagcuuacaggacuggauuguauucgcccuugcuucuggguggaacucaucagaggccggcccaaggagaacacgauuuggaccuccgggagcucuaucuccuuuuguggaguuaauagcgacacagugggcuggucuuggcccgauggggcugagcugccuuucaccauugacaaauga

SEQ ID NO: 211175 - RNA, 1410 nt, Artificial Sequence
  derived and/or modified CDS sequence (opt5) from neuraminidase__InfluenzaA__ADK33824
augaaccccaaucagaagaucauuaccaucggcagcgugugcaugacaauugggauggccaaccugauccuccaaauuggaaauaucaucuccauuuggaucucucacagcauucagcugggcaaccagaaucagaucgagacguguaaccaauccgucauuaccuacgaaaauaacacauggguuaaucagaccuauaucaacauuucuaauacaaacuucgcugccgggcagagcgugguguccgucaaacuugcgggaaauucuagccugugcccuguguccggcugggcuaucuacagcaaggacaacucuaucagaauuggguccaaaggagauguuuuugugauccgggagccguucauuagcuguucuccccucgaaugccgcaccuuuuuccugacacagggcgcccuucugaaugacaagcauuccaacggcaccaucaaagauagaagcccuuaucggacgcucaugucuugucccauuggggaggucccuucccccuacaacagccgcuuugaauccguggccuggucugcuagcgccugccacgacggaaucaauuggcugaccaucggcauuuccgggccugauaacggagcuguugccgugcugaaguauaauggcaucauuacagacaccaucaagagcuggagaaacaauauucuccggacacaagagucugagugugcgugcgucaacggguccuguuucaccgugaugacggauggaccgagcgacggccaggccucuuacaaaaucuuucgcaucgaaaagggcaaaauugucaagagcguggagaugaaugcucccaacuaucauuacgaagagugcuccuguuacccugauucuagcgagaucacaugcguuugcagagacaauuggcacggguccaaccggcccugggugagcuucaaucagaaccuggaauaucagauuggauacaucuguucuggcauuuuuggggauaauccucgccccaacgacaaaaccggauccugcggcccggugagcucuaauggggccaacggagucaagggcuucuccuuuaaguauggcaacgggguguggaucggaagaacaaaaagcauuuccucucggaauggcuucgagaugaucugggauccuaacggguggaccggaaccgacaauaacuuuagcaucaagcaagacauuguuggcaucaaugaaugguccggguacucuggcagcuucgugcagcaucccgagcuuacaggacuggauuguauucgcccuugcuucugggucgaacucaucagaggccggcccaaagagaacacgauuuggaccuccgggagcucuaucuccuuuuguggagugaauagcgacacaguuggcuggucuuggcccgauggggcugagcugccuuucaccaucgacaaguga

SEQ ID NO: 211176 - RNA, 1410 nt, Artificial Sequence; identical to SEQ ID NO: 209987
  derived and/or modified CDS sequence (opt5) from neuraminidase__InfluenzaA__ADK33834

SEQ ID NO: 211177 - RNA, 1410 nt, Artificial Sequence
  derived and/or modified CDS sequence (opt5) from neuraminidase__InfluenzaA__ADK33844
augaaccccaaucagaagaucauuaccaucggcagcgugugcaugacaauugggauggccaaccugauccuccaaauuggaaauaucaucuccauuuggaucucucacagcauucagcugggcaaccagaaucagaucgagacguguaaccaauccgucauuaccuacgaaaauaacacauggguuaaucagaccuaugugaacaucucuaauacaaacuucgcugccgggcagagcguggucuccgcgaaacuugcuggaaauucuccucugugcccggugagcggcugggccauuuacuccaaggacaacagcaucagaaucgggucuaaaggagauguuuuugugauucgggagcccuucaucuccuguagcccucucgaaugccgcaccuuuuuccugacacagggcgcccuucugaaugacaagcauucuaacggcaccauuaaagauagaucccccuaucggacgcucaugagcuguccuaucggggagguccccucuccuuacaacucccgcuuugaaagcguggcuugguccgccucugcuugccacgacggaauuaauuggcugaccaucggcaucagcgggccggauaacggagccguugcggugcugaaguauaauggcauuaucacagacaccauuaaguccuggagaaacaauauccuccggacacaagagagcgagugugccugcgucaacgggucuuguuucaccgugaugacggauggacccuccgacggccaggcuagcuacaaaauuuuucgcaucgaaaagggcaaaaucgugaagucugucgagaugaaugccccuaacuaucauuacgaagagugcagcuguuaccccgauuccucugagauuacaugcguuugcagagacaauuggcacgggagcaaccggccuuggguguccuucaaucagaaccuggaauaucagaucggauacauuuguagcggcaucuuuggggauaauccccgcccgaacgacaaaaccggaucuugcggcccuguguccagcaauggggcuaacggagucaagggcuucucuuuuaaguauggcaacgggguguggauuggaagaacaaaauccaucagcucccggaauggcuucgagaugauuugggaucccaacggguggaccggaaccgacaauaacuuuucuaucaagcaagacaucguuggcauuaaugaauggagcggguacuccggcucuuucgugcagcauccugagcuuacaggacuggauuguauccgccccugcuucugggucgaacucauuagaggccggcccaaagagaacacgaucuggaccagcggguccagcauuucuuuuuguggaguuaauuccgacacagugggcuggagcuggccugauggggccgagcugccguucaccaucgacaaguga

SEQ ID NO: 211178 - RNA, 1410 nt, Artificial Sequence; identical to SEQ ID NO: 209987
  derived and/or modified CDS sequence (opt5) from neuraminidase__InfluenzaA__ADK33854

SEQ ID NO: 211179 - RNA, 1410 nt, Artificial Sequence; identical to SEQ ID NO: 210701
  derived and/or modified CDS sequence (opt5) from neuraminidase__InfluenzaA__ADK33864

SEQ ID NO: 211180 - RNA, 1410 nt, Artificial Sequence
  derived and/or modified CDS sequence (opt5) from neuraminidase__InfluenzaA__ADK33874
augaaccccaaucagaagaucauuaccaucggcagcgugugcaugacaauugggauggccaaccugauccuccaaauuggaaauaucaucuccauuuggaucucucacagcauucagcugggcaaccagaaucagaucgagacguguaaccaauccgucauuaccuacgaaaauaacacauggguuaaucagaccuaugugaacaucucuaauacaaacuucgcugccgggcagagcguggucuccgugaaacuugcgggaaauucuagccugugcccuguuuccggcugggcuauuuacagcaaggacaacucuaucagaaucggguccaaaggagauguguuugucauucgggagccguucaucagcuguucuccccucgaaugccgcaccuuuuuccugacacagggcgcccuucugaaugacaagcauuccaacggcaccauuaaagauagaagcccuuaucggacgcucaugucuugucccaucggggaggugccuucccccuacaacagccgcuuugaauccguugccuggucugcuagcgccugccacgacggaauuaauuggcugaccaucggcaucuccgggccugauaacggagcuguggccguccugaaguauaauggcauuaucacagacaccauuaagagcuggagaaacaauauccuccggacacaagagucugagugugcgugcgugaacggguccuguuucaccgugaugacggauggaccgagcgacggccaggccucuuacaaaauuuuucgcaucgaaaagggcaaaaucgucaagagcguugagaugaaugcucccaacuaucauuacgaagagugcuccuguuacccugauucuagcgagauuacaugcgugugcagagacaauuggcacggguccaaccggcccugggugagcuucaaucagaaccuggaauaucagaucggauaccuuuguucuggcauuuuuggggauaauccucgccccaacgacaaaaccggauccugcggcccggucagcucuaauggggccaacggagugaagggcuucuccuuuaaguauggcaacgggguuuggaucggaagaacaaaaagcauuuccucucggaauggcuucgagaugaucugggauccuaacggguggaccggaaccgacaauaacuuuagcauuaagcaagacaucgugggcaucaaugaaugguccggguacucuggcagcuucguccagcaucccgagcugacaggacucgauuguauucgcccuugcuucuggguggaacugaucagaggccggcccaaagagaacacgauuuggaccuccgggagcucuaucuccuuuuguggaguuaauagcgacacagugggcuggucuuggcccgauggggcugagcuuccuuucaccauugacaaguga

SEQ ID NO: 211181 - RNA, 1410 nt, Artificial Sequence; identical to SEQ ID NO: 208810
  derived and/or modified CDS sequence (opt5) from neuraminidase__InfluenzaA__ADK33884

SEQ ID NO: 211182 - RNA, 1410 nt, Artificial Sequence; identical to SEQ ID NO: 209987
  derived and/or modified CDS sequence (opt5) from neuraminidase__InfluenzaA__ADK33894

SEQ ID NO: 211183 - RNA, 1410 nt, Artificial Sequence; identical to SEQ ID NO: 209987
  derived and/or modified CDS sequence (opt5) from neuraminidase__InfluenzaA__ADK33904

SEQ ID NO: 211184 - RNA, 1410 nt, Artificial Sequence; identical to SEQ ID NO: 210767
  derived and/or modified CDS sequence (opt5) from neuraminidase__InfluenzaA__ADK33914

SEQ ID NO: 211185 - RNA, 1410 nt, Artificial Sequence
  derived and/or modified CDS sequence (opt5) from neuraminidase__InfluenzaA__ADK33924
augaaccccaaucagaagaucauuaccaucggcagcgugugcaugacaauugggauggccaaccugauccuccaaauuggaaauaucaucuccauuuggaucucucacagcauucagcugggcaaccagaaucagaucgagacguguaaccaauccgucauuaccuacgaaaauaacacauggguuaaucagaccuaugugaacaucucuaauacaaacuucgcugccgggcagagcguggucuccgugaaacuugcgggaaauucuagccugugcccuguuuccggcugggcuauuuacagcaaggacaacucuaucagaaucggguccaaaggagauguguuugucauucgggagccguucaucagcuguucuccccucgaaugccgcaccuuuuuccugacacagggcgcccuucugaaugacaagcauuccaacggcaccauuaaagauagaagcccuuaucggacgcucaugucuugucccaucggggaggugccuucccccuacaacagccgcuuugaauccguugccuggucugcuagcgccugccacgacggaauuaauuggcugaccaucggcaucuccgggccugauaacggagcuguggccguccugaaguauaauggcauuaucacagacaccauuaagagcuggagaaacaauauccuccggacacaagagucugagugugcgugcgugaacggguccuguuucaccgugaugacggauggaccgagcgacggccaggccucuuacaaaauuuuucgcaucgaaaagggcaaaaucgucaagagcguugagaugaaugcucccaacuaucauuacgaagagugcuccuguuacccugauucuagcgagauuacaugcgugugcagagacaauuggcacggguccaaccggcccugggugagcuucaaucagaaccuggaauaucagaucggauacauuuguucuggcaucuuuggggauaauccucgccccaacgacaaaaccggauccugcggcccggucagcucuaauggggccaacggagugaagggcuucuccuuuaaguauggcaacgggguuuggauuggaagaacaaaaagcaucuccucucggaauggcuucgagaugauuugggauccuaacggguggaccggaaccgacaauaacuuuagcaucaagcaagacaucgugggcauuaaugaaugguccggguacucuggcagcuucguccagcaucccgagcuuacaggacuggauuguauccgcccuugcuucuggguggaacucauuagaggccggcccaaagagaacacgaucuggaccuccgggagcucuauuuccuuuuguggaguuaauagcaacacagugggcuggucuuggcccgacggggcugagcugccuuucaccaucgauaaguga

SEQ ID NO: 211186 - RNA, 1410 nt, Artificial Sequence; identical to SEQ ID NO: 208810
  derived and/or modified CDS sequence (opt5) from neuraminidase__InfluenzaA__ADK33934

SEQ ID NO: 211187 - RNA, 1410 nt, Artificial Sequence; identical to SEQ ID NO: 208810
  derived and/or modified CDS sequence (opt5) from neuraminidase__InfluenzaA__ADK33944

SEQ ID NO: 211188 - RNA, 1410 nt, Artificial Sequence; identical to SEQ ID NO: 210767
  derived and/or modified CDS sequence (opt5) from neuraminidase__InfluenzaA__ADK33954

SEQ ID NO: 211189 - RNA, 1410 nt, Artificial Sequence; identical to SEQ ID NO: 208810
  derived and/or modified CDS sequence (opt5) from neuraminidase__InfluenzaA__ADK33964

SEQ ID NO: 211190 - RNA, 1410 nt, Artificial Sequence; identical to SEQ ID NO: 209917
  derived and/or modified CDS sequence (opt5) from neuraminidase__InfluenzaA__ADK33974

SEQ ID NO: 211191 - RNA, 1410 nt, Artificial Sequence; identical to SEQ ID NO: 208810
  derived and/or modified CDS sequence (opt5) from neuraminidase__InfluenzaA__ADK33984

SEQ ID NO: 211192 - RNA, 1410 nt, Artificial Sequence
  derived and/or modified CDS sequence (opt5) from neuraminidase__InfluenzaA__ADK39016
augaaccccaaucagaagaucauuaccaucggcagcgugugcauuacaaucgggauggccaaccugauucuccaaaucggaaauaucauuuccaucuggauuucucacagcauccagcugggcaaccagaaucagauugagacguguaaccaauccgucaucaccuacgaaaauaacacauggguuaaucagaccuaugugaacauuucuaauacaaacuucgcugccgggcagagcguggucuccgugaaacuugcgggaaauucuagccugugcccuguuuccggcugggcuaucuacagcaaggacaacucuaucagaauuggguccaaaggagauguguuugucauccgggagccguucauuagcuguucuccccucgaaugccgcaccuuuuuccugacacagggcgcccuucugaaugacaagcauuccaacggcaccaucaaagauagaagcccuuaucggacgcucaugucuugucccauuggggaggugccuucccccuacaacagccgcuuugaauccguugccuggucugcuagcgccugccacgacggaaucuccuggcugaccaucggcauuagcgggccugauaauggagcuguggccguccugaaguauaacggcaucauuacagacaccaucaagucuuggagaaauaacauucuccggacacaagaguccgagugugcgugcgugaaugggagcuguuucaccgugaugacggauggaccgucugacggccaggccagcuacaaaaucuuucgcaucgaaaagggcaaaauugucaaguccguugagaugaacgcucccaauuaucauuacgaagagugcucuuguuacccugauagcuccgagaucacaugcgugugcagagacaacuggcacgggagcaaucggcccugggugucuuucaaccagaaucuggaauaucagauuggauacaucuguuccggcauuuuuggggauaacccucgccccaaugacaaaaccggaagcugcggcccggucucuuccaacggggccaauggagugaagggcuucagcuuuaaguauggcaacgggguuuggaucggaagaacaaaauccauuucuagccggaacggcuucgagaugaucugggauccugacggguggaccggaaccgacaauaacuuuuccaucaagcaagauauugugggcaucaaugaauggucuggguacagcggcuccuucguccagcaucccgagcuuacaggacuggacuguauucgcccuugcuucuggguggaacucaucagaggccggcccaaagagaacacgauuuggaccagcgggucuuccaucagcuuuuguggaguuaauucugauacagugggcugguccuggcccgacggggcugagcugccuuucaccaucgauaaguga

SEQ ID NO: 211193 - RNA, 1410 nt, Artificial Sequence; identical to SEQ ID NO: 208671
  derived and/or modified CDS sequence (opt5) from neuraminidase__InfluenzaA__ADK45315

SEQ ID NO: 211194 - RNA, 1410 nt, Artificial Sequence
  derived and/or modified CDS sequence (opt5) from neuraminidase__InfluenzaA__ADK45413
augaaccccaaucagaagaucauuaccaucggcagcgugucccugacaauuucuacgaucugcuucuuuaugcaaauugccauccucaucaccacagucacccugcacuucaaacaguacgaguuuaacagcccuccgaauaaccagguuaugcuuuaugaacccacaauuaucgagagaaauauuaccgaaaucguguaccugacaaacaccacgauugagaaggaaaucuguccuaaacucgcugaguaucggaauugguccaagccccagugcgacauuaccggguucgccccuuuuucuaaagauaacagcauccgccuguccgcgggaggcgacaucugggugacaagagagcccuacgucucuugugauccugacaagugcuaucaauucgcucuugggcagggaaccacacugaauaacgugcauagcaauaacaccguucgggaucgcacgccguacagaacacuccugaugaaugaacugggcgugcccuuucaccucgggaccaagcaggucuguauugccugguccucuagcuccugccaugacggaaaagccuggcugcacguguguaucacaggcgaugacaagaacgcuaccgccagcuucauuuauaauggccggcuuguugauucuguggucuccuggagcaaagacauccugcgcacccaggagucugaaugcguguguauuaacgggacaugcacgguggucaugaccgauggauccgcuagcggcaaggccgacacaaaaauccucuuuaucgaggaggggaagauuguucauaccuccacacugucuggaagcgcgcaacacguggaagaguguuccugcuacccuagauaccccggcgugcggugcgucugucgcgauaacuggaaggggagcaauagaccuaucguggacauuaacaucaaagaccacucuauugccuccagcuauguuugcucuggacuugugggcgauacgccccggaagaaugacagcuccucuagcucccauugucuggauccgaacaaugaagagggcgggcacggagucaaaggcugggcuuucgacgaugggaacgacguguggaugggacgcaccaucagcgaaaagucuagacucggcuacgagacauuuaaaguuaucgaggggugguccaauccuaagagcaaacugcagauuaaccgccaggugaucgucgaucggggaaauagaucuggcuauuccggcauuuucagcguggaagggaaguccugcaucaaccgguguuuuuacgucgagcugauuagaggacgcaaggaagagaccgaagugcucuggaccucuaauagcaucguuguguucugcggcacauccgggaccuauggaacaggcucuuggcccgacggggccaacauuaaucugaugccuaucuga

SEQ ID NO: 211195 - RNA, 1410 nt, Artificial Sequence
  derived and/or modified CDS sequence (opt5) from neuraminidase__InfluenzaA__ADK45424
augaaccccaaucagaagaucauuaccaucggcagcgugucccugacaauuucuacgaucugcuucuuuaugcaaauugccauccucaucaccacagucacccugcacuucaaacaguacgaguuuaacagcccuccgaauaaccagguuaugcuuugugaacccacaauuaucgagagaaauauuaccgaaaucguguaucugacaaacaccacgauugagaaggaaaucugcccuaaacucgcugaguaccggaauugguccaagccccagugugacauuaccggguucgccccuuuuucuaaagauaacagcauccgccuguccgcgggaggcgacaucugggugacaagagagcccuaugucucuugcgauccugacaaguguuaccaauucgcucuugggcagggaaccacacugaauaacgugcauagcaauaacaccguucgggaucgcacgccguauagaacacuccugaugaaugaacugggcgugcccuuucaccucgggaccaagcaggucugcauugccugguccucuagcuccugucaugacggaaaagccuggcugcacgugugcaucacaggcgaugacaagaacgcuaccgccagcuucauuuacaauggccggcuuguugauucuguggucuccuggagcaaagagauccugcgcacccaggaaucugagugugugugcauuaacgggacauguacgguggucaugaccgacggauccgcuagcggcaaggccgauacaaaaauccucuuuaucgaggaagggaagauuguucauaccuccacacugucuggaagcgcgcaacacguggaggaaugcuccugcuauccuagauaccccggcgugcggugugucugccgcgacaacuggaaggggagcaauagaccuaucguggauauuaacaucaaagaccacucuauuguuuccagcuaccuuuguucuggacuggugggcgacacgccccggaagaaugauagcuccucuagcucccauugccucgacccgaacaaugaggaaggcgggcacggagucaaaggcugggccuucgaugacgggaacgauguguggaugggacgcaccaucagcgagaagucuagacugggcuaugagacauuuaaaguuaucgaagggugguccaauccuaagagcaaacugcagauuaaccgccaggugaucgucgaccggggaaauagaucuggcuacuccggcauuuucagcguggaggggaaguccuguaucaaccggugcuuuuaugucgaacucauuagaggacgcaaggaggaaaccgaggugcuguggaccucuaauagcaucguuguguucuguggcacauccgggaccuacggaacaggcucuuggcccgauggggcugacauuaaccuuaugccuaucuga

SEQ ID NO: 211196 - RNA, 1410 nt, Artificial Sequence; identical to SEQ ID NO: 209977
  derived and/or modified CDS sequence (opt5) from neuraminidase__InfluenzaA__ADK45446

SEQ ID NO: 211197 - RNA, 1410 nt, Artificial Sequence
  derived and/or modified CDS sequence (opt5) from neuraminidase__InfluenzaA__ADK45457
augaaccccaaucagaagaucauuaccaucggcagcgugucccugacaauuucuacgaucugcuucuuuaugcaaauugccauccucaucaccacagucacccugcacuucaaacaguacgaguuuaacagcccuccgaauaaccagguuaugcuuugugaacccacaauuaucgagagaaauauuaccgaaaucguguaucugacaaacaccacgauugagaaggaaaucugcccuaaacucgcugaguaccggaauugguccaagccccagugugacauuaccggguucgccccuuuuucuaaagauaacagcauccgccuguccgcgggaggcgacaucugggugacaagagagcccuaugucucuugcgauccugacaaguguuaccaauucgcucuugggcagggaaccacacugaauaacgugcauagcaauaacaccguucgggaucgcacgccguauagaacacuccugaugaaugaacugggcgugcccuuucaccucgggaccaagcaggucugcauugccugguccagcagcuccugucaugacggaaaagccuggcugcacgugugcaucacaggcgaugacaagaacgcuaccgccagcuucauuuacaauggccggcuuguugauucuguggucuccuggagcaaagagauccugcgcacccaggaaucugagugugugugcauuaacgggacauguacgguggucaugaccgacggauccgcuagcggcaaggccgauacaaaaauccucuuuaucgaggaagggaagauuguucauaccuccacacugucuggaagcgcgcaacacguggaggaaugcuccugcuauccuagauaccccggcgugcggugugucugccgcgacaacuggaaggggagcaauagaccuaucguggauauuaacaucaaagaccacucuauuguuuccagcuacguguguucuggacuugucggcgacacgccccggaagaaugauagcuccggcucuagccauugccuggacccgaacaaugaggaagggggacacggcgugaaagggugggccuucgaugacggaaacgauguuuggaugggccgcaccaucuccgagaagucuagacucggguaugagacauuuaaagugaucgaaggauggucuaauccuaaguccaaacugcagauuaaccggcaggucaucguggaccgcggcaauagaagcggcuacucugggauuuucuccgucgagggaaagagcuguaucaaccggugcuuuuauguggaacugauuagaggccgcaaggaggaaaccgagguucucuggaccuccaauucuaucguggucuucugugggacaagcggaaccuacggcacaggguccuggcccgauggcgcugacauuaaccugaugccuaucuga

SEQ ID NO: 211198 - RNA, 1410 nt, Artificial Sequence
  derived and/or modified CDS sequence (opt5) from neuraminidase__InfluenzaA__ADK45479
augaaccccaaucagaagaucauuaccaucggcagcgugucccugacaauuucuacgaucugcuucuuuaugcaaauugccauccucaucaccacagucacccugcacuucaaacaguacgaguuuaacagcccuccgaauaaccagguuaugcuuugugaacccacaauuaucgagagaaauauuaccgaaaucguguaucugacaaacaccacgauugagaaggaaaucugcccuaaacucgcugaguaccggaauugguccaagccccagugugacauuaccggguucgccccuuuuucuaaagauaacagcauccgccuguccgcgggaggcgacaucugggugacaagagagcccuaugucucuugcgauccugacaaguguuaccaauucgcucuugggcagggaaccacacugaauaacgugcauagcaauaacaccguucgggaucgcacgccguauagaacacuccugaugaaugaacugggcgugcccuuucaccucgggaccaagcaggucugcauugccugguccucuagcuccugucaugacggaaaagccuggcugcacgugugcaucacaggcgaugacaagaacgcuaccgccagcuucauuuacaauggccggcuuguugauucuguggucuccuggagcaaagacauccugcgcacccaggagucugaaugugugugcauuaacgggacauguacgguggucaugaccgauggauccgcuagcggcaaggccgacacaaaaauccucuuuaucgaggaggggaagguugugcauaccuccacacugucuggaagcgcgcaacacguggaagagugcuccugcuauccuagauaccccggcguccggugugugugccgcgauaacuggaaggggagcaauagaccuauuguugacaucaacauuaaagaccacucuaucguguccagcuacgucuguucuggacuugugggcgauacgccccggaagaaugacagcuccucuagcucccauugccuggauccgaacaaugaagagggcgggcacggaguuaaaggcugggccuucgacgaugggaacgacguguggaugggacgcaccauuagcgaaaagucuagacucggcuaugagacauuuaaagucaucgaggggugguccaaucauaagagcaaacugcagaucaaccgccaggugauugucgaucggggaaauagaucuggcuacuccggcaucuucagcguggaagggaaguccuguauuaaccggugcuuuuauguugagcugaucagaggacgcaaggaagaggcugaagugcucuggaccucuaauagcauugucguguucuguggcaccuccgggacauacggaaccggcucuuggccugacggggccgaucugaaccuuaugcccaucuga

SEQ ID NO: 211199 - RNA, 1410 nt, Artificial Sequence; identical to SEQ ID NO: 208810
  derived and/or modified CDS sequence (opt5) from neuraminidase__InfluenzaA__ADK48799

SEQ ID NO: 211200 - RNA, 1410 nt, Artificial Sequence; identical to SEQ ID NO: 210723
  derived and/or modified CDS sequence (opt5) from neuraminidase__InfluenzaA__ADK62686

SEQ ID NO: 211201 - RNA, 1410 nt, Artificial Sequence; identical to SEQ ID NO: 210161
  derived and/or modified CDS sequence (opt5) from neuraminidase__InfluenzaA__ADK62696

SEQ ID NO: 211202 - RNA, 1410 nt, Artificial Sequence; identical to SEQ ID NO: 209393
  derived and/or modified CDS sequence (opt5) from neuraminidase__InfluenzaA__ADK64994

SEQ ID NO: 211203 - RNA, 1410 nt, Artificial Sequence
  derived and/or modified CDS sequence (opt5) from neuraminidase__InfluenzaA__ADK65002
augaaccccaaucagaagaucauuaccaucggcagcgugugcaugacaauugggauggccaaccugauccuccaaauuggaaauaucaucuccauuuggaucucucacagcauucagcugggcaaccagaaucagaucgagacguguaaccaauccgucauuaccuacgaaaauaacacauggguuaaucagaccuaugugaacaucucuaauacaaacuucgcugccgggcagagcguggucuccgugaaacuugcgggaaauucuagccugugcccuguuuccggcugggcuauuuacagcaaggacaacucuaucagaaccggguccaaaggagauguguuugucauccgggagccguucauuagcuguucuccccucgaaugccgcacauuuuuccugacccagggcgcccuucugaaugacaagcauuccaacggcacgaucaaagauagaagcccuuaucggacccucaugucuugucccauuggggaggugccuucccccuacaacagccgcuuugaauccguugccuggucugcuagcgccugccacgacggaaucaauuggcugacaauuggcaucuccgggccugauaacggagcuguggccggccugaaguauaaugggaucauuaccgacacaaucaagagcuggagaaacaauauucuccggacccaagagucugagugugcgugcgucaacggauccuguuucacggugaugacagauggcccgagcgacggccaggccucuuacaaaaucuuucgcauugaaaaggggaaaaucgucaagagcguggagaugaaugcucccaacuaucauuacgaagagugcuccuguuacccugauucuagcgagauuaccugcguuugcagagacaauuggcacggauccaaccggcccugggugagcuucaaucagaaccuggaauaucagaucggcuacaucuguucugggauuuuuggagauaauccucgccccaacgacaaaacaggcuccugcgggccggugagcucuaauggagccaacggcgucaagggcuucuccuuuaaguaugggaacggaguguggaucggcagaaccaaaagcauuuccucucggaauggguucgagaugaucugggauccuaacggauggaccggcacagacaauaacuuuagcauuaagcaagacaucguugggaucaaugaaugguccggcuacucuggcagcuucgugcagcaucccgagcuuacgggacuggauuguauucgcccuugcuucugggucgaacucaucagagggcggcccaaagagaacaccauuuggacauccggaagcucuaucuccuuuuguggcgugaauagcgacaccguuggguggucuuggcccgauggagcugagcugccuuucacaauugacaaguga

SEQ ID NO: 211204 - RNA, 1410 nt, Artificial Sequence; identical to SEQ ID NO: 208810
  derived and/or modified CDS sequence (opt5) from neuraminidase__InfluenzaA__ADK65010

SEQ ID NO: 211205 - RNA, 1410 nt, Artificial Sequence
  derived and/or modified CDS sequence (opt5) from neuraminidase__InfluenzaA__ADK65018
augaaccccaaucagaagaucauuaccaucggcagcgugugcaugacaauugggauggccaaccugauccuccaaauuggaaauaucaucuccauuuggaucucucacagcauucagcugggcaaccagaaucagaucgagacguguaaccaauccgucauuaccuacgaaaauaacacauggguuaaucagaccuaugugaacaucucuaauacaaacuucgcugccgggcagagcguggucuccgugaaacuugcgggaaauucuagccugugcccuguuuccggcugggcuauuuacagcaaggacaacucuaucagaaucggguccaaaggagauguguuugucauucgggagccguucaucagcuguucuccccucgaaugccgcaccuuuuuccugacacagggcgcccuucugaaugacaagcauuccaacggcaccauuaaagauagaagcccuuaucggacgcucaugucuugucccaucggggaggugccuucccccuacaacagccgcuuugaauccguugccuggccugcuucugccugccacgacggaauuaauuggcugaccaucggcaucagcgggccggauaacggagcuguggccguccugaaguauaauggcauuaucacagacaccauuaaguccuggagaaacaauauccuccggacacaagagagcgagugugcgugcgugaacgggucuuguuucaccauuaugacggauggacccuccgacggccaggccagcuacaaaaucuuucgcaucgaaaagggcaaaauugugaagucuaucgagaugaaugcuccuaacuaucauuacgaagagugcagcuguuaccccgauuccucugagauuacaugcgucugcagagacaauuggcacgggagcaaccggccuuggguuuccuucaaucagaaccuggaauaucagaucggauacauuuguagcggcaucuuuggggauaauccccgcccgaacgacaaaaccggaucuugcggcccuguguccagcaauggggccaacggagugaagggcuucucuuuuaaguauggcaacggggucuggauuggaagaacaaaauccaucagcucccggaauggcuucgagaugaucugggaucccaacggguggaccggaaccgacaauaacuuuucuauuaagcaagacaucgugggcauuaaugaauggagcggguacuccggcucuuucguucagcauccugagcuuacaggacuggauuguauccgccccugcuucuggguggaacucauuagaggccggcccaaagagaacacgaucuggaccagcggguccagcaucucuuuuuguggagucaauuccgacacagugggcuggagcuggccugauggggcugagcugccguucaccauugacaaguga

SEQ ID NO: 211206 - RNA, 1410 nt, Artificial Sequence
  derived and/or modified CDS sequence (opt5) from neuraminidase__InfluenzaA__ADK87290
augaaccccaaucagaagaucauuaccaucggcagcgugucccugacaauuucuacgaucugcuucuuuaugcaaauugccauccucaucaccacagucacccugcacuucaaacaguacgaguuuaacagcccuccgaauaaccagguuaugcuuugugaacccacaauuaucgagagaaauauuaccgaaaucguguaucugacaaacaccacgauugagaaggaaaucugcccuaaacucgcugaguaccggaauugguccaagccccagugugacauuaccggguucgccccuuuuucuaaagauaacagcauccgccuguccgcgggaggcgacaucugggugacaagagagcccuaugucucuugcgauccugacaaguguuaccaauucgcucuugggcagggaaccacacugaauaacgugcauagcaauaacaccguucgggaucgcacgccguauagaacacuccugaugaaugaacugggcgugcccuuucaccucgggaccaagcaggucugcauugccugguccucuagcuccugucaugacggaaaagccuggcugcacgugugcaucacaggcgaugacaagaacgcuaccgccagcuucauuuacaauggccggcuuguugauucuguggucuccuggagcaaagagauccugcgcacccaggaaucugagugugugugcauuaacgggacauguacgguggucaugaccgacggauccgcuagcggcaaggccuauacaaaaauccucuuuaucgaggaagggaagauuguucauaccuccacacugucuggaagcgcgcaacacguggaggaaugcuccugcuacccuagauaccccggcgugcggugugucugccgcgauaacuggaaggggagcaauagaccuaucguggacauuaacaucaaagaucacucuauuguuuccagcuauguguguucuggacuugucggcgacacgccccggaagaaugacagcuccucuagcucccauugccuggauccgaacaaugaggaaggcgggcacggagugaaaggcugggccuucgacgaugggaacgacguuuggaugggacgcaccaucagcgagaagucuagacucggcuacgagacauuuaaagugaucgaagggugguccaauccuaagagcaaacugcagauuaaccggcaggucaucguggaucgcggaaauagaucuggcuauuccggcauuuucagcgucgaggggaaguccuguaucaaccggugcuuuuacguggaacugauuagaggacgcaaggaggaaaccgagguucucuggaccucuaauagcaucguggucuucuguggcacauccgggaccuauggaacaggcucuuggcccgacggggcugauauuaaccugaugccuguguga

SEQ ID NO: 211207 - RNA, 1410 nt, Artificial Sequence
  derived and/or modified CDS sequence (opt5) from neuraminidase__InfluenzaA__ADK87292
augaaccccaaucagaagaucauuaccaucggcagcgugucccugacaauuucuacgaucugcuucuuuaugcaaauugccauccucaucaccacagucacccugcacuucaaacaguacgaguuuaacagcccuccgaauaaccagguuaugcuuugugaacccacaauuaucgagagaaauauuaccgaaaucguguaucugacaaacaccacgauugagaaggaaaucugcccuaaacucgcugaguaccggaauugguccaagccccagugugacauuaccggguucgccccuuuuucuaaagauaacagcauccgccuguccgcgggaggcgacaucugggugacaagagagcccuaugucucuugcgauccugacaaguguuaccaauucgcucuugggcagggaaccacacugaauaacgugcauagcaauaacaccguucgggaucgcacgccguauagaacacuccugaugaaugaacugggcgugcccuuucaccucgggaccaagcaggucugcauugccugguccucuagcuccugucaugacggaaaagccuggcugcacgugugcaucacaggcgaugacaagaacgcuaccgccagcuucauuuacaauggccggcuuguugauucuguggucuccuggagcaaagagauccugcgcacccaggaaucugagugugugugcauuaacgggacauguacgguggucaugaccgacggauccgcuagcggcaaggccgauacaaaaauccucuuuaucgaggaagggaagauuguucauaccuccacacugucuggaagcgcgcaacacguggaggaaugcuccugcuauccuagauaccccggcgugcggugugucugccgcgacaacuggaaggggagcaauagaccuaucguggauauuaacaucaaagaccacucuauuguuuccagcuacgccuguucuggacuugugggcgacacgccccggaagaaugauagcuccucuagcucccauugccuggacccgaacaaugaggaaggcgggcacggagucaaaggcugggcuuucgaugacgggaacgauguguggaugggacgcaccaucagcgagaagucuagacucggcuaugagacauuuaaaguuaucgaagggugguccaauccuaagagcaaacugcagauuaaccgccaggugaucgucgaccggggaaauagaucuggcuacuccggcauuuucagcguggaggggaaguccuguaucaaccggugcuuuuaugucgaacugauuagaggacgcaaggaggaaaccgaggugcucuggaccucuaauagcaucguuguguucuguggcacauccgggaccuacggaacaggcucuuggcccgauggggccgacauuaaccugaugccugucuga

SEQ ID NO: 211208 - RNA, 1410 nt, Artificial Sequence
  derived and/or modified CDS sequence (opt5) from neuraminidase__InfluenzaA__ADK87294
augaaccccaaucagaagaucauugccaucggcagcgugucccugaccauuucuacaaucugcuucuuucuccaaauugcuauccugaucacgaccgucacacuucacuucaaacaguacgaguuuaacagcccuccgaauaaccagguuaugcugugugaacccaccauuaucgagagaaauauuacagaaaucguguaucucaccaacacaaccauugagaaggaaaucugcccuaaacuggccgaguaccggaauugguccaagccccagugugacauuacgggguucgcgccuuuuucuaaagauaacagcauccgccuuuccgcuggaggcgacaucugggugaccagagagcccuaugucucuugcgauccugacaaguguuaccaauucgcccuggggcagggaacaacccucaauaacgugcauagcaauaacacaguucgggaucgcaccccguauagaacgcugcugaugaaugaacucggcgugcccuuucaccuggggacaaagcaggucugcauugccugguccucuagcuccugucgggacggaaaggcuuggcuucaugugugcaucaccggcgaugacaaaaacgccacagcuagcuucauuuacaauggccgccugguugauucuguggucuccuggagcaaagagauccucagaacccaggaaucugagugugugugcauuaacgggaccuguacaguggucaugacggacggauccgccagcggcaaggcggauaccaaaauccuguuuaucgaggaagggaagauuguucacacauccacccuuucuggaagcgcccaacauguggaggaaugcuccugcuauccucgguaccccggcgugcgcugugucugcagagacacagggaagggaagcaaccggccuaucguggauauuaauaucaaagaccacucuauuguuuccagcuacguguguucuggccuggucggcgacacgccccgcaagaacgauagcuccucuagcucccacugccucgacccgaauaacgaggaagggggacauggcgugaaagggugggcuuucgaugacggaaaugauguuuggaugggcagaaccaucagcgagaagucucggcugggguaugagacauuuaaagugaucgaaggaugguccaacccuaagagcaaacugcagauuaaucgccaggucaucguggacagaggcaaccggucuggcuacuccgggauuuucagcgucgagggaaaguccuguaucaauagaugcuuuuauguggaacucauucgcggccggaaggaggaaaccgagguucuguggaccucuaacaauaucguggucuucugugggacaagcggaaccuacggcacaggguccuggcccgauggcgccgacauuaaccuuaugccuguguga

SEQ ID NO: 211209 - RNA, 1410 nt, Artificial Sequence
  derived and/or modified CDS sequence (opt5) from neuraminidase__InfluenzaA__ADK87297
augaaccccaaucagaagaucauuaccaucggcagcgugugcaugacaauugggauggccaaccugauccuccaaauuggaaauaucaucuccauuuggaucucucacagcauucagcugggcaaccagaaucagaucgagacguguaaccaauccgucauuaccuacgaaaauaacacauggguuaaucagaccuaugugaacaucucuaauacaaacuucgcugccgggcagagcguggucuccgugaaacuugcgggaaauucuagccugugcccuguuuccggcugggcuauuuacagcaaggacaacucuaucagaaucggguccaaaggagauguguuugucauucgggagccguucaucagcuguucuccccucgaaugccgcaccuuuuuccugacacagggcgcccuucugaaugacaagcauuccaacggcaccauuaaaaacagaagcccuuaucggacgcucaugucuugucccaucggggaggugccuucccccuacaauagccgcuuugaauccguugccuggucugcuagcgccugccacgauggaauuaacuggcugaccaucggcaucuccgggccugacaauggagcuguggccguccugaaguauaacggcauuaucacagauaccauuaagagcuggagaaauaacauccuccggacacaagagucugagugugcgugcgugaauggguccuguuucaccgugaugacggacggaccgagcgauggccaggccucuuacaaaauuuuucgcaucgaaaagggcaaaaucgucaagagcguugagaugaacgcucccaauuaucauuacgaagagugcuccuguuacccugacucuagcgagauuacaugcgugugcagagauaacuggcacggguccaaucggcccugggugagcuucaaccagaaucuggaauaucagaucggauacauuuguucuggcaucuuuggggacaacccucgccccaaugauaaaaccggauccugcggcccggucagcucuaacggggccaacggagugaagggcuucuccuuuaaguauggcaaugggguuuggauuggaagaacaaaaagcaucuccucucggaacggcuucgagaugauuugggacccuaauggguggaccggaaccgauaacaauuuuagcaucaagcaagacaucgugggcauuaacgaaugguccggguacucuggcagcuucguccagcaucccgagcuuacaggacuggacuguauccgcccuugcuucuggguggaacucauuagaggccggcccaaagagaauacgaucuggaccuccgggagcucuauuuccuuuuguggaguuaacagcgauacagugggcuggucuuggcccgacggggcugagcugccuuucaccaucgauaaguga

SEQ ID NO: 211210 - RNA, 1410 nt, Artificial Sequence
  derived and/or modified CDS sequence (opt5) from neuraminidase__InfluenzaA__ADK87299
augaaccccaaucagaagaucauuaccaucggcagcgugugcaugacaauugggauggccaaccugauccuccaaauuggaaauaucaucuccauuuggaucucucacagcauucagcugggcaaccagaaucagaucgagacguguaaccaauccgucauuaccuacgaaaauaacacauggguuaaucagaccuaugugaacaucucuaauacaaacuucgcugccgggcagagcguggucuccgugaaacuugcgggaaauucuagccugugcccuguuuccggcugggcuauuuacagcaaggacaacucuaucagaaucggguccaaaggagauguguuugucauucgggagccguucaucagcuguucuccccucgaaugccgcaccuuuuuccugacacagggcgcccuucugaaugacaagcauuccaacggcaccauuaaagauagaagcccuuaucggacgcucaugucuugucccaucggggaggugccuucccccuacaacagccgcuuugaauccguugccuggucugcuagcgccugccacgacggaauuaauuggcugaccaucggcaucuccgggccugauaacggagcuguggccguccugaaguauaauggcauuaucacagacaccauuaagagcuggagaaacaauauccuccggacacaagagucugagugugcgugcgugaacggguccuguuucaccgugaugacggauggaccgagcgacggccaggccucuuuuaaaauuuuccgcaucgaaaagggcaaaaucgucaagagcguugagaugaaugcucccaacuaccauuaugaagagugcuccuguuacccugauucuagcgagauuacaugcgugugcagagacaauuggcacggguccaaccggcccugggugagcuuuaaucagaaccuggaauaccagaucggauauauuuguucuggcaucuucggggauaauccucgccccaacgacaaaaccggauccugcggcccggucagcucuaauggggccaacggagugaagggcuuuuccuucaaguacggcaacgggguuuggauuggaagaacaaaaagcaucuccucucggaauggcuuugagaugauuugggauccuaacggguggaccggaaccgacaauaacuucagcaucaagcaagacaucgugggcauuaaugaaugguccggguauucuggcagcuucguccagcaucccgagcuuacaggacuggauuguauccgcccuugcuuuuggguggaacucauuagaggccggcccaaagagaacacgaucuggaccuccgggagcucuauuuccuucuguggaguuaauagcgacacagugggcuggucuuggcccgauggggcugagcugccuuuuaccaucgacaaguga

SEQ ID NO: 211211 - RNA, 1410 nt, Artificial Sequence
  derived and/or modified CDS sequence (opt5) from neuraminidase__InfluenzaA__ADK87301
augaaccccaaucagaagaucauuaccaucggcagcgugucccugacaauuucuacgaucugcuucuuuaugcaaauugccauccucaucaccacagucacccugcacuucaaacaguacgaguuuaacagcccuccgaauaaccagguuaugcuuugugaacccacaauuaucgagagaaauauuaccgaaaucguguaucugacaaacaccacgauugagaaggaaaucugcccuaaacucgcugaguaccggaauugguccaagccccagugugacauuaccggguucgccccuuuuucuaaagauaacagcauccgccuguccgcgggaggcgacaucugggugacaagagagcccuaugucucuugcgauccugacaaguguuaccaauucgcucuugggcagggaaccacacugaauaacgugcauagcaauaacaccguucgggaucgcacgccguauagaacacuccugaugaaugaacugggcgugcccuuucaccucgggaccaagcaggucugcauugccugguccucuagcuccugucaugacggaaaagccuggcugcacgugugcaucacaggcgaugacaagaacgcuaccgccagcuucauuuacaauggccggcuuguugauucuguggucuccuggagcaaagagauccugcgcacccaggaaucugagugugugugcauuaacgggacauguacgguggcuaugaccgacggauccgccagcggcaaggcggauacaaaaauccucuuuaucgaggaagggaagauuguccauaccuccacacugucuggaagcgcccaacacguugaggaaugcuccugcuauccuagauaccccggcgugcggugugugugccgcgacaacuggaaggggagcaauagaccuaucgucgauauuaacaucaaagaccacucuauuguguccagcuacguuuguucuggacuugugggcgacacgccccggaagaaugauagcuccucuagcucccauugccuggacccgaacaaugaggaaggcgggcacggagucaaaggcugggcuuucgaugacgggaacgauguguggaugggacgcaccaucagcgagaagucuagacucggcuaugagacauuuaaaguuaucgaagggugguccaauccuaagagcaaacugcagauuaaccgccaggugaucgucgaccggggaaauagaucuggcuacuccggcauuuucagcguggaggggaaguccuguaucaaccggugcuuuuaugucgaacugauuagaggacgcaaggaggaaaccgaggugcucuggaccucuaauagcaucguuguguucuguggcacauccgggaccuacggaacaggcucuuggcccgauggggccgacauuaaccugaugccuaucuga

SEQ ID NO: 211212 - RNA, 1410 nt, Artificial Sequence; identical to SEQ ID NO: 208671
  derived and/or modified CDS sequence (opt5) from neuraminidase__InfluenzaA__ADK87303

SEQ ID NO: 211213 - RNA, 1410 nt, Artificial Sequence
  derived and/or modified CDS sequence (opt5) from neuraminidase__InfluenzaA__ADK87305
augaaccccaaucagaagaucauuaccaucggcagcgugucccugacaauuucuacgaucugcuucuuuaugcaaauugccauccucaucaccacagucacccugcacuucaaacaguacgaguuuaacagcccuccgaauaaccagguuaugcuuugugaacccacaauuaucgagagaaauauuaccgaaaucguguaucugacaaacaccacgauugagaaggaaaucugcccuaaacucgcugaguaccggaauugguccaagccccagugugacauuaccggguucgccccuuuuucuaaagauaacagcauccgccuguccgcgggaggcgacaucugggugacaagagagcccuaugucucuugcgauccugacaaguguuaccaauucgcucuugggcagggaaccacacugaauaacgugcauagcaauaacaccguucgggaucgcacgccguauagaacacuccugaugaaugaacugggcgugcccuuucaccucgggaccaagcaggucugcauugccugguccucuagcuccugucaugacggaaaagccuggcugcacgugugcaucacaggcgaugacaagaacgcuaccgccagcuucauuuacaauggccggcuuguugauucuguggucuccuggagcaaagagauccugcgcacccaggaaucugagugugugugcauuaacgggacauguacgguggucaugaccgacggauccgcuagcggcaaggccgauacaaaaauccucuuuaucgaggaagggaagauuguucauaccuccacacugucuggaagcgcgcaacacguggaggaaugcuccugcuauccuagauaccccggcgugcggugugucugccgcgacaacuggaaggggagcaauagaccuaucguggauauuaacaucaaagaccacucuauuguuuccagcuacguguguucuggacuugucggcgacacgccccggaagaaugauagcuccucuagcucccauugccuggacccgaacaaugaggaaggcgggcacggagugaaaggcugggccuucgaugacgggaacgauguuuggaugggacgcaccaucagcgagaagucuagacucggcuaugagacauuuaaagugaucgaagggugguccaauccuaagagcaaacugcagauuaaccggcaggucaucgugggacgcggcaauagaucuggcuacuccgggauuuucagcgucgagggaaaguccuguaucaaccggugcuuuuauguggaacugauuagaggccgcaaggaggaaaccgagguucucuggaccucuaauagcaucguggucuucugugggacauccggaaccuacggcacagggucuuggcccgacggcgcugauauuaaccugaugccuguguga

SEQ ID NO: 211214 - RNA, 1410 nt, Artificial Sequence
  derived and/or modified CDS sequence (opt5) from neuraminidase__InfluenzaA__ADK87307
augaaccccaaucagaaggugaucaccauuggcagcgucucccugacaaucucuacgauuugcuucuuuaugcaaaucgccauucucaucaccacaguuacccugcacuucaaacaguacgaguuuaacagcccuccgaauaaccaggugaugcuuugugaacccacaaucauugagagaaauaucaccgaaauuguguaucugacaaacaccacgaucgagaaggaaauuugcccuaaacucgcugaguaccggaauugguccaagccccagugugacaucaccggguucgccccuuuuucuaaagauaacagcauucgccuguccgcgggaggcgacaucugggucacaagagagcccuaugugucuugcgauccugacaaguguuaccaauucgcucuugggcagggaaccacacugaauaacguucauagcaauaacaccgugcgggaucgcacgccguauagaacacuccugaugaaugaacugggcguccccuuucaccucgggaccaaacaggugugcaucgccugguccucuagcuccugucaugacggaaaggccuggcugcacguuugcauuacaggcgaugacaagaacgcuaccgccagcuucaucuacaauggccggcuuguggauucugucguguccuggagcaaagagauucugcgcacccaggaaucugagugugugugcaucaacgggacauguacggucguuaugaccgacggauccgcuagcggcaaggccgauacaaaaauucucuuuaucgaggaagggaagaucgugcauaccuccacacugucuggaagcgcgcaacacguggaggaaugcuccugcuauccuagauaccccggcguccggugugugugccgcgacaacuggaaggggagcaauagaccuauuguugauaucaacauuaaagaccacucuaucguguccagcuacgucuguucuggacuugugggcgacacgccccggaagaaugauagcuccucuagcucccauugccuggacccgaacaaugaggaaggcgggcacggaguuaaaggcugggccuucgaugacgggaacgauguguggaugggacgcaccauuagcgagaagucuagacucggcuaugagacauuuaaagucaucgaagggugguccaauccuaagagcaaacugcagaucaaccgccaggugauugucggacggggcaauagaucuggcuacuccgggaucuucagcguggagggaaaguccuguauuaaccggugcuuuuauguugaacugaucggcgggagaaaggaggaaaccgaggugcucuggaccucuaauagcauugucguguucuguggaacauccggcaccuacgggacaggcucuuggcccgacggagcugauaucaaccugaugccuguuuga

SEQ ID NO: 211215 - RNA, 1410 nt, Artificial Sequence
  derived and/or modified CDS sequence (opt5) from neuraminidase__InfluenzaA__ADK87312
augaaccccaaucagaccaucauuacaaucggcagcgugugcaugacgauugggauggccaaccugauccuccaaauuggaaauaucaucuccauuuggaucucucacagcauucagcugggcaaccagaaucagaucgagaccuguaaccaauccgucauuacauacgaaaauaacaccuggguuaaucagacauaugugaacaucucuaauaccaacuucgcugccgggcagagcgugauuuccgucaaacuugcgggaaauucuagccugugcccuguguccggcugggcuaucuacagcaaggacaacaauaucagaauugggucuaagggagauguuuuugugauccgggagccguucauuuccuguagcccccucgaaugccgcacauuuuuccugacccagggcgcccuucugaacgacaaacauucuaacggcacgaucaaggauagauccccuuaucggacccucaugagcugucccauuggggaggucccuucucccuacaauucccgcuuugaaagcguggccugguccgcuucugccugccacgacggaaucaacuggcugacaaucggcauuagcgggccugauaauggagcuguugccgugcugaaauauaacggcaucauuaccgacacaaucaaguccuggagaaauaacauucuccggacccaagagagcgagugugcgugcgucaaugggucuuguuucacggugaugacagauggaccguccgacggccaggccagcuacaagaucuuucgcaucgaaaaaggcaagauugugaaaucugucgagaugaacgcucccaauuaucauuacgaagagugcagcuguuacccugauuccucugagauuaccugcguuugcagagacaacuggcacgggagcaaucggcccuggguguccuucaaccagaaucuggaauaucagaucggauacaucuguagcggcauuuuuggggauaacccucgccccaaugacaagacaggaucuugcggcccgguguccagcaacggggccaacggagucaaaggcuucucuuuuaaguauggcaaugggguguggaucggaagaaccaaguccauuagcucccggaacggcuucgagaugaucugggauccuaauggguggaccggaacagacaacaauuuuucuaucaaacaagacauuguuggcaucaacgaauggagcggguacuccggcucuuucgugcagcaucccgagcuuacgggacuggauuguauucgcccuugcuucugggucgaacucaucagaggccggcccaaggagaauaccauuuggacaagcggguccagcaucucuuuuuguggagugaacuccgacaccguuggcuggagcuggcccgauggggcugagcugccuuucacaaucgacaaauga

SEQ ID NO: 211216 - RNA, 1410 nt, Artificial Sequence
  derived and/or modified CDS sequence (opt5) from neuraminidase__InfluenzaA__ADK87314
augaaccccaaucagaagaucauuaccaucggcagcgugucccugacaauuucuacgaucugcuucuuuaugcaaauugccauccucaucaccacagucacccugcacuucaaacaguacgaguuuaacagcccuccgaauaaccagguuaugcuuugugaacccacaauuaucgaggggaauauuaccgaaaucguguaucugacaaacaccacgauugagaaggaaaugugcccuaaacucgcugaguacagaaauugguccaagccccagugugacaucaccggauucgccccuuuuucuaaagauaacagcauucggcuguccgcgggcggggacaucugggugacacgcgagcccuaugucucuugcgauccugacaaguguuaccaauucgcucuuggacagggcaccacacugaauaacgugcauagcaauaacaccguuagagaucggacgccguaucgcacacuccugaugaaugaacugggggugcccuuucaccucggaaccaagcaggucugcaucgccugguccucuagcuccugucaugacggcaaagccuggcugcacgugugcauuacaggcgaugacaagaacgcuaccgccagcuucaucuacaaugggagacuuguugauucuguggucuccuggagcaaagagauucugcggacccaggaaucugagugugugugcaucaacggaacauguacgguggucaugaccgacggcuccgcuagcgggaaggccgauacaaaaauucucuuuaucgaggaaggaaagaucguucauaccuccacaucuagcggcuccgcgcaacacguggaggaaugcagcugcuauccucgcuaccccggggugagaugugucugccgggacaacuggaagggaucuaaucgcccuauuguggauaucaacauuaaagaccacuccaucguuagcucuuacguguguagcggccuggucggcgacacccccagaaagaaugauuccucuagcuccagccauugccuugacccgaacaaugaggaagggggacacggcgugaaagggugggccuucgaugacggaaacgauguuuggaugggccggacgauuucugagaagucccgccugggguaugagacauuuaaagugaucgaaggauggagcaauccuaagucuaaacuccagaucaacagacaggucauuguggaccggggcaaucgcuccggcuacagcgggaucuucuccgucgagggaaagucuuguauuaacagaugcuuuuauguggaacugauccggggcagaaaggaggaaaccgagguucuguggaccagcaauuccauuguggucuucugugggacaucuggaaccuacggcacagggagcuggcccgauggcgcugacaucaaccucaugccuguguga

SEQ ID NO: 211217 - RNA, 1410 nt, Artificial Sequence
  derived and/or modified CDS sequence (opt5) from neuraminidase__InfluenzaA__ADK87316
augaaccccaaucagaagaucauuaccaucggcagcgugugcaugacaauugggauggccaaccugauccuccaaauuggaaauaucaucuccauuuggaucucucacagcauucagcugggcaaccagaaucagaucgagacguguaaccaauccgucauuaccuacgaaaauaacacauggguuaaucagaccuaugugaacaucucuaauacaaacuucgcugccgggcagagcguggucuccgugaaacuugcgggaaauucuagccugugcccuguuuccggcugggcuauuuacagcaaggacaacucuaucagaaucggguccaaaggagauguguuugucauucgggagccguucaucagcuguucuccccucgaaugccgcaccuuuuuccugacacagggcgcccuucugaaugacaagcauuccaacggcaccauuaaagauagaagcccuuaucggacgcucaugucuugucccaucggggaggugccuucccccuacaacagccgcuuugaauccguugccuggucugcuagcgccugccacgacggaauuaauuggcugaccaucggcaucuccgggccugauaacggagcuguggccguccugaaguauaauggcauuaucacagacaccauuaagagcuggagaaacaauauccuccggacacaagagucugagugugcgugcgugaacggguccuguuucaccgugaugacggauggaccgagcgacggccaggccucuuacaaaauuuuucgcaucgaaaagggcaaaaucgucaagagcguugagaugaaugcucccaacuaucauuacgaagagugcuccuguuacccugauucuagcgagauuacaugcgugugcagagacaauuggcacggguccaaccggcccugggugagcuucaaucagaaccuggaauaucagaucggauacauuuguucuggcaucuuuggggauaauccucgccccaacgacaaaaccggauccugcggcccggucagcucuaauggggccaacggagugaagggcuucuccuuuaaguauggcaacgggguuuggauuggaagaacaaaaagcaucuccucucggaauggcuucgagaugauuugggauccuaacggguggaccggaaccgacaauaacuuuagcaucaagcaagacaucgugggcauuaaugaaugguccggguacucuggcagcuucguccagcaucccgagaucacaggacuugauuguauucgcccuugcuucuggguggaacugaucagaggccggcccaaagagaacacgauuuggaccuccgggagcucuaucuccuuuuguggaguuaauagcgacacagugggcuggucuuggcccgauggggcugagcucccuuucaccaucgacaaguga

SEQ ID NO: 211218 - RNA, 1410 nt, Artificial Sequence
  derived and/or modified CDS sequence (opt5) from neuraminidase__InfluenzaA__ADK87318
augaaccccaaucagaagaucauuaccaucggcagcgugugcaugacaauugggauggccaaccugauccuccaaauuggaaauaucaucuccauuuggaucucucacagcauucagcugggcaaccagaaucagaucgagacguguaaccaauccgucauuaccuacgaaaauaacacauggguuaaucagaccuaugugaacaucucuaauacaaacuucgcugccgggcagagcguggucuccgugaaacuugcgggaaauucuagccugugcccuguuuccggcugggcuauuuacagcaaggacaacucuaucagaaucggguccaaaggagauguguuugucauucgggagccguucaucagcuguucuccccucgaaugccgcaccuuuuuccugacacagggcgcccuucugaaugacaagcauuccaacggcaccauuaaagauagaagcccuuaucggacgcucaugucuugucccaucggggaggugccuucccccuacaacagccgcuuugaauccguugccuggucugcuagcgccugccacgacggaauuaauuggcugaccaucggcaucuccgggccugauaacggagcuguggccguccugaaguauaauggcauuaucacagacaccauuaagagcuggagaaacaauauccuccggacacaagagucugagugugcgugcgugaacggguccuguuucaccgugaugacggauggaccgagcgacggccaggccucuuacaaaauuuuucgcaucgaaaagggcaaaaucgucaagagcguugagaugaaugcucccaacuaucauuacgaagagugcuccuguuacccugauucuagcgagauuacaugcgugugcagagacaauuggcacggguccaaccggcccugggugagcuucaaucagaaccuggaauaucagaucggauacauuuguucuggcaucuuuggggauaauccucgccccaacgacaaaaccggauccugcggcccggucagcucuaauggggccaacggagugaagggcuucuccuuuaaguauggcaacgggguuuggauuggaagaacaaaaagcaucuccucucggaauggcuucgagaugauuugggauccuaacggguggaccggaaccgacaauaacuuuagcaucaagcaagacaucgugggcauuaaugaaugguccggguacucuggcagcuucguccagcaucccgagcuuacaggacuggauuguauccgcccuugcuccuggguggaacucauuagaggccggcccaaagagaacacgaucuggaccagcgggucuuccaccagcuucuguggaguuaauucugacacagugggcugguccuggcccgauggggcugagcugccuuuuacaauugacaaguga

SEQ ID NO: 211219 - RNA, 1410 nt, Artificial Sequence
  derived and/or modified CDS sequence (opt5) from neuraminidase__InfluenzaA__ADK87320
augaaccccaaucagaagaucauuaccaucggcagcgugugcaugacaauugggauggccaaccugauccuccaaauuggaaauaucaucuccauuuggaucucucacagcauucagcugggcaaccagaaucagaucgagacguguaaccaauccgucauuaccuacgaaaauaacacauggguucaucagaccuaugugaauaucucuaacacaaauuucgcugccgggcagagcguggucuccgugaaacuugcgggaaacucuagccugugcccuguuuccggcugggcuauuuacagcaaggacaauucuaucagaaucggguccaaaggagauguguuugucauucgggagccguucaucagcuguucuccccucgaaugccgcaccuuuuuccugacacagggcgcccuucugaacgacaagcacuccaauggcaccauuaaagauagaagcccuuaucggacgcucaugucuugucccaucggggaggugccuucccccuacaacagccgcuuugaauccguugccuggucugcuagcgccugccaugacggaauuaacuggcugaccaucggcaucuccgggccugauaauggagcuguggccguccugaaguauaacggcauuaucacagacaccauuaagagcuggagaaauaacauccuccggacacaagagucugagugugcgugcgugaauggguccuguuucaccgugaugacggauggaccgagcgacggccaggccucuuacaaaauuuuucgcaucgaaaagggcaaaaucgucaagagcguugagaugaacgcucccaauuaucacuacgaagagugcuccuguuacccugauucuagcgagauuacaugcgugugcagagacaacuggcauggguccaaucggcccugggugagcuucaaccagaaucuggaauaucagaucggauacauuuguucuggcaucuuuggggauaacccucgccccaaugacaaaaccggauccugcggcccggucagcucuaacggggccaauggagugaagggcuucuccuuuaaguauggcaacgggguuuggauuggaagaacaaaaagcaucuccucucggaacggcuucgagaugauuugggauccuaauggguggaccggaaccgacaacaauuuuagcaucaagcaagacaucgugggcauuaacgaaugguccggguacucuggcagcuucguccagcaccccgagcuuacaggacugaauuguauccgcccuugcuucuggguggaacucauuagaggccggcccaaagagaacacgaucuggaccuccgggagcucuauuuccuuuuguggaguuaauagcgauacagugggcuggucuuggcccgacggggcugagcugccuuucaccaucgauaaguga

SEQ ID NO: 211220 - RNA, 1410 nt, Artificial Sequence
  derived and/or modified CDS sequence (opt5) from neuraminidase__InfluenzaA__ADK87324
augaaccccaaucagaagaucauuaccaucggcagcgugucccugacaauuucuacgaucugcuuccucaugcaaauugccauccugaucaccacagucacccuucacuuuaaacaguacgaguucaacagcccuccgaauaaccagguuaugcugugugaacccacaauuaucgagagaaauauuaccgaaaucguguaucucacaaacaccacgauugagaaggaaaucugcccuaaacuggcugaguaccggaauugguccaagccccagugugacauuaccggguuugccccuuucucuaaagauaacagcauccgccuuuccgcgggaggcgacaucugggugacaagagagcccuaugucucuugcgauccugggaaguguuaccaauuugcucugggacagggcaccacacucaauaacgugcauagcaauaacaccguucgggaccgcacgccguauagaacacugcugaugaaugaacucggggugcccuuccaccugggaaccaagcaggucugcauugccugguccucuagcuccugucaugauggcaaagccuggcuucacgugugcaucacaggcgacgaugagaacgcuaccgccagcuuuauuuacaaugggcggcugguugacucuguggucuccuggagcaaggaaauccuccgcacccaggagucugagugugugugcauuaacggaacauguacgguggucaugaccgauggcuccgcuagcgggaaagccgacacaaagauccuguucaucgaagagggaaaaauuguucauaccuccacacuuucuggcagcgcgcaacacguggaagagugcuccugcuauccuagauaccccggggugcggugugucugccgcgauaacuggaagggaagcaauagaccuaucguggacauuaacaucaaggaucacucuauuguuuccagcuacguguguucuggccuggucggcgacacgccccggaaaaaugacagcuccucuagcucccauugccucgauccgaacaaugaagaagggggacacggcgugaaggggugggccuuugacgauggaaacgacguuuggaugggccgcaccaucagcgagaaaucuagacugggguaugagacauucaaggugaucgagggaugguccaauccuaaaagcaagcugcagauuaaccggcaggucaucguggaucgcggcaauagaucuggcuacuccgggauuuuuagcgucgaaggaaaauccuguaucaaccggugcuucuauguggagcucauuagaggccgcaaggaagagaccgagguucuguggaccucuaauagcaucguggucuuuugugggacauccggaaccuacggcacagggucuuggcccgacggcgcugauauuaaccuuaugccuguguga

SEQ ID NO: 211221 - RNA, 1410 nt, Artificial Sequence
  derived and/or modified CDS sequence (opt5) from neuraminidase__InfluenzaA__ADK87327
augaaccccaaucagaagaucaugaccauuggcagcgugucccugacaaucucuacgauuugcuucuuuaugcaaaucgccauucucaucaccacagucacccugcacuucaaacaguacgaguuuaacagcccuccgaauaaccagguuaugcuuugugaacccacaaucauugagagaaauaucaccgaaauuguguaucugacaaacaccacgaucgagaaggaaauuugcccuaaacucgcugaguaccggaauugguccaagccccagugugacaucaccggguucgccccuuuuucuaaagauaacagcauucgccuguccgcgggaggcgacaucugggugacaagagagcccuaugucucuugcgauccugacaaguguuaccaauucgcucuugggcagggaaccacacugaauaacgugcauagcaauaacaccguucgggaucgcacgccguauagaacacuccugaugaaugaacugggcgugcccuuucaccucgggaccaagcaggucugcaucgccugguccucuagcuccugucaugacggaaaagccuggcugcacgugugcauuacaggcgaugacaagaacgcuaccgccagcuucaucuacaauggccggcuuguugauucuguggucuccuggagcaaagagauucugcgcacccaggaaucugagugugugugcaucaacgggacauguacgguggucaugaccgacggauccgcuagcggcaaggccgauacaaaaauucucuuuaucgaggaagggaagaucguucauaccuccacacugucuggaagcgcgcaacacguggaggaaugcuccugcuauccuagauaccccggcgugcggugugucugccgcgacaacuggaaggggagcaauagaccuauuguggauaucaacauuaaagaccacucuaucguuuccagcuacguguguucuggacuugucggcgacacgccccggaagaaugauagcuccucuagcucccauugccuggacccgaacaaugaggaaggcgggcacggagugaaaggcugggccuucgaugacgggaacgauguuuggaugggacgcaccauuagcgagagaucucggcucggcuaugagacauuuaaggugaucgaagggugguccaauccuaaaagcaagcugcagaucaaccgccaggucauuguggacagaggaaaucggucuggcuacuccggcaucuucagcgucgaggggaaauccuguauuaacagaugcuuuuauguggaacugauccgcggacggaaggaggaaaccgagguucucuggaccucuaauagcauuguggucuucuguggcacauccgggaccuacggaacaggcucuuggcccgauggggcugacaucaaccugaugccuguguga

SEQ ID NO: 211222 - RNA, 1410 nt, Artificial Sequence; identical to SEQ ID NO: 208810
  derived and/or modified CDS sequence (opt5) from neuraminidase__InfluenzaA__ADK87329

SEQ ID NO: 211223 - RNA, 1410 nt, Artificial Sequence
  derived and/or modified CDS sequence (opt5) from neuraminidase__InfluenzaA__ADK87330
augaaccccaaucagaagaucauuaccaucggcagcgugugcaugacaauugggauggccaaccugauccuccaaauuggaaauaucaucuccauuuggaucucucacagcauucagcugggcaaccagaaucagaucgagacguguaaccaauccgucauuaccuacgaaaauaacacauggguuaaucagaccuaugugaacaucucuaauacaaacuucgcugccgggcagagcguggucuccgugaaacuugcgggaaauucuagccugugcccuguuuccggcugggcuauuuacagcaaggacaacucuaucagaaucggguccaaaggagauguguuugucauucgggagccguucaucagcuguucuccccucgaaugccgcaccuuuuuccugacacagggcgcccuucugaaugacaagcauuccaacggcaccauuaaagauagaagcccuuaucggacgcucaugucuugucccaucggggaggugccuucccccuacaacagccgcuuugaauccguugccuggucugcuagcgccugccacgacggaauuaauuggcugaccaucggcaucuccgggccugauaacggagcuguggccguccugaaguauaauggcauuaucacagacaccauuaagagcuggagaaacaauauccuccggacacaagagucugagugugcgugcgugaacggguccuguuucaccgugaugacggauggaccgagcgacggccaggccucuuacaaaauuuuucgcaucgaaaagggcaaaaucgucaagagcguugagaugaaugcucccaacuaucauuacgaagagugcuccuguuacccugauucuagcgagauuacaugcgugugcagagacaauuggcacggguccaaccggcccugggugagcuucaaucagaaccuggaauaucagaucggauacauuuguucuggcaucuuuggggauaauccucgccccaacgacaaaaccggauccugcggcccggucagcucuaauggggccaacggagugaagggcuucuccuuuaaguauggcaacgggguuuggauuggaagaacaaaaagcaucuccucucggaauggcuucgagaugauuugggauccuaacggguggaccggaaccgacaauaacuuuagcaucaagcaagacaucgugggcauuaaugaaugguccggguacucuggcagcuucguccagcaucccgagcuuacaggacuggauuguauccgcccuugcuucuggguggaacucauuagaggccggcccaaagagaacacgaucugggcuuccgggagcucuauuuccuuuuguggaguuaauagcgacaccgugggcuggucuuggcccgauggggccgagcugccuuucacaaucgacaaguga

SEQ ID NO: 211224 - RNA, 1410 nt, Artificial Sequence; identical to SEQ ID NO: 208810
  derived and/or modified CDS sequence (opt5) from neuraminidase__InfluenzaA__ADK87331

SEQ ID NO: 211225 - RNA, 1410 nt, Artificial Sequence
  derived and/or modified CDS sequence (opt5) from neuraminidase__InfluenzaA__ADK87332
augaaccccaaucagaagaucauuaccaucggcagcgugugcaugacaauugggauggccaaccugauccuccaaauuggaaauaucaucuccauuuggaucucucacagcauucagcugggcaaccagaaucagaucgagacguguaaccaauccgucauuaccuacgaaaauaacacauggguuaaucagaccuaugugaacaucucuaauacaaacuucgcugccgggcagagcguggucuccgugaaacuugcgggaaauucuagccugugcccuguuuccggcugggcuauuuacagcaaggacaacucuaucagaaucggguccaaaggagauguguuugucauucgggagccguucaucagcuguucuccccucgaaugccgcaccuuuuuccugacacagggcgcccuucugaaugacaagcauuccaacggcaccauuaaagauagaagcccuuaucggacgcucaugucuugucccaucggggaggugccuucccccuacaacagccgcuuugaauccguugccuggucugcuagcgccugccacgacggaauuaauuggcugaccaucggcaucuccgggccugauaacggagcuguggccguccugaagcauaauggcauuaucacagacaccauuaagagcuggagaaacaauauccuccggacacaagagucugagugugcgugcgugaacggguccuguuucaccgugaugacggauggaccgagcgacggccaggccucuuauaaaauuuuucgcaucgaaaagggcaaaaucgucaagagcguugagaugaaugcucccaacuaccacuaugaagagugcuccuguuacccugauucuagcgagauuacaugcgugugcagagacaauuggcauggguccaaccggcccugggugagcuucaaucagaaccuggaauaccagaucggauauauuuguucuggcaucuuuggggauaauccucgccccaacgacaaaaccggauccugcggcccggucagcucuaauggggccaacggagugaagggcuucuccuuuaaguacggcaacgggguuuggauuggaagaacaaaaagcaucuccucucggaauggcuucgagaugauuugggauccuaacggguggaccggaaccgacaauaacuuuagcaucaagcaagacaucgugggcauuaaugaaugguccggguauucuggcagcuucguccagcaccccgagcuuacaggacuggauuguauccgcccuugcuucuggguggaacucauuagaggccggcccaaagagaacacgaucuggaccuccgggagcucuauuuccuuuuguggaguuaauagcgacacagugggcuggucuuggcccgauggggcugagcugccuuucaccaucgacaaguga

SEQ ID NO: 211226 - RNA, 1410 nt, Artificial Sequence
  derived and/or modified CDS sequence (opt5) from neuraminidase__InfluenzaA__ADK87333
augaaccccaaucagaagaucauuaccaucggcagcgugugcaugacaauugggauggccaaccugauccuccaaauuggaaauaucaucuccauuuggaucucucacagcauucagcugggcaaccagaaucagaucgagacguguaaccaauccgucauuaccuacgaaaauaacacauggguuaaucagaccuaugugaacaucucuaauacaaacuucgcugccgggcagagcguggucuccgugaaacuugcgggaaauucuagccugugcccuguuuccggcugggcuauuuacagcaaggacaacucuaucagaaucggguccaaaggagauguguuugucauucgggagccguucaucagcuguucuccccucgaaugccgcaccuuuuuccugacacagggcgcccuucugaaugacaagcauuccaacggcaccauuaaagauagaagcccuuaucggacgcucaugucuugucccaucggggaggugccuucccccuacaacagccgcuuugaauccguugccuggucugcuagcgccugccacgacggaauuaauuggcugaccaucggcaucuccgggccugauaacggagcuguggccguccugaaguauaauggcauuaucacagacaccauuaagagcuggagaaacaauauccuccggacacaagagucugagugugcgugcgugaacggguccuguuucaccgugaugacggauggaccgagcgacggccaggccucuuacaaaauuuuucgcaucgaaaagggcaaaaucgucaagagcguugagaugaaugcucccaacuaucauuacgaagagugcuccuguuacccuuauucuagcgagauuacaugcgugugcagagauaauuggcacggguccaaccggcccugggugagcuucaaucagaaccuggaauaccagaucggauauauuuguucuggcaucuuuggggacaauccucgccccaacgauaaaaccggauccugcggcccggucagcucuaauggggccaacggagugaagggcuucuccuuuaaguacggcaacgggguuuggauuggaagaacaaaaagcaucuccucucggaauggcuucgagaugauuugggacccuaacggguggaccggaaccgauaauaacuuuagcaucaagcaagacaucgugggcauuaaugaaugguccggguauucuggcagcuucguccagcaucccgagcuuacaggacuggacuguauccgcccuugcuucuggguggaacucauuagaggccggcccaaagagaacacgaucuggaccuccgggagcucuauuuccuuuuguggaguuaauagcgauacagugggcuggucuuggcccgacggggcugagcugccuuucaccaucgauaaguga

SEQ ID NO: 211227 - RNA, 1410 nt, Artificial Sequence
  derived and/or modified CDS sequence (opt5) from neuraminidase__InfluenzaA__ADK87335
augaaccccaaucagaagaucauuaccaucggcagcgugucccugacaauuucuacgaucugcuucuuuaugcaaauugccauccucaucaccacagucacccugcacuucaaacaguacgaguuuaacagcccuccgaauaaccagguuaugcuuugugaacccacaauuaucgagagaaauauuaccgaaaucguguaucugacaaacaccacgauugagaaggaaaucugcccuaaacucgcugaguaccggaauugguccaagccccagugugacauuaccggguucgccccuuuuucuaaagauaacagcauccgccuguccgcgggaggcgacaucugggugacaagagagcccuaugucucuugcgauccugaccggcgcuaccaauucgcucuugggcagggaaccacacugaauaacgugcauagcgauaauaccguuagagaccggacgccguaucgcacacuccugaugaacgaacugggcgugcccuuucaccucgggaccaagcaggucuguauugccugguccucuagcuccugccaugauggaaaggccuggcugcacguguguaucacaggcgacgauaaaaaugcuaccgccagcuucauuuacaacggcagacuuguugacucuguggucuccuggagcaaggagauccugcggacccaggaaucugagugcguguguauuaaugggacaugcacgguggucaugaccgauggauccgcuagcggcaaagccgacacaaagauccucuuuaucgaggaagggaaaauuguucauaccuccacacugucuggaaacgcgcaacacguggaggaauguagcugcuauccucgcuaccccggcgugagaugcgucugucgggauaacuggaagggguccaaucgcccuaucguggacauuaacaucaaggaccacagcauuguuucuuccuacgugugcagcggacuugucggcgauacccccagaaagaaugacucuagcuccucuagccauugucuggauccgaacaaugaggaaggcgggcacggagugaaaggcugggccuucgacgaugggaacgacguuuggaugggacggacgaucuccgagaaaagccgccucggcuaugagacauuuaaggugaucgaaggguggucuaauccuaaauccaagcugcagauuaacagacaggucaucguggaucggggaaauagaagcggcuacucuggcauuuucuccgucgaggggaaaagcugcaucaaccgcuguuuuuauguggaacugauucggggaagaaaggaggaaaccgagguucucuggaccuccaauucuaucguggucuucugcggcacaagcgggaccuacggaacaggcuccuggcccgacggggcugauauuaaccugaugccuaucuga

SEQ ID NO: 211228 - RNA, 1410 nt, Artificial Sequence
  derived and/or modified CDS sequence (opt5) from neuraminidase__InfluenzaA__ADK87337
augaaccccaaucagaagaucauuaccaucggcagcgugucccugacaauuucuacgaucugcuucuuuaugcaaauugccauccucaucaccacagucacccugcacuucaaacaguacgaguuuaacagcccuccgaauaaccagguuaugcuuugugaacccacaauuaucgagagaaauauuaccgaaaucguguaucugacaaacaccacgauugagaaggaaaucugcccuaaacucgcugaguaccggaauugguccaagccccagugugacauuaccggguucgccccuuuuucuaaagauaacagcauccgccuguccgcgggaggcgacaucugggugacaagagagcccuaugucucuugcgauccugacaaguguuaccaauucgcucuugggcagggaaccacacugaauaacgugcauagcaauaacgccguucgggaucgcaccccguauagaacgcuccugaugaaugaacugggcgugcccuuucaccucgggacaaagcaggucugcauugccugguccagcagcuccugucaugacggaaaggcuuggcugcacgugugcaucaccggcgaugacaagaacgccacagcuagcuucauuuacaauggccggcuuguugauucuguggucuccuggagcaaagagauccugcgcacccaggaaucugagugugugugcauuaacgggaccuguacaguggucaugacggacggauccgccagcggcaaggcggauaccaaaauccucuuuaucgaggaagggaagauuguucauacauccacccugucuggaaacgcccaacacguggaggaaugcagcugcuauccuagauaccccggcgugcggugugucugccgcgacaauuggaagggguccaacagaccuaucguggauauuaauaucaaagaccacagcauuguuucuuccuacguguguagcggacuugucggcgacacaccccggaagaacgauucuagcuccucuagccauugccuggacccgaauaacgaggaaggcgggcacggagugaaaggcugggcuuucgaugacgggaaugauguuuggaugggacgcaccaucuccgagaagucuagacucggcuaugagacguuuaaagugaucgaaggguggucuaacccuaaguccaaacugcagauuaaucggcaggucaucguggaccgcggaaacagaagcggcuacucuggcauuuucuccgucgaggggaaaagcuguaucaaucggugcuuuuauguggaacugauuagaggacgcaaggaggaaacagagguucucuggaccuccaacucuaucguggucuucuguggcaccagcgggacauacggaaccggcuccuggcccgauggggccgacauuaaucugaugccuaucuga

SEQ ID NO: 211229 - RNA, 1410 nt, Artificial Sequence
  derived and/or modified CDS sequence (opt5) from neuraminidase__InfluenzaA__ADK87339
augaaccccaaucagaagaucauuaccaucggcagcauuugcaugacaaucgggauggccaaccugauucuccaaaucggaaauaucauuuccaucuggauuucucacagcauccagcugggcaaccagaaucagauugagacguguaaccaauccgugaucaccuacgaaaauaacacaugggucaaucagaccuauguuaacauuucuaauacaaacuucgcugccgggcagagcgugguguccgucaaacuugcgggaaauucuagccugugcccuguguccggcugggcuaucuacagcaaggacaacucuaucagaauuggguccaaaggagauguuuuugugauccgggagccguucauuagcuguucuccccucgaaugccgcaccuuuuuccugacacagggcgcccuucugaaugacaagcauuccaacggcaccaucaaagauagaagcccuuaucggacgcucaugucuugucccauuggggaggucccuucccccuacaacagccgcuuugaauccguggccuggucugcuagcgccugccacgacggaaucaauuggcugaccaucggcauuuccgggccugauaacggagcuguugccgugcugaaguauaauggcaucauuacagacaccaucaagagcuggagaaacaauauucuccggacacaagagucugagugugcgugcgucaacggguccuguuucaccgugaugacggauggaccgagcgacggccaggccucuuacaaaaucuuucgcaucgaaaagggcaaaauugucaagagcguggagaugaaugcucccaacuaucauuacgaagagugcuccuguuacccugauucuagcgagaucacaugcguuugcagagacaauuggcacggguccaaccggcccugggugagcuucaaucagaaccuggaauaucagauuggauacaucuguucuggcauuuuuggggauaauccucgccccaacgacaaaaccggauccugcggcccggugagcucuaauggggccaacggagucaagggcuucuccuuuaaguauggcaacgggguguggaucggaagaacaaaaagcauuuccucucggaauggcuucgagaugaucugggauccuaacggguggaccggaaccgacaauaacuuuagcaucaagcaagacauuguuggcaucaaugaaugguccggguacucuggcagcuucgugcagcaucccgagcuuacaggacuggauuguauucgcccuugcuucugggucgaacucaucagaggccggcccaaagagaacacgauuuggaccuccgggagcucuaucuccuuuuguggagugaauagcgacacaguuggcuggucuuggcccgauggggcugagcugccuuucaccaucgacaaguga

SEQ ID NO: 211230 - RNA, 1410 nt, Artificial Sequence; identical to SEQ ID NO: 208810
  derived and/or modified CDS sequence (opt5) from neuraminidase__InfluenzaA__ADK90209

SEQ ID NO: 211231 - RNA, 1410 nt, Artificial Sequence; identical to SEQ ID NO: 208810
  derived and/or modified CDS sequence (opt5) from neuraminidase__InfluenzaA__ADK90213

SEQ ID NO: 211232 - RNA, 1410 nt, Artificial Sequence; identical to SEQ ID NO: 208810
  derived and/or modified CDS sequence (opt5) from neuraminidase__InfluenzaA__ADK90217

SEQ ID NO: 211233 - RNA, 1410 nt, Artificial Sequence; identical to SEQ ID NO: 210789
  derived and/or modified CDS sequence (opt5) from neuraminidase__InfluenzaA__ADK90221

SEQ ID NO: 211234 - RNA, 1410 nt, Artificial Sequence; identical to SEQ ID NO: 210789
  derived and/or modified CDS sequence (opt5) from neuraminidase__InfluenzaA__ADK90225

SEQ ID NO: 211235 - RNA, 1410 nt, Artificial Sequence; identical to SEQ ID NO: 208810
  derived and/or modified CDS sequence (opt5) from neuraminidase__InfluenzaA__ADK90229

SEQ ID NO: 211236 - RNA, 1410 nt, Artificial Sequence; identical to SEQ ID NO: 208810
  derived and/or modified CDS sequence (opt5) from neuraminidase__InfluenzaA__ADK90233

SEQ ID NO: 211237 - RNA, 1410 nt, Artificial Sequence
  derived and/or modified CDS sequence (opt5) from neuraminidase__InfluenzaA__ADK90241
augaaccccaaucagaagaucauuaccaucggcagcgugugcaugacaauugggauggccaaccugauccuccaaauuggaaauaucaucuccauuuggaucucucacagcauucagcugggcaaccagaaucagaucgagacguguaaccaauccgucauuaccuacgaaaauaacacauggguuaaucagaccuaugugaacaucucuaaugcuaacuucgccgcggggcagagcguggucuccgugaaacuugcuggaaauucuagccugugcccuguuuccggcugggccauuuacagcaaggacaacucuaucagaaucggguccaaaggagauguguuugucauucgggagccguucaucagcuguucuccccucgaaugccgcacauuuuuccugacccagggcgcccuucugaaugacaagcauuccaacggcacaauuaaagauagaagcccucaccggacccucaugucuugucccaucggggaggugccuucccccuauaacagccgcuuugaauccguugcuuggucugccagcgcuugccaugacggaauuaauuggcugacgaucggcaucuccgggccugauaacggagccguggcgguccugaaguacaauggcauuaucaccgacacaauuaagagcuggagaaacaauauccuccggacccaagagucugagugugccugcgugaacggguccuguuucacagugaugaccgauggaccgagcgacggccaggcuucuuauaaaauuuuucgcaucgaaaagggcaaaaucgucaagagcguugagaugaaugcccccaacuaccacuaugaagagugcuccuguuacccugauucuagcgagauuacgugcgugugcagagacaauuggcauggguccaaccggcccugggugagcuucaaucagaaccuggaauaccagaucggauauauuuguucuggcaucuuuggggauaauccucgccccaacgacaaaacaggauccugcggcccggucagcucuaauggggcuaacggagugaagggcuucuccuuuaaguacggcaacgggguuuggauuggaagaaccaaaagcaucuccucucggaauggcuucgagaugauuugggauccuaacggguggacaggaaccgacaauaacuuuagcaucaagcaagacaucgugggcauuaaugaaugguccggguauucuggcagcuucguccagcaccccgagcuuaccggacuggauuguauccgcccuugcuucuggguggaacucauuagaggccggcccaaagagaacacaaucuggacguccgggagcucuauuuccuuuuguggaguuaauagcgacaccgugggcuggucuuggcccgauggggccgagcugccuuucacaaucgacaaguga

SEQ ID NO: 211238 - RNA, 1410 nt, Artificial Sequence; identical to SEQ ID NO: 210789
  derived and/or modified CDS sequence (opt5) from neuraminidase__InfluenzaA__ADK90245

SEQ ID NO: 211239 - RNA, 1410 nt, Artificial Sequence
  derived and/or modified CDS sequence (opt5) from neuraminidase__InfluenzaA__ADK90249
augaaccccaaucagaagaucauuaccaucggcagcgugugcaugacaauugggauggccaaccugauccuccaaauuggaaauaucaucuccauuuggaucucucacagcauucagcugggcaaccagaaucagaucgagacguguaaccaauccgucauuaccuacgaaaauaacacauggguuaaucagaccuaugugaacaucucuaauacaaacuucgcugccgggcagagcguggucuccgugaaacuugcgggaaauucuagccugugcccuguuuccggcugggcuauuuacagcaaggacaacucuaucagaaucggguccaaaggagauguguuugucauucgggagccguucaucagcuguucuccccucgaaugccgcaccuuuuuccugacacagggcgcccuucugaaugacaagcauuccaacggcaccauuaaagauagaagcccuuaucggacgcucaugucuugucccaucggggaggugccuucccccuacaacagccgcuuugaauccguugccuggucugcuagcgccugccacgacggaauuaauuggcugaccaucggcaucuccgggccugauaacggagcuguggccguccugaaguauaauggcauuaucacagacaccauuaagagcuggagaaacaauauccuccggacacaagagucugagugugcgugcgugaacggguccuguuucaccgugaugacggauggaccgagcgacggccaggccucuuacaaaauuuuucgcaucgaaaagggcaaaaucgucaagagcguugagaugaaugcucccaacuaucauuacgaagagugcuccuguuacccugauucuagcgagauuacaugcgugugcagagacaauuggcacggguccaaccggcccugggugagcuucaaucagaaccuggaauaucagaucggauacauuuguucuggcaucuuuggggauaauccucgccccaacgacaaaaccggauccugcggcccggucagcucuaauggggccaacggagugaagggcuucuccuuuaaguauggcaacgggguuuggauuggaagaacaaaaagcaucuccucucggaauggcuucgagaugauuugggauccuaacggguggaccggaaccgacaauaacuuuagcaugaagcaagacaucgugggcaucaaugaaugguccggguacucuggcagcuucguccagcaucccgagcuuacaggacuggauuguauucgcccuugcuucuggguggaacucaucagaggccggcccaaagagaacacgauuuggaccuccgggagcucuaucuccuuuuguggaguuaauagcgacacagugggcuggucuuggcccgauggggcugagcugccuuucaccauugacaaguga

SEQ ID NO: 211240 - RNA, 1410 nt, Artificial Sequence; identical to SEQ ID NO: 211239
  derived and/or modified CDS sequence (opt5) from neuraminidase__InfluenzaA__ADK90253

SEQ ID NO: 211241 - RNA, 1410 nt, Artificial Sequence
  derived and/or modified CDS sequence (opt5) from neuraminidase__InfluenzaA__ADK90257
augaaccccaaucagaagaucauuaucauuggcagcgugugcaugaccaucgggauggccaaccugauucuccaaaucggaaauaucauuuccaucuggauuucucacagcauccagcugggcaaccagaaucagauugagacauguaaccaauccgucaucacguacgaaaauaacaccuggguuaaucagacauaugugaacauuucuaauaccaacuucgcugccgggcagagcguggucuccgugaaacuugcgggaaauucuagccugugcccuguuuccggcugggcuaucuacagcaaggacaacucuaucagaauuggguccaaaggagauguguuugucauccgggagccguucauuagcuguucuccccucgaaugccgcacauuuuuccugacccagggcgcccuucugaaugacaagcauuccaacggcacaaucaaagauagaagcccucaccggacccucaugucuugucccauuggggaggugccuucccccuauaacagccgcuuugaauccguugccuggucugcuagcgccugccaugacggaaucaauuggcugacgaucggcauuuccgggccugauaacggagcuguggccguccugaaguacaauggcaucauuaccgacacaaucaagagcuggagaaacaauauucuccggacccaagagucugagugugcgugcgugaacggguccuguuucacagugaugaccgauggaccgagcgacggccaggccucuuauaaaaucuuucgcaucgaaaagggcaaaauugucaagagcguugagaugaaugcucccaacuaccacuaugaagagugcuccuguuacccugauucuagcgagaucacgugcgugugcagagacaauuggcauggguccaaccggcccugggugagcuucaaucagaaccuggaauaccagauuggauauaucuguucuggcauuuuuggggauaauccucgccccaacgacaaaacaggauccugcggcccggucagcucuaauggggccaacggagugaagggcuucuccuuuaaguacggcaacgggguuuggaucggaagaaccaaaagcauuuccucucggaauggcuucgagaugaucugggauccuaacggguggacaggaaccgacaauaacuuuagcaucaagcaagacauugugggcaucaaugaaugguccggguauucuggcagcuucguccagcaccccgagcuuaccggacuggauuguauucgcccuugcuucuggguggaacucaucagaggccggcccaaagagaacacaauuuggacguccgggagcucuaucuccuuuuguggaguuaauagcgacaccgugggcuggucuuggcccgauggggcugagcugccuuucacaaucgacaaguga

SEQ ID NO: 211242 - RNA, 1410 nt, Artificial Sequence; identical to SEQ ID NO: 209164
  derived and/or modified CDS sequence (opt5) from neuraminidase__InfluenzaA__ADK90261

SEQ ID NO: 211243 - RNA, 1410 nt, Artificial Sequence
  derived and/or modified CDS sequence (opt5) from neuraminidase__InfluenzaA__ADK90265
augaaccccaaucagaagaucauuaccaucggcagcgugugcaugacaauugggauggccaaccugauccuccaaauuggaaauaucaucuccauuuggaucucucacagcauucagcugggcaaccagaaucagaucgagacguguaaccaauccgucauuaccuacgaaaauaacacauggguuaaucagaccuaugugaacaucucuaauacaaacuucgcugccgggcagagcguggucuccgugaaacuugcgggaaauucuagccugugcccuguuuccggcugggcuauuuacagcaaggacaacucuaucagaaucggguccaaaggagauguguuugucauucgggagccguucaucagcuguucuccccucgaaugccgcaccuuuuuccugacacagggcgcccuucugaaugacaagcauuccaacggcaccauuaaagauagaagcccuuaucggacgcucaugucuugucccaucggggaggugccuucccccuacaacagccgcuuugaauccguugccuggucugcuagcgccugccacgacggaauuaauuggcugaccaucggcaucuccgggccugauaacggagcuguggccguccugaaguauaauggcauuaucacagacaccauuaagagcuggagaaacaauauccuccggacacaagagucugagugugcgugcgugaacggguccuguuucaccgugaugacggauggaccgagcgacggccaggccucuuacaaaauuuuucgcaucgaaaagggcaaaaucgucaagagcguugagaugaaugcucccaacuaucauuacgaagagugcuccuguuacccugauucuagcgagauuacaugcgugugcagagacaauuggcacggguccaaccggcccugggugagcuucaaucagaaccuggaauaucagaugggauacaucuguucuggcauuuuuggggauaauccucgccccaacgacaaaaccggauccugcggcccggucagcucuaauggggccaacggagugaagggcuucuccuuuaaguauggcaacgggguuuggaucggaagaacaaaaagcauuuccucucggaauggcuucgagaugaucugggauccuaacggguggaccggaaccgacaauaacuuuagcauuaagcaagacaucgugggcaucaaugaaugguccggguacucuggcagcuucguccagcaucccgagcuuacaggacuggauuguauucgcccuugcuucuggguggaacucaucagaggccggcccaaagagaacacgauuuggaccuccgggagcucuaucuccuuuuguggaguuaauagcgacacagugggcuggucuuggcccgauggggcugagcugccuuucaccauugacaaguga

SEQ ID NO: 211244 - RNA, 1410 nt, Artificial Sequence
  derived and/or modified CDS sequence (opt5) from neuraminidase__InfluenzaA__ADK90269
augaaccccaaucagaagaucauuaccaucggcagcgugugcaugacaauugggauggccaaccugauccuccaaauuggaaauaucaucuccauuuggaucucucacagcauucagcugggcaaccagaaucagaucgagaaauguaaccaauccgucauuacguacgaaaauaacaccuggguuaaucagacauaugugaacaucucuaauaccaacuucgcugccgggcagagcguggucuccgugaaacuugcgggaaauucuagccugugcccuguuuccggcugggcuauuuacagcaaggacaacucuaucagaaucggguccaagggagauguguuugucauucgggagccguucaucagcuguucuccccucgaaugccgcacauuuuuccugacccagggcgcccuucugaaugacaaacauuccaacggcacaauuaaggauagaagcccuuaucggacccucaugucuugucccaucggggaggugccuucccccuacaacagccgcuuugaauccguugccuggucugcuagcgccugccacgacggaauuaauuggcugacgaucggcaucuccgggccugauaacggagcuguggccguccugaaguauaauggcauuaucaccgacacaauuaaaagcuggagaaacaauauccuccggacccaagagucugagugugcgugcgugaacggguccuguuucacagugaugaccgauggaccgagcgacggccaggccucuuacaagauuuuucgcaucgaaaaaggcaagaucgucaaaagcauugagaugaaugcucccaacuaucauuacgaagagugcuccuguuacccugauucuagcgagaucacgugcguuugcagagacaauuggcacggguccaaccggcccugggugagcuucaaucagaaccuggaauaucagauuggauacaucuguucuggcauuuuuggggauaauccucgccccaacgacaagacaggauccugcggcccggugagcucuaauggggccaacggagucaagggcuucuccuuuaaauauggcaacgggguguggaucggaagaaccaagagcauuuccucucggaauggcuucgagaugaucugggauccuaacggguggacaggaaccgacaauaacuuuagcaucaaacaagacauuguuggcaucaaugaaugguccggguacucuggcagcuucgugcagcaucccgagcuuaccggacuggauuguauucgcccuugcuucugggucgaacucaucagaggccggcccaaggagaacacaauuuggacguccgggagcaucaucucuuuuuguggaguuaauuccgacaccgugggcuggagcuggcccgauggggcugagcugccuuucacaauugacaaauga

SEQ ID NO: 211245 - RNA, 1410 nt, Artificial Sequence; identical to SEQ ID NO: 208810
  derived and/or modified CDS sequence (opt5) from neuraminidase__InfluenzaA__ADK90273

SEQ ID NO: 211246 - RNA, 1410 nt, Artificial Sequence; identical to SEQ ID NO: 208810
  derived and/or modified CDS sequence (opt5) from neuraminidase__InfluenzaA__ADK90277

SEQ ID NO: 211247 - RNA, 1410 nt, Artificial Sequence; identical to SEQ ID NO: 208810
  derived and/or modified CDS sequence (opt5) from neuraminidase__InfluenzaA__ADK90281

SEQ ID NO: 211248 - RNA, 1410 nt, Artificial Sequence
  derived and/or modified CDS sequence (opt5) from neuraminidase__InfluenzaA__ADK90289
augaaccccaaucagaagaucauuaccaucggcagcgugugcaugacaauugggauggccaaccugauccuccaaauuggaaauaucaucuccauuuggaucucucacagcauucagcugggcaaccagaaucuuaucgagacguguaaccaguccgucauuaccuacgaaaauaacacauggguuaaucaaaccuaugugaacaucucuaauacaaacuucgcugccgggcagagcguggucuccgugaaacuggcgggaaauucuagccucugcccuguuuccggcugggcuauuuacagcaaggacaacucuaucagaaucggguccaaaggagauguguuugucauucgggagccguucaucagcuguucuccccuggaaugccgcaccuuuuuccuuacacagggcgcccugcucaaugacaagcauuccaacggcaccauuaaagauagaagcccuuaucggacgcugaugucuugucccaucggggaggugccuucccccuacaacagccgcuuugaauccguugccuggucugcuagcgccugccacgacggaauuaauuggcugaccaucggcaucuccgggccugauaacggagcuguggccguccucaaguauaauggcauuaucacagacaccauuaagagcuggagaaacaauauccugcggacacaggagucugagugugcgugcgugaacggguccuguuucaccgugaugacggauggaccgagcgacggccaagccucuuacaaaauuuuucgcaucgaaaagggcaaaaucgucaagagcguugagaugaaugcucccaacuaucauuacgaagagugcuccuguuacccugauucuagcgagauuacaugcgugugcagagacaauuggcacggguccaaccggcccugggugagcuucaaucagaaccuugaauaucagaucggauacauuuguucuggcaucuuuggggauaauccucgccccaacgacaaaaccggauccugcggcccggucagcucuaauggggccaacggagugaagggcuucuccuuuaaguauggcaacgggguuuggauuggaagaacaaaaagcaucuccucucggaauggcuucgagaugauuugggauccuaacggguggaccggaaccgacaauaacuuuagcaucaagcaggacaucgugggcauuaaugaaugguccggguacucuggcagcuucguccaacaucccgagcugacaggacucgauuguauccgcccuugcuucuggguggaacugauuagaggccggcccaaagagaacacgaucuggaccuccgggagcucuauuuccuuuuguggaguuaauagcgacacagugggcuggucuuggcccgauggggcugagcuuccuuucaccaucgacaaguga

SEQ ID NO: 211249 - RNA, 1410 nt, Artificial Sequence; identical to SEQ ID NO: 210789
  derived and/or modified CDS sequence (opt5) from neuraminidase__InfluenzaA__ADK90293

SEQ ID NO: 211250 - RNA, 1410 nt, Artificial Sequence; identical to SEQ ID NO: 210701
  derived and/or modified CDS sequence (opt5) from neuraminidase__InfluenzaA__ADK90297

SEQ ID NO: 211251 - RNA, 1410 nt, Artificial Sequence; identical to SEQ ID NO: 208810
  derived and/or modified CDS sequence (opt5) from neuraminidase__InfluenzaA__ADK90301

SEQ ID NO: 211252 - RNA, 1410 nt, Artificial Sequence; identical to SEQ ID NO: 210701
  derived and/or modified CDS sequence (opt5) from neuraminidase__InfluenzaA__ADK90305

SEQ ID NO: 211253 - RNA, 1410 nt, Artificial Sequence; identical to SEQ ID NO: 208810
  derived and/or modified CDS sequence (opt5) from neuraminidase__InfluenzaA__ADK90309

SEQ ID NO: 211254 - RNA, 1410 nt, Artificial Sequence
  derived and/or modified CDS sequence (opt5) from neuraminidase__InfluenzaA__ADK90313
augaaccccaaucacaagaucauuaccaucggcagcgugugcaugacaauugggauggccaaccugauccuccagauuggaaauaucaucuccauuuggaucucucauagcauucaacugggcaaccagaaucagaucgagacguguaaccaguccgucauuaccuacgaaaauaacacauggguuaaucaaaccuaugugaacaucucuaauacaaacuucgcugccgggcagagcguggucuccgugaaacuugcgggaaauucuagccugugcccuguuuccggcugggcuauuuacagcaaggacaacucuaucagaaucggguccaaaggagauguguuugucauucgggagccguucaucagcuguucuccccucgaaugccgcaccuuuuuccugacacagggcgcccuucugaaugacaagcacuccaacggcaccauuaaagauagaagcccucaucggacgcucaugucuugucccaucggggaggugccuucccccuauaacagccgcuuugaauccguugccuggucugcuagcgccugccacgacggaauuaauuggcugaccaucggcaucuccgggccugauaacggagcuguggccguccugaaguacaauggcauuaucacagacaccauuaagagcuggagaaacaauauccuccggacacaggagucugagugugcgugcgugaacggguccuguuucaccgugaugacggauggaccgagcgacggccaagccucuuauaaaauuuuucgcaucgaaaagggcaaaaucgucaagagcguugagaugaaugcucccaacuaccauuaugaagagugcuccuguuacccugauucuagcgagauuacaugcgugugcagagacaauuggcacggguccaaccggcccugggugagcuucaaucagaaccuggaauaccagaucggauauauuuguucuggcaucuuuggggauaauccucgccccaacgacaaaaccggauccugcggcccggucagcucuaauggggccaacggagugaagggcuucuccuuuaaguacggcaacgggguuuggauuggaagaacaaaaagcaucuccucucggaauggcuucgagaugauuugggauccuaacggguggaccggaaccgacaauaacuuuagcaucaagcaggacaucgugggcauuaaugaaugguccggguauucuggcagcuucguccaacaccccgagcuuacaggacuggauuguauccgcccuugcuucuggguggaacucauuagaggccggcccaaagagaacacgaucuggaccuccgggagcucuauuuccuuuuguggaguuaauagcgacacagugggcuggucuuggcccgauggggcugagcugccuuucaccaucgacaaguga

SEQ ID NO: 211255 - RNA, 1410 nt, Artificial Sequence; identical to SEQ ID NO: 208810
  derived and/or modified CDS sequence (opt5) from neuraminidase__InfluenzaA__ADK90317

SEQ ID NO: 211256 - RNA, 1410 nt, Artificial Sequence; identical to SEQ ID NO: 210789
  derived and/or modified CDS sequence (opt5) from neuraminidase__InfluenzaA__ADK90321

SEQ ID NO: 211257 - RNA, 1410 nt, Artificial Sequence; identical to SEQ ID NO: 208810
  derived and/or modified CDS sequence (opt5) from neuraminidase__InfluenzaA__ADK90325

SEQ ID NO: 211258 - RNA, 1410 nt, Artificial Sequence
  derived and/or modified CDS sequence (opt5) from neuraminidase__InfluenzaA__ADK90329
augaaccccaaucagaagaucauuaccaucggcagcgugugcaugacaauugggauggccaaccugauccuccaaauuggaaauaucaucuccauuuggaucucucacagcauucagcugggcaaccagaaucagaucgagacguguaacagauccgucauuaccuacgaaaauaacacauggguuaaucaaaccuaugugaacaucucuaauacaaacuucgcugccgggcagagcguggucuccgugaaacuugcgggaaauucuagccugugcccuguuuccggcugggcuauuuacagcaaggacaacucuauccggaucggguccaaaggagauguguuugucauucgcgagccguucaucagcuguucuccccucgaaugcagaaccuuuuuccugacacagggcgcccuucugaaugacaagcauuccaacggcaccauuaaagaucggagcccuuaucgcacgcucaugucuugucccaucggggaggugccuucccccuacaacagcagauuugaauccguugccuggucugcuagcgccugccacgacggaauuaauuggcugaccaucggcaucuccgggccugauaacgaggcuguggccguccugaaguauaauggaauuaucacagacaccauuaagagcuggcggaacaauauccuccgcacacaggagucugaaugugcgugcgugaacggcuccuguuucaccgugaugacggaugggccgagcgacggacaagccucuuacaaaauuuuuagaaucgagaagggcaaaaucgucaagagcguugaaaugaaugcucccaacuaucauuacgaggagugcuccuguuacccugauucuagcgaaauuacaugcgugugccgggacaauuggcacggcuccaaccgccccugggugagcuucaaucagaaccuggaguaucagaucggguacauuuguucuggaaucuuuggcgauaauccuagacccaacgacaaaaccggguccugcggaccggucagcucuaauggcgccaacggggugaagggauucuccuuuaaguauggcaacggcguuuggauugggcggacaaaaagcaucuccucucgcaauggauucgaaaugauuugggauccuaacggcuggaccgggaccgacaauaacuuuagcaucaagcaggacaucgugggaauuaaugagugguccggcuacucugggagcuucguccaacaucccgaacuuacaggccuggauuguaucagaccuugcuucuggguggagcucauucggggacgccccaaagagaacacgaucuggaccuccggcagcucuauuuccuuuugugggguuaauagcgacacagugggauggucuuggcccgauggcgcugaacugccuuucaccaucgacaaguga

SEQ ID NO: 211259 - RNA, 1410 nt, Artificial Sequence
  derived and/or modified CDS sequence (opt5) from neuraminidase__InfluenzaA__ADK90333
augaaccccaaucagaagaucauuaccaucggcagcgugugcaugacaauugggauggccaaccugauccuccaaauuggaaauaucaucuccauuuggaucucucacagcauucagcugggcaacaaaaaucagaucgagacguguaaccaguccgucauuaccuacgaaaauaacacauggguuaaucaaaccuaugugaacaucucuaauacaaacuucgcugccgggcagagcguggucuccgugaaacuugcgggaaauucuagccugugcccuguuuccggcugggcuauuuacagcaaggacaacucuaucagaaucggguccaagggagauguguuugucauucgggagccguucaucagcuguucuccccucgaaugccgcaccuuuuuccugacacagggcgcccuucugaaugacaaacauuccaacggcaccauuaaggauagaagcccuuaucggacgcucaugucuugucccaucggggaggugccuucccccuacaacagccgcuuugaauccguugccuggucugcuagcgccugccacgacggaauuaauuggcugaccaucggcaucuccgggccugauaacggagcuguggccguccugaaguauaauggcauuaucacagacaccauuaaaagcuggagaaacaauauccuccggacacaggagucugagugugcgugcgugaacggguccuguuucaccgugaugacggauggaccgagcgacggccaagccucuuacaagauuuuucgcaucgaaaaaggcaagaucgucaaaagcguugagaugaaugcucccaacuaucauuacgaagagugcuccuguuacccugauucuagcgagauuacaugcgugugcagagacaauuggcacggguccaaccggcccugggugagcuucaaucagaaccuggaauaucagaucggauacauuuguucuggcaucuuuggggauaauccucgccccaacgacaagaccggauccugcggcccggucagcucuaauggggccaacggagugaagggcuucuccuuuaaauauggcaacgggguuuggauuggaagaacaaagagcaucuccucucggaauggcuucgagaugauuugggauccuaacggguggaccggaaccgacaauaacuuuagcaucaaacaggacaucgugggcauuaaugaaugguccggguacucuggcagcuucguccaacaucccgagcuuacaggacuggauuguauccgcccuugcuucuggguggaacucauuagaggccggcccaaggagaacacgaucuggaccuccgggagcucuauuuccuuuuguggaguuaauagcgacacagugggcuggucuuggcccgauggggcugagcugccuuucaccaucgacaaauga

SEQ ID NO: 211260 - RNA, 1410 nt, Artificial Sequence; identical to SEQ ID NO: 210789
  derived and/or modified CDS sequence (opt5) from neuraminidase__InfluenzaA__ADK90337

SEQ ID NO: 211261 - RNA, 1410 nt, Artificial Sequence; identical to SEQ ID NO: 209869
  derived and/or modified CDS sequence (opt5) from neuraminidase__InfluenzaA__ADK90341

SEQ ID NO: 211262 - RNA, 1410 nt, Artificial Sequence; identical to SEQ ID NO: 209869
  derived and/or modified CDS sequence (opt5) from neuraminidase__InfluenzaA__ADK90345

SEQ ID NO: 211263 - RNA, 1410 nt, Artificial Sequence; identical to SEQ ID NO: 209869
  derived and/or modified CDS sequence (opt5) from neuraminidase__InfluenzaA__ADK90349

SEQ ID NO: 211264 - RNA, 1410 nt, Artificial Sequence; identical to SEQ ID NO: 210789
  derived and/or modified CDS sequence (opt5) from neuraminidase__InfluenzaA__ADK90353

SEQ ID NO: 211265 - RNA, 1410 nt, Artificial Sequence; identical to SEQ ID NO: 208810
  derived and/or modified CDS sequence (opt5) from neuraminidase__InfluenzaA__ADK90357

SEQ ID NO: 211266 - RNA, 1410 nt, Artificial Sequence; identical to SEQ ID NO: 210789
  derived and/or modified CDS sequence (opt5) from neuraminidase__InfluenzaA__ADK90361

SEQ ID NO: 211267 - RNA, 1410 nt, Artificial Sequence; identical to SEQ ID NO: 209784
  derived and/or modified CDS sequence (opt5) from neuraminidase__InfluenzaA__ADK90365

SEQ ID NO: 211268 - RNA, 1410 nt, Artificial Sequence; identical to SEQ ID NO: 208810
  derived and/or modified CDS sequence (opt5) from neuraminidase__InfluenzaA__ADK90369

SEQ ID NO: 211269 - RNA, 1410 nt, Artificial Sequence; identical to SEQ ID NO: 208810
  derived and/or modified CDS sequence (opt5) from neuraminidase__InfluenzaA__ADK90373

SEQ ID NO: 211270 - RNA, 1410 nt, Artificial Sequence
  derived and/or modified CDS sequence (opt5) from neuraminidase__InfluenzaA__ADK90377
augaaccccaaucagaagaucauuaccaucggcagcgugugcaugacaauugggaugacgaaccugauccuccaaauuggaaauaucaucuccauuuggaucucucacagcauucagcugggcaaccagaaucagaucgagaccuguaaccaauccgucauuacauacgaaaauaacaccuggguuaaucagacauaugugaacaucucuaauaccaacuucgccgcugggcagagcguggucuccgugaaacuugccggaaauucuagccugugcccuguuuccggcugggcgauuuacagcaaggacaacucuaucagaaucggguccaaaggagauguguuugucauucgggagccguucaucagcuguucuccccucgaaugccgcacauuuuuccugacccagggcgcccuucugaaugacaagcauuccaacggcacgauuaaagauagaagcccucaccggacccucaugucuugucccaucggggaggugccuucccccuauaacagccgcuuugaauccguugcuuggucugccagcgcuugccaugacggaauuaauuggcugacaaucggcaucuccgggccugauaacggagccguggcuguccugaaguacaauggcauuaucaccgacacaauuaagagcuggagaaacaauauccuccggacccaagagucugagugugccugcgugaacggguccuguuucacggugaugacagauggaccgagcgacggccaggcgucuuauaaaauuuuucgcaucgaaaagggcaaaaucgucaagagcguugagauggaugcccccaauuaccacuaugaagagugcuccuguuacccugacucuagcgagauuaucugcgugugcagagauaacuggcauggguccaaucggcccugggugagcuucaaccagaaucuggaauaccagauuggauauaucuguucuggcauuuuuggggacaacccucgccccaaugauaaaaccggauccugcggcccggucagcucuaacggggcuaauggagugaagggcuucuccuuuaaguacggcaacgggguuuggaucggaagaacaaaaagcauuuccucucggaacggcuucgagaugaucugggacccuaauggguggaccggaaccgacaacaauuuuagcaucaagcaagauauugugggcaucaacgaaugguccggguauucuggcagcuucguccagcaccccgagcuuacaggacuggacuguauucgcccuugcuucuggguggaacucaucagaggccggcccaaagagaauacgauuuggaccuccgggagcucuaucuccuuuuguggaguuaacagcgauacagugggcuggucuuggcccgacggggccgagcugccuuucaccaucgauaaguga

SEQ ID NO: 211271 - RNA, 1410 nt, Artificial Sequence; identical to SEQ ID NO: 210789
  derived and/or modified CDS sequence (opt5) from neuraminidase__InfluenzaA__ADK90381

SEQ ID NO: 211272 - RNA, 1410 nt, Artificial Sequence
  derived and/or modified CDS sequence (opt5) from neuraminidase__InfluenzaA__ADK90385
augaaccccaaucagaagaucauuaccaucggcagcgugugcaugacaauugggauggccaaccugauccuccaaauuggaaauaucaucuccauuuggaucucucacagcauucagcugggcaaccagaaucagaucgagacguguaaccaauccgucauuaccuacgaaaauaacacauggguuaaucagaccuaugugaacaucucuaauacaaacuucgcugccgggcagagcguggucuccgugaaacuuucuggaaauagcucccugugcccuguuagcggcugggcgauuuacucuaaggacaacuccaucagaaucgggagcaaaggagauguguuugucauucgggagccguucaucucuuguagcccccucgaaugccgcaccuuuuuccugacacagggcgcccuucugaaugacaagcauuccaacggcaccauuaaagauagaucuccucaccggacgcucauguccugucccaucggggaggugccuagccccuauaacucccgcuuugaaucuguugcuuggagcgccuccgcuugccaugacggaauuaauuggcugaccaucggcaucagcgggccugauaacggagccguggcuguccugaaguacaauggcauuaucacagacaccauuaagucuuggagaaacaauauccuccggacacaagaguccgaguguaccugcgugaacgggagcuguuucacggugaugacagauggaccgucugacggccaggccagcuauaaaauuuuucgcaucgaaaagggcaaaaucgucaaguccguugagaugaaugcgcccaacuaccacuaugaagagugcucuuguuacccugauagcuccgagauuaccugcgugugcagagacaauuggcaugggagcaaccggcccugggugucuuucaaucagaaccuggaauaccagaucggauauauuuguuccggcaucuuuggggauaauccucgccccaacgacaaaacaggaagcugcggcccggucucuuccaauggggccaacggagugaagggcuucagcuuuaaguacggcaacgggguuuggauuggaagaaccaaauccaucucuagccggaauggcuucgagaugauuugggauccuaacggguggaccggaacagacaauaacuuuuccaucaagcaagacaucgugggcauuaaugaauggucuggguauagcggcuccuucguccagcaccccgagcuuacgggacuggauuguauccgcccuugcuucuggguggaacucauuagaggccggcccaaagagaacaccaucuggacaagcgggucuuccauuagcuuuuguggaguuaauucugacaccgugggcugguccuggcccgauggggcugagcugccuuucacaaucgacaaguga

SEQ ID NO: 211273 - RNA, 1410 nt, Artificial Sequence; identical to SEQ ID NO: 208810
  derived and/or modified CDS sequence (opt5) from neuraminidase__InfluenzaA__ADK90389

SEQ ID NO: 211274 - RNA, 1410 nt, Artificial Sequence; identical to SEQ ID NO: 210789
  derived and/or modified CDS sequence (opt5) from neuraminidase__InfluenzaA__ADK90393

SEQ ID NO: 211275 - RNA, 1410 nt, Artificial Sequence; identical to SEQ ID NO: 210701
  derived and/or modified CDS sequence (opt5) from neuraminidase__InfluenzaA__ADK90397

SEQ ID NO: 211276 - RNA, 1410 nt, Artificial Sequence; identical to SEQ ID NO: 208810
  derived and/or modified CDS sequence (opt5) from neuraminidase__InfluenzaA__ADK90401

SEQ ID NO: 211277 - RNA, 1410 nt, Artificial Sequence
  derived and/or modified CDS sequence (opt5) from neuraminidase__InfluenzaA__ADK90405
augaaccccaaucagaagaucauuaccaucggcagcgugugcaugacaauugggauggccaaccugauccuccaaauuggaaauaucaucuccauuuggaucucucacagcauucagcugggcaaccagaaucagaucgagacguguaaccaauccgucauuaccuacgaaaauaacacauggguuaaucagaccuaugugaacaucucuaauacaaacuucgcugccgggcagagcguggucuccgugaaacuugcgggaaauucuagccugugcccuguuuccggcugggcuauuuacagcaaggacaacucuaucagaaucggguccaaaggagauguguuugucauucgggagccguucaucagcuguucuccccucgaaugccgcaccuuuuuccugacacagggcgcccuucugaaugacaagcauuccaacggcaccauuaaagauagaagcccucaccggacgcucaugucuugucccaucggggaggugccuucccccuauaacagccgcuuugaauccguugccuggucugcuagcgccugccaugacggaauuaauuggcugaccaucggcaucuccgggccugauaacggagcuguggccguccugaaguacaauggcauuaucacagacaccauuaagagcuggagaaacaauauccuccggacacaagagucugaguguaccugcgugaacggguccuguuucacggugaugacagauggaccgagcgacggccaggcgucuuauaaaauuuuucgcaucgaaaagggcaaaaucgucaagagcguugagaugaaugcccccaacuaccacuaugaagagugcuccuguuacccugauucuagcgagauuaccugcgugugcagagacaauuggcauggguccaaccggcccugggugagcuucaaucagaaccuggaauaccagaucggauauauuuguucuggcaucuuuggggauaauccucgccccaacgacaaaacaggauccugcggcccggucagcucuaauggggcuaacggagugaagggcuucuccuuuaaguacggcaacgggguuuggauuggaagaaccaaaagcaucuccucucggaauggcuucgagaugauuugggauccuaacggguggaccggaacagacaauaacuuuagcaucaagcaagacaucgugggcauuaaugaaugguccggguauucuggcagcuucguccagcaccccgagcuuacgggacuggauuguauccgcccuugcuucuggguggaacucauuagaggccggcccaaagagaacaccaucuggacauccgggagcucuauuuccuuuuguggaguuaauagcgacaccgugggcuggucuuggcccgauggggccgagcugccuuucacaaucgacaaguga

SEQ ID NO: 211278 - RNA, 1410 nt, Artificial Sequence; identical to SEQ ID NO: 208810
  derived and/or modified CDS sequence (opt5) from neuraminidase__InfluenzaA__ADK90409

SEQ ID NO: 211279 - RNA, 1410 nt, Artificial Sequence
  derived and/or modified CDS sequence (opt5) from neuraminidase__InfluenzaA__ADK90413
augaaccccaaucagaagaucauuaccaucggcagcgugugcaugacaauugggauggccaaccugauccuccaaauuggaaauaucaucuccauuuggaucucucacagcauucagcugggcaaccagaaucagaucgagacguguaaccaauccgucauuaccuacgaaaauaacacauggguuaaucagaccuaugugaacaucucuaauacaaacuucgcugccgggcagagcguggucuccgugaaacuugcgggaaauucuagccugugcccuguuuccggcugggcuauuuacagcaaggacaacucuaucagaaucggguccaaaggagauguguuugucauucgggagccguucaucagcuguucuccccucgaaugccgcaccuuuuuccugacacagggcgcccuucugaaugacaagcauuccaacggcaccauuaaagauagaagcccucaccggacgcucaugucuugucccaucggggaggugccuucccccuauaacagccgcuuugaauccguugccuggucugcuagcgccugccaugacggaauuaauuggcugaccaucggcaucuccgggccugauaacggagcuauggccgugcugaaguacaauggcauuaucacagacaccauuaagagcuggagaaacaauauccuccggacacaagagucugagugugcgugcgucaacggguccuguuucaccgugaugacggauggaccgagcgacggccaggccucuuauaaaauuuuucgcaucgaaaagggcaaaaucgucaagagcguggagaugaaugcucccaacuaccacuaugaagagugcuccuguuacccugauucuagcgagauuacaugcguuugcagagacaauuggcauggguccaaccggcccugggugagcuucaaucagaaccuggaauaccagaucggauauauuuguucuggcaucuuuggggauaauccucgccccaacgacaaaaccggauccugcggcccggugagcucuaauggggccaacggagucaagggcuucuccuuuaaguacggcaacgggguguggauuggaagaacaaaaagcaucuccucucggaauggcuucgagaugauuugggauccuaacggguggaccggaaccgacaauaacuuuagcaucaagcaagacaucguuggcauuaaugaaugguccggguauucuggcagcuucgugcagcaccccgagcuuacaggacuggauuguauccgcccuugcuucugggucgaacucauuagaggccggcccaaagagaacacgaucuggaccuccgggagcucuauuuccuuuuguggagugaauagcgacacaguuggcuggucuuggcccgauggggcugagcugccuuucaccaucgacaaguga

SEQ ID NO: 211280 - RNA, 1410 nt, Artificial Sequence; identical to SEQ ID NO: 208810
  derived and/or modified CDS sequence (opt5) from neuraminidase__InfluenzaA__ADK90417

SEQ ID NO: 211281 - RNA, 1410 nt, Artificial Sequence; identical to SEQ ID NO: 208810
  derived and/or modified CDS sequence (opt5) from neuraminidase__InfluenzaA__ADK90421

SEQ ID NO: 211282 - RNA, 1410 nt, Artificial Sequence; identical to SEQ ID NO: 208810
  derived and/or modified CDS sequence (opt5) from neuraminidase__InfluenzaA__ADK90425

SEQ ID NO: 211283 - RNA, 1410 nt, Artificial Sequence; identical to SEQ ID NO: 208810
  derived and/or modified CDS sequence (opt5) from neuraminidase__InfluenzaA__ADK90429

SEQ ID NO: 211284 - RNA, 1410 nt, Artificial Sequence; identical to SEQ ID NO: 208671
  derived and/or modified CDS sequence (opt5) from neuraminidase__InfluenzaA__ADK94194

SEQ ID NO: 211285 - RNA, 1410 nt, Artificial Sequence; identical to SEQ ID NO: 208671
  derived and/or modified CDS sequence (opt5) from neuraminidase__InfluenzaA__ADK94205

SEQ ID NO: 211286 - RNA, 1410 nt, Artificial Sequence; identical to SEQ ID NO: 209977
  derived and/or modified CDS sequence (opt5) from neuraminidase__InfluenzaA__ADK94216

SEQ ID NO: 211287 - RNA, 1410 nt, Artificial Sequence; identical to SEQ ID NO: 208671
  derived and/or modified CDS sequence (opt5) from neuraminidase__InfluenzaA__ADK94227

SEQ ID NO: 211288 - RNA, 1410 nt, Artificial Sequence; identical to SEQ ID NO: 208671
  derived and/or modified CDS sequence (opt5) from neuraminidase__InfluenzaA__ADK94238

SEQ ID NO: 211289 - RNA, 1410 nt, Artificial Sequence; identical to SEQ ID NO: 211195
  derived and/or modified CDS sequence (opt5) from neuraminidase__InfluenzaA__ADK94260

SEQ ID NO: 211290 - RNA, 1410 nt, Artificial Sequence; identical to SEQ ID NO: 211195
  derived and/or modified CDS sequence (opt5) from neuraminidase__InfluenzaA__ADK94271

SEQ ID NO: 211291 - RNA, 1410 nt, Artificial Sequence; identical to SEQ ID NO: 208671
  derived and/or modified CDS sequence (opt5) from neuraminidase__InfluenzaA__ADK94293

SEQ ID NO: 211292 - RNA, 1410 nt, Artificial Sequence; identical to SEQ ID NO: 208671
  derived and/or modified CDS sequence (opt5) from neuraminidase__InfluenzaA__ADK94304

SEQ ID NO: 211293 - RNA, 1410 nt, Artificial Sequence
  derived and/or modified CDS sequence (opt5) from neuraminidase__InfluenzaA__ADK94326
augaaccccaaucagaagaucauuaccaucggcagcgugucccugacaauuucuacgaucugcuucuuuaugcaaauugccauccucaucaccacagucacccugcacuucaaacaguacgaguuuaacagcccuccgaauaaccagguuaugcuuugugaacccacaauuaucgagagaaauauuaccgaaaucguguaucugacaaacaccacgauugagaaggaaaucugcccuaaacucgcugaguaccggaauugguccaagccccagugugacauuaccggguucgccccuuuuucuaaagauaacagcauccgccuguccgcgggaggcgacaucugggugacaagagagcccuaugucucuugcgauccugacaaguguuaccaauucgcucuugggcagggaaccacacugaauaacauucauagcaauaacaccgugcgggaucgcacgccguauagaacacuccugaugaaugaacugggcguucccuuucaccucgggaccaaacaggugugcaucgccugguccucuagcuccugucaugacggaaaggccuggcugcacgucugcauuacaggcgaugacaagaacgcuaccgccagcuucaucuacaauggccggcuuguggauucuguuguguccuggagcaaagagauucugcgcacccaggaaucugagugugucugcaucaacgggacauguacgguggugaugaccgacggauccgcuagcggcaaggccgauacaaaaauccucuuuauugaggaagggaagaucguccauaccuccacacugucuggaagcgcgcaacacguugaggaaugcuccugcuauccuagauaccccggcgugcggugugugugccgcgacaacuggaaggggagcaauagaccuauugucgauaucaacauuaaagaccacucuaucguguccagcuacguuuguucuggacuugugggcgacacgccccggaagaaugauagcuccucuagcucccauugccuggacccgaacaaugaggaaggcgggcacggagucaaaggcugggccuucgaugacgggaacgauguguggaugggacgcaccaucagcgagaagucuagacucggcuaugagacauuuaaaguuauugaagggugguccaauccuaagagcaaacugcagaucaaccgccaggugauugucgaccggggaaauagaucuggcuacuccggcaucuucagcguggaggggaaguccuguauuaaccggugcuuuuaugucgaacugaucagaggacgcaaggaggaaaccgaggugcucuggaccucuaauagcauuguuguguucuguggcacauccgggaccuacggaacaggcucuuggcccgauggggcugacaucaaccugaugccuaucuga

SEQ ID NO: 211294 - RNA, 1410 nt, Artificial Sequence; identical to SEQ ID NO: 209977
  derived and/or modified CDS sequence (opt5) from neuraminidase__InfluenzaA__ADK94337

SEQ ID NO: 211295 - RNA, 1410 nt, Artificial Sequence; identical to SEQ ID NO: 208671
  derived and/or modified CDS sequence (opt5) from neuraminidase__InfluenzaA__ADK94444

SEQ ID NO: 211296 - RNA, 1410 nt, Artificial Sequence
  derived and/or modified CDS sequence (opt5) from neuraminidase__InfluenzaA__ADK94479
augaaccccaaucagaagaucauuaccaucggcagcgugucccugacaauuucuacgaucugcuuccucaugcaaauugccauccugaccacaaccgucacacuucacuuuaaacaguacgaguucaacagcccuccgaauaaccagguuaugcugugugaacccaccacaaucgagagaaauauuaccgaaaucguguaucucacgaacaccacaauugagaaggaaaucugcccuaaacuggcugaguaccggaauugguccaagccccagugugacauuaccggguuugccccuuucucuaaagauaacagcauccgccuuuccgcgggaggcgacauuugggugacaagagagcccuaugucucuugcgauccugacaaguguuaccaauuugcucuggggcagggaaccacgcucaauaacgugcauagcaauaacacaguucgggaucgcaccccguauagaacacugcugaugaaugaacucggcgugcccuuccaccuggggaccaagcaggucugcaucgccugguccucuagcuccugucaugacggaaaagccuggcuucacgugugcaucaccggcgaugacaagaacgcuacagccagcuuuauuuacaauggcaaacugguugauucuguggucuccuggagcaaggagauccuccggacgcaggaaucugagugugugugcauuaacgggaccuguacaguggucaugaccgacggauccgcuagcggcaaagccgauacaaagauccuguucauugaggaagggaagaucguucauaccuccacgcuuucuggaagcgcgcaacacguggaggaaugcuccugcuauccucgcuaccccggcgugagaugugucugccgggacaacuggaaagggagcaaucgcccuaucguggauauuaacaucaaggaccacucuauuguuuccagcuaccuguguucuggacucgugggcgacacaccccggaaaaaugauagcuccucuagcucccauugccuggacccgaacaaugaggaaggcgggcacggagucaagggcugggccuuugaugacgggaacgauguguggaugggaagaaccaucagcgagaaaucucgccugggcuaugagaccuucaagguuauugaagggugguccaauccuaaaagcaagcuccagaucaacagacaggugaucgucgaccggggaaaucgcucuggcuacuccggcauuuuuagcguggaggggaaguccuguaucaacagaugcuucuaugucgaacugauucggggaagaaaagaggaaacaggcgugcuuuggaccucuaauagcaucguuguguuuugugggacauccggaacguacggcaccgggucuuggcccgauggcgcugacauuaaccugaugccuaucuga

SEQ ID NO: 211297 - RNA, 1410 nt, Artificial Sequence; identical to SEQ ID NO: 208671
  derived and/or modified CDS sequence (opt5) from neuraminidase__InfluenzaA__ADK94490

SEQ ID NO: 211298 - RNA, 1410 nt, Artificial Sequence; identical to SEQ ID NO: 208671
  derived and/or modified CDS sequence (opt5) from neuraminidase__InfluenzaA__ADK94501

SEQ ID NO: 211299 - RNA, 1410 nt, Artificial Sequence
  derived and/or modified CDS sequence (opt5) from neuraminidase__InfluenzaA__ADK94512
augaaccccaaucagaagaucauuaccaucggcagcgugucccugacaauuucuacgaucugcuucuuuaugcaaauugccauccucaucaccacagucacccugcacuucaaacaguacgaguuuaacagcccuccgaauaaccagguuaugcuuugugaacccacaauuaucgagagaaauauuaccgaaaucguguaucugacaaacaccacgauugagaaggaaaucugcccuaaacucgcugaguaccggaauugguccaagccccagugugacauuaccggguucgccccuuuuucuaaagauaacagcauccgccuguccgcgggaggcgacaucugggugacaagagagcccuaugucucuugcgauccugacaaguguuaccaauucgcucuugggcagggaaccacacugaauaacgugcauagcaauaacaccguucgggaucgcacgccguauagaacacuccugaugaaugaacugggcgugcccuuucaccucgggaccaagcaggucugcauugccugguccucuagcuccugucaugacggaaaagccuggcugcacgugugcaucacaggcgaugacaagaacgcuaccgccagcuucauuuacaauggccggcuuguugauucuguggucuccuggagcaaagagauccugcgcacccaggaaucugagugugugugcauuaacgggacauguacgguggucaugaccgacggauccgcuagcggcaaggccgauacaaaaauccucuuuaucgaggaagggagaauuguucauaccuccacacugucuggaagcgcgcaacacguggaggaaugcuccugcuauccucgguaccccggcgugcgcugugucugcagagacaacuggaaggggagcaaucggccuaucguggauauuaacaucaaggaccacucuauuguuuccagcuacguguguucuggacuugucggcgacacgccccgcaaaaaugauagcuccucuagcucccauugccuggacccgaacaaugaggaaggcgggcacggagugaagggcugggccuucgaugacgggaacgauguuuggaugggaagaaccaucagcgagaaaucucggcucggcuaugagacauuuaaggugaucgaagggugguccaauccuaaaagcaagcugcagauuaaccgccaggucaucguggacagaggaaaucggucuggcuacuccggcauuuucagcgucgaggggaaauccuguaucaacagaugcuuuuauguggaacugauucgcggacggaaggaggaaaccgagguucucuggaccucuaauagcaucguggucuucuguggcacauccgggaccuacggaacaggcucuuggcccgauggggcugacauuaaccugaugccuaucuga

SEQ ID NO: 211300 - RNA, 1410 nt, Artificial Sequence; identical to SEQ ID NO: 208671
  derived and/or modified CDS sequence (opt5) from neuraminidase__InfluenzaA__ADK94534

SEQ ID NO: 211301 - RNA, 1410 nt, Artificial Sequence; identical to SEQ ID NO: 211195
  derived and/or modified CDS sequence (opt5) from neuraminidase__InfluenzaA__ADK94556

SEQ ID NO: 211302 - RNA, 1410 nt, Artificial Sequence; identical to SEQ ID NO: 208671
  derived and/or modified CDS sequence (opt5) from neuraminidase__InfluenzaA__ADK94567

SEQ ID NO: 211303 - RNA, 1410 nt, Artificial Sequence; identical to SEQ ID NO: 208671
  derived and/or modified CDS sequence (opt5) from neuraminidase__InfluenzaA__ADK94578

SEQ ID NO: 211304 - RNA, 1410 nt, Artificial Sequence; identical to SEQ ID NO: 208671
  derived and/or modified CDS sequence (opt5) from neuraminidase__InfluenzaA__ADK94589

SEQ ID NO: 211305 - RNA, 1410 nt, Artificial Sequence; identical to SEQ ID NO: 210361
  derived and/or modified CDS sequence (opt5) from neuraminidase__InfluenzaA__ADK98504

SEQ ID NO: 211306 - RNA, 1410 nt, Artificial Sequence
  derived and/or modified CDS sequence (opt5) from neuraminidase__InfluenzaA__ADK98506
augaaccccaaucagaagaucauuaccaucggcagcgugugcaugacaauugggauggccaaccugauccuccaaauuggaaauaucaucuccauuuggaucucucacagcauucagcugggcaaccagaaucagaucgagacguguaaccaaaaugucauuaccuacgaaaacaauacauggguuaaccagaccuaugugaauaucuccaacacaaauuucgcugccgggcagucuguggucagcgugaaacuugcgggaaacuccucucugugcccuguuagcggcugggcuauuuacuccaaggacaauagcaucagaaucgggucuaaaggagauguguuugucauucgggagccguucaucuccuguagcccccucgaaugccgcaccuuuuuccugacacagggcgcccuucugaacgacaagcauucuaacggcaccauuaaagauagauccccuuaucggacgcucaugagcugucccaucggggaggugccuucucccuacaauucccgcuuugaaagcguugccugguccgcuucugccugccacgacggaauuaacuggcugaccaucggcaucagcgggccugauaauggagcuguggccguccugaaguauaacggcauuaucacagacaccauuaaguccuggagaaauaacauccuccggacacaagagagcgagugugcgugcgugaaugggucuuguuucaccgugaugacggauggaccguccgacggccaggccagcuacaaaauuuuucgcaucgaaaagggcaaaaucgucaagucuguugagaugaacgcucccaauuaucauuacgaagagugcagcuguuacccugauuccucugagauuacaugcgugugcagagacaacuggcacgggagcaaucggcccuggguguccuucaaccagaaucuggaauaucagaucggauacauuuguagcggcaucuuuggggauaacccucgccccaaugacaaaaccggaucuugcggcccggucuccagcaacggggccaacggagugaagggcuucucuuuuaaguauggcaaugggguuuggauuggaagaacaaaauccaucagcucccggaacggcuucgagaugauuugggauccuaauggguggaccggaaccgacaacaauuuuucuaucaagcaagacaucgugggcauuaacgaauggagcggguacuccggcucuuucguccagcaucccgagcuuacaggacuggauuguauccgcccuugcuucuggguggaacucauuagaggccggcccaaagagaauacgaucuggaccagcggguccagcauuucuuuuuguggaguuaacuccgacacagugggcuggagcuggcccgauggggcugagcugccuuucaccaucgacaaguga

SEQ ID NO: 211307 - RNA, 1410 nt, Artificial Sequence
  derived and/or modified CDS sequence (opt5) from neuraminidase__InfluenzaA__ADK98626
augaaccccaaucagaagaucauuaccaucggcagcgugucccugacaauuucuacgaucugcuucuuuaugcaaauugccauccucaucaccacagucacccugcacuucaaacaguacgaguuuaacagcccuccgaauaaccagguuaugcuuugugaacccacaaugauugagagaaauaucaccgaaauuguguaucugacaaacaccacgaucgagaaggaaauuugcccuaaacucgcugaguaccggaauugguccaagccccagugugacaucaccggguucgccccuuuuucuaaagauaacagcauucgccuguccgcgggaggcgacaucugggugacaagagagcccuaugucucuugcgauccugacaaguguuaccaauucgcucuugggcagggaaccacacugaauaacgugcauagcaauaacaccguucgggaucgcacgccguauagaacacuccugaugaaugaacugggcgugcccuuucaccucgggaccaagcaggucugcaucgccugguccucuagcuccugucaugacggaaaagccuggcugcacgugugcauuacaggcgaugacaagaacgcuaccgccagcuucaucuacaauggccggcuuguugauucuguggucuccuggagcaaagagauucugcgcacccaggaaucugagugugugugcaucaacgggacauguacgguggucaugaccgacggauccgcuagcggcaaggccgauacaaaaauucucuuuaucgaggaagggaagaucguucauaccuccacacugucuggaagcgcgcaacacguggaggaaugcuccugcuauccuagauaccccggcgugcggugugucugccgcgacaacuggaaggggagcaauagaccuauuguggauaucaacauuaaagaccacucuaucguuuccagcuaccuuuguucuggacuggugggcgacacgccccggaagaaugauagcuccucuagcucccauugccucgacccgaacaaugaggaaggcgggcacggagucaaaggcugggccuucgaugacgggaacgauguguggaugggacgcaccauuagcgagaagucuagacugggcuaugagacauuuaaaguuaucgaagggugguccaauccuaagagcaaacugcagaucaaccgccaggugauugucgaccggggaaauagaucuggcuacuccggcaucuucagcguggaggggaaguccuguauuaaccggugcuuuuaugucgaacucaucagaggacgcaaggaggaaaccgaggugcuguggaccucuaauagcauuguuguguucuguggcacauccgggaccuacggaacaggcucuuggcccgauggggcugacaucaaccuuaugccuauuuga

SEQ ID NO: 211308 - RNA, 1410 nt, Artificial Sequence; identical to SEQ ID NO: 209977
  derived and/or modified CDS sequence (opt5) from neuraminidase__InfluenzaA__ADK98637

SEQ ID NO: 211309 - RNA, 1410 nt, Artificial Sequence
  derived and/or modified CDS sequence (opt5) from neuraminidase__InfluenzaA__ADK98648
augaaccccaaucagaagaucauuaccaucggcagcgugucccugacaauuucuacgaucugcuucuuuaugcaaauugccauccucgucaccacaguuacccugcacuucaaacaguacgaguuuaacagcccuccgaauaaccaggugaugcuuugugaacccacaaucauugagagaaauaucaccgaaauuguguaucugacaaacaccacgaucgagaaggaaauuugcccuaaacucgcugaguaccggaauugguccaagccccagugugacaucaccggguucgccccuuuuucuaaagauaacagcauucgccuguccgcgggaggcgacaucugggucacaagagagcccuaugugucuugcgauccugacaaguguuaccaauucgcucuugggcagggaaccacacugaauaacguucauagcaauaacaccgugcgggaucgcacgccguauagaacacuccugaugaaugaacugggcguccccuuucaccucgggaccaaacaggugugcaucgccugguccucuagcuccugucaugacggaaaggccuggcugcacguuugcauuacaggcgaugacaagaacgcuaccgccagcuucaucuacaauggccggcuuguggauucugucguguccuggagcaaagacauucugcgcacccaggagucugaaugugugugcaucaacgggacauguacggucguuaugaccgauggauccgcuagcggcaaggccgacacaaaaauucucuuuaucgaggaggggaagaucgugcauaccuccacacugucuggaagcgcgcaacacguggaagagugcuccugcuauccuagauaccccggcguccggugugugugccgcgauaacuggaaggggagcaauagaccuauuguugacaucaacauuaaagaccacucuaucguguccagcuacgucuguucuggacuugugggcgauacgccccggaagaaugacagcuccucuagcucccauugccuggauccgaacaaugaagagggcgggcgcggaguuaaaggcugggccuucgacgaugggaacgacguguggaugggaagaaccauuagcgaaaagucucggcucggcuaugagacauuuaaagucaucgaggggugguccaauccuaagagcaaacugcagaucaaccgccaggugauugucgauagaggaaaucggucuggcuacuccggcaucuucagcguggaagggaaguccuguauuaacagaugcuuuuauguugagcugauccgcggacggaaggaagagaccgaagugcucuggaccucuaauagcauugucguguucuguggcacauccgggaccuacggaacaggcucuuggcccgacggggcuaacaucaaucugaugccuauuuga

SEQ ID NO: 211310 - RNA, 1410 nt, Artificial Sequence
  derived and/or modified CDS sequence (opt5) from neuraminidase__InfluenzaA__ADK98659
augaaccccaaucagaagaucauuaccaucggcagcgugucccugacaauuucuacgaucugcuucuuuaugcaaauugccauccucaucaccacagucacccugcacuucaaacaguacgaguuuaacagcccuccgaauaaccagguuaugcuuugugaacccacaauuaucgagagaaauauuaccgaaaucguguaucugacaaacaccacgauugagaaggaaaucugcccuaaacucgcugaguaccggaauugguccaagccccagugugacauuaccggguucgccccuuuuucuaaagauaacagcauccgccuguccgcgggaggcgacaucugggugacaagagagcccuaugucucuugcgauccugacaaguguuaccaauucgcucuugggcagggaaccacacugaauaacgugcauagcaauaacaccguucgggaucgcacgccguauagaacacuccugaugaaugaacugggcgugcccuuucaccucgggaccaagcaggucugcauugccugguccagcagcuccugucaugacggaaaagccuggcugcacgugugcaucacaggcgaugacaagaacgcuaccgccagcuucauuuacaauggccggcuuguugauucuguggucuccuggagcaaagagauccugcgcacccaggaaucugagugugugugcauuaacgggacauguacgguggucaugaccgacggauccgcuagcggcaaggccgauacaaaaauccucuuuaucgaggaagggaagauuguucauaccuccacacugucuggaagcgcgcaacacguggaggaaugcuccugcuauccuagauaccccggcgugcggugugucugccgcgacaacuggaaggggagcaauagaccuaucguggauauuaacaucaaagaccacucuauuguuuccagcuacguguguucuggacuugucggcgacacgccccggaagaaugauagcuccucuagcggccauugccuggacccgaacaaugaggaagggggacacggcgugaaagggugggccuucgaugacggaaacgauguuuggaugggccgcaccaucuccgagaagucuagacucggguaugagacauuuaaagugaucgaaggauggucuaaucauaaguccaaacugcagauuaaccggcaggucaucguggaccgcggcaauagaagcggcuacucugggauuuucuccgucgagggaaagagcuguaucaaccggugcuuuuauguggaacugauuagaggccgcaaggaggaaaccgagguucucuggaccuccaauucuaucguggucuucugugggacaagcggaaccuacggcacaggguccuggccugauggcgcugaccugaaccuuaugcccauuuga

SEQ ID NO: 211311 - RNA, 1410 nt, Artificial Sequence; identical to SEQ ID NO: 211195
  derived and/or modified CDS sequence (opt5) from neuraminidase__InfluenzaA__ADK98670

SEQ ID NO: 211312 - RNA, 1410 nt, Artificial Sequence
  derived and/or modified CDS sequence (opt5) from neuraminidase__InfluenzaA__ADK98681
augaaccccaaucagaagaucauuaccaucggcagcgugucccugacaauuucuacgaucugcuucuuuaugcaaauugccauccucaucaccacagucacccugcacuucaaacaguacgaguuuaacagcccuccgaauaaccagguuaugcuuugugaacccacaauuaucgagagaaauauuaccgaaaucguguaucugacaaacaccacgauugagaaggaaaucugcccuaaacucgcugaguaccggaauugguccaagccccagugugacauuaccggguucgccccuuuuucuaaagauaacagcauccgccuguccgcgggaggcgacaucugggugacaagagagcccuaugucucuugcgauccugacaaguguuaccaauucgcucuugggcagggaaccacacugaauaacgugcauagcaauaacaccguucgggaucgcacgccguauagaacacuccugaugaaugaacugggcgugcccuuucaccucgggaccaagcaggucugcauugccugguccucuagcuccugucaugacggaaaagccuggcugcacgugugcaucacaggcgaugacaagaacgcuaccgccagcuucauuuacaauggccggcuuguugauucuguggucuccuggagcaaagagauccugcgcacccaggaaucugagugugugugcauuaacgggacauguacgguggucaugaccgacggauccgcuagcggcgaggccgauacaaagauccucuuuaucgaagaggggaaaauuguucauaccuccacacugucuggaagcgcgcaacacguggaagagugcuccugcuauccuagauaccccggcgugcggugugucugccgcgacaacuggaaggggagcaauagaccuaucguggauauuaacaucaaggaccacucuauuguuuccagcuacguguguucuggacuugucggcgacacgccccggaaaaaugauagcuccucuagcucccauugccuggacccgaacaaugaagagggcgggcacggagugaagggcugggccuucgaugacgggaacgauguuuggaugggacgcaccaucagcgagaaaucuagacucggcuaugaaacauuuaaggugaucgaggggugguccaauccuaaaagcaagcugcagaccaaccggcaggucauuguggaccgcggaaauagaucuggcuacuccggcaucuucagcgucgaagggaaaaacuguauuaaucggugcuuuuauguggagcugaucagaggacgcaaggaagagaccgagguucucuggacauccaacucuauuguggucuucuguggcaccagcgggacauacggaacgggcuccuggcccgauggggcugacaucaaucugaugccuauuuga

SEQ ID NO: 211313 - RNA, 1410 nt, Artificial Sequence
  derived and/or modified CDS sequence (opt5) from neuraminidase__InfluenzaA__ADK98703
augaaccccaaucagaagaucauuaccaucggcagcgugucccugacaauuucuacgaucugcuucuuuaugcaaaccgccauucucaucacaaccgucacacugcacuucaaacaguacgaguuuaacagcccuccgaauaaccagguuaugcuuugugaacccaccaucauugagagaaauaucacagaaauuguguaucugaccaacacgaccaucgagaaggaaauuugcccuaaacucgcugaguaccggaauugguccaagccccagugugacaucacaggguucgccccuuuuucuaaagauaacagcauucgccuguccgcgggaggcgacaucugggugaccagagagcccuaugucucuugcgauccugacaaguguuaccaauucgcucuugggcagggaacaacccugaauaacgugcauagcaauaacacgguucgggaucgcacaccguauagaacccuccugaugaaugaacugggcgugcccuuucaccucgggacaaagcaggucugcaucgccugguccucuagcuccugucaugacggaaaagccuggcugcacgugugcauuaccggcgaugacaagaacgcuaccgccagcuucaucuacaauggccggcuuguugauucuguggucuccuggagcaaagagauucugcgcacacaggaaucugagugugugugcaucaacgggacguguaccguggucaugacagacggauccgcuagcggcgaggccgauaccaagauucucuuuaucgaagaggggaaaaucguucauacauccacccugucuggaagcgcgcaacacguggaagagugcuccugcuauccuagauaccccggcgugcggugugucugccgcgacaacuggaaggggagcaauagaccuauuguggauaucaacauuaaggaccacucuaucguuuccagcuacguguguucuggacuugucggcgacacgccccggaaaaaugauagcuccucuagcucccauugccuggacccgaacaaugaagagggcgggcacggagugaagggcugggccuucgaugacgggaacgauguuuggaugggacgcacaauuagcgagaaaucuagacucggcuaugaaaccuuuaaggugaucgaggggugguccaauccuaaaagcaagcugcagaccaaccggcaggucaucguggaccgcggaaauagaucuggcuacuccggcauuuucagcgucgaagggaaaaacuguaucaaucggugcuuuuauguggagcugauuagaggacgcaaggaagagacagagguucucuggaccuccaacucuaucguggucuucuguggcacaagcgggacguacggaaccggcuccuggcccgauggggcugacauuaaucugaugccuaucuga

SEQ ID NO: 211314 - RNA, 1410 nt, Artificial Sequence; identical to SEQ ID NO: 210556
  derived and/or modified CDS sequence (opt5) from neuraminidase__InfluenzaA__ADK98725

SEQ ID NO: 211315 - RNA, 1410 nt, Artificial Sequence; identical to SEQ ID NO: 211195
  derived and/or modified CDS sequence (opt5) from neuraminidase__InfluenzaA__ADK98736

SEQ ID NO: 211316 - RNA, 1410 nt, Artificial Sequence
  derived and/or modified CDS sequence (opt5) from neuraminidase__InfluenzaA__ADK98747
augaaccccaaucagaagaucauuaccaucggcagcgugucccugacaauuucuacgaucugcuucuuuaugcaaauugccauccucgucaccacaguuacccugcacuucaaacaguacgaguuuaacagcccuccgaauaaccaggugaugcuuugugaacccacaaucauugagagaaauaucaccgaaauuguguaucugacaaacaccacgaucgagaaggaaauuugcccuaaacucgcugaguaccggaauugguccaagccccagugugacaucaccggguucgccccuuuuucuaaagauaacagcauucgccuguccgcgggaggcgacaucugggucacaagagagcccuaugugucuugcgauccugacaaguguuaccaauucgcucuugggcagggaaccacacugaauaacguucauagcaauaacaccgugcgggaucgcacgccguauagaacacuccugaugaaugaacugggcguccccuuucaccucgggaccaaacaggugugcaucgccugguccucuagcuccugucaugacggaaaggccuggcugcacguuugcauuacaggcgaugacaagaacgcuaccgccagcuucaucuacaauggccggcuuguggauucugucguguccuggagcaaagacauucugcgcacccaggagucugaaugugugugcaucaacgggacauguacggucguuaugaccgauggauccgcuagcggcaaggccgacacaaaaauucucuuuaucgaggaggggaagaucgugcauaccuccacacugucuggaagcgcgcaacacguggaagagugcuccugcuauccuagauaccccggcguccggugugugugccgcgauaacuggaaggggagcaauagaccuauuguugacaucaacaugaaagaccacucuauuguguccagcuacgucuguucuggacuugugggcgauacgccccggaagaaugacagcuccucuagcucccauugccuggauccgaacaaugaagagggcgggcacggaguuaaaggcugggccuucgacgaugggaacgacguguggaugggacgcaccaucagcgaaaagucuagacucggcuaugagacauuuaaagucauugaggggugguccaauccuaagagcaaacugcagaucaaccgccaggugaucgucgaucggggaaauagaucuggcuacuccggcauuuucagcguggaagggaaguccuguaucaaccggugcuuuuauguugagcugauuagaggacgcaaggaagagaccgaagugcucuggaccucuaauagcaucgucguguucuguggcacauccgggaccuacggaacaggcucuuggcccgacggggcuaacauuaaucugaugccuaucuga

SEQ ID NO: 211317 - RNA, 1410 nt, Artificial Sequence
  derived and/or modified CDS sequence (opt5) from neuraminidase__InfluenzaA__ADK98758
augaaccccaaucagaagaucauuaccaucggcagcgugucccugacaauuucuacgaucugcuucuuuaugcaaauugccauccucgucaccacaguuacccugcacuucaaacaguacgaguuuaacagcccuccgaauaaccaggugaugcuuugugaacccacaaucauugagagaaauaucaccgaaauuguguaucugacaaacaccacgaucgagaaggaaauuugcccuaaacucgcugaguaccggaauugguccaagccccagugugacaucaccggguucgccccuuuuucuaaagauaacagcauucgccuguccgcgggaggcgacaucugggucacaagagagcccuaugugucuugcgauccugacaaguguuaccaauucgcucuugggcagggaaccacacugaauaacguucauagcaauaacaccgugcgggaucgcacgccguauagaacacuccugaugaaugaacugggcguccccuuucaccucgggaccaaacaggugugcaucgccugguccucuagcuccugucaugacggaaaggccuggcugcacguuugcauuacaggcgaugacaagaacgcuaccgccagcuucaucuacaauggccggcuuguggauucugucguguccuggagcaaagacauucugcgcacccaggagucugaaugugugugcaucaacgggacauguacggucguuaugaccgauggauccgcuagcggcaaggccaacacaaaaauucucuuuaucgaggaggggaagaucgugcauaccuccacacugucuggaagcgcgcaacacguggaagagugcuccugcuauccuagauaccccggcguccggugugugugccgcgacaauuggaaggggagcaacagaccuauuguugauaucaauauuaaagaccacucuaucguguccagcuacgucuguucuggacuugugggcgacacgccccggaagaacgauagcuccucuagcucccauugccuggacccgaauaacgaagagggcgggcacggaguuaaaggcugggccuucgaugacgggaaugauguguggaugggacgcaccauuagcgaaaagucuagacucggcuaugagacauuuaaagucaucgaggggugguccaacccuaagagcaaacugcagaucaaucgccaggugauugucgaccggggaaacagaucuggcuacuccggcaucuucagcguggaagggaaguccuguauuaaucggugcuuuuauguugagcugaucagaggacgcaaggaagagaccgaagugcucuggaccucuaacagcauugucguguucuguggcacauccgggaccuacggaacaggcucuuggcccgauggggcuaauaucaaccugaugccuauuuga

SEQ ID NO: 211318 - RNA, 1410 nt, Artificial Sequence; identical to SEQ ID NO: 210556
  derived and/or modified CDS sequence (opt5) from neuraminidase__InfluenzaA__ADK98769

SEQ ID NO: 211319 - RNA, 1410 nt, Artificial Sequence; identical to SEQ ID NO: 211110
  derived and/or modified CDS sequence (opt5) from neuraminidase__InfluenzaA__ADK98780

SEQ ID NO: 211320 - RNA, 1410 nt, Artificial Sequence; identical to SEQ ID NO: 210556
  derived and/or modified CDS sequence (opt5) from neuraminidase__InfluenzaA__ADK98791

SEQ ID NO: 211321 - RNA, 1410 nt, Artificial Sequence; identical to SEQ ID NO: 208671
  derived and/or modified CDS sequence (opt5) from neuraminidase__InfluenzaA__ADK98802

SEQ ID NO: 211322 - RNA, 1410 nt, Artificial Sequence
  derived and/or modified CDS sequence (opt5) from neuraminidase__InfluenzaA__ADK98813
augaaccccaaucagaagaucauuaccaucggcagcgugucccugacaauuucuacgaucugcuucuuuaugcaaauugccauccucaucaccacagucacccugcacuucaaacaguacgaguuuaacagcccuccgaauaaccagguuaugcuuugugaacccgcuauuaucgagagaaauauuacagaaaucguguaucugaccaacacaaccauugagaaggaaaucugcccuaaacucgccgaguaccggaauugguccaagccccagugugacauuacgggguucgcgccuuuuucuaaagauaacagcauccgccuguccgcuggaggcgacaucugggugaccagagagcccuaugucucuugcgauccugacaaguguuaccaauucgcccuugggcagggaacaacccugaauaacgugcauagcaauaacacaguucgggaucgcaccccguauagaacgcuccugaugaaugaacugggcgugcccuuucaccucgggacaaagcaggucugcauugccugguccucuagcuccugucaugacggaaaggcuuggcugcacgugugcaucaccggcgaugacaaaaacgccacagcuagcuucauuuacaauggccggcuuguugauucuguggucuccuggagcaaagagauccugcgcacccaggaaucugagugugugugcauuaacgggaccuguacaguggucaugacggacggauccgccagcggcaaggcggauaccaaaauccucuuuaucgaggaagggaagauuguucauacauccacccugucuggaagcgcccaacacguggaggaaugcuccugcuauccuagauaccccggcgugcggugugucugccgcgacaacuggaaggggagcaauagaccuaucguggauauuaacaucaaagaccacucuauuguuuccagcuacguguguucuggacuugucggcgacacaccccggaagaaugauagcuccucuagcucccauugccuggacccgaacaaugaggaaggcgggcacggagugaaaggcugggcuuucgaugacgggaacgauguuuggaugggacgcaccaucagcgagaagucuagacucggcuaugagacguuuaaagugaucgaagggugguccaaucauaagagcaaacugcagauuaaccggcaggucaucguggaccgcggaaauagaucuggcuacuccggcauuuucagcgucgaggggaaguccuguaucaaccggugcuuuuauguggaacugauuagaggacgcaaggaggaaacagagguucucuggaccucuaauagcaucguggucuucuguggcaccuccgggacauacggaaccggcucuuggccugauggggccgaccugaaccuuaugcccauuuga

SEQ ID NO: 211323 - RNA, 1410 nt, Artificial Sequence; identical to SEQ ID NO: 208671
  derived and/or modified CDS sequence (opt5) from neuraminidase__InfluenzaA__ADK98824

SEQ ID NO: 211324 - RNA, 1410 nt, Artificial Sequence; identical to SEQ ID NO: 210556
  derived and/or modified CDS sequence (opt5) from neuraminidase__InfluenzaA__ADK98835

SEQ ID NO: 211325 - RNA, 1410 nt, Artificial Sequence; identical to SEQ ID NO: 211195
  derived and/or modified CDS sequence (opt5) from neuraminidase__InfluenzaA__ADK98846

SEQ ID NO: 211326 - RNA, 1410 nt, Artificial Sequence
  derived and/or modified CDS sequence (opt5) from neuraminidase__InfluenzaA__ADK98857
augaaccccaaucagaagaucauuaccaucggcagcgugucccugacaauuucuacgaucugcuucuuuaugcaaauugccauccucgucaccacaguuacccugcacuucaaacaguacgaguuuaacagcccuccgaauaaccaggugaugcuuugugaacccacaaucauugagagaaauaucaccgaaauuguguaucugacaaacaccacgaucgagaaggaaauuugcccuaaacucgcugaguaccggaauugguccaagccccagugugacaucaccggguucgccccuuuuucuaaagauaacagcauucgccuguccgcgggaggcgacaucugggucacaagagagcccuaugugucuugcgauccugacaaguguuaccaauucgcucuugggcagggaaccacacugaauaacguucauagcaauaacaccgugcgggaucgcacgccguauagaacacuccugaugaaugaacugggcguccccuuucaccucgggaccaaacaggugugcaucgccugguccucuagcuccugucaugacggaaaggccuggcugcacguuugcauuacaggcgaugacaagaacgcuaccgccagcuucaucuacaauggccggcuuguggauucugucguguccuggagcaaagacauucugcgcacccaggagucugaaugugugugcaucaacgggacauguacggucguuaugaccgauggauccgcuagcggcaaggccgacacaaaaauucucuuuaucgaggaggggaagaucgugcauaccuccacacugucuggaagcgcgcaacacguggaagagugcuccugcuauccuagauaccccggcguccggugugugugccgcgauaacuggaaggggagcaauagaccuauuguugacaucaacauuaaagaccacucuaucguguccagcuacgucuguucuggacuugugggcgauacgccccggaagaaugacagcuccucuagcucccauugccuggauccgaacaaugaagagggcgggcacggaguuaaaggcugggccuucgacgaugggaacgacguguggaugggacgcaccauuagcgaaaagucuagacucggcuaugagacauuuaaagucaucgaggggugguccaaucauaagagcaaacugcagaucaaccgccaggugauugucgaucggggaaauagaucuggcuacuccggcaucuucagcguggaagggaaguccuguauuaaccggugcuuuuauguugagcugaucagaggacgcaaggaagagaccgaagugcucuggaccucuaauagcauugucguguucuguggcacauccgggaccuacggaacaggcucuuggccugacggggcuaacaucaaucugaugcccauuuga

SEQ ID NO: 211327 - RNA, 1410 nt, Artificial Sequence
  derived and/or modified CDS sequence (opt5) from neuraminidase__InfluenzaA__ADK98868
augaaccccaaucagaagaucauuaccaucggcagcgugucccugacaauuucuacgaucugcuucuuuaugcaaauugccauccucaucaccacagucacccugcacuucaaacaguacgaguuuaacagcccuccgaauaaccagguuaugcuuugugaacccacaauuaucgagagaaauauuaccgaaaucguguaucugacaaacaccacgauugagaaggaaaucugcccuaaacucgcugaguaccggaauugguccaagccccagugugacauuaccggguucgccccuuuuucuaaagauaacagcauccgccuguccgcgggaggcgacaucugggugacaagagagcccuaugucucuugcgauccugacaaguguuaccaauucgcucuugggcagggaaccacacugaauaacgugcauagcaauaacaccguucgggaucgcacgccguauagaacacuccugaugaaugaacugggcgugcccuuucaccucgggaccaagcaggucugcauugccugguccucuagcuccugucaugacggaaaagccuggcugcacgugugcaucacaggcgaugacaagaacgcuaccgccagcuucauuuacaauggccggcuuguugauucuguggucuccuggagcaaagagauccugcgcacccaggaaucugagugugugugcauuaacgggacauguacgguggucaugaccgacggauccgcuagcggcaaggccgauacaaaaauccucuuuaucgaggaagggaagauuguucauaccuccacacugucuggaagcgcgcaacacguggaggaaugcuccugcuauccuagauaccccggcgugcggugugucugccgcgacaacuggaaggggagcaauagaccuaucguggauauuaacaucaaagaccacucuauuguuuccagcuacguguguucuggacuugucggcgacacgccccggaagaaugauagcuccucuagcucccauugccuggacccgaacaaugaggaaggcgggcacggagugaaaggcugggccuucgaugacgggaacgauguuuggaugggacgcaccaucagcgagaagucuagacucggcuaugagacauuuaaagugaucgaagggugguccaauccuaagagcaaacugcagauuaaccggcaggucaucguggaccgcggaaauagaucuggcuacuccggcauuuucagcgucgaggggaaguccuguaucaaccggugcuuuuauguggaacugauuagaggacgcaaggaggaaaaugagguucucuggaccucuaacagcaucguggucuucuguggcaccuccgggacauacggaaccggcucuuggcccgauggggcugacauuaaucugaugccuaucuga

SEQ ID NO: 211328 - RNA, 1410 nt, Artificial Sequence
  derived and/or modified CDS sequence (opt5) from neuraminidase__InfluenzaA__ADK98879
augaaccccaaucagaagaucauuaccaucggcagcgugucccugacaauuucuacgaucugcuucuuuaugcaaauugccauccucaucaccacagucacccugcacuucaaacaguacgaguuuaacagcccuccgaauaaccaggcuaugcuuugugaacccacaauuaucgagagaaauauuaccgaaaucguuuaucugacaaacaccacgauugagaaggaaaucugcccuaaacucgccgaguaccggaauugguccaagccccagugugacauuaccggguucgcgccuuuuucuaaagauaacagcauccgccuguccgcuggaggcgacaucugggugacaagagagcccuaugugucuugcgauccugacaaguguuaccaauucgcccuugggcagggaaccacacugaauaacguccauagcaauaacaccgugcgggaucgcacgccguauagaacacuccugaugaaugaacugggcguucccuuucaccucgggaccaaacaggugugcauugccugguccucuagcuccugucaugacggaaaggcuuggcugcacgucugcaucacaggcgaugacaagaacgccaccgcuagcuucauuuacaauggccggcuuguggauucuguuguguccuggagcaaagagauccugcgcacccaggaaucugagugugucugcauuaacgggacauguacgguggugaugaccgacggauccgccagcggcaaggcggauacaaaaauccucuuuaucgaggaagggaagauuguccauaccuccacacugucuggaagcgcccaacacguugaggaaugcuccugcuauccuagauaccccggcgugcggugugugugccgcgacaacuggaaggggagcaauagaccuaucgucgauauuaacaucaaagaccacucuauuguguccagcuacguuuguucuggacuugugggcgacacgccccggaagaaugauagcuccucuagcucccauugccuggacccgaacaaugaggaaggcgggcacggagucaaaggcugggcuuucgaugacgggaacgauguguggaugggacgcaccaucagcgagaagucuagacucggcuaugagacauuuaaaguuaucgaagggugguccaauccuaagagcaaacugcagauuaaccgccaggugaucgucgaccggggaaauagaucuggcuacuccggcauuuucagcguggaggggaaguccuguaucaaccggugcuuuuaugucgaacugauuagaggacgcaaggaggaaaccgaggugcucuggaccucuaauagcaucguuguguucuguggcacauccgggaccuacggaacaggcucuuggcccgauggggccgacauuaaccugaugccuaucuga

SEQ ID NO: 211329 - RNA, 1410 nt, Artificial Sequence; identical to SEQ ID NO: 211195
  derived and/or modified CDS sequence (opt5) from neuraminidase__InfluenzaA__ADK98890

SEQ ID NO: 211330 - RNA, 1410 nt, Artificial Sequence; identical to SEQ ID NO: 210556
  derived and/or modified CDS sequence (opt5) from neuraminidase__InfluenzaA__ADK98901

SEQ ID NO: 211331 - RNA, 1410 nt, Artificial Sequence; identical to SEQ ID NO: 211110
  derived and/or modified CDS sequence (opt5) from neuraminidase__InfluenzaA__ADK98912

SEQ ID NO: 211332 - RNA, 1410 nt, Artificial Sequence; identical to SEQ ID NO: 211195
  derived and/or modified CDS sequence (opt5) from neuraminidase__InfluenzaA__ADK98923

SEQ ID NO: 211333 - RNA, 1410 nt, Artificial Sequence; identical to SEQ ID NO: 209977
  derived and/or modified CDS sequence (opt5) from neuraminidase__InfluenzaA__ADK98945

SEQ ID NO: 211334 - RNA, 1410 nt, Artificial Sequence
  derived and/or modified CDS sequence (opt5) from neuraminidase__InfluenzaA__ADK98956
augaaccccaaucagaagaucauuaccaucggcagcgugucccugacaauuucuacgaucugcuucuuuaugcaaauugccauccucaucaccacagucacccugcacuucaaacaguacgaguuuaacagcccuccgaauaaccagguuaugcuuugugaacccacaauuaucgagagaaauauuaccgaaaucguguaucugacaaacaccacgauugagaaggaaaucugcccuaaacucgcugaguaccggaauugguccaagccccagugugacauuaccggguucgccccuuuuucuaaagauaacagcauccgccuguccgcgggaggcgacaucugggugacaagagagcccuaugucucuugcgauccugacaaguguuaccaauucgcucuugggcagggaaccacacugaauaacgugcauagcaauaacaccguucgggaucgcacgccguauagaacacuccugaugaaugaacugggcgugcccuuucaccucgggaccaagcaggucugcauugccugguccagcagcuccugucaugacggaaaagccuggcugcacgugugcaucacaggcgaugacaagaacgcuaccgccagcuucauuuacaauggccggcuuguugauucuguggucuccuggagcaaagagauccugcgcacccaggaaucugagugugugugcauuaacgggacauguacgguggucaugaccgacggauccgcuagcggcaaggccgauacaaaaauccucuuuaucgaggaagggaagauuguucauaccuccacacugucuggaagcgcgcaacacguggaggaaugcuccugcuauccuagauaccccggcgugcggugugucugccgcgacaacuggaaggggagcaauagaccuaucguggauauuaacaucaaagaccacucuguuguguccagcuacgucuguucuggacuugugggcgacacgccccggaagucugauuccucuagcuccagccauugccuggacccgaauaacgaggaaggcgggcacggaguuaaaggcugggccuucgaugacgggaaugauguguggaugggacgcaccauuucugagaaguccagacucggcuaugagacauuuaaagucaucgaaggguggagcaaccauaagucuaaacugcagaucaaucgccaggugauugucgaccggggaaacagauccggcuacagcggcaucuucuccguggaggggaagucuuguauuaaucggugcuuuuauguugaacugaucagaggacgcaaggaggaaaccgaggugcucuggaccagcaacuccauugucguguucuguggcacaucugggaccuacggaacaggcagcuggccugauggggcugaccugaaucuuaugcccaucuga

SEQ ID NO: 211335 - RNA, 1410 nt, Artificial Sequence; identical to SEQ ID NO: 210556
  derived and/or modified CDS sequence (opt5) from neuraminidase__InfluenzaA__ADK98967

SEQ ID NO: 211336 - RNA, 1410 nt, Artificial Sequence; identical to SEQ ID NO: 211195
  derived and/or modified CDS sequence (opt5) from neuraminidase__InfluenzaA__ADK98978

SEQ ID NO: 211337 - RNA, 1410 nt, Artificial Sequence; identical to SEQ ID NO: 211334
  derived and/or modified CDS sequence (opt5) from neuraminidase__InfluenzaA__ADK98989

SEQ ID NO: 211338 - RNA, 1410 nt, Artificial Sequence; identical to SEQ ID NO: 208671
  derived and/or modified CDS sequence (opt5) from neuraminidase__InfluenzaA__ADK99000

SEQ ID NO: 211339 - RNA, 1410 nt, Artificial Sequence; identical to SEQ ID NO: 211334
  derived and/or modified CDS sequence (opt5) from neuraminidase__InfluenzaA__ADK99011

SEQ ID NO: 211340 - RNA, 1410 nt, Artificial Sequence
  derived and/or modified CDS sequence (opt5) from neuraminidase__InfluenzaA__ADK99022
augaaccccaaucagaagaucauuaccaucggcagcgugucccugacaauuucuacgaucugcuucuuuaugcaaauugccauccucgucaccacaguuacccugcacuucaaacaguacgaguuuaacagcccuccgaauaaccaggugaugcuuugugaccccacaaucauugaaagaaauaucaccgagauuguguaucugacaaacaccacgaucgaaaaggagauuugcccuaaacucgcugaauaccggaauugguccaagccccagugugauaucaccggguucgccccuuuuucuaaagacaacagcauucgccuguccgcgggaggcgauaucugggucacaagagagcccuaugugucuugcgacccugauaaguguuaccaauucgcucuugggcagggaaccacacugaauaacguucauagcaauaacaccgugcgggaccgcacgccguauagaacacuccugaugaaugagcugggcguccccuuucaccucgggaccaaacaggugugcaucgccugguccucuagcuccugucaugauggaaaggccuggcugcacguuugcauuacaggcgacgauaagaacgcuaccgccagcuucaucuacaauggccggcuuguggacucugucguguccuggagcaaagauauucugcgcacccaggaaucugagugugugugcaucaacgggacauguacggucguuaugaccgacggauccgcuagcggcaaggccgauacaaaaauucucuuuaucgaagaggggaagaucgugcauaccuccacacugucuggaagcgcgcaacacguggaggaaugcuccugcuauccuagauaccccggcguccggugugugugccgcgacaacuggaaggggagcaauagaccuauuguugacaucaacauuaaagaucacucuaucguguccagcuacgucuguucuggacuugugggcgacacgccccggaagaaugauagcuccucuagcucccauugccuggacccgaacaaugaggaaggcgggcacggaguuaaaggcugggccuucgaugacgggaacgauguguggaugggacgcaccauuagcgagaagucuagacucggcuaugaaacauuuaaagucaucgaggggugguccaauccuaagagcaaacugcagaucaaccgccaggugauugucgaccggggaaauagaucuggcuacuccggcaucuucagcguggaggggaaguccuguauuaaccggugcuuuuauguugaacugaucagaggacgcaaggaggaaaccgaggugcucuggaccucuaauagcauugucguguucuguggcacauccgggaccuacggaacaggcucuuggcccgauggggcuaacaucaaucugaugccuauuuga

SEQ ID NO: 211341 - RNA, 1410 nt, Artificial Sequence; identical to SEQ ID NO: 208671
  derived and/or modified CDS sequence (opt5) from neuraminidase__InfluenzaA__ADK99033

SEQ ID NO: 211342 - RNA, 1410 nt, Artificial Sequence
  derived and/or modified CDS sequence (opt5) from neuraminidase__InfluenzaA__ADK99044
augaaccccaaucagaagaucauuaccaucggcagcgugucccugacaauuucuacgaucugcuucuuuaugcaaauugccauccucaucaccacagucacccugcacuucaaacaguacgaguuuaacagcccuccgaauaaccagguuaugcuuugugaacccacaauuaucgagagaaauaagaccgaaauuguguaucugacaaacaccacgaucgagaaagaaauuugcccuaagcucgcugaguaccggaauugguccaaaccccagugugacaucaccggguucgccccuuuuucuaaggauaacagcauucgccuguccgcgggaggcgacaucugggugacaagagagcccuaugucucuugcgauccugacaaguguuaccaauucgcucuugggcagggaaccacacugaauaacggccauagcaauaacaccgugcgggaucgcacgccguauagaacacuccugaugaaugaacuggggguucccuuucaccucggaaccaaacaggugugcaucgccugguccucuagcuccugucaugacggcaaggccuggcugcacgucugcauuacaggcgaugacaaaaacgcuaccgccagcuucaucuacaaugggaaacuuguggauucuguuguguccuggagcaaggagauucugcggacccaggaaucugagugugucugcaucaacggaacauguacgguggugaugaccgacggcuccgcuagcgggaaggccgauacaaagauucucuuuaucgaggaaggaaaaaucguccauaccuccacacugucuggcagcgcgcaacacguugaggaaugcuccugcuauccucgcuaccccggggugagaugugugugccgggacaacuggaagggaagcaaucgcccuauugucgauaucaacauuaaagaccacucuaucguguccagcuacguuuguucuggccuugugggcgacacccccagaaagaaugauagcuccucuagcucccauugccuggacccgaacaaugaggaagggggacacggcgucaaagggugggccuucgaugacggaaacgauguguggaugggccggacgauuagcgagaagucucgccucggguaugagacauuuaaaguuaucgaaggaugguccaaucauaagagcaagcugcagaucaacagacaggugauugucgaccggggcaaucgcucuggcuacuccgggaucuucagcguggagggaaaauccuguauuaacagaugcuuuuaugucgaacugauccggggcagaaaggaggaaaccgaggugcucuggaccucuaauagcauuguuguguucugugggacauccggaaccuacggcacagggucuuggccugauggcgcugaccugaaccuuaugcccaucuga

SEQ ID NO: 211343 - RNA, 1410 nt, Artificial Sequence
  derived and/or modified CDS sequence (opt5) from neuraminidase__InfluenzaA__ADK99055
augaaccccaaucagaagaucauuaccaucggcagcgugucccugacaauuucuacgaucugcuucuuuaugcaaauugccauccucaucaccacagucacccugcacuucaaacaguacgaguuuaacagcccuccgaauaaccagguuaugcuuugugaacccacaauuaucgagagaaauauuaccgaaaucguguaucugacaaacaccacgauugagaaggaaaucugcccuaaacucgcugaguaccggaauugguccaagccccagugugacauuaccggguucgccccuuuuucuaaagauaacagcauccgccuguccgcgggaggcgacaucugggugacaagagagcccuaugucucuugcgauccugacaaguguuaccaauucgcucuugggcagggaaccacacugaauaacgugcauagcaauaacaccguucgggaucgcacgccguauagaacacuccugaugaaugaacugggcgugcccuuucaccucgggaccaagcaggucugcauugccugguccucuagcuccugucaugacggaaaagccuggcugcacgugugcaucacaggcgaugacaagaacgcuaccgccagcuucauuuacaauggccggcuuguugauucuguggucuccuggagcaaagagauccugcgcacccaggaaucugagugugugugcauuaacgggacauguacgguggucaugaccgacggauccgcuagcggcaaggccgauacaaaaauccucuuuaucgaggaagggaagauuguucauaccuccacacugucuggaagcgcgcaacacguggaggaaugcuccugcuauccuagauaccccggcgugcggugugucugccgcgacaacuggaaggggagcaauagaccuaucguggauauuaacaugaaagaccacucuaucguuuccagcuacguguguucuggacuugucggcgacacgccccggaagaaugauagcuccucuagcucccauugccuggacccgaacaaugaggaaggcgggcacggagugaaaggcugggccuucgaugacgggaacgauguuuggaugggacgcaccauuagcgagaagucuagacucggcuaugagacauuuaaagugaucgaagggugguccaauccuaagagcaaacugcagaucaaccggcaggucauuguggaccgcggaaauagaucuggcuacuccggcaucuucagcgucgaggggaaguccuguauuaaccggugcuuuuauguggaacugaucagaggacgcaaggaggaaaccgagguucucuggaccucuaauagcauuguggucuucuguggcacauccgggaccuacggaacaggcucuuggcccgauggggcugacaucaaccugaugccuauuuga

SEQ ID NO: 211344 - RNA, 1410 nt, Artificial Sequence
  derived and/or modified CDS sequence (opt5) from neuraminidase__InfluenzaA__ADK99066
augaaccccaaucagaagaucauuaccaucggcagcgugucccugacaauuucuacgaucugcuucuuuaugcaaauugccauccucaucaccacagucacccugcacuucaaacagugugaguuuaacagcccuccgaauaaccagguuaugcuuugcgaacccacaauuaucgagagaaauauuaccgaaaucguguaccugacaaacaccacgauugagaagaaaaucuguccuaagcucgcugaauaucggaauugguccaaaccccagugcgacauuaccggguucgccccuuuuucuaaggauaacagcauccgccuguccgcgggaggcgacaucugggugacaagagagcccuacgucucuugugauccugacaagugcuaucaauucgcucuugggcagggaaccacacugaauaacgugcauagcaauaacaccguucgggaucgcacgccguacagaacacuccugaugaaugagcugggcgugcccuuucaccucgggaccaaacaggucuguauugccugguccucuagcuccugccaugacggaaaggccuggcugcacguguguaucacaggcgaugacaaaaacgcuaccgccagcuucauuuauaauggccggcuuguugauucuguggucuccuggagcaaggaaauccugcgcacccaggagucugaaugcguguguauuaacgggacaugcacgguggucaugaccgacggauccgcuagcggcaaagccgauacaaagauccucuuuaucgaggaggggaagauuguucauaccuccacacugucuggaagcgcgcaacacguggaagagugcuccuguuacccuagauaucccggcgugcggugcgucugucgcgacaacuggaaagggagcaauagaccuaucguggauauuaacaucaaggaccacucuauuguuuccagcuaccuuugcucuggacuggugggcgacacgccccggaaaaaugauagcuccucuagcucccauugucucgacccgaacaaugaagagggcgggcacggagucaagggcugggccuucgaugacgggaacgauguguggaugggacgcaccaucagcgaaaaaucuagacugggcuacgagacauuuaagguuaucgaggggugguccaauccuaaaagcaagcugcagauuaaccgccaggugaucgucgaccggggaaauagaucuggcuauuccggcauuuucagcguggaagggaaguccugcaucaaccgguguuuuuacgucgagcucauuagaggacgcaaagaagagaccgaagugcuguggaccucuaauagcaucguuguguucugcggcacauccgggaccuauggaacaggcucuuggcccgauggggcuaacauuaaucuuaugccuaucuga

SEQ ID NO: 211345 - RNA, 1410 nt, Artificial Sequence
  derived and/or modified CDS sequence (opt5) from neuraminidase__InfluenzaA__ADK99077
augaaccccaaucagaagaucauuaccaucggcagcgugucccugacaauuucuacgaucugcuucuuuaugcaaauugccauccucaucaccacagucacccugcacuucaaacaguacgaguuuaacagcccuccgaauaaccagguuaugcuuugugaacccacaauuaucgagagaaauauuaccgaaaucguguaucugacaaacaccacgauugagaaggaaaucugcccuaaacucgcugaguaccggaauugguccaagccccagugugacauuaccggguucgccccuuuuucuaaagauaacagcauccgccuguccgcgggaggcgacaucugggugacaagagagcccuaugucucuugcgauccugacaaguguuaccaauucgcucuugggcagggaaccacacugaauaacgugcauagcaauaacaccguucgggaucgcacgccguauagaacacuccugaugaaugaacugggcgugcccuuucaccucgggaccaagcaggucugcauugccugguccucuagcuccugucaugacggaaaagccuggcugcacgugugcaucacaggcgaugacaagaacgcuaccgccagcuucauuuacaauggccggcuuguugauucuguggucuccuggagcaaagacauccugcgcacccaggagucugaaugugugugcauuaacgggacauguacgguggucaugaccgauggauccgcuagcggcaaggccgacacaaaaauccucuuuaucgaggaggggaagguugugcauaccuccacacugucuggaagcgcgcaacacguggaagagugcuccugcuauccuagauaccccggcguccggugugugugccgcgauaacuggaaggggagcaauagaccuauuguugacaucaacauuaaagaccacucuaucguguccagcuacgucuguucuggacuugugggcgauacgccccggaagaaugacagcuccucuagcucccauugccuggauccgaacaaugaagagggcgggcacggaguuaaaggcugggccuucgacgaugggaacgacguguggaugggacgcaccauuagcgaaaagucuagacucggcuaugagacauuuaaagucaucgaggggugguccaaucauaagagcaaacugcagaucaaccgccaggugauugucgaucggggaaauagaucuggcuacuccggcaucuucagcguggaagggaaguccuguauuaaccggugcuuuuauguugagcugaucagaggacgcaaggaagagaccgaagugcucuggaccucuaauagcauugucguguucuguggcacauccgggaccuacggaacaggcucuuggccugacggggcugaucugaaccuuaugcccaucuga

SEQ ID NO: 211346 - RNA, 1410 nt, Artificial Sequence; identical to SEQ ID NO: 211110
  derived and/or modified CDS sequence (opt5) from neuraminidase__InfluenzaA__ADK99088

SEQ ID NO: 211347 - RNA, 1410 nt, Artificial Sequence; identical to SEQ ID NO: 210556
  derived and/or modified CDS sequence (opt5) from neuraminidase__InfluenzaA__ADK99099

SEQ ID NO: 211348 - RNA, 1410 nt, Artificial Sequence
  derived and/or modified CDS sequence (opt5) from neuraminidase__InfluenzaA__ADK99110
augaaccccaaucagaagaucauuaccaucggcagcgugucccugacaauuucuacgaucugcuucuuuaugcaaauugccauccucgucaccacaguuacccugcacuucaaacaguacgaguuuaacccuccgcccaauaaccaggugaugcuuugugaaccuacaaucauugagagaaauaucaccgaaauuguguaucugacaaacaccacgaucgagaaggaaauuugccccaaacucgcugaguaccggaauuggagcaagccucagugugacaucaccggguucgcccccuuuuccaaagauaacucuauucgccugagcgcgggaggcgacaucugggucacaagagagccuuauguguccugcgauccggacaaguguuaccaauucgcucuugggcagggaaccacacugaauaacguucauucuaauaacaccgugcgggaucgcacgcccuauagaacacuccugaugaaugaacugggcgucccuuuucaccucgggaccaaacaggugugcaucgccuggagcuccagcucuugucaugacggaaaggccuggcugcacguuugcauuacaggcgaugacaagaacgcuaccgccuccuucaucuacaauggccggcuuguggauagcgucgugucuugguccaaagacauucugcgcacccaggagagcgaaugugugugcaucaacgggacauguacggucguuaugaccgauggaucugcuuccggcaaggccgacacaaaaauucucuuuaucgaggaggggaagaucgugcauaccagcacacuguccggaucugcgcaacacguggaagagugcagcugcuaucccagauacccuggcguccggugugugugccgcgauaacuggaagggguccaauagacccauuguugacaucaacauuaaagaccacagcaucgugucuuccuacgucuguagcggacuugugggcgauaccccgcggaagaaugacucuagcuccucuagccauugccuggauccuaacaaugaagagggcgggcacggaguuaaaggcugggccuucgacgaugggaacgacguguggaugggacgcacgauuuccgaaaagagcagacucggcuaugagacauuuaaagucaucgagggguggucuaaucccaaguccaaacugcagaucaaccgccaggugauugucgaucggggaaauagaagcggcuacucuggcaucuucuccguggaaggaaagagcuguauuaaccggugcuuuuauguugagcugaucagagggcgcaaggaagagaccgaagugcucuggaccuccaauucuauugucguguucuguggcacaagcgggaccuacggaacaggcuccuggccugacggggcuaacaucaaucugaugcccauuuga

SEQ ID NO: 211349 - RNA, 1410 nt, Artificial Sequence; identical to SEQ ID NO: 211195
  derived and/or modified CDS sequence (opt5) from neuraminidase__InfluenzaA__ADK99121

SEQ ID NO: 211350 - RNA, 1410 nt, Artificial Sequence
  derived and/or modified CDS sequence (opt5) from neuraminidase__InfluenzaA__ADK99132
augaaccccaaucagaagaucauuaccaucggcagcgugucccugacaauuucuacgaucugcuucuuuaugcaaauugccauccucaucaccacagucacccugcacuucaaacaguacgaguuuaacagcccuccgaauaaccagguuaugcuuugugaacccacaauuaucgagagaaauauuaccgaaaucguguaucugacaaacaccacgguggagaaggaaauuugcccuaaacucgcugaguaccggaauugguccaagccccagugugacaucaccggguucgccccuuuuucuaaagauaacagcauucgccuguccgcgggaggcgacaucugggucacaagagagcccuaugugucuugcgauccugacaaguguuaccaauucgcucuugggcagggaaccacacugaauaacguucauagcaauaacaccgugcgggaucgcacgccguauagaacacuccugaugaaugaacugggcguccccuuucaccucgggaccaaacaggugugcaucgccugguccucuagcuccugucaugacggaaaggccuggcugcacguuugcauuacaggcgaugacaagaacgcuaccgccagcuucaucuacaauggccggcuuguggauucugucguguccuggagcaaagagauucugcgcacccaggaaucugagugugugugcaucaacgggacauguacggucguuaugaccgacggauccgcuagcggcaaggccgauacaaaaauucucuuuaucgaggaagggaagaucgugcauaccuccacacugucuggaagcgcgcaacacguggaggaaugcuccugcuauccuagauaccccggcguccggugugugugccgcgacaacuggaaggggagcaauagaccuauuguugauaucaacauuaaagaccacucuaucguguccagcuaccuuuguucuggacuggucggcgacacgccccggaagaaugauagcuccucuagcucccauugccucgacccgaacaaugaggaaggcgggcacggagugaaaggcugggccuucgaugacgggaacgauguuuggaugggacgcaccauuagcgagaagucuagacugggcuaugagacauuuaaagugaucgaagggugguccaauccuaagagcaaacugcagaucaaccggcaggucauuguggaccgcggaaauagaucuggcuacuccggcaucuucagcgucgaggggaaguccuguauuaaccggugcuuuuauguggaacucaucagaggacgcaaggaggaaaccgagguucuguggaccucuaauagcauuguggucuucuguggcacauccgggaccuacggaacaggcucuuggcccgauggggcugacaucaaccuuaugccuauuuga

SEQ ID NO: 211351 - RNA, 1410 nt, Artificial Sequence; identical to SEQ ID NO: 211195
  derived and/or modified CDS sequence (opt5) from neuraminidase__InfluenzaA__ADK99143

SEQ ID NO: 211352 - RNA, 1410 nt, Artificial Sequence; identical to SEQ ID NO: 208671
  derived and/or modified CDS sequence (opt5) from neuraminidase__InfluenzaA__ADK99154

SEQ ID NO: 211353 - RNA, 1410 nt, Artificial Sequence
  derived and/or modified CDS sequence (opt5) from neuraminidase__InfluenzaA__ADK99176
augaaccccaaucagaagaucauuaccaucggcagcgugucccugacaauuucuacgaucugcuucuuuaugcaaauugccauccucgucaccacaguuacccugcacuucaaacaguacgaguuuaacagcccuccgaauaaccaggugaugcuuugugaacccacaaucauugagagaaauaucaccgaaauuguguaucugacaaacaccacgaucgagaaggaaauuugccucaaacuggcugaguaccggaauugguccaagccucagugugacaucaccggguucgcccccuuuucuaaagauaacagcauucgccuuuccgcgggaggcgacaucugggucacaagagagccuuaugugucuugcgaucccgacaaguguuaccaauucgcucuggggcagggaaccacacucaauaacguucauagcaauaacaccgugcgggaucgcacgccuuauagaacacugcugaugaaugaacucggcgucccguuucaccuggggaccaaacaggugugcaucgccugguccagcagcuccugucaugacggaaaggccuggcuucacguuugcauuacaggcgaugacaagaacgcuaccgccagcuucaucuacaauggccggcugguggauucugucguguccuggagcaaagacauucuccgcacccaggagucugaaugugugugcaucaacgggacauguacggucguuaugaccgauggauccgcuagcggcaaggccgacacaaaaauucuguuuaucgaggaggggaagaucgugcauaccuccacacuuucuggaagcgcgcaacacguggaagagugcuccugcuaucccagauacccuggcguccggugugugugccgcgauaacuggaaggggagcaauagacccauuguugacaucaacauuaaagaccacucuaucguguccagcuacgucuguucuggacuggugggcgauaccccucggaagaaugacagcuccucuagcucccauugccucgaucccaacaaugaagagggcgggcacggaguuaaaggcugggccuucgacgaugggaacgacguguggaugggacgcacgauuagcgaaaagucuagacugggcuaugagacauuuaaagucaucgaggggugguccaauccgaagucuaaacugcagaucaaccgccaggugauugucgaucggggaaauagaucuggcuacuccggcaucuucagcguggaagggaaguccuguauuaaccggugcuuuuauguugagcucaucagaggacgcaaggaagagaccgaagugcuguggaccucuaauagcauugucguguucuguggcacauccgggaccuacggaacaggcucuuggccugacggggcuaacaucaaucuuaugcccauuuga

SEQ ID NO: 211354 - RNA, 1410 nt, Artificial Sequence; identical to SEQ ID NO: 211345
  derived and/or modified CDS sequence (opt5) from neuraminidase__InfluenzaA__ADK99187

SEQ ID NO: 211355 - RNA, 1410 nt, Artificial Sequence; identical to SEQ ID NO: 210556
  derived and/or modified CDS sequence (opt5) from neuraminidase__InfluenzaA__ADK99198

SEQ ID NO: 211356 - RNA, 1410 nt, Artificial Sequence; identical to SEQ ID NO: 211195
  derived and/or modified CDS sequence (opt5) from neuraminidase__InfluenzaA__ADK99220

SEQ ID NO: 211357 - RNA, 1410 nt, Artificial Sequence
  derived and/or modified CDS sequence (opt5) from neuraminidase__InfluenzaA__ADK99231
augaaccccaaucagaagaucauuaccaucggcagcgugucccugacaauuucuacgaucugcuucuuuaugcaaauugccauccucaucaccacagucacccugcacuucaaacaguacgaguuuaacagcccuccgaauaaccagguuaugcuuugugaacccacaauuaucgagagaaauauuaccgaaaucguguaucugacaaacaccacgauugagaaggaaaucugcccuaaacucgcugaguaccggaauugguccaagccccagugugacauuaccggguucgccccuuuuucuaaagauaacagcauccgccuguccgcgggaggcgacaucugggugacaagagagcccuaugucucuugcgauccugacaauuguuaccaauucgcucuugggcagggaaccacacugaacaaugugcauagcaacaauaccguucgggaucgcacgccguauagaacacuccugaugaacgaacugggcgugcccuuucaccucgggaccaagcaggucugcauugccugguccucuagcuccugucaugacggaaaggccuggcugcacgugugcaucacaggcgaugacaaaaaugcuaccgccagcuucauuuacaacggccggcuuguugauucuguggucuccuggagcaaggagauccugcgcacccaggaaucugagugugugugcauuaacgggacauguacgguggucaugaccgacggauccgcuagcggcaaagccgauacaaagauccucuuuaucgaggaagggaaaauuguucauaccuccacacugucuggaagcgcgcaacacguggaggaaugcuccugcuauccuagauaccccggcgugcggugugucugccgcgacaauuggaaggggagcaacagaccuaucguggauauuaauaucaaggaccacucuauuguuuccagcuaccuuuguucuggacuggugggcgacacgccccggaaaaacgauagcuccucuagcucccauugccucgacccgaauaacgaggaaggcgggcacggagucaagggcugggccuucgaugacgggaaugauguguggaugggacgcaccaucagcgagaaaucuagacugggcuaugagacauuuaagguuaucgaagggugguccaacccuaaaagcaagcugcagauuaaucgccaggugaucgucgaccggggaaacagaucuggcuacuccggcauuuucagcguggaggggaaauccuguaucaaucggugcuuuuaugucgaacucauuagaggacgcaaggaggaaaccgaggugcuguggaccucuaacagcaucguuguguucuguggcacauccgggaccuacggaacaggcucuuggcccgauggggcugacauuaaucuuaugccuaucuga

SEQ ID NO: 211358 - RNA, 1410 nt, Artificial Sequence
  derived and/or modified CDS sequence (opt5) from neuraminidase__InfluenzaA__ADK99242
augaaccccaaucagaagaucauuaccaucggcagcgugucccugacaauuucuacgaucugcuucuuuaugcaaauugccauccucaucaccacagucacccugcacuucaaacaguacgaguuuaacagcccuccgaauaaccagguuaugcuuugugaacccacaauuaucgagagaaauauuaccgaaaucguguaucugacaaacaccacgauugagaaggaaaucugcccuaaacucgcugaguaccggaauugguccaagccccagugugacauuaccggguucgccccuuuuucuaaagauaacagcauccgccuguccgcgggaggcgacaucugggugacaagagagcccuaugucucuugcgauccugacaaguguuaccaauucgcucuugggcagggaaccacacugaauaacgugcauagcaauaacaccguucgggaucgcacgccguauagaacacuccugaugaaugaacugggcgugcccuuucaccucgggaccaagcaggucugcauugccugguccucuagcuccugucaugacggaaaagccuggcugcacgugugcaucacaggcgaugacaagaacgcuaccgccagcuucauuuacaauggccggcuuguugauucuguggucuccuggagcaaagacauccugcgcacccaggagucugaaugugugugcauuaacgggacauguacgguggucaugaccgauggauccgcuagcggcaaggccgacacaaaaauccucuuuaucgaggaggggaagauuguucauaccuccacacugucuggaagcgcgcaacacguggaagagugcuccugcuauccuagauaccccggcgugcggugugucugccgcgauaacuggaaggggagcaauagaccuaucguggacauuaacaucaaagaccacucuauuguuuccagcuacguguguucuggacuugucggcgauacgccccggaagaaugacagcuccucuagcucccauugccuggauccgaacaaugaagagggcgggcacggagugaaaggcugggccuucgacgaugggaacgacguuuggaugggacgcaccaucagcgaaaagucuagacucggcuaugagacauuuaaagugaucgaggggugguccaauccuaagagcaaacugcagauuaaccggcaggucaucguggaucgcggaaauagaucuggcuacuccggcauuuucagcgucgaagggaaguccuguaucaaccggugcuuuuauguggagcugauuagaggacgcaaggaagagaccgaaguucucuggaccucuaauagcaucauuguguucuguggcacauccgggaccuacggaacaggcucuuggcccgacggggcugauaucaaccugaugccuaucuga

SEQ ID NO: 211359 - RNA, 1410 nt, Artificial Sequence
  derived and/or modified CDS sequence (opt5) from neuraminidase__InfluenzaA__ADK99253
augaaccccaaucagaagaucauuaccaucggcagcgugucccugacaauuucuacgaucugcuucuuuaugcaaauugccauccucaucaccacagucacccugcacuucaaacaguacgaguuuaacagcccuccgaauaaccagguuaugcuuugugaacccacaauuaucgagagaaauauuaccgaaaucguguaucugacaaacaccacgauugagaaggaaaucugcccuaaacucgcugaguaccggaauugguccaagccccagugugacauuaccggguucgccccuuuuucuaaagauaacagcauccgccuguccgcgggaggcgacaucugggugacaagagagcccuaugucucuugcgauccugacaaguguuaccaauucgcucuugggcagggaaccacacugaauaacgugcauagcaauaacaccguucgggaucgcacgccguauagaacacuccugaugaaugaacugggcgugcccuuucaccucgggaccaagcaggucugcauugccugguccucuagcuccugucaugacggaaaagccuggcugcacgugugcaucacaggcgaugacaagaacgcuaccgccagcuucauuuacaauggccggcuuguugauucuguggucuccuggagcaaagagauccugcgcacccaggaaucugagugugugugcauuaacgggacauguacgguggucaugaccgacggauccgcuagcggcaaggccgauacaaaaauccucuuuaucgaggaagggaagauuguucauaccuccacacugucuggaagcgcgcaacacguggaggaaugcuccugcuauccuagauaccccggcgugcggugugucugccgcgacaacuggaaggggagcaauagaccuaucguggauauuaacaucaaagaccacucuauuguuuccagcuacguguguucuggacuugucggcgacacgccccggaagaaugauagcuccucuagcucccauugccuggacccgaacaaugaggaaggcgggcacggagugaaaggcugggccuucgaugacgggaacgauguuuggaugggacgcaccaucagcgagaagucuagacucggcuaugagacauuuaaagugaucgaagggugguccaaucauaagagcaaacugcagauuaaccggcaggucaucguggaccgcggacacagaucuggcuacuccggcauuuucagcgucgaggggaaguccuguaucaaucggugcuuuuauguggaacugauuagaggacgcaaggaggaaaccgagguucucuggaccucuaacagcaucguggucuucuguggcacauccgggaccuacggaacaggcucuuggccugauggggcugaccugacgcuuaugcccauuuga

SEQ ID NO: 211360 - RNA, 1410 nt, Artificial Sequence
  derived and/or modified CDS sequence (opt5) from neuraminidase__InfluenzaA__ADK99264
augaaccccaaucagaagaucauuaccaucggcagcgugucccugacaauuucuacgaucugcuucuuuaugcaaauugccauccucaucaccacagucacccugcacuucaaacaguacgaguuuaacagcccuccgaauaaccagguuaugcuuugugaacccacaauuaucgagagaaauauuaccgaaaucguguaucugacaaacaccacgauugagaaggaaaucugcccuaaacucgcugaguaccggaauugguccaagccccagugugacauuaccggguucgccccuuuuucuaaagauaacagcauccgccuguccgcgggaggcgacaucugggugacaagagagcccuaugucucuugcgauccugacaaguguuaccaauucgcucuugggcagggaaccacacugaauaacgugcauagcaauaacaccguucgggaucgcacgccguauagaacacuccugaugaaugaacugggcgugcccuuucaccucgggaccaagcaggucugcauugccugguccucuagcuccugucaugacggaaaagccuggcugcacgugugcaucacaggcgaugacaagaacgcuaccgccagcuucauuuacaauggccggcuuguugauucuguggucuccuggagcaaagagauccugcgcacccaggaaucugagugugugugcauuaacgggacauguacgguggucaugaccgacggauccgcuagcggcaaggccgauacaaaaauccucuuuaucgaggaagggaagauuguucauaccuccacacugucuggaagcgcgcaacacguggaggaaugcuccugcuauccuagauaccccggcgugcggugugucugccgcgacaacuggaaggggagcaauagaccuaucguggauauuaacaucaaagaccacucuauuguuuccagcuaccuuuguucuggacuggugggcgacacgccccggaagaaugauagcuccucuagcucccauugccucgacccgaacaaugaggaaggcgggcacggagucaaaggcugggccuucgaugacgggaacgauguguggaugggacgcaccaucagcgagaagucuagacugggcuaugagacauuuaaaguuaucgaagggugguccaauccuaagagcaaacugcauauuaaccgccaggugaucgucgaccggggaaauagaucuggcuacuccggcauuuucagcguggaggggaaguccuguaucaaccggugcuuuuaugucgaacucauuagaggacgcaaggaggaaaccgaggugcuguggaccucuaauagcaucguuguguucuguggcacauccgggaccuacggaacaggcucuuggcccgauggggcugacauuaaccuuaugccuaucuga

SEQ ID NO: 211361 - RNA, 1410 nt, Artificial Sequence
  derived and/or modified CDS sequence (opt5) from neuraminidase__InfluenzaA__ADK99275
augaaccccaaucagaagaucauuaccaucggcagcgugucccugacaauuucuacgaucugcuucuuuaugcaaauugccguccucaucaccacaguuacccugcacuucaaacaguacgaguuuaacagcccuccgaauaaccaggugaugcuuugugaacccacaaucauugagagaaauaucaccgaaauuguguaucugacaaacaccacgaucgagaaggaaauuugcccuaaacucgcuggguaccggaauugguccaagccccagugugacaucaccggauucgccccuuuuucuaaagauaacagcauucgccuguccgcgggcggggacaucugggucacaagagagcccuaugugucuugcgauccugacaaguguuaccaauucgcucuuggacagggcaccacacugaauaacguucauagcaaugauaccgugcgggaccgcacgccguauagaacacuccugaugaacgagcuggggguccccuuucaccucggaaccaaacaggugugcaucgccugguccucuagcuccugucaugauggcaaggccuggcugcacguuugcauuacaggcgacgauaagaaugcuaccgccagcuucaucuacaacgggcggcuuguggacucugucguguccuggagcaaagaaauucugcgcacccaggagucugaaugugugugcaucaauggaacauguacggucguuaugaccgauggcuccgcuagcgggaaggccgacacaaaaauucucuuuaucgaggagggaaagaucgugcauaccuccacacugucuggcagcgcgcaacacguggaagagugcuccugcuauccuagauaccccgggguccggugugugugccgcgauaacuggaagggaagcaacagaccuauuguugacaucaauauuaaagaccacucuaucguguccagcuacgucuguucuggccuugugggcgauacgccccggaagaacgacagcuccucuagcucccauugccuggauccgaauaacgaagaagggggacacggcguuaaagggugggccuucgacgauggaaaugacguguggaugggccgcaccauuaacgagacaagcagacucggguaugagaccuuuaaggucaucgagggauggucuaauccuaaauccaagcugcagaucaaccgccaggugauugucgaucggggcaauagaagcggcuacucugggaucuucuccguggaaggaaaaagcuguauuaaccggugcuuuuauguugagcugaucagaggccgcaaggaagagaccgaagugcucuggacauccaauucuauugucguguucugugggaccagcggaacauacggcacgggguccuggcccgacggcgcugaucugaaccuuaugccuaucuga

SEQ ID NO: 211362 - RNA, 1410 nt, Artificial Sequence
  derived and/or modified CDS sequence (opt5) from neuraminidase__InfluenzaA__ADK99286
augaaccccaaucagaagaucauuaccaucggcagcgugucccugacaauuucuacgaucugcuucuuuaugcaaauugccauccucaucaccacagucacccugcacuucaaacaguacgaguuuaacccuccgcccaauaaccagguuacaccuagagaacccaccauuaucgagcggaauauuacagaaaucguguaucuuaccaacacgaccauugagaaggaaaucuguccuaaacuggcugaguaccgcaauuggagcaagccccagugcgacauuacaggguucgccccuuuuuccaaagauaacucuaucagacucagcgcgggaggcgacaucugggugacccgggagccguaugucuccugugaucccgacaagugcuaccaauucgcucuggggcagggaacaacccuuaauaacauucauucuaauaacacggugcgcgauagaacaccuuaucggacccugcucaugaaugaacugggcguucccuuucaccuggggacaaaacagguguguaucgccuggagcuccagcucuugccaugacggaaaggccuggcuccacgucuguauuaccggcgaugacaagaacgcuaccgccuccuucaucuacaauggccgccugguggauagcguugugucuugguccaaagagauucuuagaacacaggaaagcgagugcgucuguaucaacgggacgugcaccguggugaugacagacggaucugcuuccggcaaggccgauaccaaaauccuguuuauugaggaagggaagaucguccauacaagcacccucuccggaucugcgcaacacguugaggaauguagcugcuauccucgguaccccggcgugcgcugcguguguagagacaacuggaagggguccaaucggccgauugucgauaucaacauuaaagaccacagcaucgugucuuccuacguuugcagcggacuggugggcgacacgccucgcaagaaugauucuagcuccucuagccauugucuugaccccaacaaugaggaaggcgggcacggagucaaaggcugggccuucgaugacgggaacgauguguggaugggaagaacaaucuccgaaaagagccggcugggcuaugagaccuuuaaaguuauugagggguggucuaauccuaaguccaaacuccagaucaaccgccaggugauugucgacagaggaaaucggagcggcuacucuggcaucuucuccguggagggaaagagcugcauuaacagauguuuuuaugucgaacugauccgcgggcggaaggaggaaaccgaggugcuguggacauccaauucuauuguuguguucugcggcaccagcgggacauacggaacgggcuccuggcccgauggggcugacaucaaccucaugcccaucuga

SEQ ID NO: 211363 - RNA, 1410 nt, Artificial Sequence; identical to SEQ ID NO: 209664
  derived and/or modified CDS sequence (opt5) from neuraminidase__InfluenzaA__ADK99297

SEQ ID NO: 211364 - RNA, 1410 nt, Artificial Sequence
  derived and/or modified CDS sequence (opt5) from neuraminidase__InfluenzaA__ADK99308
augaaccccaaucagaagaucauuaccaucggcagcgugucccugacaauuucuacgaucugcuucuuuaugcaaauugccauccucgucaccacaguuacccugcacuucaaacaguacgaguuuaacagcccuccgaauaaccaggugaugcuuugugaacccacaaucauugagagaaauaucaccgaaauuguguaucugacaaacaccacgaucgagaaggaaauuugcccuaaacucgcugaguaccggaauugguccaagccccagugugacaucaccggguucgccccuuuuucuaaagauaacagcauucgccuguccgcgggaggcgacaucugggucacaagagagcccuaugugucuugcgauccugacaaguguuaccaauucgcucuugggcagggaaccacacugaauaacguucauagcaauaacaccgugcgggaucgcacgccguauagaacacuccugaugaaugaacugggcauccccuuucaccucgggaccaagcaggucugcauugccugguccucuagcuccugucaugacggaaaagccuggcugcacgugugcaucacaggcgaugacaagaacgcuaccgccagcuucauuuacaauggccggcuuguugauucuguggucuccuggagcaaagacauccugcgcacccaggagucugaaugugugugcauuaacgggacauguacgguggucaugaccgauggauccgcuagcggcaaggccgacacaaaaauccucuuuaucgaggaggggaagauuguucauaccuccacacugucuggaagcgcgcaacacguggaagagugcuccugcuauccuagauaccccggcgugcggugugucugccgcgauaacuggaaggggagcaauagaccuaucguggacauuaacaucaaagaccacucuauuguuuccagcuacguguguucuggacuugucggcgauacgccccggaagaaugacagcuccucuagcucccauugccuggauccgaacaaugaagagggcgggcacggagugaaaggcugggccuucgacgaugggaacgacguuuggaugggacgcaccaucagcgaaaagucuagacucggcuaugagacauuuaaagugaucgaggggugguccaauccuaagagcaaacugcagauuaaccggcaggucaucguggaucgcggaaauagaucuggcuacuccggcauuuucagcgucgaagggaaguccuguaucaaccggugcuuuuauguggagcugauuagaggacgcaaggaagagaccgaaguucucuggaccucuaauagcaucguggucuucuguggcacauccgggaccuacggaacaggcucuuggcccgacggggcuaacauuaaucugaugccuaucuga

SEQ ID NO: 211365 - RNA, 1413 nt, Artificial Sequence; identical to SEQ ID NO: 209533
  derived and/or modified CDS sequence (opt5) from neuraminidase__InfluenzaA__ADL14590

SEQ ID NO: 211366 - RNA, 1410 nt, Artificial Sequence; identical to SEQ ID NO: 210556
  derived and/or modified CDS sequence (opt5) from neuraminidase__InfluenzaA__ADL27992

SEQ ID NO: 211367 - RNA, 1410 nt, Artificial Sequence; identical to SEQ ID NO: 211195
  derived and/or modified CDS sequence (opt5) from neuraminidase__InfluenzaA__ADL28003

SEQ ID NO: 211368 - RNA, 1410 nt, Artificial Sequence; identical to SEQ ID NO: 211340
  derived and/or modified CDS sequence (opt5) from neuraminidase__InfluenzaA__ADL28014

SEQ ID NO: 211369 - RNA, 1410 nt, Artificial Sequence
  derived and/or modified CDS sequence (opt5) from neuraminidase__InfluenzaA__ADL28025
augaaccccaaucagaagaucauuaccaucggcagcgugucccugacaauuucuacgaucugcuucuuuaugcaaauugccauccucaucaccacagucacccugcacuucaaacaguacgaguuuaacagcccuccgaauaaccagguuaugcuuugugaacccacaauuaucgagagaaauauuaccgaaaucguguaucugacaaacaccacgauugagaagaaaaucugcccuaagcucgcugaauaccggaauugguccaaaccccagugugacauuaccggguucgccccuuuuucuaaggauaacagcauccgccuguccgcgggaggcgacaucugggugacaagagagcccuaugucucuugcgauccugacaaguguuaccaauucgcucuugggcagggaaccacacugaauaacgugcauagcaauaacaccguucgggaucgcacgccguauagaacacuccugaugaaugagcugggcgugcccuuucaccucgggaccaaacaggucugcauugccugguccucuagcuccugucaugacggaaaggccuggcugcacgugugcaucacaggcgaugacaaaaacgcuaccgccagcuucauuuacaauggccggcuuguugauucuguggucuccuggagcaaggaaauccugcgcacccaggagucugaaugugugugcauuaacgggacauguacgguggucaugaccgacggauccgcuagcggcaaagccgauacaaagauccucuuuaucgaggaggggaagauuguucauaccuccacacugucuggaagcgcgcaacacguggaagagugcuccugcuauccuagauaccccggcgugcggugugucugccgcgacaacuggaaagggagcaauagaccuaucguggauauuaacaucaaggaccacucuauuguuuccagcuaccuuuguucuggacuggugggcgacacgccccggaaaaaugauagcuccucuagcucccauugccucgacccgaacaaugaagagggcgggcacggagucaagggcugggccuucgaugacgggaacgauguguggaugggacgcaccaucagcgaaaaaucuagacugggcuaugagacauuuaagguuaucgaggggugguccaauccuaaaagcaagcugcagauuaaccgccaggugaucgucgaccggggaaauagaucuggcuacuccggcauuuucagcguggaagggaaguccuguaucaaccggugcuuuuaugucgagcucauuagaggacgcaaagaagagaccgaagugcuguggaccucuaauagcaucguuguguucuguggcacauccgggaccuacggaacaggcucuuggcccgauggggcugacauuaaccuuaugccuaucuga

SEQ ID NO: 211370 - RNA, 1410 nt, Artificial Sequence; identical to SEQ ID NO: 210556
  derived and/or modified CDS sequence (opt5) from neuraminidase__InfluenzaA__ADL28036

SEQ ID NO: 211371 - RNA, 1410 nt, Artificial Sequence; identical to SEQ ID NO: 208671
  derived and/or modified CDS sequence (opt5) from neuraminidase__InfluenzaA__ADL28047

SEQ ID NO: 211372 - RNA, 1410 nt, Artificial Sequence; identical to SEQ ID NO: 209977
  derived and/or modified CDS sequence (opt5) from neuraminidase__InfluenzaA__ADL28058

SEQ ID NO: 211373 - RNA, 1410 nt, Artificial Sequence; identical to SEQ ID NO: 211348
  derived and/or modified CDS sequence (opt5) from neuraminidase__InfluenzaA__ADL28069

SEQ ID NO: 211374 - RNA, 1410 nt, Artificial Sequence; identical to SEQ ID NO: 211195
  derived and/or modified CDS sequence (opt5) from neuraminidase__InfluenzaA__ADL28080

SEQ ID NO: 211375 - RNA, 1410 nt, Artificial Sequence; identical to SEQ ID NO: 210556
  derived and/or modified CDS sequence (opt5) from neuraminidase__InfluenzaA__ADL28091

SEQ ID NO: 211376 - RNA, 1410 nt, Artificial Sequence
  derived and/or modified CDS sequence (opt5) from neuraminidase__InfluenzaA__ADL28102
augaaccccaaucagaagaucauuaccaucggcagcgugucccugacaauuucuacgaucugcuucuuuaugcaaauugccauccucaucaccacagucacccugcacuucaaacaguacgaguuuaacagcccuccgaauaaccagguuaugcuuugugaacccacaauuaucgagagaaauauuaccgaaaucguguaucugacaaacaccacgauugagaaggaaaucugcccuaaacucgcugaguaccggaauugguccaagccccagugugacauuaccggguucgccccuuuuucuaaagauaacagcauccgccuguccgcgggaggcgacaucugggugacaagagagcccuaugucucuugcgauccugacaaguguuaccaauucgcucuugggcagggaaccacacugaauaacgugcauagcaauaacaccguucgggaucgcacgccguauagaacacuccugaugaaugaacugggcgugcccuuucaccucgggaccaagcaggucugcauugccugguccucuagcuccugucaugacggaaaagccuggcugcacgugugcaucacaggcgaugacaagaacgcuaccgccagcuucauuuacaauggccggcuuguugauucuguggucuccuggagcaaagacauccugcgcacccaggagucugaaugugugugcauuaacgggacauguacgguggucaugaccgauggauccgcuagcggcaaggccgacacaaaaauccucuuuaucgaggaggggaagauuguucauaccuccacacugucuggaagcgcgcaacacguggaagagugcuccugcuauccuagauaccccggcgugcggugugucugccgcgauaacuggaaggggagcaauagaccuaucguggacauuaacaucaaagaccacucuauuguuuccagcuacguguguucuggacuugucggcgauacgccccggaagaaugacagcuccucuagcucccauugccuggauccgaacaaugaagagggcgggcacggagugaaaggcugggccuucgacgaugggaacgacguuuggaugggacgcaccaucagcgaaaagucuagacucggcuaugagacauuuaaagugaucgaggggugguccaauccuaagagcaaacugcagauuaaccggcaggucaucguggaucgcggaaauagaucuggcuacuccggcauuuucagcgucgaagggaaguccuguaucaaccggugcuuuuauguggagcugauuagaggacgcaaggaagagaccgaaguucucuggaccucuaauagcaucguggucuucuguggcacauccgggaccuacggaacaggcucuuggcccgacggggcugauauuaaccugaugccuaucuga

SEQ ID NO: 211377 - RNA, 1410 nt, Artificial Sequence; identical to SEQ ID NO: 208671
  derived and/or modified CDS sequence (opt5) from neuraminidase__InfluenzaA__ADL28113

SEQ ID NO: 211378 - RNA, 1410 nt, Artificial Sequence
  derived and/or modified CDS sequence (opt5) from neuraminidase__InfluenzaA__ADL28129
augaaccccaaucagaagaucauuaccaucggcagcgugucccugacaauuucuacgaucugcuucuuuaugcaaauugccauccucgucaccacaguuacccugcacuucaaacaguacgaguuuaacagcccuccgaauaaccaggugaugcuuugugaacccacaaucauugagagaaauaucaccgaaauuguguaucugacaaacaccacgaucgagaaggaaauuugcccuaaacucgcugaguaccggaauugguccaagccccagugugacaucaccggguucgccccuuuuucuaaagauaacagcauucgccuguccgcgggaggcgacaucugggucacaagagagcccuaugugucuugcgauccugacaaguguuaccaauucgcucuugggcagggaaccacacugaauaacguucauagcaauaacaccgugcgggaucgcacgccguauagaacacuccugaugaaugaacugggcguccccuuucaccucgggaccaaacaggugugcaucgccugguccucuagcuccugucaugacggaaaggccuggcugcacguuugcauuacaggcgaugacaagaacgcuaccgccagcuucaucuacaauggccggcuuguggauucugucguguccuggagcaaagacauucugcgcacccaggagucugaaugugugugcaucaacgggacauguacggucguuaugaccgauggauccgcuagcggcaaggccgacacaaaaauucucuuuaucgaggaggggaagaucgugcauaccuccacacugucuggaagcgcgcaacacguggaagagugcuccugcuauccuagauaccccggcguccggugugugugccgcgauaacuggaaggggagcaauagaccuauuguugacaucaacauuaaagaccacucuaucguguccagcuacgucuguucuggacuugugggcgauacgccccggaagaaugacagcuccucuagcucccauugccuggauccgaacaaugaagagggcgggcacggaguuaaaggcugggccuucgacgaugggaacgacguguggaugggacgcaccauuagcgaaaagucuagacucggcuaugagacauuuaaagucaucgaggggugguccaauccuaagagcaaacugcagaucaaccgccaggugauugucgaucggggaaauagaucuggcuacuccggcaucuucagcguggaagggaaguccuguauuaaccggugcuuuuauguugagcugaucagaggacgcaaggaagagaccgaaauucucuggaccucuaauagcaucguggucuucuguggcacauccgggaccuacggaacaggcucuuggcccgacggggcuaacauuaaucugaugccuaucuga

SEQ ID NO: 211379 - RNA, 1410 nt, Artificial Sequence
  derived and/or modified CDS sequence (opt5) from neuraminidase__InfluenzaA__ADL28140
augaaccccaaucagaagaucauuaccaucggcagcgugucccugacaauuucuacgaucugcuucuuuaugcaaauugccauccucaucaccacagucacccugcacuucaaacaguacgaguuuaacagcccuccgaauaaccagguuaugcuuugugaacccacaauuaucgagagaaauauuaccgaaaucguguaucugacaaacaccacgauugagaaggaaaucugcccuaaacucgcugaguaccggaauugguccaagccccagugugacauuaccggguucgccccuuuuucuaaagauaacagcauccgccuguccgcgggaggcgacaucugggugacaagagagcccuaugucucuugcgauccugacaaguguuaccaauucgcucuugggcagggaaccacacugaauaacgugcauagcaauaacaccguucgggaucgcacgccguauagaacacuccugaugaaugaacugggcgugcccuuucaccucgggaccaagcaggucugcauugccugguccucuagcuccugucaugacggaaaagccuggcugcacgugugcaucacaggcgaugacaagaacgcuaccgccagcuucauuuacaauggcaaacuuguugauucuguggucuccuggagcaaggagauccugcggacccaggaaucugagugugugugcauuaacgggacauguacgguggucaugaccgacggauccgcuagcggcaaagccgauacaaagauccucuuuaucgaggaagggaagauuguucauaccuccacacugucuggaagcgcgcaacacguggaggaaugcuccugcuauccucgcuaccccggcgugagaugugucugccgggacaacuggaaagggagcaaucgcccuaucguggauauuaacaucaaggaccacucuauuguuuccagcuacguguguucuggacuugucggcgacacccccagaaagaaugauagcuccucuagcucccauugccuggacccgaacaaugaggaaggcgggcacggagugaaaggcugggccuucgaugacgggaacgauguuuggaugggacggacgaucagcgagaaaucucgccucggcuaugagacauuuaaggugaucgaagggugguccaauccuaaaagcaagcugcagauuaacagacaggucaucguggaccggggaaaucgcucuggcuacuccggcauuuucagcgucgaggggaaguccuguaucaacagaugcuuuuauguggaacugauucggggaagaaaagaggaaaccgagguucucuggaccucuaauagcaucguggucuucuguggcacauccgggaccuacggaacaggcucuuggcccgauggggcuaacauuaaucugaugccuaucuga

SEQ ID NO: 211380 - RNA, 1410 nt, Artificial Sequence; identical to SEQ ID NO: 210556
  derived and/or modified CDS sequence (opt5) from neuraminidase__InfluenzaA__ADL28151

SEQ ID NO: 211381 - RNA, 1410 nt, Artificial Sequence; identical to SEQ ID NO: 209977
  derived and/or modified CDS sequence (opt5) from neuraminidase__InfluenzaA__ADL28162

SEQ ID NO: 211382 - RNA, 1410 nt, Artificial Sequence; identical to SEQ ID NO: 211195
  derived and/or modified CDS sequence (opt5) from neuraminidase__InfluenzaA__ADL28173

SEQ ID NO: 211383 - RNA, 1410 nt, Artificial Sequence; identical to SEQ ID NO: 210556
  derived and/or modified CDS sequence (opt5) from neuraminidase__InfluenzaA__ADL28184

SEQ ID NO: 211384 - RNA, 1410 nt, Artificial Sequence
  derived and/or modified CDS sequence (opt5) from neuraminidase__InfluenzaA__ADL28195
augaaccccaaucagaagaucauuaccaucggcagcgugucccugacaauuucuacgaucugcuucuuuaugcaaauugccauccucaucaccacagucacccugcacuucaaacaguacgaguuuaacagcccuccgaauaaccagguuaugcuuugugaacccacaauuaucgagagaaauauuaccgaaaucguguaucugacaaacaccacgauugagaaggaaaucugcccuaaacucgcugaguaccggaauugguccaagccccagugugacauuaccggguucgccccuuuuucuaaagauaacagcauccgccuguccgcgggaggcgacaucugggugacaagagagcccuaugucucuugcgauccugacaaguguuaccaauucgcucuugggcagggaaccacacugaauaacgugcauagcaauaacaccguucgggaucgcacgccguauagaacacuccugaugaaugaacugggcgugcccuuucaccucgggaccaagcaggucugcauugccugguccucuagcuccugucaugacggaaaagccuggcugcacgugugcaucacaggcgaugacaagaacgcuaccgccagcuucauuuacaauggccggcuuguugauucuguggucuccuggagcaaagagauccugcgcacccaggaaucugagugugugugcgugaacgggacauguacggucguuaugaccgacggauccgcuagcggcaaggccgauacaaaaauucucuuuaucgaggaagggaagaucgugcauaccuccacacugucuggaagcgcgcaacacguggaggaaugcuccugcuauccuagauaccccggcguccggugugugugccgcgacaacuggaaggggagcaauagaccuauuguugauaucaacauuaaagaccacucuaucguguccagcuacgucuguucuggacuugugggcgacacgccccggaagaaugauagcuccucuagcucccauugccuggacccgaacaaugaggaaggcgggcacggaguuaaaggcugggccuucgaugacgggaacgauguguggaugggacgcaccauuagcgagaagucuagacucggcuaugagacauuuaaagucaucgaagggugguccaauccuaagagcaaacugcagaucaaccgccaggugauugucgaccggggaaauagaucuggcuacuccggcaucuucagcguggaggggaaguccuguauuaaccggugcuuuuauguugaacugaucagaggacgcaaggaggaaaccgaggugcucuggaccucuaauagcauugucguguucuguggcacauccgggaccuacggaacaggcucuuggcccgauggggcugacaucaaccugaugccuauuuga

SEQ ID NO: 211385 - RNA, 1410 nt, Artificial Sequence; identical to SEQ ID NO: 211345
  derived and/or modified CDS sequence (opt5) from neuraminidase__InfluenzaA__ADL28206

SEQ ID NO: 211386 - RNA, 1410 nt, Artificial Sequence; identical to SEQ ID NO: 209664
  derived and/or modified CDS sequence (opt5) from neuraminidase__InfluenzaA__ADL28217

SEQ ID NO: 211387 - RNA, 1410 nt, Artificial Sequence; identical to SEQ ID NO: 210556
  derived and/or modified CDS sequence (opt5) from neuraminidase__InfluenzaA__ADL28228

SEQ ID NO: 211388 - RNA, 1410 nt, Artificial Sequence; identical to SEQ ID NO: 211195
  derived and/or modified CDS sequence (opt5) from neuraminidase__InfluenzaA__ADL28239

SEQ ID NO: 211389 - RNA, 1410 nt, Artificial Sequence; identical to SEQ ID NO: 209977
  derived and/or modified CDS sequence (opt5) from neuraminidase__InfluenzaA__ADL28250

SEQ ID NO: 211390 - RNA, 1410 nt, Artificial Sequence; identical to SEQ ID NO: 211195
  derived and/or modified CDS sequence (opt5) from neuraminidase__InfluenzaA__ADL28261

SEQ ID NO: 211391 - RNA, 1410 nt, Artificial Sequence; identical to SEQ ID NO: 210556
  derived and/or modified CDS sequence (opt5) from neuraminidase__InfluenzaA__ADL28373

SEQ ID NO: 211392 - RNA, 1410 nt, Artificial Sequence; identical to SEQ ID NO: 208675
  derived and/or modified CDS sequence (opt5) from neuraminidase__InfluenzaA__ADL28387

SEQ ID NO: 211393 - RNA, 1410 nt, Artificial Sequence
  derived and/or modified CDS sequence (opt5) from neuraminidase__InfluenzaA__ADL28391
augaaccccaaucagaagaucauuaccaucggcagcgugucccugacaauuucuacgaucugcuucuuuaugcaaauugccauccucaucaccacagucacccugcacuucaaacaguacgaguuuaacagcuccccuaauaaccagguuaugcuuugugaaccgacaauuaucgagagaaauauuaccgaaaucguguaucugacaaacaccacgauugagaaggaaaucugccccaaacucgcugaguaccggaauuggucuaagccucagugugacauuaccggguucgcccccuuuagcaaagauaacuccauccgccugucugcgggaggcgacaucugggugacaagagucccuuaugugagcugcgaucccgacaaguguuaccaauucgcucuugggcagggaaccacacugaauaacguucauuccaauaacaccgugcgggaucgcacgccuuauagaacacuccugaugaaugagcugggcgucccguuucaccucgggaccaaacaggugugcauugccuggucuagcuccagcugucaugacggaaaggccuggcugcacguuugcaucacaggcgaugacaagaacgcuaccgccucuuucauuuacaauggccggcuuguggauuccaucgucagcuggucuaaagaaauucugcgcacccaggaguccgaaugugugugcaucaacgggacauguacgguggucaugaccgacggaagcgcuuccggcaaggccgauacaaaaauccucuuuauugaggaggggaagaucguucauaccucuacacugagcggauccgcgcaacacguggaagagugcagcugcuaucccagauacccuggcgugcggugugucugccgcgacaacuggaaggggucuaauagacccauuguggauaucaacauuaaagaccacuccaucguuagcucuuacguguguagcggacuugucggcgacaccccucggaagaaugauuccucuagcuccagccauugccuggaccccaacaaugaagagggcgggcacggagugaaaggcugggccuucgaugacgggaacgauguuuggaugggacgcacgaucucugaaaaguccagacucggcuaugagacauuuaaagugauugagggguggagcaauccgaagucuaaacugcagaucaaccggcaggucauuguggaccgcggaaauagauccggcuacagcggcaucuucuccgucgaagggaagucuuguauuaaccggugcuuuuauguggagcugaucagaggacgcaaggaagagaccgaaguucucuggaccagcaauuccauuguggucuucuguggcacaucugggaccuacggaacaggcagcuggccugauggggcugacaucaaccugaugcccaucuga

SEQ ID NO: 211394 - RNA, 1410 nt, Artificial Sequence
  derived and/or modified CDS sequence (opt5) from neuraminidase__InfluenzaA__ADL28395
augaaccccaaucagaagaucauuaccaucggcagcgugucccugacaauugccacgaucugcuuccucaugcaaauugcuauccuggucaccacaguuacccuucacuuuaaacaguacgaguguaacucuccuccgaauaaccaggugaugcugugcgaacccgccaucauugagagaaauaucacagaaauuguguaucucaccaacacaaccaucgagaaggaaauuuguccuaaacuggcggaguaccggaauuggagcaagccccagugcaacaucacgggguucgcuccuuuuuccaaagacaauucuauucgccuuagcgccggaggcgauaucugggucaccagagugcccuauguuuccugugacccugauaagugcuaccaauucgcccuggggcagggaacaacccucaacaauggccauucuaacgacacagugcacgaucggaccccguaucgcacgcugcugaugaaugagcucgggguccccuuucaucugggaacaagacagguguguaucgcuuggagcuccagcucuugccacgacggcaaggccuggcuucauguuugugugaccggcgaugacgaaaacgcuacagccuccuucauuuacaaugggcggcuggucgauagcaucggaucuugguccaaaaagauucuccgcacccaggagagcgaaugcguguguaucaacgggaccugcacaguggucaugacggacggcucugcguccggaaaagccgauaccaagauucuguuuaucgaggagggcaaaaucguuaacauuagcacacuuuccgggucugcucaacacguggaagagugcagcuguuauccuagauaccccggagugcggugcgucugucgcgacaauuggaagggcuccaacagaccuaucguggauauuaauguuaaggacuacagcaucgugucuuccuaugucugcagcggccuggugggggacacaccccggaaaaacgauucuuucagcuccucucacugucucgacccgaauaacgaagagggaggccaugggguuaagggaugggccuuugaugacggcaaugauguguggauggggcgcaccauuagcgaaaaauucagauccggauacgagaccuuuaaggucaucgagggcuggagcaaaccuaacucuaagcugcagaucaaucgccaggugauugucgaacggggcaacagauccggguauagcggaaucuucucuguggagggcaaauccugcauuaaucgguguuuuuacguugaacugaucagagggcgcaaggaggaaacggaggugugguggacaagcaacuccauugucguguucugcggaaccucuggcaccuaugggacaggcagcuggcccgacggagcugauaucaaucucaugccuauuuga

SEQ ID NO: 211395 - RNA, 1410 nt, Artificial Sequence; identical to SEQ ID NO: 208810
  derived and/or modified CDS sequence (opt5) from neuraminidase__InfluenzaA__ADL29675

SEQ ID NO: 211396 - RNA, 1410 nt, Artificial Sequence; identical to SEQ ID NO: 208810
  derived and/or modified CDS sequence (opt5) from neuraminidase__InfluenzaA__ADL29685

SEQ ID NO: 211397 - RNA, 1410 nt, Artificial Sequence
  derived and/or modified CDS sequence (opt5) from neuraminidase__InfluenzaA__ADL29695
augaaccccaaucagaagaucauuaccaucggcagcgugugcaugacaauugggauggccaaccugauccuccaaauuggaaauaucaucuccauuuggaucucucacagcauucagcugggcaaccagaaucagaucgagacguguaaccaauccgucauuaccuacgaaaauaacacauggguuaaucagaccuaugugaacaucucuaauacaaacuucgcugccgggcagagcguggucuccgugaaacuugcgggaaauucuagccugugcccuguuuccggcugggcuauuuacagcaaggacaacucuaucagaaucggguccaaaggagauguguuugucauucgggagccguucaucagcuguucuccccucgaaugccgcaccuuuuuccugacacagggcgcccuucugaaugacaagcauuccaacggcaccauuaaagauagaagcccuuaucggacgcucaugucuugucccaucggggaggugccuucccccuacaacagccgcuuugaauccguugccuggucugcuagcgccugccacgacggaauuaauuggcugaccaucggcaucuccgggccugauaacggagcuguggccguccugaaguauaauggcauuaucacagacaccauuaagagcuggagaaacaauauccuccggacacaagagucugagugugcgugcgugaacggguccuguuucaccgugaugacggauggaccgagcgacggccaggccucuuacaaaauuuuucgcaucgaaaagggcaaaaucgucaagagcguugagaugaaugcucccaacuaucauuacgaagagugcuccuguuacccugauucuagcgagauuacaugcgugugcagagacaauuggcacggguccaaccggcccugggugagcuucaaucagaaccuggaauaucagaucggauacauuuguucuggcaucuuuggggauaauccucgccccaacgacaaaaccggauccugcggcccggucagcucuaauggggccaacggagugaagggcuucuccuuuaaguauggcaacgggguuuggauuggaagaacaaaaagcaucuccucucggaauggcuucgagaugauuugggauccuaacggguggaccggaaccgacaauaacuuuagcaucaagcaagacaucgugggcauuaaugaaugguccggguacucuggcagcuucguccagcaucccgagcuuacaggacuggauuguauccgcccuugcuucuggguggaacucauuagaggccggcccaaagagaacacgaucuggaccuccgggagcucuauuuccuuuuguggaguuaauagcgacaucgugggcuggucuuggcccgauggggcugagcugccuuucacaaucgacaaguga

SEQ ID NO: 211398 - RNA, 1410 nt, Artificial Sequence; identical to SEQ ID NO: 208810
  derived and/or modified CDS sequence (opt5) from neuraminidase__InfluenzaA__ADL29705

SEQ ID NO: 211399 - RNA, 1410 nt, Artificial Sequence; identical to SEQ ID NO: 211397
  derived and/or modified CDS sequence (opt5) from neuraminidase__InfluenzaA__ADL29733

SEQ ID NO: 211400 - RNA, 1410 nt, Artificial Sequence; identical to SEQ ID NO: 208810
  derived and/or modified CDS sequence (opt5) from neuraminidase__InfluenzaA__ADL29743

SEQ ID NO: 211401 - RNA, 1410 nt, Artificial Sequence
  derived and/or modified CDS sequence (opt5) from neuraminidase__InfluenzaA__ADL29753
augaaccccaaucagaagaucauuaccaucggcagcgugugcauggccauugggauggcuaaccugauccuccaaauuggaaauaucaucuccauuuggaucucucacagcauucagcugggcaaccagaaucagaucgagacauguaaccaauccgucauuacguacgaaaauaacaccuggguuaaucagacauaugugaacaucucuaauaccaacuucgccgcggggcagagcguggucuccgugaaacuugcuggaaauucuagccugugcccuguuuccggcugggccauuuacagcaaggacaacucuaucagaaucggguccaaaggagauguguuugucauucgggagccguucaucagcuguucuccccucgaaugccgcacauuuuuccugacccagggcgcccuucugaaugacaagcauuccaacggcacaauuaaagauagaagcccuuaucggacccucaugucuugucccaucggggaggugccuucccccuacaacagccgcuuugaauccguugcuuggucugccagcgcuugccacgacggaauuaauuggcugacgaucggcaucuccgggccugauaacggagccguggcgguccugaaguauaauggcauuaucaccgacacaauuaagagcuggagaaacaauauccuccggacccaagagucugagugugccugcgugaacggguccuguuucacagugaugaccgauggaccgagcgacggccaggcuucuuacaaaauuuuucgcaucgaaaagggcaaaaucgucaagagcguugagaugaaugcccccaacuaucauuacgaagagugcuccuguuacccugauucuagcgagauuacgugcgugugcagagacaauuggcacggguccaaccggcccugggugagcuucaaucagaaccuggaauaucagaucggauacauuuguucuggcaucuuuggggauaauccucgccccaacgacaaaacaggauccugcggcccggucagcucuaauggggcuaacggagugaagggcuucuccuuuaaguauggcaacgggguuuggauuggaagaaccaaaagcaucuccucucggaauggcuucgagaugauuugggauccuaacggguggacaggaaccgacaauaacuuuagcaucaagcaagacaucgugggcauuaaugaaugguccggguacucuggcagcuucguccagcaucccgagcuuaccggacuggauuguauccgcccuugcuucuggguggaacucauuagaggccggcccaaagagaacacaaucuggacguccgggagcucuauuuccuuuuguggaguuaauagcgacaucgugggcuggucuuggcccgauggggccgagcugccuuucaccaucgacaaguga

SEQ ID NO: 211402 - RNA, 1410 nt, Artificial Sequence; identical to SEQ ID NO: 208810
  derived and/or modified CDS sequence (opt5) from neuraminidase__InfluenzaA__ADL29763

SEQ ID NO: 211403 - RNA, 1410 nt, Artificial Sequence; identical to SEQ ID NO: 211397
  derived and/or modified CDS sequence (opt5) from neuraminidase__InfluenzaA__ADL29773

SEQ ID NO: 211404 - RNA, 1410 nt, Artificial Sequence; identical to SEQ ID NO: 208810
  derived and/or modified CDS sequence (opt5) from neuraminidase__InfluenzaA__ADL29783

SEQ ID NO: 211405 - RNA, 1410 nt, Artificial Sequence; identical to SEQ ID NO: 211397
  derived and/or modified CDS sequence (opt5) from neuraminidase__InfluenzaA__ADL29882

SEQ ID NO: 211406 - RNA, 1410 nt, Artificial Sequence
  derived and/or modified CDS sequence (opt5) from neuraminidase__InfluenzaA__ADL32020
augaaccccaaucagaagaucauuaccaucggcagcgugugcaugacaauugggauggccaaccugauccuccaaauuggaaauaucaucuccacguggauuucucacagcauccagcugggcaaccagaaucagauugagaccuguaaccaauccgucaucacauacgaaaauaacaccuggguuaaucagacauaugugaacauuucuaauaccaacuucgcugccgggcagagcguggucuccgugaaacuugcgggaaauucuagccugugcccuguuuccggcugggcuaucuacagcaaggacaacucuauuagaaucggguccaaaggagauguguuugucauccgggagccguucauuagcuguucuccccucgaaugccgcacauuuuuccugacccagggcgcccuucugaaugacaagcauuccaacggcacgaucaaagauagaagcccuuaucggacccucaugucuugucccauuggggaggugccuucccccuacaacagccgcuuugaauccguugccuggucugcuagcgccugccacgacggaaucaauuggcugacaauuggcaucuccgggccugauaacggagcuguggccguccugaaguauaauggcaucauuaccgacacaaucaagagcuggagaaacaauauucuccggacccaagagucugagugugcgugcgugaacggguccuguuucacggugaugacagauggaccgagcgacggccaggccucuuacaaaaucuuucgcauugaaaagggcaaaaucgucaagagcguugagaugaaugcucccaacuaucauuacgaagagugcuccuguuacccugauucuagcgagauuaccugcgugugcagagacaauuggcacggguccaaccggcccugggugagcuucaaucagaaccuggaauaucagaucggauacaucuguucuggcauuuuuggggauaauccucgccccaacgacaaaacaggauccugcggcccggucagcucuaauggggccaacggagugaagggcuucuccuuuaaguauggcaacgggguuuggaucggaagaaccaaaagcauuuccucucggaauggcuucgagaugaucugggauccuaacggguggaccggaacagacaauaacuuuagcauuaagcaagacaucgugggcaucaaugaaugguccggguacucuggcagcuucguccagcaucccgagcuuacgggacuggauuguauucgcccuugcuucuggguggaacucaucagaggccggcccaaagagaacaccauuuggacauccgggagcucuaucuccuuuuguggaguuaauagcgacaccgugggcuggucuuggcccgauggggcugagcugccuuucacaauugacaaguga

SEQ ID NO: 211407 - RNA, 1410 nt, Artificial Sequence; identical to SEQ ID NO: 211397
  derived and/or modified CDS sequence (opt5) from neuraminidase__InfluenzaA__ADL32030

SEQ ID NO: 211408 - RNA, 1410 nt, Artificial Sequence; identical to SEQ ID NO: 208810
  derived and/or modified CDS sequence (opt5) from neuraminidase__InfluenzaA__ADL32040

SEQ ID NO: 211409 - RNA, 1410 nt, Artificial Sequence; identical to SEQ ID NO: 208810
  derived and/or modified CDS sequence (opt5) from neuraminidase__InfluenzaA__ADL32050

SEQ ID NO: 211410 - RNA, 1410 nt, Artificial Sequence; identical to SEQ ID NO: 208810
  derived and/or modified CDS sequence (opt5) from neuraminidase__InfluenzaA__ADL32060

SEQ ID NO: 211411 - RNA, 1410 nt, Artificial Sequence; identical to SEQ ID NO: 208810
  derived and/or modified CDS sequence (opt5) from neuraminidase__InfluenzaA__ADL32093

SEQ ID NO: 211412 - RNA, 1410 nt, Artificial Sequence; identical to SEQ ID NO: 208810
  derived and/or modified CDS sequence (opt5) from neuraminidase__InfluenzaA__ADL32117

SEQ ID NO: 211413 - RNA, 1410 nt, Artificial Sequence; identical to SEQ ID NO: 208810
  derived and/or modified CDS sequence (opt5) from neuraminidase__InfluenzaA__ADL32347

SEQ ID NO: 211414 - RNA, 1410 nt, Artificial Sequence
  derived and/or modified CDS sequence (opt5) from neuraminidase__InfluenzaA__ADL32357
augaaccccaaucagaagaucauuaccaucggcagcgugugcaugacaauugggauggccaaccugauccuccaaauuggaaauaucaucuccauuuggaucucucacagcauucagcugggcaaccagaaucagaucgagacguguaaccaauccgucauuaccuacgaaaauaacacauggguuaaucagaccuaugugaacaucucuaauacaaacuucgcugccgggcagagcguggucuccgugaaacuugcgggaaauucuagccugugcccuguuuccggcugggcuauuuacagcaaggacaacucuaucagaaucggguccaaaggagauguguuugucauucgggagccguucaucagcuguucuccccucgaaugccgcaccuuuuuccugacacagggcgcccuucugaaugacaagcauuccaacggcaccauuaaagauagaagcccuuaucggacgcucaugucuugucccaucggggaggugccuucccccuacaacagccgcuuugaauccguugccuggucugcuagcgccugccacgacggaauuaauuggcugaccaucggcaucuccgggccugauaacggagcuguggccguccugaaguauaauggcauuaucacagacaccauuaagagcuggagaaacaauauccuccggacacaagagucugagugugcgugcgugaacggguccuguuucaccgugaugacggauggaccgagcgacggccaggccucuuacaaaauuuuucgcaucgaaaagggcaaaaucgucaagagcguugagaugaaugcucccaacuaucauuacgaagagugcuccuguuacccugauucuagcgagauuacaugcgugugcagagacaauuggcacggguccaaccggcccugggugagcuucaaucagaaccuggaauaucagaucggauacauuuguucuggcaucuuuggggauaauccucgccccaacgacaaaaccggauccugcggcccggucagcucuaauggggccaacggagugaagggcuucuccuuuaaguauggcaacgggguuuggauuggaagaacaaaaagcaucuccucucggaauggcuucgagaugauuugggauccuaacggguggaccggaaccgacaauaacuuuagcaucaagcaagacaucgugggcauuaaugaaugguccggguacucuggcagcuucguccagcaucccgagcuuacaggacuggauuguauccgcccuugcuucuggguggaacucauuagaggccggcccaaagagaacacgaucuggaccuccgggagcucuauuuccuuuuguggaguuaauagcgacacagugggcuggucuuggcccgauggggcugagcugccuuucaccgucgacaaguga

SEQ ID NO: 211415 - RNA, 1410 nt, Artificial Sequence; identical to SEQ ID NO: 208810
  derived and/or modified CDS sequence (opt5) from neuraminidase__InfluenzaA__ADL32367

SEQ ID NO: 211416 - RNA, 1410 nt, Artificial Sequence; identical to SEQ ID NO: 208810
  derived and/or modified CDS sequence (opt5) from neuraminidase__InfluenzaA__ADL32377

SEQ ID NO: 211417 - RNA, 1410 nt, Artificial Sequence; identical to SEQ ID NO: 208810
  derived and/or modified CDS sequence (opt5) from neuraminidase__InfluenzaA__ADL32387

SEQ ID NO: 211418 - RNA, 1410 nt, Artificial Sequence; identical to SEQ ID NO: 208810
  derived and/or modified CDS sequence (opt5) from neuraminidase__InfluenzaA__ADL32397

SEQ ID NO: 211419 - RNA, 1410 nt, Artificial Sequence; identical to SEQ ID NO: 208810
  derived and/or modified CDS sequence (opt5) from neuraminidase__InfluenzaA__ADL32407

SEQ ID NO: 211420 - RNA, 1410 nt, Artificial Sequence; identical to SEQ ID NO: 208810
  derived and/or modified CDS sequence (opt5) from neuraminidase__InfluenzaA__ADL32417

SEQ ID NO: 211421 - RNA, 1410 nt, Artificial Sequence
  derived and/or modified CDS sequence (opt5) from neuraminidase__InfluenzaA__ADL32427
augaaccccaaucagaagaucauuaccaucggcagcgugugcaugacaauugggauggccaaccugauccuccaaauuggaaauaucaucuccauuuggaucucucacagcauucagcugggcaaccagaaucagaucgagacguguaaccaauccgucauuaccuacgaaaauaacacauggguuaaucagaccuaugugaacaucucuaauacaaacuucgcugccgggcagagcguggucuccgugaaacuugcgggaaauucuagccugugcccuguuuccggcugggcuauuuacagcaaggacaacucuaucagaaucggguccaaaggagauguguuugucauucgggagccguucaucagcuguucuccccucgaaugccgcaccuuuuuccugacacagggcgcccuucugaaugacaagcauuccaacggcaccauuaaagauagaagcccuuaucggacgcucaugucuugucccaucggggaggugccuucccccuacaacagccgcuuugaauccguugccuggucugcuagcgccugccacgacggaauuaauuggcugaccaucggcaucuccgggccugauaacggagcuguggccguccugaaguauaauggcauuaucacagacaccauuaagagcuggagaaacaauauccuccggacacaagagucugagugugcgugcgugaacggguccuguuucaccgugaugacggauggaccgagcgacggccaggccucuuacaaaauuuuucgcaucgaaaagggcaaaaucgucaagagcguugagaugaaugcucccaacuaucauuacgaagagugcuccuguuacccugauucuagcgagauuacaugcgugugcagagacaauuggcacggguccaaccggcccugggugagcuucaaucagaaccuggaauaucagaucggauacauuuguucuggcaucuuuggggauaauccucgccccaacgacaaaaccggauccugcggcccggucagcucuaauggggccaacggagugaagggcuucuccuuuaaguauggcaacgggguuuggauuggaagaacaaaaagcaucuccucucggaauggcuucgagaugauuugggauccuaacggguggaccggaaccgacaauaacuuuagcaucaagcaagacaucgugggcauuaaugaaugguccggguacucuggcagcuucguccagcaucccgagcuuacaggacuggauuguauccgcccuugcuucuggguggaacucauuagaggccggcccaaagagaagacgaucuggaccuccgggagcauuaucucuuuuuguggaguuaacuccgacacagugggcuggagcuggcccgauggggcugagcugccuuucaccaucgacaaauga

SEQ ID NO: 211422 - RNA, 1410 nt, Artificial Sequence; identical to SEQ ID NO: 208810
  derived and/or modified CDS sequence (opt5) from neuraminidase__InfluenzaA__ADL32447

SEQ ID NO: 211423 - RNA, 1410 nt, Artificial Sequence
  derived and/or modified CDS sequence (opt5) from neuraminidase__InfluenzaA__ADL32457
augaaccccaaucagaagaucauuaccaucggcagcgugugcaugacaauugggauggccaaccugauccuccaaauuggaaauaucaucuccauuuggaucucucacagcauucagcugggcaaccagaaucagaucgagacguguaaccaauccgucauuaccuacgaaaauaacacauggguuaaucagaccuaugugaacaucucuaauacaaacuucgcugccgggcagagcguggucuccgugaaacuugcgggaaauucuagccugugcccuguuuccggcugggcuauuuacagcaaggacaaaucuaucagaaucggguccaagggagauguguuugucauucgggagccguucaucagcuguucuccccucgaaugccgcaccuuuuuccugacacagggcgcccuucugaacgacaaacauuccaauggcaccauuaaggauagaagcccuuaucggacgcucaugucuugucccaucggggaggugccuucccccuacaacagccgcuuugaauccguugccuggucugcuagcgccugccacgacggaauuuccuggcugaccaucggcaucagcgggccugauaacggagcuguggccguccugaaguauaauggcauuaucacagacaccauuaaaucuuggagaaacaauauccuccggacacaagaguccgagugugcgugcgugaacgggagcuguuucaccgugaugacggauggaccgucugacggccaggccagcuacaagauuuuucgcaucgaaaaaggcaagaucgucaaauccguugagaugaaugcucccaacuaucauuacgaagagugcucuuguuacccugauagcuccgagauuacaugcgugugcagagacaauuggcacgggagcaaccggcccugggugucuuucaaucagaaccuggaauaucagaucggauacauuuguuccggcaucuuuggggauaauccucgccccaacgacaagaccggaagcugcggcccggucucuuccaauggggccaacggagugaagggcuucagcuuuaaauauggcaaugggguuuggauuggaagaacaaaguccaucucuagccggaacggcuucgagaugauuugggauccuaacggguggaccggaaccgacaauaacuuuuccaucaaacaagacaucgugggcauuaaugaauggucuggguacagcggcuccuucguccagcaucccgagcuuacaggacuggauuguauccgcccuugcuucuggguggaacucauuagaggccggcccaaggagaacacgaucuggaccagcgggucuuccauuagcuuuuguggaguuucuuccgacacagugggcuggagcuggcccgauggggcugagcugccuuucaccaucgacaaauga

SEQ ID NO: 211424 - RNA, 1410 nt, Artificial Sequence; identical to SEQ ID NO: 209987
  derived and/or modified CDS sequence (opt5) from neuraminidase__InfluenzaA__ADL32487

SEQ ID NO: 211425 - RNA, 1410 nt, Artificial Sequence; identical to SEQ ID NO: 208810
  derived and/or modified CDS sequence (opt5) from neuraminidase__InfluenzaA__ADL32497

SEQ ID NO: 211426 - RNA, 1410 nt, Artificial Sequence; identical to SEQ ID NO: 208810
  derived and/or modified CDS sequence (opt5) from neuraminidase__InfluenzaA__ADL32507

SEQ ID NO: 211427 - RNA, 1410 nt, Artificial Sequence; identical to SEQ ID NO: 210272
  derived and/or modified CDS sequence (opt5) from neuraminidase__InfluenzaA__ADL32517

SEQ ID NO: 211428 - RNA, 1410 nt, Artificial Sequence; identical to SEQ ID NO: 209987
  derived and/or modified CDS sequence (opt5) from neuraminidase__InfluenzaA__ADL32527

SEQ ID NO: 211429 - RNA, 1410 nt, Artificial Sequence; identical to SEQ ID NO: 208810
  derived and/or modified CDS sequence (opt5) from neuraminidase__InfluenzaA__ADL32537

SEQ ID NO: 211430 - RNA, 1410 nt, Artificial Sequence; identical to SEQ ID NO: 209697
  derived and/or modified CDS sequence (opt5) from neuraminidase__InfluenzaA__ADL32547

SEQ ID NO: 211431 - RNA, 1410 nt, Artificial Sequence; identical to SEQ ID NO: 210161
  derived and/or modified CDS sequence (opt5) from neuraminidase__InfluenzaA__ADL32673

SEQ ID NO: 211432 - RNA, 1410 nt, Artificial Sequence; identical to SEQ ID NO: 208810
  derived and/or modified CDS sequence (opt5) from neuraminidase__InfluenzaA__ADL32683

SEQ ID NO: 211433 - RNA, 1410 nt, Artificial Sequence; identical to SEQ ID NO: 208800
  derived and/or modified CDS sequence (opt5) from neuraminidase__InfluenzaA__ADL32693

SEQ ID NO: 211434 - RNA, 1410 nt, Artificial Sequence; identical to SEQ ID NO: 210033
  derived and/or modified CDS sequence (opt5) from neuraminidase__InfluenzaA__ADL32703

SEQ ID NO: 211435 - RNA, 1410 nt, Artificial Sequence; identical to SEQ ID NO: 208800
  derived and/or modified CDS sequence (opt5) from neuraminidase__InfluenzaA__ADL32713

SEQ ID NO: 211436 - RNA, 1410 nt, Artificial Sequence; identical to SEQ ID NO: 208810
  derived and/or modified CDS sequence (opt5) from neuraminidase__InfluenzaA__ADL32723

SEQ ID NO: 211437 - RNA, 1410 nt, Artificial Sequence; identical to SEQ ID NO: 210491
  derived and/or modified CDS sequence (opt5) from neuraminidase__InfluenzaA__ADL32733

SEQ ID NO: 211438 - RNA, 1410 nt, Artificial Sequence; identical to SEQ ID NO: 210491
  derived and/or modified CDS sequence (opt5) from neuraminidase__InfluenzaA__ADL32743

SEQ ID NO: 211439 - RNA, 1410 nt, Artificial Sequence
  derived and/or modified CDS sequence (opt5) from neuraminidase__InfluenzaA__ADL39139
augaaccccaaucagaagaucauuaccaucggcagcgugucccugacaauuucuacgaucugcuucuuuaugcaaauugccauccucaucaccacagucacccugcacuucaaacaguacgaguuuaacagcccuccgaauaaccagguuaugcuuuccgaacccacaauuaucgagagaaauauuaccgaaaucguguaucugacaaacaccacgauugagaaggaaaucuguccuaaacucgcugaguaccggaauuggucuaagccccagugcgacauuaccggguucgccccuuuuagcaaagauaacuccauccgccugucugcgggaggcgacaucugggugacaagagagcccuaugucagcugugauccugacaagugcuaccaauucgcucuugggcagggaaccacacugaauaacgugcauuccaauaacaccguucgggaacgcacgccguauagaacacuccugaugaaugagcugggcgugcccuuucaccucgggaccaagcaggucuguauugccuggucuagcuccagcugccaugauggaaaagccuggcugcacguguguaucacaggcgacgauaagaacgcuaccgccucuuucauuuacaauggccggcuuguugacuccguggucagcuggucuaaagaaauccugcgcacccaggaguccgagugcguguguauuaacgggacaugcacgguggucaugaccgauggaagcgcuuccggcaaggccgacacaaaaauccucuuuaucgaagaggggaagauuguucauaccucuacacugagcggauccgcgcaacacguggaagaguguagcugcuauccuagauaccccggcgugcggugcgucugucgcgauaacuggaaggggucuaauagaccuaucguggacauuaacaucaaagaucacuccauuguuagcucuuacgugugcagcggacuugucggcgacacgccccggaagaaugacuccucuagcuccagccauugucuggauccgaacaaugaagagggcgggcacggagugaaaggcugggccuucgacgaugggaacgacguuuggaugggacgcaccaucucugagaaguccagacucggcuaugaaacauuuaaagugaucgagggguggagcaauccuaagucuaaacugcagauuaaccggcaggucaucguggaucgcggaaauagauccggcuacagcggcauuuucuccgucgaagggaagucuugcaucaaccgguguuuuuauguggagcugauuagaggacgcaaggaagagaccgagguucucuggaccagcaauuccaucguggucuucugcggcacaucugggaccuacggaacaggcagcuggcccgacggggcugauauuaaccugaugccuaucuga

SEQ ID NO: 211440 - RNA, 1413 nt, Artificial Sequence
  derived and/or modified CDS sequence (opt5) from neuraminidase__InfluenzaA__ADL39150
augaaccccaaucagaagaucauuaccaucggcagcauuuccaucgccauugggaucaucucucugaugcuccaaauuggaaacaucauuagcaucugggcuucccacucuauucagacaggcagccagaauaacacggggaucugcaaucagagaauuaucaccuacgagaacuccacaugggugaaucauaccuaugugaacaucaauaacacaaauguuguggccggagaagacaaaaccucugugacacuggcgggcaacagcucccuuuguagcauuucugggugggcuaucuacaccaaggauaauuccauucggaucggaagcaaaggcgacgucuucgugauucgcgagccuuuuaucucuugcucccaccuggaauguagaacguucuuucucacccaaggcgcccugcuuaacgauaagcauagcaaugggacaguuaaagaccggucuccguaucgcgcccugauguccugcccccucggagaggcuccuagccccuacaacuccaaguucgaaucuguggccuggagcgcuuccgccugucacgauggcaugggguggcugaccaucggaauuagcggcccugacaacggggcggucgccgugcugaaguauaauggaaucauuacagagaccaucaaaucuuggaagaaacagauucucagaacgcaggaguccgaaugcguuuguaugaacggcagcugcuuuacaaucaugaccgauggccccucuaauaaggcugccagcuacaaaaucuucaagauugagaaggggaaagugacaaaguccaucgaacugaacgcuccuaauuuuuauuacgaggaguguucuugcuacccggacaccggaauugucaugugugugugccgggauaacuggcauggcagcaaucgccccuggguguccuucaaccagaaucuugacuaucaaaucggguacauuugcagcggagucuuuggcgauaacccuagacccgaagacggggagggaucuuguaauccuguuaccguggauggcgccaacggcgugaaaggguucuccuauaaguacggaaauggcgucuggaucgggcggacaaaaagcaaccgccugagaaagggauuugaaaugauuugggaccccaauggcuggacgaacaccgacucugauuucuccgugaaacaggacguuguggcgaucacagauuggagcggguauuccggcucuuuuguccagcacccggagcucaccggacuggacugcauccggccuuguuucuggguggaacuuguucgcggccugcccagagagaacacaaccauuuggacgagcggguccucuaucagcuucugcggagucaauuccgauacagccaacuggagcuggccugacggcgcugagcuccccuuuaccauugauaaguga

SEQ ID NO: 211441 - RNA, 1410 nt, Artificial Sequence
  derived and/or modified CDS sequence (opt5) from neuraminidase__InfluenzaA__ADL39172
augaaccccaaucagaagaucauuaccaucggcagcgugucccugacaauuucuacgaucugcuucuuuaugcaaauugccauccucaucaccacagucacccugcacuucaaacaguacgaguuuaacagcccuccgaauaaccagguuaugcuuugugaacccacaauuaucgagagaaauauuaccgaaaucguguaucugacaaacaccacgauugagaaggaaaucugcccuaaacucgcugaguaccggaauugguccaagccccagugugacauuaccggguucgccccuuuuucuaaagauaacagcauccgccuguccgcgggaggcgacaucugggugacaagagagcccuaugucucuugcgauccugacaaguguuaccaauucgcucuugggcagggaaccacacugaauaacgugcauagcaauaacaccguucgggaucgcacgccguauagaacacuccugaugaaugaacugggcgugcccuuucaccucgggaccaagcaggucugcauugccugguccucuagcuccugucaugacggaaaagccuggcugcacgugugcaucacaggcgaugacaagaacgcuaccgccagcuucauuuacaauggccggcuuguugauucuguggucuccuggagcaaagagauccugcgcacccaggaaucugagugugugugcauuaacgggacauguacgguggucaugaccgacggauccgcuagcggcgaggccgauacaaagauccucuuuaucgaagaggggaaaauuguucauaccuccacacugucuggaagcgcgcaacacguggaagagugcuccugcuauccuagauaccccggcgugcggugugucugccgcgacaacuggaaggggagcaauagaccuaucguggauauuaacaucaaggaccacucuauuguuuccagcuacguguguucuggacuugucggcgacacgccccggaaaaaugauagcuccucuagcucccauugccuggacccgaacaaugaagagggcgggcacggagugaagggcugggccuucgaugacgggaacgauguuuggaugggacgcaccaucagcgagaaaucuagacucggcuaugaaacauuuaaggugaucgaggggugguccaauccuaaaagcaagcugcagauuaaccggcaggucaucguggaccgcggaaauagaucuggcuacuccggcauuuucagcgucgaagggaaauccuguaucaaccggugcuuuuauguggagcugauuagaggacgcaaggaagagaccgagguucucuggaccucuaauagcaucguggucuucuguggcacauccgggaccuacggaacaggcucuuggcccgauggggcugacauuaaccugaugccuaucuga

SEQ ID NO: 211442 - RNA, 1410 nt, Artificial Sequence; identical to SEQ ID NO: 208671
  derived and/or modified CDS sequence (opt5) from neuraminidase__InfluenzaA__ADL39183

SEQ ID NO: 211443 - RNA, 1413 nt, Artificial Sequence; identical to SEQ ID NO: 211002
  derived and/or modified CDS sequence (opt5) from neuraminidase__InfluenzaA__ADL39194

SEQ ID NO: 211444 - RNA, 1410 nt, Artificial Sequence; identical to SEQ ID NO: 208671
  derived and/or modified CDS sequence (opt5) from neuraminidase__InfluenzaA__ADL39205

SEQ ID NO: 211445 - RNA, 1413 nt, Artificial Sequence; identical to SEQ ID NO: 209533
  derived and/or modified CDS sequence (opt5) from neuraminidase__InfluenzaA__ADL39227

SEQ ID NO: 211446 - RNA, 1413 nt, Artificial Sequence; identical to SEQ ID NO: 211002
  derived and/or modified CDS sequence (opt5) from neuraminidase__InfluenzaA__ADL39238

SEQ ID NO: 211447 - RNA, 1413 nt, Artificial Sequence; identical to SEQ ID NO: 211002
  derived and/or modified CDS sequence (opt5) from neuraminidase__InfluenzaA__ADL39249

SEQ ID NO: 211448 - RNA, 1413 nt, Artificial Sequence; identical to SEQ ID NO: 209533
  derived and/or modified CDS sequence (opt5) from neuraminidase__InfluenzaA__ADL39260

SEQ ID NO: 211449 - RNA, 1410 nt, Artificial Sequence
  derived and/or modified CDS sequence (opt5) from neuraminidase__InfluenzaA__ADL39282
augaaccccaaucagaagaucauuaccaucggcagcgugucccugacaauuucuacgaucugcuucuuuaugcaaauugccauccucaucaccacagucacccugcacuucaaacaguacgaguuuaacagcccuccgaauaaccagguuaugcuuugugaacccacaauuaucgagaagaauauuaccgaaaucguguaucugacaaacaccacgauugagaaagaaaucugcccuagacucgcugaguaccggaauugguccaagccccagugugacauuaccggguucgccccuuuuucuaaagauaacagcauccgccuguccgcgggaggcgacaucugggugacaagagagcccuaugucucuugcgauccugacaaguguuaccaauucgcucuugggcagggaaccacacugaauaacgugcauagcaauaacaagguucgggaucgcaccccguauagaacgcuccugaugaaugaacugggcgugcccuuucaccucgggacaaaacaggucugcauugccugguccucuagcuccugucaugacggaaaggccuggcugcacgugugcaucaccggcgaugacaaaaacgcuacagccagcuucauuuacaauggccggcuuguugauucuguggucuccuggagcaaggagauccugcgcacccaggaaucugagugugugugcauuaacgggaccuguacaguggucaugacggacggauccgcuagcggcaaagccgauaccaagauccucuuuaucgaggaagggaagauuguucauacauccacccugucuggaagcgcgcaacacguggaggaaugcuccugcuauccuagauaccccggcgugcggugugucugccgcgacaacuggaaagggagcaauagaccuaucguggauauuaacaucaaggaccacucuauuguuuccagcuacguguguucuggacuugucggcgacacaccccggaaaaaugauagcuccucuagcucccauugccuggacccgaacaaugaggaaggcgggcacggagugaagggcugggccuucgaugacgggaacgauguuuggaugggacgcaccaucagcgagaaaucuagacucggcuaugagacguuuaaggugaucgaagggugguccaauccuaaaagcaagcugcagauuaaccggcaggucaucguggaccgcggaaauagaucuggcuacuccggcauuuucagcgucgaggggaaguccuguaucaaccggugcuuuuauguggaacugauuagaggacgcaaagaggaaacagagguucucuggaccucuaauagcaucguggucuucuguggcaccuccgggacauacggaaccggcucuuggcccgauggggcugacauuaaccugaugccuaucuga

SEQ ID NO: 211450 - RNA, 1413 nt, Artificial Sequence; identical to SEQ ID NO: 209533
  derived and/or modified CDS sequence (opt5) from neuraminidase__InfluenzaA__ADL39293

SEQ ID NO: 211451 - RNA, 1410 nt, Artificial Sequence
  derived and/or modified CDS sequence (opt5) from neuraminidase__InfluenzaA__ADL39304
augaaccccaaucagaagaucauuaccaucggcagcgugucccugacaauuucuacgaucugcuucuuuaugcaaauugccauccucaucaccacagucacccugcacuucaaacaguacgaguuuaacuucccuccgaauaaccagguuaugcuuugugaacccacaauuaucgagagaaauauuaccgaaaucguguaucugacaaacaccacgauugagaaggaaaucugcccuaaacucgcugaguaccggaauuggagcaagccccagugugacauuaccggguuugccccuuucuccaaagauaacucuauccgccugagcgcgggaggcgacaucugggugacaagagagcccuaugucuccugcgauccugacaaguguuaccaauuugcucuugggcagggaaccacacugaauaacgugcauucuaauaacaccguucgggaucgcacgccguauagaacacuccugaugaaugaacugggcgugcccuuccaccucgggaccaagcaggucugcauugccuggagcuccagcucuugucaugacggaaaagccuggcugcacgugugcaucacaggcgaugacaagaacgcuaccgccuccuuuauuuacaauggccggcuuguugauagcguggucucuugguccaaagagauccugcgcacccaggaaagcgagugugugugcauuaacgggacauguacgguggucaugaccgacggaucugcuuccggcaaggccgauacaaaaauccucuucaucgaggaagggaagauuguucauaccagcacacuguccggaucugcgcaacacguggaggaaugcagcugcuauccuagauaccccggcgugcggugugucugccgcgacaacuggaagggguccaauagaccuaucguggauauuaacaucaaagaccacagcauuguuucuuccuacguguguagcggacuugucggcgacacgccccggaagaaugauucuagcuccucuagccauugccuggacccgaacaaugaggaaggcgggcacggagugaaaggcugggccuuugaugacgggaacgauguuuggaugggacgcaccaucuccgagaaguccagacucggcuaugagacauucaaagugaucgaaggguggucuaauccuaaguccaaacugcagauuaaccggcaggucaucguggaccgcggaaauagaagcggcuacucuggcauuuuuagcgucgagggaaagagcuguaucaaccggugcuucuauguggaacugauuagagggcgcaaggaggaaaccgagguucucuggaccuccaauucuaucguggucuucuguggcacaagcgggaccuacggaacaggcuccuggcccgauggggcugacauuaaccugaugccuaucuga

SEQ ID NO: 211452 - RNA, 1410 nt, Artificial Sequence; identical to SEQ ID NO: 208671
  derived and/or modified CDS sequence (opt5) from neuraminidase__InfluenzaA__ADL39326

SEQ ID NO: 211453 - RNA, 1413 nt, Artificial Sequence; identical to SEQ ID NO: 211002
  derived and/or modified CDS sequence (opt5) from neuraminidase__InfluenzaA__ADL39392

SEQ ID NO: 211454 - RNA, 1410 nt, Artificial Sequence
  derived and/or modified CDS sequence (opt5) from neuraminidase__InfluenzaA__ADL39403
augaaccccaaucagaagaucauuaccaucggcagcgugucccugacaauuucuacgaucugcuucuuuaugcaaauugccauccucaucaccacagucacccugcacuucaaacaguacgaguuuaacccuccgcccaauaaccagguuaugcuuugugaaccuacaauuaucgagagaaauauuaccgaaaucguguaucugacaaacaccacgauugagaaggaaaucugccccaaacucgcugaguaccggaauuggagcaagccucagugugacauuaccggguucgcccccuuuuccaaagauaacucuauccgccugagcgcgggaggcgacaucugggugacaagagagccuuaugucuccugcgauccggacaaguguuaccaauucgcucuugggcagggaaccacacugaauaacgugcauucuaauaacaccguucgggaucgcacgcccuauagaacacuccugaugaaugaacugggcgugccuuuucaccucgggaccaagcaggucugcauugccuggagcuccagcucuugucaugacggaaaagccuggcugcacgugugcaucacaggcgaugacaagaacgcuaccgccuccuucauuuacaauggccggcuuguugauagcguggucucuugguccaaagagauccugcgcacccaggaaagcgagugugugugcauuaacgggacauguacgguggucaugaccgacggaucugcuuccggcaaggccgauacaaaaauccucuuuaucgaggaagggaagauuguucauaccagcacacuguccggaucugcgcaacacguggaggaaugcagcugcuaucccagauacccuggcgugcggugugucugccgcgacaacuggaagggguccaauagacccaucguggauauuaacaucaaagaccacagcauuguuucuuccuacguguguagcggacuugucggcgacaccccgcggaagaaugauucuagcuccucuagccauugccuggacccuaacaaugaggaaggcgggcacggagugaaaggcugggccuucgaugacgggaacgauguuuggaugggacgcacgaucuccgaaaagagcagacucggcuaugagacauuuaaagugaucgagggguggucuaaucauaaguccaaacugcagauuaaccggcaggucaucguggaccgcggaaauagaagcggcuacucuggcauuuucuccgucgagggaaagagcuguaucaaccggugcuuuuauguggaacugauuagagggcgcaaggaggaaaccgagguucucuggaccuccaauucuaucguggucuucuguggcacaagcgggaccuacggaacaggcuccuggcccgauggggcugaccugaaccuuaugccuauuuga

SEQ ID NO: 211455 - RNA, 1413 nt, Artificial Sequence; identical to SEQ ID NO: 209533
  derived and/or modified CDS sequence (opt5) from neuraminidase__InfluenzaA__ADL39425

SEQ ID NO: 211456 - RNA, 1413 nt, Artificial Sequence
  derived and/or modified CDS sequence (opt5) from neuraminidase__InfluenzaA__ADL39447
augaaccccaaucagaagaucauuaccaucggcagcauuuccaucgccauugggaucaucucucugaugcuccaaauuggaagcaucauuuccaucugggcuucucacagcauucagacaggcucccagaacaauacggggaucugcaaccagagaauuaucaccuacgagaauagcacaugggugaaccauaccuaugucaauaucaacaauacaaacguuguggccggagaagacaaaaccagcgugacacugaccggcaauuccagccuuuguucuauuuccgggugggcgaucuacacgaaggauaacagcauucggaucggaucuaaaggcgacgucuucgugauucgcgagccuuuuaucuccugcagccaccuggaauguagaaccuucuuucucacacaaggcgcucugcuuaaugauaagcauucuaacgggaccguuaaagaccgguccccguaucgcgcccugaugagcugcccccucggagaggccccuucccccuacaauucuaaguucgaaagcguggcuugguccgccagcgcuugucacgauggcaugggguggcugacaaucggaauuucuggcccugacaacggggccgucgcggugcugaaguauaacggaaucauuaccggcacgaucaaauccuggaagaaacagauucucagaacacaggagagcgagugcguuuguaugaauggcucuugcuuuaccaucaugacagaugggcccagcaacaaggccgcuuccuacaaaaucuucaagauugaaaagggaaaagugaccaagucuaucgagcugaaugccccuaacuuuuauuacgaagaguguagcugcuacccggacaccggcauugucaugugugugugccgggauaauuggcauggguccaaccgccccugggugagcuucaaucagaaccuugacuaucaaaucggauacauuugcucuggcgucuuuggggauaauccuagacccgaggacggagaaggcuccuguaacccuguuacaguggauggcgcuaauggggugaaaggauucagcuauaaguacggcaacggggucuggaucggacggacgaaaucuaaucgccugagaaagggcuuugagaugauuugggaccccaacggguggaccaauacagacuccgauuucagcgugaaacaggacguuguggccaucaccgauugguccggcuauucuggaucuuuuguccagcacccggaacucacaggccuggacugcauccggccuuguuucuggguggagcuuguucgcgggcugcccagagaaaacaccacgauuuggacauccggaucuagcaucuccuucugcggcgugaacagcgauaccgcgaauuggucuuggccugacggggccgagcuccccuuuaccauugauaaguga

SEQ ID NO: 211457 - RNA, 1413 nt, Artificial Sequence; identical to SEQ ID NO: 209533
  derived and/or modified CDS sequence (opt5) from neuraminidase__InfluenzaA__ADL39458

SEQ ID NO: 211458 - RNA, 1413 nt, Artificial Sequence
  derived and/or modified CDS sequence (opt5) from neuraminidase__InfluenzaA__ADL39469
augaaccccaaucagaagaucauuaccaucggcagcauuuccaucgccauugggaucaucucucugaugcuccaaauuggaagcaucauuuccaucugggcuucucacagcauucagacaggcucccagaacaauacggggaucugcaaccagagaauuaucaccuacgagaauagcacaugggugaaccauaccuaugucaauaucaacaauacaaacguuguggccggagaagacaaaaccagcgugacacuggcgggcaauuccagccuuuguucuauuuccgggugggcuaucuacaccaaggauaacagcauucggaucggaucuaaaggcgacgucuucgugauucgcgagccuuuuaucuccugcagccaccuggaauguagaacguucuuucucacccaaggcgcccugcuuaaugauaagcauucuaacgggacaguuaaagaccgguccccguaucgcgcccugaugagcugcccccucggagaggcuccuucccccuacaauucuaaguucgaaagcguggccugguccgcuagcgccugucacgauggcaugggguggcugaccaucggaauuucuggcccugacaacggggcggucgccgugcugaaguauaacggaaucauuacaggcaccaucaaauccuggaagaaacagauucucagaacgcaggagagcgagugcguuuguaugaauggcucuugcuuuacaaucaugaccgaugggcccagcaacaaggcugccuccuacaaaaucuucaagauugaaaagggaaaagugacaaagucuaucgagcuggacgcuccuaauuuuuauuacgaagaguguagcugcuacccggauaccggcauugucaugugugugugccgggacaacuggcauggguccaaucgccccugggugagcuucaaccagaaucuugauuaucaaaucggauacauuugcucuggcgucuuuggggacaacccuagacccgaggauggagaaggcuccuguaauccuguuaccguggacggcgccaacggggugaaaggauucagcuauaaguacggcaauggggucuggaucggacggacaaaaucuaaccgccugagaaagggcuuugagaugauuugggaccccaauggguggacgaacaccgauuccgacuucagcgugaaacaggauguuguggcgaucacagacugguccggcuauucuggaucuuuuguccagcacccggaacucaccggccuggauugcauccggccuuguuucuggguggagcuuguucgcgggcugcccagagaaaauacaaccauuuggacguccggaucuagcaucuccuucugcggcgugaacagcgacacagccaacuggucuuggccugauggggcugagcuccccuuuaccauugacaaguga

SEQ ID NO: 211459 - RNA, 1413 nt, Artificial Sequence
  derived and/or modified CDS sequence (opt5) from neuraminidase__InfluenzaA__ADL39480
augaaccccaaucagaagaucauuaccaucggcagcauuuccaucgccauugggaucaucucucugaugcuccaaauuggaagcaucauuuccaucugggcuucucacagcauucagacaggcucccagaacaauacggggaucugcaaccagagaauuaucaccuacgagaauagcacaugggugaaccauaccuaugucaauaucaacaauacaaacguuguggccggagaagacaaaaccagcgugacacuggcgggcaauuccagccuuuguucuauuuccgggugggcuaucuacaccaaggauaacagcauucggaucggaucuaaaggcgacgucuucgugauucgcgagccuuuuaucuccugcagccaccuggaauguagaacguucuuucucacccaaggcgcccugcuuaaugauaagcauucuaacgggacaguuaaagaccgguccccguaucgcgcccugaugagcugcccccucggagaggcuccuucccccuacaauucuaaguucgaaagcguggccugguccgcuagcgccugucacgauggcaugggguggcugaccaucggaauuucuggcccugacaacggggcggucgccgugcugaaguauaacggaaucauuacaggcaccaucaaauccuggaagaaacagauucucagaacgcaggagagcgagugcguuuguaugaauggcucuugcuuuacaaucaugaccgaugggcccagcaacaaggcugccuccuacaaaaucuucaagauugaaaagggaaaagugacaaagucuaucgagcugaaugcuccuaacuuuuauuacgaagaguguagcugcuacccggacaccggcauugucaugugugugugccgggauaauuggcauggguccaaccgccccugggugagcuucaaucagaaccuugacuaucaaaucggauacauuugcucuggcgucuuuggggauaauccuagacccgaggacggagaaggcuccuguaacccuguuaccguggauggcgccaauggggugaaaggauucagcuauaaguacggcaacggggucuggaucggacggacaaaaucuaaucgccugagaaagggcuuugagauggugugggaccccaacggguggacgaauaccgacuccgauuucagcguuaaacaggacguggucgcgauuacagauugguccggcuauucuggaucuuuugugcagcacccggaacucaccggccuggacugcauccggccuuguuucuggguugagcuugugcgcgggcugcccagagaaaacacaaccaucuggacguccggaucuagcauuuccuucugcggcgucaacagcgauacagccaauuggucuuggccugacggggcugagcuccccuuuaccaucgauaaguga

SEQ ID NO: 211460 - RNA, 1410 nt, Artificial Sequence
  derived and/or modified CDS sequence (opt5) from neuraminidase__InfluenzaA__ADL39491
augaaccccaaucagaagaucauuaccaucggcagcgugucccugacaauuucuacgaucugcuucuuuaugcaaauugccauccucaucaccacagucacccugcacuucaaacaguacgaguuuaacagcuccccuaauaaccagguuaugcuuugugaaccgacaauuaucgagagaaauauuaccgaaaucguguaucugacaaacaccacgauugagaaggaaaucugccccaaacucgcugaguaccggaauuggucuaagccucagugugacauuaccggguucgcccccuuuagcaaagauaacuccauccgccugucugcgggaggcgacaucugggugacaagagagccuuaugucagcugcgaucccgacaaguguuaccaauucgcucuugggcagggaaccacacugaauaacgugcauuccaauaacauuguucgggaucgcaccccuuauagaacgcuccugaugaaugaacugggcgugccguuucaccucgggacaaagcaggucugcaucgccuggucuagcuccagcugucaugacggaaaagccuggcugcacgugugcauuaccggcgaugacaagaacgcuacagccucuuucaucuacaauggccggcuuguugauuccauugugagcuggucuaaagagauccugcgcacccaggaauccgagugugucugcaucaacgggaccuguacaguggugaugacggacggaagcgcuuccggcaaggccgauaccaaaauucucuuuaucgaggaagggaagauuguccauacaucuacccugagcggauccgcgcaacacguugaggaaugcagcugcuaucccagauacccuggcgugcggugugugugccgcgacaacuggaaggggucuaauagacccaucgucgauauuaacaucaaagaccacuccaucgugagcucuuacguuuguagcggacuugugggcgacacaccucggaagaaugauuccucuagcuccagccauugccuggaccccaacaaugaggaaggcgggcacggagucaaaggcugggccuucgaugacgggaacgauguguggaugggacgcaccauuucugagaaguccagacucggcuaugagacguuuaaaguuaucgaaggguggagcaauccgaagucuaaacugcagauuaaccgccaggugaucgucgaccggggaaauagauccggcuacagcggcauuuucuccguggaggggaagucuuguaucaaccggugcuuuuaugucgaacugauuagaggacgcaaggaggaaacagaggugcucuggaccagcuccucuaucguuguguucuguggcaccagcgggacauacggaaccggcuccuggccugauggggcugacaucaaucugaugcccauuuga

SEQ ID NO: 211461 - RNA, 1410 nt, Artificial Sequence; identical to SEQ ID NO: 208810
  derived and/or modified CDS sequence (opt5) from neuraminidase__InfluenzaA__ADL41165

SEQ ID NO: 211462 - RNA, 1410 nt, Artificial Sequence
  derived and/or modified CDS sequence (opt5) from neuraminidase__InfluenzaA__ADL41175
augaaccccaaucagaagaucauuaccaucggcagcgugugcaugacaauugggauggccaaccugauccuccaaauuggaaauaucaucuccacguggauuucucacagcauccagcugggcaaccagaaucagauugagaccuguaaccaauccgucaucacauacgaaaauaacaccuggguuaaucagacauaugugaacauuucuaauaccaacuucgcugccgggcagagcguggucuccgugaaacuugcgggaaauucuagccugugcccuguuuccggcugggcuaucuacagcaaggacaacucugugagaauuggguccaaaggagaugucuuugugauccgggagccguucaucagcuguucuccccucgaaugccgcacauuuuuccugacccagggcgcccuucugaaugacaagcauuccaacggcacgauuaaagauagaagcccuuaucggacccucaugucuugucccaucggggagguuccuucccccuacaacagccgcuuugaauccguggccuggucugcuagcgccugccacgacggaauuaauuggcugacaaucggcauuuccgggccugauaacggagcugucgccgugcugaaguauaauggcaucaucaccgacacaauuaagagcuggagaaacaauauccuccggacccaagagucugagugugcgugcgugaacggguccuguuucacggucaugacagauggaccgagcaauggccaggccucuuacaaaauuuuucgcaucgaaaagggcaaaauuguuaagagcguggagaugaacgcucccaauuaucauuacgaagagugcuccuguuacccugacucuagcgagauuaccugcgugugcagagauaacuggcacggguccaaucggcccugggucagcuucaaccagaaucuggaauaucagaucggauacaucuguucuggcaucuuuggggacaacccucgccccaaugauaaaacaggauccugcggcccggugagcucuaacggggccaacggaguuaagggcuucuccuuuaaguauggcaaugggguguggauuggaagaaccaaaagcaucuccucucggaacggcuucgagaugauuugggacccuaauggguggaccggaacagauaacaauuuuagcaucaagcaagacauugucggcaucaacgaaugguccggguacucuggcagcuucgugcagcaucccgagcuuacgggacuggacuguauccgcccuugcuucuggguugaacucauuagaggccggcccaaagagaauaccaucuggacauccgggagcucuauuuccuuuuguggagugaacagcgauaccgucggcuggucuuggcccgacggggcugagcugccuuucacaaucgauaaguga

SEQ ID NO: 211463 - RNA, 1413 nt, Artificial Sequence
  derived and/or modified CDS sequence (opt5) from neuraminidase__InfluenzaA__ADL60255
augaaccccaaucagaagaucauuaccaucggcagcauuuccaucgccauugggaucaucucucugaugcuccaaauuggaaacaucauuagcaucugggcuucccacucuauucagacaggcagccagaauaacacggggaucugcaaucagagaauuaucaccuacgagaacuccacaugggugaauuauaccuacgugaacaucaauaacacaaauguuguggccggagaagacaaaaccucugugacacuggcgggcaacagcucccuuuguagcauuucugggugggcuaucuauaccaaggauaauuccauucggaucggaagcaaaggcgacgucuucgugauucgcgagccuuuuaucucuugcucccaucuggaauguagaacguucuuucucacccaaggcgcccugcuuaacgauaagcacagcaaugggacaguuaaagaccggucuccguaccgcgcccugauguccugcccccucggagaggcuccuagccccuauaacuccaaguucgaaucuguggccuggagcgcuuccgccugucaugauggcaugggguggcugaccaucggaauuagcggcccugacaacggggcggucgccgugcugaaguacaauggaaucauuacaggcaccaucaaaucuuggaagaaacagauucucagaacgcaggaguccgagugcguuuguaugaacggcagcugcuuuacaaucaugaccgaugggcccucuaauaaggcugccagcuauaaaaucuucaagauugaaaagggaaaagugacaaaguccaucgagcugaacgcuccuaauuuucacuacgaagaguguucuugcuacccggacaccggcauugucaugugugugugccgggauaacuggcaugggagcaaucgccccuggguguccuucaaccagaaucuugacuaucaaaucggauacauuugcagcggcgucuuuggggauaacccuagacccaaagacggacggggcucuuguaauccuguuaccguggauggcgccaacggggugaagggauucuccuauaaauacgacaauggcgucuggaucgggcgcacaaagagcaacagacugcggaaaggauuugagaugauuugggaccccaauggcuggacgaacaccgauucugacuucuccgugaagcaggauguuguggcgaucacagacuggagcggguauuccggcucuuuuguccagcacccggaacucaccggacuggauugcauccgcccuuguuucuggguggagcuuguuagaggccugccccgggaaaacacaaccauuuggacgagcggguccucuaucagcuucugcggagucaauuccgacacagccaacuggagcuggccugauggcgcugagcuccccuuuaccauugacaaguga

SEQ ID NO: 211464 - RNA, 1413 nt, Artificial Sequence
  derived and/or modified CDS sequence (opt5) from neuraminidase__InfluenzaA__ADL60277
augaaccccaaucagagaaucauuaccaucggcagcauuuccaucgccauugggaucaucucucugaugcuccaaauuggaaacaucauuagcaucugggcuucccacucuauucagaucggcagccagaauaacacagggauuugcaaucagcggaucaucacguacgagaacuccaccugggugaaucauacauaugucaacauuaauaacaccaauguuguggccggagaagacaagacaccugugacccuggcgggcaacucuagccuuuguuccaucagcgggugggcuauuuacacaaaagauaauucuauccgcauuggauccaagggcgacgucuucgugaucagagagccguuuaucagcugcucucaccuggaaugucggaccuucuuucucacgcaaggcgcccugcuuaacgauaaacauuccaaugggaccgccaaggaccgcagccccuauagagcucugaugucuugcccucucggagaggcccccuccccuuacaacagcaaauucgaauccguugcuuggucugccagcgcgugucacgauggcaugggguggcugacaauuggaaucuccggccccgacaacggggccguggcuguccugaaguauaauggaauuaucaccggcacaauuaagagcuggaaaaagcagauccuccggacccaggagucugagugcguguguaugaacggcuccugcuuuacgaucaugacagaugggccuagcaauaaagccgcuucuuacaagauuuucaaaaucgaaaagggaaagguuaccaaaagcauugagcugaacgccccgaauuuuuauuacgaagaguguuccugcuaccccgacacaggcaucgugaugugugucugccgcgauaacuggcaugggucuaauagaccuugggugagcuucaaccagaaucuugacuaucaaauuggauacaucugcuccggcguguuuggggauaacccccggccugaggacggagaaggcagcuguaaucccgucaccguugauggcgcgaacggggugaagggauucucuuauaaauacggcaaugggguguggauuggacgcaccaaguccaacagacugcggaaaggcuuugagaugaucugggacccgaauggguggacaaacacggacagcgauuucucugucaagcaggacgugguugccaucaccgauugguccggcuauagcggauccuuugugcagcacccugaacucacaggccuggacugcauucgccccuguuucugggucgagcuugugagagggcugccucgggaaaacaccacaaucuggaccucuggaagcuccauuucuuucugcggcguuaauagcgauacggcuaacugguccuggcccgacggggccgagcuccccuuuacaaucgauaaauga

SEQ ID NO: 211465 - RNA, 1413 nt, Artificial Sequence
  derived and/or modified CDS sequence (opt5) from neuraminidase__InfluenzaA__ADL60288
augaaccccaaucagaagaucauuaccaucggcagcauuuccaucgccauugggaucaucucucugaugcuccaaauuggaaacaucauuagcaucugggcuucccacucuauucagacaggcagccagaauaacacggggaucugcaaucagagaauuaucaccuacgagaacuccacaugggugaaucauaccuaugugaacaucaauaacacaaauguuguggccggagaagacaaaaccucugugacacuggcgggcaacagcucccuuuguagcauuucugggugggcuaucuacaccaaggauaauuccauucggaucggaagcaaaggcgacgucuucgugauucgcgagccuuuuaucucuugcucccaccuggaauguagaacguucuuucucacccaaggcgcccugcuuaacgauaagcauagcaaugggacaguuaaagaccggucuccguaucgcgcccugauguccugcccccucggagaggcuccuagccccuacaacuccaaguucgaaucuguggccuggagcgcuuccgccugucacgauggcaugggguggcugaccaucggaauuagcggcccugacaacggggcggucgccgugcugaaguauaauggaaucauuacaggcaccaucaaaucuuggaagaaacagauucucagaacgcaggaguccgagugcguuuguaugaacggcagcugcuuuacaaucaugaccgaugggcccucuaauaaggcugccagcuacaaaaucuucaagauugaaaagggaaaagugacaaaguccaucgagcugaacgcuccuaauuuuuauuacgaagaguguucuugcuacccggacaccggcauugucaugugugugugccgggauaacuggcaugggagcaaucgccccuggguguccuucaaccagaaucuugacuaucaaaucggauacauuugcagcggcgucuuuggggauaacccuagacccaaagacggaaagggcucuuguaauccuguuaccguggauggcgccaacggggugaaaggauucuccuauaaguacggcaauggggucuggaucggacggacaaaaagcaaccgccugagaaagggcuuugagaugauuugggaccccaauggguggacgaacaccgacucugauuucuccgugaagcaggacguuguggcgaucacagauuggagcggcuauuccggaucuuuuguccagcacccggaacucaccggccuggacugcauccggccuuguuucuggguggagcuuguucgcgggcugcccagagaaaacacaaccauuuggacgagcggauccucuaucagcuucugcggcgucaauuccgauacagccaacuggagcuggccugacggggcugagcuccccuuuaccauugauaaauga

SEQ ID NO: 211466 - RNA, 1413 nt, Artificial Sequence
  derived and/or modified CDS sequence (opt5) from neuraminidase__InfluenzaA__ADL60299
augaaccccaaucagaagaucauuaccaucggcagcauuuccaucgccauugggaucaucucucugaugcuccaaauuggaaacaucauuagcaucugggcuucccacucuauucagacaggcagccagaauaacacggggaucugcaaucagagaauuaucaccuacgagaacuccacaugggugaaucauaccuaugucucuaucaacaauacaaacguuguggccggaaaagacaagaccagcgugacacuggcgggcaauuccagccuuuguucuauuuccgggugggcuaucuacaccaaagauaacagcauucggaucggaucuaagggcgacgucuucgugauucgcgaaccuuuuaucuccugcagccaccuggaguguagaacguucuuucucacccaaggcgcccugcuuaaugauaaacauucuaacgggacaguuaaggaccgguccccguaucgcgcccugaugagcugcccccucggagaagcuccuucccccuacaauucuaaguucgagagcguggccugguccgcuagcgccugucacgauggcaugggguggcugaccaucggaauuucuggcccugacaacggggcggucgccgugcugaaauauaacggaaucauuacaggcaccaucaaguccuggaaaaagcagauucucagaacgcaggaaagcgagugcguuuguaugaauggcucuugcuuuacaaucaugaccgaugggcccagcaacaaagcugccuccuacaagaucuucaagauugagaaaggaaaggugacaaaaucuaucgaacugaaugcuccuaacuuuuauuacgaggaauguagcugcuacccggacaccggcauugucaugugugugugccgggauaauuggcauggguccaaccgccccugggugagcuucaaucaggaccuugauuaucaaaucggauacauuugcucuggcgucuuuggggacaacccuagacccaaggauggaaaaggcuccuguaauccuguuaccguggacggcgccaacggggugaagggauucagcuauaaauacggcaauggggucuggaucggacggacaaagucuaaccgccugagaaagggcuuugagaugauuugggaccccaauggguggacgaacaccgauuccgacuucagcgugaaacaggauguuguggcgaucacagacugguccggcuauucuggcagcuuuguccagcacccggagcucaccggacuggauugcauccggccuuguuucuggguggaacuuguucgcgggcugcccagagagaauacaaccauuuggacguccggaucuagcaucuccuucugcggcgugaacagcgacacagccaacuggucuuggccugauggggcugaacuccccuuuaccauugacaaguga

SEQ ID NO: 211467 - RNA, 1413 nt, Artificial Sequence; identical to SEQ ID NO: 208704
  derived and/or modified CDS sequence (opt5) from neuraminidase__InfluenzaA__ADL60310

SEQ ID NO: 211468 - RNA, 1413 nt, Artificial Sequence
  derived and/or modified CDS sequence (opt5) from neuraminidase__InfluenzaA__ADL60321
augaaccccaaucagaagaucauuaccaucggcagcauuuccaucgccauugggaucaucucucugaugcuccaaauuggaaacaucauuagcaucugggcuucccacucuauucagacaggcagccagaauaacacggggaucugcaaucagagaauuaucaccuacgagaacuccacaugggugaaucauaccuaugugaacaucaauaacacaaauguuguggccggagaagacaaaaccucugugacacuggcgggcaacagcucccuuuguagcauuucugggugggcuaucuacaccaaggauaauuccauucggaucggaagcaaaggcgacgucuucgugauucgcgagccuuuuaucucuugcucccaccuggaauguagaacguucuuucucacccaaggcgcccugcuuaacgauaagcauagcaaugggacaguuaaagaccggucuccguaucgcgcccugauguccugcccccucggagaggcuccuagccccuacaacuccaaguucgaaucuguggccuggagcgcuuccgccugucacgauggcaugggguggcugaccaucggaauuagcggcccugacaacggggcggucgccgugcugaaguauaauggaaucauuacaggcaccaucaaaucuuggaagaaacagauucucagaacgcaggaguccgagugcguuuguaugaacggcagcugcuuuacaaucaugaccgaugggcccucuaauaaggcugccagcuacaaaaucuucaagauugaaaagggaaaagugacaaaguccaucgagcugaacgcuccuaauuuucauuaugaagaguguucuugcuacccggacaccggcauggucaugugugugugccgggauaacuggcacgggagcaaucgccccuggguguccuucaaccagaaucuugacuaccaaauuggauauaucugcagcggcgucuuuggggauaacccuagacccgaggacggagaaggcucuuguaauccuguuaccguggauggcgccaacggggugaaaggauucuccuacaaguaugacaauggcgucuggauugggcggacaaaaagcaaccgccugagaaagggauuugagaugaucugggaccccaauggcuggacgaacaccgauucugacuucuccgugaaacaggauguuguggcgauuacagacuggagcggguacuccggcucuuuuguccagcacccggaacucaccggacuggauugcauccggccuuguuucuggguggagcuuguucgcggccugcccagagaaaacacaaccaucuggacgagcggguccucuauuagcuucugcggagucaauuccgacacagccaacuggagcuggccugauggcgcugagcuccccuuuaccaucgacaaguga

SEQ ID NO: 211469 - RNA, 1413 nt, Artificial Sequence
  derived and/or modified CDS sequence (opt5) from neuraminidase__InfluenzaA__ADL60332
augaaccccaaucagaagaucauuaccaucggcagcauuuccaucgccauugggaucaucucucugaugcuccaaauuggaaacaucauuagcaucugggcuucccacucuauucagacaggcagccagaauaacacggggaucugcaaucagagaauuaucaccuacgagaacuccacaugggugaaucauaccuaugugaacaucaauaacacaaauguuguggccggagaagacaaaaccucugugacacuggcgggcaacagcucccuuuguagcauuucugggugggcuaucuacaccaaggauaauuccauucggaucggaagcaaaggcgacgucuucgugauucgcgagccuuuuaucucuugcucccaccuggaauguagaacguucuuucucacccaaggcgcccugcuuaacgauaagcauagcaaugggacaguuaaagaccggucuccguaucgcgcccugauguccugcccccucggagaggcuccuagccccuacaacuccaaguucgaaucuguggccuggagcgcuuccgccugucacgauggcaugggguggcugaccaucggaauuagcggcccugacaacggggcggucgccgugcugaaguauaauggaaucauuacaggcaccaucaaaucuuggaagaaacagauucucagaacgcaggaguccgagugcguuuguaugaacggcagcugcuuuacaaucaugaccgaugggcccucuaauaaggcugccagcuacaaaaucuucaagauugaaaagggaaaagugacaaaguccaucgagcugaacgcuccuaauuuucauuaugaagaguguucuugcuacccggacaccggcauugucaugugugugugccgggauaacuggcacgggagcaaucgccccuggguguccuucaaccagaaucuugacuaccaaaucggauauauuugcagcggcgucuuuggggauaacccuagacccaaagacggacggggcucuuguaauccuguuaccguggauggcgccaacggggugaagggauucuccuacaaauaugacaauggcgucuggaucgggcgcacaaagagcaacagacugcggaaaggauuugagaugauuugggaccccaauggcuggacgaacaccgauucugacuucuccgugaagcaggauguuguggcgaucacagacuggagcggguacuccggcucuuuuguccagcacccggaacucaccggacuggauugcauccgcccuuguuucuggguggagcuuguuagaggccugccccgggaaaacacaaccauuuggacgagcggguccucuaucagcuucugcggagucaauuccgacacagccaacuggagcuggccugauggcgcugagcuccccuuuaccauugacaaguga

SEQ ID NO: 211470 - RNA, 1413 nt, Artificial Sequence; identical to SEQ ID NO: 208704
  derived and/or modified CDS sequence (opt5) from neuraminidase__InfluenzaA__ADL60343

SEQ ID NO: 211471 - RNA, 1413 nt, Artificial Sequence
  derived and/or modified CDS sequence (opt5) from neuraminidase__InfluenzaA__ADL60354
augaaccccaaucagagaaucauuaccaucggcagcauuuccaucgccauugggaucaucucucugaugcuccaaauuggaaacaucauuagcaucugggcuucccacucuauucagaucggcagccagaauaacacagggauuugcaaucagcggaucaucacguacgagaacuccaccugggugaaucauacauaugucaacauuaauaacaccaauguuguggccggagaagacaagacaucugugacccuggcgggcaacagcucccuuuguagcaucucugggugggcuauuuacacaaaagauaauuccauccgcauuggaagcaagggcgacgucuucgugaucagagagccuuuuaucucuugcucccaccuggaaugucggaccuucuuucucacgcaaggcgcccugcuuaacgauaaacauagcaaugggaccgccaaggaccgcucuccguauagagcucugauguccugcccccucggagaggccccuagccccuacaacuccaaauucgaaucuguugcuuggagcgccuccgcgugucacgauggcaugggguggcugacaauuggaaucagcggcccugacaacggggccguggcuguccugaaguauaauggaauuaucaccggcacaauuaagucuuggaaaaagcagauccuccggacccaggaguccgagugcguguguaugaacggcagcugcuuuacgaucaugacagaugggcccucuaauaaagccgcuagcuacaagauuuucaaaaucgaaaagggaaagguuaccaaauccauugagcugaacgccccuaauuuuuauuacgaagaguguucuugcuacccggacacaggcaucgugaugugugucugccgcgauaacuggcaugggagcaauagacccuggguguccuucaaccagaaucuugacuaucaaauuggauacaucugcagcggcguguuuggggauaacccucggcccaaggacggaaaaggcucuuguaauccugucaccguugauggcgcgaacggggugaagggauucuccuauaaauacggcaaugggguguggauuggacgcaccaagagcaacagacugcggaaaggcuuugagaugaucugggaccccaauggguggacaaacacggacucugauuucuccgucaagcaggacgugguugccaucaccgauuggagcggcuauuccggaucuuuugugcagcacccggaacucacaggccuggacugcauucgcccuuguuucugggucgagcuugugagagggcugccccgggaaaacaccacaaucuggaccagcggauccucuauuagcuucugcggcguuaauuccgauacggcuaacuggagcuggccugacggggccgagcuccccuuuacaaucgauaaguga

SEQ ID NO: 211472 - RNA, 1410 nt, Artificial Sequence
  derived and/or modified CDS sequence (opt5) from neuraminidase__InfluenzaA__ADL60365
augaaccccaaucagaagaucauuaccaucggcagcgugucccugacaauuucuacgaucugcuucuuuaugcaaauugccauccucaucaccacagucacccugcacuucaaacaguacgaguuuaacagcuccccuaauaaccagguuaugcuuugugaaccgacaauuaucgagagaaauauuaccgaaaucguguaucugacaaacaccacgauugagaaggaaaucucucccaaacucgcugaguaccggaauuggagcaagccucagugcgacauuaccggguucgcccccuuuuccaaagauaacucuauccgccugagcgcgggaggcgacaucugggugacaagagagccuuaugucuccugugaucccgacaagugcuaccaauucgcucuugggcagggaaccacacugaauaacgugcauagcaauaacauuguucgggaucgcaccccuuauagaacgcuccugaugaaugaacugggcgugccguuucaccucgggacaaagcaggucuguaucgccuggucuuccagcucuugccaugacggaaaagccuggcugcacguguguauuaccggcgaugacaagaacgcuacagccuccuucaucuacaauggccggcuuguugauagcauugugucuugguccaaagagauccugcgcacccaggaaagcgagugcgucuguaucaacgggaccugcacaguggugaugacggacggauccgcuucuggcaaggccgauaccaaaauucucuuuaucgaggaagggaagauuguccauacaagcacccuguccggaagcgcgcaacacguugaggaauguucuugcuaucccagauacccuggcgugcggugcgugugucgcgacaacuggaagggguccaauagacccaucgucgauauuaacaucaaagaccacagcacagugucuagcuacguuugcuccggacuugugggcgacaccccucggaagaaugauucuagcuccagcucucauugucuggaccccaacaaugaggaaggcgggcacggagucaaaggcugggccuucgaugacgggaacgauguguggaugggacgcacgaucuccgaaaagagcagacucggcuaugagacauuuaaaguuauugagggguggucuaauccgaaguccaaacugcagaucaaccgccaggugauugucgaccggggaaauagaagcggcuacuccggcaucuucucuguggagggaaagagcugcauuaaccgguguuuuuaugucgaacugaucagagggcgcaaggaggaaaccgaggugcucuggaccuccaauucuauuguuguguucugcggcacaagcgggaccuacggaacaggcuccuggccugauggggcugacaucaaccugaugcccaucuga

SEQ ID NO: 211473 - RNA, 1413 nt, Artificial Sequence
  derived and/or modified CDS sequence (opt5) from neuraminidase__InfluenzaA__ADL60376
augaaccccaaucagaagaucauuaccaucggcagcauuuccaucgccauugggaucaucucucugaugcuccaaauuggaaacaucauuagcaucugggcuucccacucuauucagacaggcagccagaauaacacggggaucugcaaucagagaauuaucaccuacgagaacuccacaugggugaaucauaccuaugucaacaucaauaacacaaauguuguggccggagaagacaaaaccucugugacacuggcgggcaacagcucccuuuguagcauuucugggugggcuaucuacaccaaggauaauuccauucggaucggaagcaaaggcgacgucuucgugauucgcgagccuuuuaucucuugcucccaccuggaauguagaacguucuuucucacccaaggcgcccugcuuaacgauaagcauagcaaugggacaggaaaagaccggucuccguaucgcgcccugauguccugcccccucggcgaggcuccuagccccuacaacuccaaguucgaaucuguugccuggagcgcuuccgccugucacgaugggaugggauggcugaccaucggcauuagcgggccugacaacggagcgguggccguccugaaguauaauggcaucauuacaggcaccaucaaaucuuggaagaaacagauucucagaacgcaggaguccgagugcguguguaugaacgggagcugcuuuacaaucaugaccgauggacccucuaauaaggcugccagcuacaaaaucuucaagauugaaaagggcaaaguuacaaaguccaucgagcugaacgcuccuaauuuucauuaugaagaguguucuugcuacccggacaccgggauugugaugugugucugccgggauaacuggcacggaagcaaucgccccuggguguccuucaaccagaaucuugacuaccaaaucggcuauauuugcagcgggguguuuggagauaacccuagacccaaagacggcaagggcucuuguaauccugucaccguugauggggccaacggagugaaaggcuucuccuacaaguaugacaaugggguguggaucggacggacaaaaagcaaccgccugagaaagggcuuugagaugauuugggaccccaauggguggacgaacaccgauucugacuucuccgucaagcaggaugugguugcgaucacagacuggagcggcuacuccggaucuuuugugcagcacccggaacucaccggccuggauugcauccggccuuguuucugggucgagcuugugcgcgggcugcccagagaaaacacaaccauuuggacgagcggauccucuaucagcuucugcggcguuaauuccgacacagccaacuggagcuggccugauggggcugagcuccccuuuaccauugacaaauga

SEQ ID NO: 211474 - RNA, 1410 nt, Artificial Sequence; identical to SEQ ID NO: 208810
  derived and/or modified CDS sequence (opt5) from neuraminidase__InfluenzaA__ADM07137

SEQ ID NO: 211475 - RNA, 1410 nt, Artificial Sequence; identical to SEQ ID NO: 208810
  derived and/or modified CDS sequence (opt5) from neuraminidase__InfluenzaA__ADM07146

SEQ ID NO: 211476 - RNA, 1410 nt, Artificial Sequence; identical to SEQ ID NO: 208810
  derived and/or modified CDS sequence (opt5) from neuraminidase__InfluenzaA__ADM07156

SEQ ID NO: 211477 - RNA, 1410 nt, Artificial Sequence; identical to SEQ ID NO: 208810
  derived and/or modified CDS sequence (opt5) from neuraminidase__InfluenzaA__ADM07165

SEQ ID NO: 211478 - RNA, 1413 nt, Artificial Sequence; identical to SEQ ID NO: 209533
  derived and/or modified CDS sequence (opt5) from neuraminidase__InfluenzaA__ADM07474

SEQ ID NO: 211479 - RNA, 1413 nt, Artificial Sequence; identical to SEQ ID NO: 209533
  derived and/or modified CDS sequence (opt5) from neuraminidase__InfluenzaA__ADM07485

SEQ ID NO: 211480 - RNA, 1410 nt, Artificial Sequence
  derived and/or modified CDS sequence (opt5) from neuraminidase__InfluenzaA__ADM07496
augaaccccaaucagaagaucauuaccaucggcagcgugucccugacaauuucuacgaucugcuucuuuaugcaaauugccauccucaucaccacagucacccugcacuucaaacaguacgaguuuaacagcccuccgaauaaccagguuaugcuuugugaacccacaauuaucgagagaaauauuaccgaaaucguguaucugacaaacaccacgauugagaaggaaaucugcccuaaacucgcugaguaccggaauugguccaagccccagugugacauuaccggguucgccccuuuuucuaaagauaacagcauccgccuguccgcgggaggcgacaucugggugacaagagagcccuaugucucuugcgauccugacaaguguuaccaauucgcucuugggcagggaaccacacugaauaacgugcauagcaauaacaccguucgggaucgcacgccguauagaacacuccugaugaaugaacugggcgugcccuuucaccucgggaccaagcaggucugcauugccugguccucuagcuccugucaugacggaaaagccuggcugcacgugugcaucacaggcgaugacaagaacgcuaccgccagcuucauuuacaauggccggcuuguugauucuguggucuccuggagcaaagagauccugcgcacccaggaaucugagugugugugcauuaacgggacauguacgguggucaugaccgacggauccgcuagcggcaaggccgauacaaaaauccucuuuaucgaggaagggaagauuguucauaccuccacacugucuggaagcgcgcaacacguggaggaaugcuccugcuauccuagauaccccggcgugcggugugucugccgcgacaacuggaaggggagcaauagaccuaucguggauauuaacaucaaagaccacucuauuguuuccagcuacguguguucuggacuugucggcgacacgccccggaagaaugauagcuccucuagcucccauugccuggacccgaacaaugaggaaggcgggcacggagugaaaggcugggccuucgaugacgggaacgauguuuggaugggacgcaccaucagcgagaagucuagacucggcuaugagacauuuaaagugaucgaagggugguccaauccuaagagcaaacugcagauuaaccggcaggucaucguggaccgcggaaauagaucuggcuacuccggcauuuucagcgucgaggggaaguccuguaucaaccggugcuuuuauguggaacugauuagaggacgcaaggaggaaaccgagguucucuggaccucuaauagcaucguggucuucuguggcacauccgggaccuacggaacaggcucuuggcccgauggggcugacauuaacaucaugccuaucuga

SEQ ID NO: 211481 - RNA, 1410 nt, Artificial Sequence
  derived and/or modified CDS sequence (opt5) from neuraminidase__InfluenzaA__ADM07507
augaaccccaaucagaagaucauuaccaucggcagcgugucccugacaauuucuacgaucugcuucuuuaugcaaaccgccauucucaucacaaccgucacacugcacuucaaacaguuugaguucaacagcccuccgaauaaccagguuaugcuuugugaacccgcuaucauugagagaaauaucaccgaaauuguguaccugacaaacaccacgaucgagaaggaaauuugcccuaaacucgccgaguaucggaauugguccaagccccagugugacaucaccggguuugcgccuuucucuaaagauaacagcauucgccuguccgcuggaggcgacaucugggugacaagagagcccuacgucucuugcgauccugacaaguguuaucaauuugcccuugggcagggaaccacacugaauaacgugcauagcaauaacaccguucgggaucgcacgccguacagaacacuccugaugaaugaacugggcgugcccuuccaccucgggaccaagcaggucugcaucgccugguccucuagcuccugucaugacggaaaggcuuggcugcacgugugcauuacaggcgaugacaaaaacgccaccgcuagcuuuaucuauaauggccggcuuguugauucuguggucuccuggagcaaagagauucugcgcacccaggaaucugagugugugugcaucaacgggacauguacgguggucaugaccgacggauccgccagcggcaaggcggauacaaaaauucucuucaucgaggaagggaagaucguucauaccuccacacugucuggaagcgcccaacacguggaggaaugcuccugcuacccuagauaucccggcgugcggugugucugccgcgacaacuggaaggggagcaauagaccuauuguggauaucaacauuaaagaccacucuaucguuuccagcuacguguguucuggacuugucggcgacacgccccggaagaaugauagcuccucuagcucccauugccuggacccgaacaaugaggaaggcgggcacggagugaaaggcugggcuuuugaugacgggaacgauguuuggaugggacgcaccauuagcgagaagucuagacucggcuacgagacauucaaagugaucgaagggugguccaauccuaagagcaaacugcagaucaaccggcaggucauuguggaccgcggaaauagaucuggcuauuccggcaucuuuagcgucgaggggaaguccuguauuaaccggugcuucuacguggaacugaucagaggacgcaaggaggaaaccgagguucucuggaccucuaauagcauuguggucuucuguggcacauccgggaccuauggaacaggcucuuggcccgauggggccgacaucaaccugaugccuauuuga

SEQ ID NO: 211482 - RNA, 1410 nt, Artificial Sequence
  derived and/or modified CDS sequence (opt5) from neuraminidase__InfluenzaA__ADM12820
augaaccccaaucagaagaucauuaccaucggcagcgugucccugacaauuucuacgaucugcuucuuuaugcaaauugccauccucaucaccacagucacccugcacuucaaacaguacaaguuuaacagcccuccgaauaaccagguuaugcuuugugagcccacaauuaucgaaagaaauauuaccgagaucguguaucugacaaacaccacgauugaaaaagagaucugcccuaagcucgcugaauaccggaauugguccaaaccccagugugacauuaccggguucgccccuuuuucuaaggauaacagcauccgccuguccgcgggaggcgacaucugggugacaagagagcccuaugucucuugcgauccugacaaguguuaccaauucgcucuugggcagggaaccacacugaauaacgugcauagcaauaacaccguucgggaucgcacgccguauagaacacuccugaugaaugagcugggcgugcccuuucaccucgggaccaaacaggucugcauugccugguccagcagcuccugucaugacggaaaggccuggcugcacgugugcaucacaggcgaugacaaaaacgcuaccgccagcuucauuuacaauggccggcuuguugauucuguggucuccuggagcaaggaaauccugcgcacccaggagucugaaugugugugcauuaacgggacauguacgguggucaugaccgacggauccgcuagcggcaaagccgauacaaagauccucuuuaucgaggaggggaagauuguucauaccuccacacugucuggaagcgcgcaacacguggaagagugcuccugcuauccuagauaccccggcgugcggugugucugccgcgacaacuggaaagggagcaauagaccuaucguggauauuaacaucaaggaccacucuauuguuuccagcuacguguguucuggacuugucggcgacacgccccggaaaaaugauagcuccucuagcucccauugccuggacccgaacaaugaagagggcgggcacggagugaagggcugggccuucgaugacgggaacgauguuuggaugggacgcaccaucaaugaaacaagcagacucggcuaugagaccuuuaaagugaucgagggguggucuaacccuaaguccaaacugcagauuaaucggcaggucaucguggaccgcggaaacagaagcggcuacucuggcauuuucuccgucgaagggaagucuuguaucaaucggugcuuuuauguggagcugauuagaggacgcaaggaagagaccgaaguucucuggacauccaacucuaucguggucuucuguggcaccagcgggacauacggaacgggcuccuggcccgauggggcugaccugaaucuuaugccuauuuga

SEQ ID NO: 211483 - RNA, 1410 nt, Artificial Sequence; identical to SEQ ID NO: 211482
  derived and/or modified CDS sequence (opt5) from neuraminidase__InfluenzaA__ADM12831

SEQ ID NO: 211484 - RNA, 1410 nt, Artificial Sequence; identical to SEQ ID NO: 211482
  derived and/or modified CDS sequence (opt5) from neuraminidase__InfluenzaA__ADM12842

SEQ ID NO: 211485 - RNA, 1410 nt, Artificial Sequence; identical to SEQ ID NO: 211482
  derived and/or modified CDS sequence (opt5) from neuraminidase__InfluenzaA__ADM12853

SEQ ID NO: 211486 - RNA, 1410 nt, Artificial Sequence; identical to SEQ ID NO: 208810
  derived and/or modified CDS sequence (opt5) from neuraminidase__InfluenzaA__ADM12864

SEQ ID NO: 211487 - RNA, 1410 nt, Artificial Sequence; identical to SEQ ID NO: 208810
  derived and/or modified CDS sequence (opt5) from neuraminidase__InfluenzaA__ADM12874

SEQ ID NO: 211488 - RNA, 1410 nt, Artificial Sequence; identical to SEQ ID NO: 208810
  derived and/or modified CDS sequence (opt5) from neuraminidase__InfluenzaA__ADM12884

SEQ ID NO: 211489 - RNA, 1410 nt, Artificial Sequence
  derived and/or modified CDS sequence (opt5) from neuraminidase__InfluenzaA__ADM12894
augaaccccaaucagaagaucauuaccaucggcagcgugugcaugacaauugggauggccaaccugauccuccaaauuggaaauaucaucuccauuuggaucucucacagcauucagcugggcaaccagaaucagaucgagacguguaaccaauccgucauuaccuacgaaaauaacacauggguuaaucagaccuaugugaacaucucuaauacaaacuucgcugccgggcagagcguggucuccgugaaacuugcgggaaauucuagccugugcccuguuuccggcugggcuauuuacagcaaggacaacucuaucagaaucggguccaaaggagauguguuugucauucgggagccguucaucagcuguucuccccucgaaugccgcaccuuuuuccugacacagggcgcccuucugaaugacaagcauuccaacggcaccauuaaagauagaagcccuuaucggacgcucaugucuugucccaucggggaggugccuucccccuacaacagccgcuuugaauccguugccuggucugcuagcgccugccacgacggaauuaauuggcugaccaucggcaucuccgggccugauaacggagcuguggccguccugaaguauaauggcauuaucacagacaccauuaagagcuggagaaacaauauccuccggacacaagagucugagugugcgugcgugaacggguccuguuucaccgugaugacggauggaccgagcgacggccagucuagcuacaaaauuuuucgcaucgaaaagggcaaaaucgucaaguccguugagaugaaugcccccaacuaucauuacgaagagugcucuuguuacccugauagcuccgagauuacaugcgugugcagagacaauuggcacgggagcaaccggcccugggugucuuucaaucagaaccuggaauaucagaucggauacauuuguuccggcaucuuuggggauaauccucgccccaacgacaaaaccggaagcugcggcccggucucuuccaauggggcuaacggagugaagggcuucagcuuuaaguauggcaacgggguuuggauuggaagaacaaaauccaucucuagccggaauggcuucgagaugauuugggauccuaacggguggaccggaaccgacaauaacuuuuccaucaagcaagacaucgugggcauuaaugaauggucuggguacagcggcuccuucguccagcaucccgagcuuacaggacuggauuguauccgcccuugcuucuggguggaacucauuagaggccggcccaaagagaacacgaucuggaccagcgggucuuccauuagcuuuuguggaguuaauucugacacagugggcugguccuggcccgauggggccgagcugccuuucaccaucgacaaguga

SEQ ID NO: 211490 - RNA, 1410 nt, Artificial Sequence; identical to SEQ ID NO: 208810
  derived and/or modified CDS sequence (opt5) from neuraminidase__InfluenzaA__ADM12904

SEQ ID NO: 211491 - RNA, 1410 nt, Artificial Sequence
  derived and/or modified CDS sequence (opt5) from neuraminidase__InfluenzaA__ADM12914
augaaccccaaucagaagaucauuaccaucggcagcgugugcaugacaauugggauggccaaccugauccuccaaauuggaaauaucaucuccauuuggaucucucacagcauucagcugggcaaccagaaucagaucgagacguguaaccaauccgucauuaccuacgaaaauaacacauggguuaaucagaccuaugugaacaucucuaauacaaacuucgcugccgggcagagcguggucuccgugaaacuugcgggaaauucuagccugugcccuguuuccggcugggcuauuuacagcaaggacaacucuaucagaaucggguccaaaggagauguguuugucauucgggagccguucaucagcuguucuccccucgaaugccgcaccuuuuuccugacacagggcgcccuucugaaugacaagcauuccaacggcaccauuaaagauagaagcccuuaucggacgcucaugucuugucccaucggggaggugccuucccccuacaacagccgcuuugaauccguugccuggucugcuagcgccugccacgacggaauuaauuggcugaccaucggcaucuccgggccugauaacggagcuguggccguccugaaguauaauggcauuaucacagacaccauuaagagcuggagaaacaauauccuccggacacaagagucugagugugcgugcgugaacggguccuguuucaccgugaugacggauggaccgagcgacggccaggccucuuacaaaauuuuucgcaucgaaaagggcaaaaucgucaagagcguugagaugaaugcucccaacuaucauuacgaagagugcuccuguuacccugauucuagcgagauuacaugcgugugcagagacaauuggcacggguccaaccggcccugggugagcuucaaucagaaccuggaauaucagaucggauacauuuguucuggcaucuuuggggauaauccucgccccaacgacaaaaccggauccugcggcccggucagcucuuauggggccaauggagugaagggcuucuccuuuaaguacggcaacgggguuuggauuggaagaacaaaaagcaucuccucucggaacggcuucgagaugauuugggauccuaauggguggaccggaaccgacaacaauuuuagcaucaagcaagacaucgugggcauuaacgaaugguccggguauucuggcagcuucguccagcaucccgagcuuacaggacuggauuguauccgcccuugcuucuggguggaacucauuagaggccggcccaaagagaauacgaucuggaccuccgggagcucuauuuccuuuuguggaguuaacagcgacacagugggcuggucuuggcccgauggggcugagcugccuuucaccaucgacaaguga

SEQ ID NO: 211492 - RNA, 1410 nt, Artificial Sequence; identical to SEQ ID NO: 208810
  derived and/or modified CDS sequence (opt5) from neuraminidase__InfluenzaA__ADM12924

SEQ ID NO: 211493 - RNA, 1410 nt, Artificial Sequence; identical to SEQ ID NO: 208810
  derived and/or modified CDS sequence (opt5) from neuraminidase__InfluenzaA__ADM12934

SEQ ID NO: 211494 - RNA, 1410 nt, Artificial Sequence; identical to SEQ ID NO: 208810
  derived and/or modified CDS sequence (opt5) from neuraminidase__InfluenzaA__ADM12944

SEQ ID NO: 211495 - RNA, 1410 nt, Artificial Sequence; identical to SEQ ID NO: 208810
  derived and/or modified CDS sequence (opt5) from neuraminidase__InfluenzaA__ADM12954

SEQ ID NO: 211496 - RNA, 1410 nt, Artificial Sequence; identical to SEQ ID NO: 208810
  derived and/or modified CDS sequence (opt5) from neuraminidase__InfluenzaA__ADM12964

SEQ ID NO: 211497 - RNA, 1410 nt, Artificial Sequence; identical to SEQ ID NO: 210098
  derived and/or modified CDS sequence (opt5) from neuraminidase__InfluenzaA__ADM12974

SEQ ID NO: 211498 - RNA, 1410 nt, Artificial Sequence
  derived and/or modified CDS sequence (opt5) from neuraminidase__InfluenzaA__ADM12984
augaaccccaaucagaagaucauuaccaucggcagcgugugcaugacaauugggauggccaaccugauccuccaaauuggaaauaucaucuccauuuggaucucucacagcauucagcugggcaaccagaaucagaucgagacguguaaccaauccgucauuaccuacgaaaauaacacauggguuaaucagaccuaugugaacaucucuaauacaaacuucgcugccgggcagagcguggucuccgugaaacuugcgggaaauucuagccugugcccuguuuccggcugggcuauuuacagcaaggacaacucuaucagaaucggguccaaaggagauguguuugucauucgggagccguucaucagcuguucuccccucgaaugccgcaccuuuuuccugacacagggcgcccuucugaaugacaagcauuccaacggcaccauuaaagauagaagcccuuaucggacgcucaugucuugucccaucggggaggugccuucccccuacaacagccgcuuugaauccguugccuggucugcuagcgccugccacgacggaauuaauuggcugaccaucggcaucuccgggccugauaacggagcuguggccguccugaaguauaauggcauuaucacagacaccauuagaagcuggcggaacaauauccuccgcacacaagagucugagugugcgugcgugaacggguccuguuucaccgugaugacggauggaccgagcgacggccaggccucuuacaagauuuuuagaaucgaaaaaggcaagaucgucaaaagcguugagaugaaugcucccaacuaucauuacgaagagugcuccuguuacccugauucuagcgagauuacaugcgugugccgggacaauuggcacggguccaaccgccccugggugagcuucaaucagaaccuggaauaucagaucggauacauuuguucuggcaucuuuggggauaauccuagacccaacgacaagaccggauccugcggcccggucagcucuaauggggccaacggagugaaaggcuucuccuuuaaguauggcaacgggguuuggauuggacggacaaagagcaucuccucucgcaauggcuucgagaugauuugggauccuaacggguggaccggaaccgacaauaacuuuagcaucaaacaagacaucgugggcauuaaugaaugguccggguacucuggcagcuucguccagcaucccgagcuuacaggacuggauuguaucagaccuugcuucuggguggaacucauucggggccgccccaaggagaacacgaucuggaccuccgggagcucuauuuccuuuuguggaguuaauagcgacacagugggcuggucuuggcccgauggggcugagcugccuuucaccaucgacaaauga

SEQ ID NO: 211499 - RNA, 1410 nt, Artificial Sequence; identical to SEQ ID NO: 208810
  derived and/or modified CDS sequence (opt5) from neuraminidase__InfluenzaA__ADM12994

SEQ ID NO: 211500 - RNA, 1410 nt, Artificial Sequence; identical to SEQ ID NO: 208810
  derived and/or modified CDS sequence (opt5) from neuraminidase__InfluenzaA__ADM13004

SEQ ID NO: 211501 - RNA, 1410 nt, Artificial Sequence; identical to SEQ ID NO: 208810
  derived and/or modified CDS sequence (opt5) from neuraminidase__InfluenzaA__ADM13014

SEQ ID NO: 211502 - RNA, 1410 nt, Artificial Sequence
  derived and/or modified CDS sequence (opt5) from neuraminidase__InfluenzaA__ADM13034
augaaccccaaucagaagaucauuaccaucggcagcgugugcaugacaauugggauggccaaccugauccuccaaauuggaaauaucaucuccauuuggaucucucacagcauucagcugggcaaccagaaucagaucgagacguguaaccaauccgucauuaccuacgaaaauaacacauggguuaaucagaccuaugugaacaucucuaauacaaacuucgcugccgggcagagcguggucuccgugaaacuugcgggaaauucuagccugugcccuguuuccggcugggcuauuuacagcaaggacaacucuaucagaaucggguccaaaggagauguguuugucauucgggagccguucaucagcuguucuccccucgaaugccgcaccuuuuuccugacacagggcgcccuucugaaugacaagcauuccaacggcaccauuaaagauagaagcccuuaucggacgcucaugucuugucccaucggggaggugccuucccccuacaacagccgcuuugaauccguugccuggucugcuagcgccugccacgacggaauuaauuggcugaccaucggcaucuccgggccugauaacggagcuguggccguccugaaguauaauggcauuaucacagacaccauuaagagcuggagaaacaauauccuccggacacaagagucugagugugcgugcgugaacggguccuguuucaccgugaugacggauggaccgagcgacggccaggccucuuacaaaauuuuucgcaucgaaaagggcaaaaucgucaagagcguugagaugaaugcucccaacuaucauuacgaagagugcuccuguuacccugauucuagcgagauuacaugcgugugcagagacaauuggcacggguccaaccggcccugggugagcuucaaucagaaccuggaauaucagaucggauacauuuguucuggcaucuuuggggauaauccucgccccaacgacaaaaccggaaauugcggcccggucuccagcaacggggccaacggagugaagggcuucucuuuuaaguauggcaaugggguuuggauuggaagaacaaaauccaucagcucccggaacggcuucgagaugauuugggauccuaauggguggaccggaaccgacaacaauuuuucuaucaagcaagacaucgugggcauuaacgaauggagcggguacuccggcucuuucguccagcaucccgagcuuacaggacuggauuguauccgcccuugcuucuggguggaacucauuagaggccggcccaaagagaauacgaucuggaccagcggguccagcauuucuuuuuguggaguuaacuccgacacagugggcuggagcuggcccgauggggcugagcugccuuucaccaucgacaaguga

SEQ ID NO: 211503 - RNA, 1410 nt, Artificial Sequence; identical to SEQ ID NO: 210723
  derived and/or modified CDS sequence (opt5) from neuraminidase__InfluenzaA__ADM13044

SEQ ID NO: 211504 - RNA, 1410 nt, Artificial Sequence; identical to SEQ ID NO: 209636
  derived and/or modified CDS sequence (opt5) from neuraminidase__InfluenzaA__ADM13054

SEQ ID NO: 211505 - RNA, 1410 nt, Artificial Sequence; identical to SEQ ID NO: 209987
  derived and/or modified CDS sequence (opt5) from neuraminidase__InfluenzaA__ADM13064

SEQ ID NO: 211506 - RNA, 1410 nt, Artificial Sequence
  derived and/or modified CDS sequence (opt5) from neuraminidase__InfluenzaA__ADM13074
augaaccccaaucagaagaucauuaccaucggcagcgugugcaugacaauugggauggccaaccugauccuccaaauuggaaauaucaucuccauuuggaucucucacagcauucagcugggcaaccagaaucagaucgagacguguaaccaauccgucauuaccuacgaaaauaacacauggguuaaucagaccuaugugaacaucucuaauacaaaccuugcugccgggcagagcguggucuccgugaaacuggcgggaaauucuagccucugcccuguuuccggcugggcuauuuacagcaaggacaacucuaucagaaucggguccaaaggagauguguucgucauucgggagccguuuaucagcuguucuccccuggaaugccgcaccuucuuucuuacacagggcgcccugcucaaugacaagcauuccaacggcaccauuaaagauagaagcccuuaucggacgcugaugucuugucccaucggggaggugccuucccccuacaacagccgcuucgaauccguugccuggucugcuagcgccugccacgacggaauuaauuggcugaccaucggcaucuccgggccugauaacggagcuguggccguccucaaguauaauggcauuaucacagacaccauuaagagcuggagaaacaauauccugcggacacaagagucugagugugcgugcgugaacggguccuguuuuaccgugaugacggauggaccgagcgacggccaggccucuuacaaaauuuuccgcaucgaaaagggcaaaaucgucaagagcguugagaugaaugcucccaacuaucauuacgaagagugcuccuguuacccugauucuagcgagauuacaugcgugugcagagacaauuggcacggguccaaccggcccugggugagcuuuaaucagaaccuugaauaucagaucggauacauuuguucuggcaucuucggggauaauccucgccccaacgacaaaaccggauccugcggcccggucagcucuaauggggccaacggagugaagggcuuuuccuucaaguauggcaacgggguuuggauuggaagaacaaaaagcaucuccucucggaauggcuuugagaugauuugggauccuaacggguggaccggaaccgacaauaaguucagcaucaaacaagacaucgugggcauuaacgaaugguccggguacucuggcagcuuuguccagcaucccgagcugacaggacucgauuguauccgcccuugcuucuggguggaacugauuagaggccggcccaaggagaauacgaucuggaccuccgggagcucuauuuccuucuguggaguuaacagcgacacagugggcuggucuuggcccgauggggcugagcuuccuuuuaccaucgacaaauga

SEQ ID NO: 211507 - RNA, 1410 nt, Artificial Sequence; identical to SEQ ID NO: 209987
  derived and/or modified CDS sequence (opt5) from neuraminidase__InfluenzaA__ADM13084

SEQ ID NO: 211508 - RNA, 1410 nt, Artificial Sequence
  derived and/or modified CDS sequence (opt5) from neuraminidase__InfluenzaA__ADM13094
augaaccccaaucagaagaucauuaccaucggcagcgugugcaugacaauugggauggccaaccugauccuccaaauuggaaauacgaucuccaucuggauuucucacagcauccagcugggcaaccagaaucagauugagaccuguaaccaauccgucaucacauacgaaaauaacaccuggguuaaucagacauaugugaacauuucuaauaccaacuucgcugccgggcagagcguggucuccgcgaaacuugcuggaaauucuagccugugcccuguguccggcugggccaucuacagcaaggacaacucuauuagaaucggguccaaaggagauguuuuugugauccgggagccguucauuagcuguucuccccucgaaugccgcacauuuuuccugacccagggcgcccuucugaaugacaagcauuccaacggcacgaucaaagauagaagcccuuaucggacccucaugucuugucccauuggggaggucccuucccccuacaacagccgcuuugaauccguggcuuggucugccagcgcuugccacgacggaaucaauuggcugacaauuggcaucuccgggccugauaacggagccguugcggugcugaaguauaauggcaucauuaccgacacaaucaagagcuggagaaacaauauucuccggacccaagagucugagugugccugcgucaacggguccuguuucacggugaugacagauggaccgagcgacggccaggcuucuuacaaaaucuuucgcauugaaaagggcaaaaucgucaagagcguggagaugaaugcccccaacuaucauuacgaagagugcuccuguuacccugauucuagcgagauuaccugcguuugcagagacaauuggcacggguccaaccggcccugggugagcuucaaucagaaccuggaauaucagaucggauacaucuguucuggcauuuuuggggauaauccucgccccaacgacaaaacaggauccugcggcccggugagcucuaauggggcuaacggagucaagggcuucuccuuuaaguauggcaacgggguguggaucggaagaaccaaaagcauuuccucucggaauggcuucgagaugaucugggauccuaacggguggaccggaacagacaauaacuuuagcauuaagcaagacaucguuggcaucaaugaaugguccggguacucuggcagcuucgugcagcaucccgagcuuacgggacuggauuguauucgcccuugcuucugggucgaacucaucagaggccggcccaaagagaacaccauuuggacauccgggagcucuaucuccuuuuguggagugaauagcgacaccguuggcuggucuuggcccgauggggccgagcugccuuucacaauugacaaguga

SEQ ID NO: 211509 - RNA, 1410 nt, Artificial Sequence; identical to SEQ ID NO: 209987
  derived and/or modified CDS sequence (opt5) from neuraminidase__InfluenzaA__ADM13104

SEQ ID NO: 211510 - RNA, 1410 nt, Artificial Sequence; identical to SEQ ID NO: 210712
  derived and/or modified CDS sequence (opt5) from neuraminidase__InfluenzaA__ADM13124

SEQ ID NO: 211511 - RNA, 1410 nt, Artificial Sequence
  derived and/or modified CDS sequence (opt5) from neuraminidase__InfluenzaA__ADM13134
augaaccccaaucagaagaucauuaccaucggcagcgugugcaugacaauugggauggccaaccugauccuccaaauuggaaauaucaucuccauuuggaucucucacagcauucagcugggcaaccagaaucagaucgagacguguaaccaauccgucauuaccuacgaaaauaacacauggguuaaucagaccuaugugaacaucucuaauacaaacuucgcugccgggcagagcguggucuccgugaaacuugcgggaaauucuagccugugcccuguuuccggcugggcuauuuacagcaaggacaacucuaucagaaucggguccaaaggagauguguuugucauucgggagccguucaucagcuguucuccccucgaaugccgcaccuuuuuccugacacagggcgcccuucugaaugacaagcauuccaacggcaccauuaaagauagaagcccuuaucggacgcucaugucuugucccaucggggaggugccuucccccuacaacagccgcuuugaauccguugccuggucugcuagcgccugccacgacggaauuaauuggcugaccaucggcaucuccgggccugauaacggagcuguggccguccugaaguauaauggcauuaucacagacaccauuaagagcuggagaaacaauacacuccggacccaagagucugagugugcgugcgugaacggguccuguuucacggugaugacagauggaccgagcgacggccaggccucuuacaaaaucuuucgcauugaaaagggcaaaaucgucaagagcguugagaugaaugcucccaacuaucauuacgaagagugcuccuguuacccugauucuagcgagauuaccugcgugugcagagacaauuggcacggguccaaccggcccugggugagcuucaaucagaaccuggaauaucagaucggauacaucuguucuggcauuuuuggggauaauccucgccccaacgacaaaaagggauccugcggcccggucagcucuaauggggccaacggagugaagggcuucuccuuuaaauauggcaacgggguuuggaucggaagaacaaagagcauuuccucucggaauggcuucgagaugaucugggauccuaacggguggaccggaaccgacaauaacuuuagcauuaaacaagacaucgugggcaucaaugaaugguccggguacucuggcagcuucguccagcaucccgagcuuacaggacuggauuguauucgcccuugcuucuggguggaacucaucagaggccggcccaaggagaacacgauuuggaccuccgggagcucuaucuccuuuuguggaguuaauagcgacacagugggcuggucuuggcccgauggggcugagcugccuuucaccauugacaaauga

SEQ ID NO: 211512 - RNA, 1410 nt, Artificial Sequence
  derived and/or modified CDS sequence (opt5) from neuraminidase__InfluenzaA__ADM13154
augaaccccaaucagaagaucauuaccaucggcagcgugugcaugacaauugggauggccaaccugauccuccaaauuggaaauaucaucuccauuuggaucucucacagcauucagcugggcaaccagaaacagaucgagacguguaaucaauccgucuucaccuacgaaaacaauacauggguuaaccagaccuaugugaauauuucuaacacaaauuuugcugccgggcagagcguggucuccgugaaacuugcgggaaacucuagccugugcccuguuuccggcugggcuaucuacagcaaggacaauucuauuagaaucggguccaagggagauguguucgucauccgggagccguuuauuagcuguucuccccucgaaugccgcaccuucuuucugacacagggcgcccuucugaacgacaaacauuccaauggcaccaucaaggauagaagcccuuaucggacgcucaugucuugucccauuggggaggugccuucccccuacaacagccgcuucgaauccguugccuggucugcuagcgccugccacgacggaaucaacuggcugaccauuggcaucuccgggccugauaauggagcuguggccguccugaaguauaacggcaucauuacagacaccaucaaaagcuggagaaauaacauucuccggacacaagagucugagugugcgugcgugaauggguccuguuuuaccgugaugacggauggaccgagcgacggccaggccucuuacaagaucuucaaaauugaaaagggcaaaaucgucaagagcguugagaugaacgcucccaauuaucauuacgaagagugcuccuguuacccugauucuagcgagaucacaugcgugugccgcgacaacuggcacggguccaauagacccugggugagcuuuaaccagaaucuggaauaucagauuggauacaucuguucuggcauuuucggggauaacccucggcccaaugacaagaccggauccugcggcccggucagcucuaacggggccaauggagugaaaggcuuuuccuucaaguauggcaacgggguuuggaucggacgcacaaaaagcauuuccucuagaaacggcuuugagaugaucugggauccuaauggguggaccggaaccgacaacaauuucagcauuaagcaagacaucgugggcaucaacgaaugguccggguacucuggcagcuucguccagcaucccgagcuuacaggacuggauuguauucggccuugcuuuuggguggaacucauccgcggcagacccaaagagaauacgauuuggaccuccgggagcucuaucuccuucuguggaguuaacagcgacacagugggcuggucuuggcccgauggggcugagcugccuuuuaccauugacaaguga

SEQ ID NO: 211513 - RNA, 1410 nt, Artificial Sequence; identical to SEQ ID NO: 210240
  derived and/or modified CDS sequence (opt5) from neuraminidase__InfluenzaA__ADM13164

SEQ ID NO: 211514 - RNA, 1410 nt, Artificial Sequence; identical to SEQ ID NO: 208810
  derived and/or modified CDS sequence (opt5) from neuraminidase__InfluenzaA__ADM13174

SEQ ID NO: 211515 - RNA, 1410 nt, Artificial Sequence; identical to SEQ ID NO: 208810
  derived and/or modified CDS sequence (opt5) from neuraminidase__InfluenzaA__ADM13184

SEQ ID NO: 211516 - RNA, 1410 nt, Artificial Sequence; identical to SEQ ID NO: 208810
  derived and/or modified CDS sequence (opt5) from neuraminidase__InfluenzaA__ADM13194

SEQ ID NO: 211517 - RNA, 1410 nt, Artificial Sequence; identical to SEQ ID NO: 208810
  derived and/or modified CDS sequence (opt5) from neuraminidase__InfluenzaA__ADM13204

SEQ ID NO: 211518 - RNA, 1410 nt, Artificial Sequence; identical to SEQ ID NO: 209987
  derived and/or modified CDS sequence (opt5) from neuraminidase__InfluenzaA__ADM13214

SEQ ID NO: 211519 - RNA, 1410 nt, Artificial Sequence
  derived and/or modified CDS sequence (opt5) from neuraminidase__InfluenzaA__ADM13224
augaaccccaaucagaagaucauuaccaucggcagcgugugcaugacaauugggauggccaaccugauccuccaaauuggaaauaucaucuccauuuggaucucucacagcauucagcugggcaaccagaaucagaucgagacguguaaccaauccgucauuaccuacgaaaauaacacauggguuaaucagaccuaugugaacaucucuaauacaaacuucgcugccgggcagagcguggucuccgugaaacuugcgggaaauucuagccugugcccuguuuccggcugggcuauuuacagcaaggacaacucuaucagaaucggguccaaaggagauguguuugucauucgggagccguucaucagcuguucuccccucgaaugccgcaccuuuuuccugacacagggcgcccuucugaaugacaagcauuccaacggcaccauuaaagauagaagcccuuaucggacgcucaugucuugucccaucggggaggugccuucccccuacaacagccgcuuugaauccguugccuggucugcuagcgccugccacgacggaauuaauuggcugaccaucggcaucuccgggccugauaacggagcuguggccguccugaaguauaauggcauuaucacagacaccauuagaagcuggcggaacaauauccuccgcacacaagagucugagugugcgugcgugaacggguccuguuucaccgugaugacggauggaccgagcgacggccaggccucuuacaagauuuuuagaaucgaaaaaggcaagaucgucaaaagcguugagaugaaugcucccaacuaucauuacgaagagugcuccuguuacccugauucuagcaagauuacaugcgugugccgggacaauuggcacggguccaaccgccccugggugagcuucaaucagaaccuggaguaucagaucggauacauuuguucuggcaucuuuggggauaauccuagacccaacgacaaaaccggauccugcggcccggucagcucuaauggggccaacggagugaagggcuucuccuuuaaguauggcaacgggguuuggauuggacggacaaaaagcaucuccucucgcaauggcuucgaaaugauuugggauccuaacggguggaccggaaccgacaauaacuuuagcaucaagcaagacaucgugggcauuaaugagugguccggguacucuggcagcuucguccagcaucccgaacuuacaggacuggauuguaucagaccuugcuucuggguggagcucauucggggccgccccaaagaaaacacgaucuggaccuccgggagcucuauuuccuuuuguggaguuaauagcgacacagugggcuggucuuggcccgauggggcugagcugccuuucaccaucgacaaguga

SEQ ID NO: 211520 - RNA, 1410 nt, Artificial Sequence; identical to SEQ ID NO: 208810
  derived and/or modified CDS sequence (opt5) from neuraminidase__InfluenzaA__ADM13234

SEQ ID NO: 211521 - RNA, 1410 nt, Artificial Sequence; identical to SEQ ID NO: 210098
  derived and/or modified CDS sequence (opt5) from neuraminidase__InfluenzaA__ADM13244

SEQ ID NO: 211522 - RNA, 1410 nt, Artificial Sequence; identical to SEQ ID NO: 209164
  derived and/or modified CDS sequence (opt5) from neuraminidase__InfluenzaA__ADM13254

SEQ ID NO: 211523 - RNA, 1410 nt, Artificial Sequence; identical to SEQ ID NO: 209987
  derived and/or modified CDS sequence (opt5) from neuraminidase__InfluenzaA__ADM13264

SEQ ID NO: 211524 - RNA, 1410 nt, Artificial Sequence; identical to SEQ ID NO: 208810
  derived and/or modified CDS sequence (opt5) from neuraminidase__InfluenzaA__ADM13274

SEQ ID NO: 211525 - RNA, 1410 nt, Artificial Sequence; identical to SEQ ID NO: 208810
  derived and/or modified CDS sequence (opt5) from neuraminidase__InfluenzaA__ADM13284

SEQ ID NO: 211526 - RNA, 1410 nt, Artificial Sequence
  derived and/or modified CDS sequence (opt5) from neuraminidase__InfluenzaA__ADM13294
augaaccccaaucagaagaucauuaccaucggcagcgugugcaugacaauugggauggccaaccugauccuccaaauuggaaauaucaucuccauuuggaucucucacagcauucagcugggcaaccagaaucagaucgagacguguaaccaauccgucauuaccuacgaaaauaacacauggguuaaucagaccuaugugaacaucucuaauacaaacuucgcugccgggcagagcguggucuccgugaaacuugcgggaaauucuagccugugcccuguuuccggcugggcuauuuacagcaaggacaacucuaucagaaucggguccaaaggagauguguuugucauucgggagccguucaucagcuguucuccccucgaaugccgcaccuuuuuccugacacagggcgcccuucugaaugacaagcauuccaacggcaccauuaaagauagaagcccuuaucgggcccucaugucuugucccaucggggaggugccuucccccuacaacagccgcuuugaauccguugcuuggucugccagcgcuugccacgacggaauuaauuggcugacgaucggcaucuccgggccugauaacggagccguggcgguccugaaguauaauggcauuaucaccgacacaauuaagagcuggagaaacaauauccuccggacccaagagucugagugugccugcgugaacggguccuguuucacagugaugaccgauggaccgagcgacggccaggcuucuuacaaaauuuuucgcaucgaaaagggcaaaaucgucaagagcguugagaugaaugcccccaacuaucauuacgaagagugcuccuguuacccugauucuagcgagauuacgugcgugugcagagacaauuggcacggguccaaccggcccugggugagcuucaaucagaaccuggaauaucagaucggauacauuuguucuggcaucuuuggggauaauccucgccccaacgacaaaacaggauccugcggcccggucagcucuaauggggcuaacggagugaagggcuucuccuuuaaguauggcaacgggguuuggauuggaagaaccaaaagcaucuccucucggaauggcuucgagaugauuugggauccuaacggguggacaggaaccgacaauagcuuuuccaucaagcaagacaucgugggcauuaacgaauggucuggguacagcggcuccuucguccagcaucccgagcuuaccggacuggauuguauccgcccuugcuucuggguggaacucauuagaggccggcccaaagagaauacaaucuggacgagcgggucuuccauuagcuuuuguggaguuaacucugacaccgugggcugguccuggcccgauggggccgagcugccuuucacaaucgacaaguga

SEQ ID NO: 211527 - RNA, 1410 nt, Artificial Sequence; identical to SEQ ID NO: 208810
  derived and/or modified CDS sequence (opt5) from neuraminidase__InfluenzaA__ADM13304

SEQ ID NO: 211528 - RNA, 1410 nt, Artificial Sequence; identical to SEQ ID NO: 210272
  derived and/or modified CDS sequence (opt5) from neuraminidase__InfluenzaA__ADM13314

SEQ ID NO: 211529 - RNA, 1410 nt, Artificial Sequence; identical to SEQ ID NO: 208810
  derived and/or modified CDS sequence (opt5) from neuraminidase__InfluenzaA__ADM13324

SEQ ID NO: 211530 - RNA, 1410 nt, Artificial Sequence
  derived and/or modified CDS sequence (opt5) from neuraminidase__InfluenzaA__ADM13344
augaaccccaaucagaagaucauuaucauuggcagcgugugcaugaccaucgggauggccaaccugauucuccaaaucggaaauaucauuuccaucuggauucugcacucuauccagcuuggcaaccagaaucagauugagacauguaaccaaagcgucaucacguacgaaaauaacaccuggguuaaucagacauaugugaacauuuccaauaccaacuucgcugccgggcagucuguggucagcgugaaacuggcgggaaauuccucucucugcccuguuagcggcugggcuaucuacuccaaggacaacagcaucagaauugggucuaaaggagauguguuugucauccgggagccguucauuuccuguagcccccuggaaugccgcacauuuuuccuuacccagggcgcccugcucaaugacaagcauucuaacggcacaaucaaagauagauccccuuaucggacccugaugagcugucccauuggggaggugccuucucccuacaacucccgcuuugaaagcguugccugguccgcuucugccugccacgacggaaucaauuggcugacgaucggcauuagcgggccugauaacggagcuguggccguccucaaguauaauggcaucauuaccgacacaaucaaguccuggagaaacaauauucugcggacccaagagagcgagugugcgugcgugaacgggucuuguuucacagugaugaccgauggaccguccgacggccaggccagcuacaaaaucuuucgcaucgaaaagggcaaaauugucaagucuguugagaugaaugcucccaacuaucauuacgaagagugcagcuguuacccugauuccucugagaucacgugcgugugcagagacaauuggcacgggagcaaccggcccuggguguccuucaaucagaaccuugaauaucagauuggauacaucuguagcggcauuuuuggggauaauccucgccccaacgacaaaacaggaucuugcggcccggucuccagcaauggggccaacggagugaagggcuucucuuuuaaguauggcaacgggguuuggaucggaagaaccaaauccauuagcucccggaauggcuucgagaugaucugggauccuaacggguggacaggaaccgacaauaacuuugcuaucaagcaagacauugugggcaucaaugaauggucuggguacagcggcuccuucguccagcaucccgagcugaccggacucgauuguauucgcccuugcuucuggguggaacugaucagaggccggcccaaagagaacacaauuuggacgucugggagcuccaucagcuuuuguggaguuaauucugacaccgugggcugguccuggcccgauggggccgagcuuccuuucacaaucgacaaguga

SEQ ID NO: 211531 - RNA, 1410 nt, Artificial Sequence; identical to SEQ ID NO: 210712
  derived and/or modified CDS sequence (opt5) from neuraminidase__InfluenzaA__ADM13354

SEQ ID NO: 211532 - RNA, 1410 nt, Artificial Sequence; identical to SEQ ID NO: 209987
  derived and/or modified CDS sequence (opt5) from neuraminidase__InfluenzaA__ADM13363

SEQ ID NO: 211533 - RNA, 1410 nt, Artificial Sequence
  derived and/or modified CDS sequence (opt5) from neuraminidase__InfluenzaA__ADM13464
augaaccccaaucagaagaucauuaccaucggcagcgugucccugacaauugccacggucugcuuccucaugcaaaucgcuauucugguuaccacagugacccuucacuuuaaacaguacgagugugacucuccugccagcaaccaggugaugccgugcgaacccaucaucauugagagaaauaucacagaaauugucuaucugaacaauaccacaaucgagaaggaaauuuguccuaaagugguugaguaccggaacugguccaagccccagugccaaaucaccggguucgcgccuuuuucuaaagauaauagcauucgccucuccgcuggaggcgacaucugggugacgagagagcccuaugucucuugugaucaugggaagugcuaccaguucgcccugggacagggcaccacacuugacaacaagcacagcaaugauaccauccaugaccggauuccucaccgcacacugcucaugaacgaacugggggugccguuucaucugggaaccagacagguuuguaucgccugguccuccucuuccugccacgauggcaaggcuuggcuccacguguguauuacgggcaaugacaaaaacgccacagcuagcuucaucuaugaugggcggcuggucgacucuauuggauccuggagccaaaauauccuucgcacccaggagucugaaugcguguguaucaacggcacaugcaccguggucaugaccgauggguccgccagcggcagagcggacacacggauucuguuuaucgaggagggaaaaauuguucauaucagcccccucucugggagcgcccagcacguggaagagugcuccuguuacccucgcuaucccggagugagaugcauuugucgggauaauuggaagggcagcaaccgcccugucguggacaucaacauggaagacuacucuaucgauuccagcuacguuugcucuggccuggugggggacacgcccagaaaugaugaccggagcuccaacucuaauugucgcaacccgaauaacgagagaggaaaucagggcgucaaagggugggcuuucgauaacggagacgauguguggaugggccggaccauuagcaaggaccuuagauccggguaugaaacauuuaagguuaucggaggcuggagcaccccuaauucuaaaucccaaauuaaccgccaggugaucgucgauagcgacaaucggucuggcuacuccgggauuuucagcguggagggaaaguccugcaucaacagauguuuuuaugucgagcugauucgcggccgggaacaggagacaagagugugguggaccucuaauagcaucguuguguucugcgggacguccggaacauacggcaccgggucuuggcccgauggcgccaacaucaauuuuaugccuauuuga

SEQ ID NO: 211534 - RNA, 1410 nt, Artificial Sequence
  derived and/or modified CDS sequence (opt5) from neuraminidase__InfluenzaA__ADM13465
augaaccccaaucagaagaucauuaccaucggcagcgugucccugacaauugccacggucugcuuccucaugcaaaucgcuauucugguuaccacagugacccuucacuuuaaacaguacgagugugacucuccugccagcaaccaggugaugccgugcgaacccaucaucauugagagaaauaucacagaaauugucuaucugaacaauaccacaaucgagaaggaaauuuguccuaaagugguugaguaccggaacugguccaagccccagugccaaaucaccggguucgcgccuuuuucuaaagauaauagcauucgccucuccgcuggaggcgacaucugggugacgagagagcccuaugucucuugugaucaugggaagugcuaccaguucgcccugggacagggcaccacacuugacaacaagcacagcaaugauaccauccaugaccggauuccucaccgcacacugcucaugaacgaacugggggugccguuucaucugggaaccagacagguuuguaucgccugguccuccucuuccugccacgauggcaaggcuuggcuccacguguguauuacgggcgacgauaaaaaugccacagcuagcuucaucuaugacgggcggcuggucgauucuauuggauccuggagccaaaacauccuucgcacccaggagucugaaugcguguguaucaauggcacaugcaccguggucaugaccgacggguccgccagcggcagagcggauacacggauucuguuuaucgaggagggaaaaauuguucauaucagcccccucucugggagcgcccagcacguggaagagugcuccuguuacccucgcuaucccggagugagaugcauuugucgggacaacuggaagggcagcaaucgcccugucguggacaucaacauggaagauuacucuaucgacuccagcuacguuugcucuggccuggugggggauacgcccagaaacgacgaucggagcuccaauucuaacugucgcaauccgaacaaugagagaggaaaccagggcgucaaagggugggcuuucgacaauggagaugacguguggaugggccggaccauuagcaaggaucuuagauccggguaugaaacauuuaagguuaucggaggcuggagcaccccuaacucuaaaucccaaauuaaucgccaggugaucgucgacagcgauaaccggucuggcuacuccgggauuuucagcguggagggaaaguccugcaucaauagauguuuuuaugucgagcugaugcgcggccggaaacaggaaacaagagugugguggaccucuaacagcauuguuguguucugcgggacguccggaacauacggcaccgggucuuggcccgacggcgccaauaucaacuuuaugccuaucuga

SEQ ID NO: 211535 - RNA, 1410 nt, Artificial Sequence; identical to SEQ ID NO: 206167
  derived and/or modified CDS sequence (opt5) from neuraminidase__InfluenzaA__ADM13466

SEQ ID NO: 211536 - RNA, 1410 nt, Artificial Sequence
  derived and/or modified CDS sequence (opt5) from neuraminidase__InfluenzaA__ADM13467
augaaccccaaucagaagaucauuaccaucggcagcgugucccugacaauugccacggucugcuuccucaugcaaaucgcuauucugguuaccacagugacccuucacuuuaaacaguacgagugugacucuccugccagcaaccaggugaugccgugcgaacccaucaucauugagagaaauaucacagaaauugucuaucugaacaauaccacaaucgagaaggaaauuuguccuaaagugguugaguaccggaacugguccaagccccagugccaaaucaccggguucgcgccuuuuucuaaagauaauagcauucgccucuccucuggaggcgacaucugggugacgagagagcccuaugucagcugugaucaugggaagugcuaccaguucgcucugggacagggcaccacacuugacaacaagcacuccaaugauaccauccaugaccggauuccucaccgcacacugcucaugaacgaacugggggugccguuucaucugggaaccagacagguuuguaucgccuggucuagcuccagcugccacgauggcaaagccuggcuccacguguguauuacgggcgacgauaagaaugcuacagccucuuucaucuaugacgggcggcuggucgauuccauuggaagcuggucucaaaacauccuucgcacccaggaguccgaaugcguguguaucaauggcacaugcaccguggucaugaccgacgggagcgcuuccggcagagccgauacacggauucuguuuaucgaggagggaaaaauuguucauaucucuccccucagcggguccgcgcagcacguggaagagugcagcuguuacccucgcuaucccggagugagaugcauuugucgggacaacuggaagggcucuaaucgcccugucguggacaucaacauggaagauuacuccaucgacagcucuuacguuugcagcggccuggugggggauacgcccagaaacgacgaucgguccucuaauagcaacugucgcaauccgaacaaugagagaggaaaccagggcgucaaagggugggccuucgacaauggagaugacguguggaugggccggaccauuuccaaggaucuuagaagcggguaugaaacauuuaagguuaucggaggcuggucuaccccuaacuccaaaagccaaauuaaucgccaggugaucgucgacucugauaaccgguccggcuacagcgggauuuucuccguggagggaaagucuugcaucaauagauguuuuuaugucgagcugauucgcggccggaaacaggaaacaagagugugguggaccagcaacuccaucguuguguucugcgggacgucuggaacauacggcaccgggagcuggcccgacggcgcuaauaucaacuuuaugccuauuuga

SEQ ID NO: 211537 - RNA, 1410 nt, Artificial Sequence; identical to SEQ ID NO: 206167
  derived and/or modified CDS sequence (opt5) from neuraminidase__InfluenzaA__ADM13468

SEQ ID NO: 211538 - RNA, 1410 nt, Artificial Sequence
  derived and/or modified CDS sequence (opt5) from neuraminidase__InfluenzaA__ADM13469
augaaccccaaucagaagaucauuaccaucggcagcgugucccugacaauugccacggcuugcuuccucaugcaaaucgccauucuggucaccacaguuacccuucacuuuaaacaguacgagugugacucuccugcgagcaaccaggugaugccgugcgaacccaucaucauugagagaaauaucacagaaauuguguaucugaacaauaccacaaucgagaaggaaauuuguccuaaagucguggaguaccggaacugguccaagccccagugccaaaucaccggguucgcuccuuuuucuaaagauaauagcauucgccucuccgccggaggcgacaucuggguuacgagagagcccuaugugucuugugaucaugggaagugcuaccaguucgcccugggacagggcaccacacuugacaacaagcacagcaaugauaccauccaugaccggauuccucaccgcacacugcucaugaacgaacugggggucccguuucaucugggaaccagacagguguguaucgcuugguccuccucuuccugccacgauggcaaagccuggcuccacguuuguauuacgggcgacgauaagaaugcuacagccagcuucaucuaugacgggcggcugguggauucuauuggauccuggagccaaaacauccuucgcacccaggagucugaaugcgucuguaucaauggcacaugcaccguggugaugaccgacggguccgcgagcggcagagccgauacacggauucuguuuaucgaggagggaaaaauuguccauaucagcccccucucugggagcgcucagcacguugaagagugcuccuguuacccucgcuaucccggagugagaugcauuugucgggacaacuggaagggcagcaaucgcccuguggucgacaucaacauggaagauuacucuaucgacuccagcuacgugugcucuggccugguuggggauacgcccagaaacgacgaucggagcuccaauucuaacugucgcaauccgaacaaugagagaggaaaccagggcgugaaagggugggccuucgacaauggagaugacgucuggaugggccggaccauuagcaaggaucuuagauccggguaugaaacauuuaaggugaucggaggcuggagcaccccuaacucuaaaucccaaauuaaucgccagguuaucguggacagcgauaaccggucuggcuacuccgggauuuucagcgucgagggaaaguccugcaucaauagauguuuuuauguggagcugauucgcggccggaaacaggaaacaagagucugguggaccucuaacagcaucgugguuuucugcgggacguccggaacauacggcaccgggucuuggcccgacggcgcuaauaucaacuuuaugccuauuuga

SEQ ID NO: 211539 - RNA, 1410 nt, Artificial Sequence
  derived and/or modified CDS sequence (opt5) from neuraminidase__InfluenzaA__ADM13470
augaaccccaaucagaagaucauuaccaucggcagcgugucccugacaauugccacggucugcuuccucaugcaaaucgcuauucugguuaccacagugacccuucacuuuaaacaguacgagugugacucuccugccagcaaccaggugaugccgugcgaacccaucaucauugagagaaauaucacagaaauugucuaucugaacaauaccacaaucgagaaggaaauuuguccuaaagugguugaguaccggaacugguccaagccccagugccaaaucaccggguucgcgccuuuuucuaaagauaauagcauucgccucuccgcuggaggcgacaucugggugacgagagagcccuaugucucuugugaucaugggaagugcuaccaguucgcccugggacagggcaccacacuugacaacaagcacagcaaugauaccauccaugaccggauuccucaccgcacacugcucaugaacgaacugggggugccguuucaucugggaaccagacagguuuguaucgccugguccuccucuuccugccacgauggcaaggcuuggcuccacguguguauuacgggcgacgauaaaaaugccacagcuagcuucaucuaugacgggcggcuggucgauucuauuggauccuggagccaaaacauccuucgcacccaggagucugaaugcguguguaucaauggcacaugcaccguggucaugaccgacggguccgccagcggcagagcggauacacggauucuguuuaucgaggagggaaaaauuguucauaucagcccccucucugggagcgcccagcacguggaagagugcuccuguuacccucgcuaucccggagugagaugcauuugucgggacaacuggaagggcagcaaucgcccugucguggacaucaacauggaagauuacucuaucgacuccagcuacguuugcucuggccuggugggggauacgcccagaaacgacgaucggagcuccaauucuaacugucgcaauccgaacaaugagagaggaaaccagggcgucaaagggugggcuuucgacaauggagaugacguguggaugggccggaccauuagcaaggaucuuagauccggguaugaaacauuuaagguuaucggaggcuggagcaccccuaacucuaaaucccaaauuaaucgccaggugaucauugacagcgauaaccggucuggcuacuccgggaucuucagcgucgagggaaaguccugcauuaauagauguuuuuauguggagcugauccgcggccggaaacaggaaacaagagucugguggaccucuaacagcaucgugguuuucugcgggacguccggaacauacggcaccgggucuuggcccgacggcgccaauauuaacuuuaugccuaucuga

SEQ ID NO: 211540 - RNA, 1410 nt, Artificial Sequence
  derived and/or modified CDS sequence (opt5) from neuraminidase__InfluenzaA__ADM13471
augaaccccaaucagaagaucauuaccaucggcagcgugucccugacaauugccacggucugcuuccucaugcaaaucgcuauucugguuaccacagugacccuucacuuuaaacaguacgagugugacucuccugccagcaaccaggugaugccgugcgaacccaucaucauugagagaaauaucacagaaauugucuaucugaacaauaccacaaucgagaaggaaauuuguccuaaagugguugaguaccggaacugguccaagccccagugccaaaucaccggguucgcgccuuuuucuaaagauaauagcauucgcaucuccgcuggaggcgacaucugggugacgagagagcccuaugucucuugugaucaugggaagugcuaccaguucgcccucggacagggcaccacacuggacaacaagcacagcaaugauaccauucaugaccggaucccucaccgcacacuucugaugaacgaacucggggugccguuucaucugggaaccagacagguuuguauugccugguccuccucuuccugccacgauggcaaggcuuggcugcacguguguaucacgggcgacgauaaaaaugccacagcuagcuucauuuaugacgggcggcucgucgauucuaucggauccuggagccaaaacauccugcgcacccaggagucugaaugcguguguauuaauggcacaugcaccguggucaugaccgacggguccgccagcggcagagcggauacacggauccuuuuuauugaggagggaaaaaucguucauauuagcccccugucugggagcgcccagcacguggaagagugcuccuguuacccucgcuaucccggagugagaugcaucugucgggacaacuggaagggcagcaaucgcccugucguggacaucaacauggaagauuacucuauugacuccagcuacguuugcucuggccucgugggggauacgcccagaaacgacgaucggagcuccaauucuaacugucgcaauccgaacaaugagagaggaaaccagggcgucaaagggugggcuuucgacaauggagaugacguguggaugggccggaccaucagcaaggaucugagauccggguaugaaacauuuaagguuauuggaggcuggagcaccccuaacucuaaaucccaaaucaaucgccaggugauugucgacagcgauaaccggucuggcuacuccgggaucuucagcguggagggaaaguccugcauuaauagauguuuuuaugucgagcuuauccgcggccggaaacaggaaacaagagugugguggaccucuaacagcaucguuguguucugcgggacguccggaacauacggcaccgggucuuggcccgacggcgccaauauuaacuuuaugccuaucuga

SEQ ID NO: 211541 - RNA, 1410 nt, Artificial Sequence; identical to SEQ ID NO: 208580
  derived and/or modified CDS sequence (opt5) from neuraminidase__InfluenzaA__ADM13472

SEQ ID NO: 211542 - RNA, 1410 nt, Artificial Sequence; identical to SEQ ID NO: 206167
  derived and/or modified CDS sequence (opt5) from neuraminidase__InfluenzaA__ADM13473

SEQ ID NO: 211543 - RNA, 1410 nt, Artificial Sequence; identical to SEQ ID NO: 208575
  derived and/or modified CDS sequence (opt5) from neuraminidase__InfluenzaA__ADM13474

SEQ ID NO: 211544 - RNA, 1410 nt, Artificial Sequence
  derived and/or modified CDS sequence (opt5) from neuraminidase__InfluenzaA__ADM14469
augaaccccaaucagaagaucauuaccaucggcagcgugugcaugacaauugggauggccaaccugauccuccaaauuggaaauaucaucuccauuuggaucucucacagcauucagcugggcaaccagaaucagaucgagacguguaaccaauccgucauuaccuacgaaaauaacacauggguuaaucagaccuaugugaacaucucuaauacaaacuucgcugccgggcagagcguggucuccgugaaacuugcgggaaauucuagccugugcccuguuuccggcugggcuauuuacagcaaggacaacucuaugagaaucggguccaaaggagauguguuugucauccgggagccguucauuagcuguucuccccucgaaugccgcaccuuuuuccugacacagggcgcccuucugaaugacaagcauuccaacggcaccaucaaagauagaagcccuuaucggacgcucaugucuugucccauuggggaggugccuucccccuacaacagccgcuuugaauccguugccuggucugcuagcgccugccacgacggaaucaauuggcugaccauuggcaucuccgggccugauaacggagcuguggccguccugaaguauaauggcaucauuacagacaccaucaagagcuggagaaacaauauucuccggacacaagagucugagugugcgugcgugaacggguccuguuucaccgugaugacggauggaccgagcgacggccaggccucuuacaaaaucuuucgcauugaaaagggcaaaaucgucaagagcguugagaugaaugcucccaacuaucauuacgaagagugcuccuguuacccugauucuagcgagaucacaugcgugugcagagacaauuggcacggguccaaccggcccugggugagcuucaaucagaaccuggaauaucagauuggauacaucuguucuggcauuuuuggggauaauccucgccccaacgacaaaaccggauccugcggcccggucagcucuaauggggccaacggagugaagggcuucuccuuuaaguauggcaacgggguuuggaucggaagaacaaaaagcauuuccucucggaccggcuucgagaugaucugggauccuaauggguggaccggaacagacaacaauuuuagcauuaagcaagacaucgugggcaucaacgaaugguccggguacucuggcagcuucguccagcaucccgagcuuacgggacuggauuguauucgcccuugcuucuggguggaacucaucagaggccggcccaaagagaauaccauuuggacauccgggagcucuaucuccuuuuguggaguuaacagcgacaccgugggcuggucuuggcccgauggggcugagcugccuuucacaauugacaaguga

SEQ ID NO: 211545 - RNA, 1410 nt, Artificial Sequence; identical to SEQ ID NO: 208810
  derived and/or modified CDS sequence (opt5) from neuraminidase__InfluenzaA__ADM14479

SEQ ID NO: 211546 - RNA, 1410 nt, Artificial Sequence; identical to SEQ ID NO: 208810
  derived and/or modified CDS sequence (opt5) from neuraminidase__InfluenzaA__ADM14499

SEQ ID NO: 211547 - RNA, 1410 nt, Artificial Sequence; identical to SEQ ID NO: 210323
  derived and/or modified CDS sequence (opt5) from neuraminidase__InfluenzaA__ADM14518

SEQ ID NO: 211548 - RNA, 1410 nt, Artificial Sequence; identical to SEQ ID NO: 211148
  derived and/or modified CDS sequence (opt5) from neuraminidase__InfluenzaA__ADM14527

SEQ ID NO: 211549 - RNA, 1410 nt, Artificial Sequence; identical to SEQ ID NO: 210241
  derived and/or modified CDS sequence (opt5) from neuraminidase__InfluenzaA__ADM14537

SEQ ID NO: 211550 - RNA, 1410 nt, Artificial Sequence; identical to SEQ ID NO: 208810
  derived and/or modified CDS sequence (opt5) from neuraminidase__InfluenzaA__ADM14546

SEQ ID NO: 211551 - RNA, 1410 nt, Artificial Sequence
  derived and/or modified CDS sequence (opt5) from neuraminidase__InfluenzaA__ADM14555
augaaccccaaucagaagaucauuaccaucggcagcgugugcaugacaauugggauggccaaccugauccuccaaauuggaaauaucaucuccauuuggaucucucacagcauucagcugggcaaccagaaucagaucgagacguguaaccaauccgucauuaccuacgaaaauaacacauggguuaaucagaccuaugugaacaucucuaauacaaacuucgcugccgggcagagcguggucuccgugaaacuugcgggaaauucuagccugugcccuguuuccggcugggcuauuuacagcaaggacaacucuaucagaaucggguccaaaggagauguguuugucauucgggagccguucaucagcuguucuccccucgaaugccgcaccuuuuuccugacacagggcgcccuucugaaugacaagcauuccaacggcaccauuaaagauagaagcccuuaucggacgcucaugucuugucccaucggggaggugccuucccccuacaacagccgcuuugaauccguugccuggucugcuagcgccugccacgacggaauuaauuggcugaccaucggcaucuccgggccugauaacggagcuguggccguccugaaguauaauggcauuaucacagacaccauuaagagcuggagaaacaauauccuccggacacaagagucugagugugcgugcgugaacggguccuguuucaccgugaugacggauggaccgagcgacggccaggccucuuacaaaauuuuucgcaucgaaaagggcaaaaucgucaagagcguugagaugaaugcucccaacuaucauuacgaagagugcuccuguuacccugauucuagcgagauuacaugcgugugcagagacaauuggcacggguccaaccggcccugggugagcuucaaucagaaccuggaauaucagaucggauacauuuguucuggcaucuuuggggauaauccucgccccaacgacaaaaccggauccugcggcccggucagcucuaauggggccaacggagugaagggcuucuccuuuagauauggcaacgggguuuggauuggacggacaaagagcaucuccucucgcaauggcuucgagaugauuugggauccuaacggguggaccggaaccgacaauaacuuuagcaucaaacaagacaucgugggcauuaaugaaugguccggguacucuggcagcuucguccagcaucccgagcuuacaggacuggauuguaucagaccuugcuucuggguggaacucauucggggccgccccaaggagaacacgaucuggaccuccgggagcucuauuuccuuuuguggaguuaauagcgacacagugggcuggucuuggcccgauggggcugagcugccuuucaccaucgacaaauga

SEQ ID NO: 211552 - RNA, 1410 nt, Artificial Sequence; identical to SEQ ID NO: 208810
  derived and/or modified CDS sequence (opt5) from neuraminidase__InfluenzaA__ADM14573

SEQ ID NO: 211553 - RNA, 1410 nt, Artificial Sequence; identical to SEQ ID NO: 208810
  derived and/or modified CDS sequence (opt5) from neuraminidase__InfluenzaA__ADM14582

SEQ ID NO: 211554 - RNA, 1410 nt, Artificial Sequence; identical to SEQ ID NO: 208810
  derived and/or modified CDS sequence (opt5) from neuraminidase__InfluenzaA__ADM14591

SEQ ID NO: 211555 - RNA, 1410 nt, Artificial Sequence
  derived and/or modified CDS sequence (opt5) from neuraminidase__InfluenzaA__ADM14601
augaaccccaaucagaagaucauuaccaucggcagcgugugcaugacaauugggauggccaaccugauccuccaaauuggaaauaucaucuccauuuggaucucucacagcauucagcugggcaaccagaaucagaucgagacguguaaccaauccgucauuaccuacgaaaauaacacauggguuaaucagaccuaugugaacaucucuaauacaaacuucgcugccgggcagagcguggucuccgugaaacuugcgggaaauucuagccugugcccuguuaacggcugggcuauuuacuccaaggacaauagcgugagaaucgggucuaaaggagaugucuuugugauccgggagccguucauuuccuguagcccccucgaaugccgcaccuuuuuccugacacagggcgcccuucugaacgacaagcauucuaacggcaccaucaaagauagauccccuuaucggacgcucaugagcugucccauuggggagguuccuucucccuacaauucccgcuuugaaagcguggccugguccgcuucugccugccacgacggaaucaacuggcugaccauuggcaucagcgggccugauaauggagcugucgccgugcugaaguauaacggcaucauuacagacaccaucaaguccuggagaaauaacauucuccggacacaagagagcgagugugcgugcgugaaugggucuuguuucaccgucaugacggauggaccguccgacggccaggccagcuacaaaaucuuucgcauugaaaagggcaaaaucguuaagucuguggagaugaacgcucccaauuaucauuacgaagagugcagcuguuacccugauuccucugagaucacaugcgugugcagagacaacuggcacgggagcaaucggcccugggucuccuucaaccagaaucuggaauaucagauuggauacaucuguagcggcauuuuuggggauaacccucgccccaaugacaaaaccggaucuugcggcccgguguccagcaacggggccaacggaguuaagggcuucucuuuuaaguauggcaaugggguguggaucggaagaacaaaauccauuagcucccggaacggcuucgagaugaucugggauccuaauggguggaccggaaccgacaacaauuuuucuauuaagcaagacaucgucggcaucaacgaauggagcggguacuccggcucuuucgugcagcaucccgagcuuacaggacuggauuguauucgcccuugcuucuggguugaacucaucagaggccggcccaaagagaauacgauuuggaccagcggguccagcaucucuuuuuguggagugaacuccgacacagucggcuggagcuggcccgauggggcugagcugccuuucaccauugacaaguga

SEQ ID NO: 211556 - RNA, 1410 nt, Artificial Sequence
  derived and/or modified CDS sequence (opt5) from neuraminidase__InfluenzaA__ADM14611
augaaccccaaucagaagaucauuaccaucggcagcgugugcaugacaauugggauggccaaccugauccuccaaauuggaaauaucaucuccauuuggaucucucacagcauucagcugggcaaccagaaucagaucgagacguguaaccaauccgucauuaccuacgaaaauaacacauggguuaaucagaccuaugugaacaucucuaauacaaacuucgcugccgggcagagcguggucuccgugaaacuuucuggaaauagcucccugugcccuguuagcggcugggcgauuuacucuaaggacaacuccaucagaaucgggagcaaaggagauguguuugucauucgggagccguucaucucuuguagcccccucgaaugccgcaccuuuuuccugacacagggcgcccuucugaaugacaagcauuccaacggcaccauuaaagauagaucuccuuaucggacgcucauguccugucccaucggggaggugccuagccccuacaacucccgcuuugaaucuguugcuuggagcgccuccgcuugccacgacggaauuaauuggcugaccaucggcaucagcgggccugauaacggagccguggcuguccugaaguauaauggcauuaucacagacaccauuaagucuuggagaaacaauauccuccggacacaagaguccgagugugccugcgugaacgggagcuguuucaccgugaugacggauggaccgucugacggccaggcgagcuacaaaauuuuucgcaucgaaaagggcaaaaucgucaaguccguugagaugaaugcccccaacuaucauuacgaagagugcucuuguuacccugauagcuccgagauuacaugcgugugcagagacaauuggcacgggagcaaccggcccugggugucuuucaaucagaaccuggaauaucagaucggauacauuuguuccggcaucuuuggggauaauccucgccccaacgacaaaaccggaagcugcggcccggucucuuccaauggggcuaacggagugaagggcuucagcuuuaaguauggcaacgggguuuggauuggaagaacaaaauccaucucuagccggaauggcuucgagaugauuugggauccuaacggguggaccggaaccgacaauaacuuuuccaucaagcaagacaucgugggcauuaaugaauggucuggguacagcggcuccuucguccagcaucccgagcuuacaggacuggauuguauccgcccuugcuucuggguggaacucauuagaggccggcccaaagagaacacgaucuggaccagcgggucuuccauuagcuuuuguggaguuaauucugacacagugggcugguccuggcccgauggggccgagcugccuuucaccaucgacaaguga

SEQ ID NO: 211557 - RNA, 1410 nt, Artificial Sequence; identical to SEQ ID NO: 208810
  derived and/or modified CDS sequence (opt5) from neuraminidase__InfluenzaA__ADM14620

SEQ ID NO: 211558 - RNA, 1410 nt, Artificial Sequence; identical to SEQ ID NO: 208810
  derived and/or modified CDS sequence (opt5) from neuraminidase__InfluenzaA__ADM14629

SEQ ID NO: 211559 - RNA, 1410 nt, Artificial Sequence; identical to SEQ ID NO: 208810
  derived and/or modified CDS sequence (opt5) from neuraminidase__InfluenzaA__ADM14639

SEQ ID NO: 211560 - RNA, 1410 nt, Artificial Sequence; identical to SEQ ID NO: 208810
  derived and/or modified CDS sequence (opt5) from neuraminidase__InfluenzaA__ADM14657

SEQ ID NO: 211561 - RNA, 1410 nt, Artificial Sequence; identical to SEQ ID NO: 208810
  derived and/or modified CDS sequence (opt5) from neuraminidase__InfluenzaA__ADM14666

SEQ ID NO: 211562 - RNA, 1410 nt, Artificial Sequence; identical to SEQ ID NO: 208810
  derived and/or modified CDS sequence (opt5) from neuraminidase__InfluenzaA__ADM14684

SEQ ID NO: 211563 - RNA, 1410 nt, Artificial Sequence
  derived and/or modified CDS sequence (opt5) from neuraminidase__InfluenzaA__ADM14693
augaaccccaaucagaagaugaucaccauuggcagcgugugcaugacaaucgggauggccaaccugauucuccaaaucggaaauauuaucuccaucuggauuucucacagcauccagcugggcaaccagaaucagauugagacguguaaccaauccgucaucaccuacgaaaauaacacauggguuaaucagaccuaugugaacauuucuaauacaaacuucgcugccgggcagagcguggucuccgugaaacuugcgggaaauucuagccugugcccuguuuccggcugggcuaucuacagcaaggacaacucuauuagaaucggguccaaaggagauguguuugucauccgggagccguucauuagcuguucuccccucgaaugccgcaccuuuuuccugacacagggcgcccuucugaaugacaagcauuccaacggcaccaucaaagauagaagcccuuaucggacgcucaugucuugucccauuggggaggugccuucccccuacaacagccgcuuugaauccguugccuggucugcuagcgccugccacgacggaaucaauuggcugaccauuggcaucuccgggccugauaacggagcuguggccguccugaaguauaauggcaucauuacagacaccaucaagagcuggagaaacaauauucuccggacacaagagucugagugugcgugcgugaacggguccuguuucaccgugaugacggauggaccgagcgacggccaggccucuuacaaaaucuuucgcauugaaaagggcaaaaucgucaagagcguugagaugaaugcucccaacuaucauuacgaagagugcuccuguuacccugauucuagcgagaucacaugcgugugcagagacaauuggcacggguccaaccggcccugggugagcuucaaucagaaccuggaauaucagauuggauacaucuguucuggcauuuuuggggauaauccucgccccaacgacaaaaccggauccugcggcccggucagcucuaauggggccaacggagugaagggcuucuccuuuaaguauggcaacgggguuuggaucggaagaacaaaaagcauuuccucucggaauggcuucgagaugaucugggauccuaacggguggaccggaaccgacaauaacuuuagcauuaagcaagacaucgugggcaucaaugaaugguccggguacucuggcagcuucguccagcaucccgagcuuacaggacuggauuguauucgcccuugcuucuggguggaacucaucagaggccggcccaaagagaacacgauuuggaccuccgggagcucuaucuccuuuuguggaguuaauagcgacacagugggcuggucuuggcccgauggggcugagcugccuuucaccauugacaaguga

SEQ ID NO: 211564 - RNA, 1410 nt, Artificial Sequence
  derived and/or modified CDS sequence (opt5) from neuraminidase__InfluenzaA__ADM14702
augaaccccaaucagaagaucauuaccaucggcagcgugugcaugacaauugggauggccaaccugauccuccaaauuggaaauaucaucuccauuuggaucucucacagcauucagcugggcaaccagaaucagaucgagacguguaaccaauccgucauuaccuacgaaaauaacacauggguuaaucagaccuaugugaacaucucuaauacaaacuucgcugccgggcagagcguggucuccgugaaacuugcgggaaauucuagccugugcccuguuuccggcugggcuauuuacagcaaggacaacucuaucagaaucggguccaaaggagauguguuugucauucgggagccguucaucagcuguucucaucucgaaugccgcaccuuuuuccugacacagggcgcccuucugaaugacaagcacuccaacggcaccauuaaagauagaagccccuaucggacgcucaugucuuguccuaucggggaggugcccuccccuuacaacagccgcuuugaauccguugccuggucugcuagcgccugccaugacggaauuaauuggcugaccaucggcaucuccgggcccgauaacggagcuguggccguccugaaguauaauggcauuaucacagacaccauuaagagcuggagaaacaauauccuccggacacaagagucugagugugcgugcgugaacggguccuguuucaccgugaugacggauggaccuagcgacggccaggccucuuacaaaauuuuucgcaucgaaaagggcaaaaucgucaagagcguugagaugaaugcuccgaacuaucacuacgaagagugcuccuguuaccccgauucuagcgagauuacaugcgugugcagagacaauuggcauggguccaaccggccuugggugagcuucaaucagaaccuggaauaucagaucggauacauuuguucuggcaucuuuggggauaauccccgcccuaacgacaaaaccggauccugcggccccgucagcucuaauggggccaacggagugaagggcuucuccuuuaaguauggcaacggggcuuggauuggaagaacaaaaagcaccuccucucggaauggcuucgagaugaucugggauccgaacggguggaccggaacagacaauaacuuuagcauuaagcaagacaucguuggcaucaaugaaugguccggguacucuggcagcuucgugcagcacccugagcuuacgggacuggauuguauucgccccugcuucugggucgaacucaucagaggccggccuaaagagaacaccauuuggacauccgggagcucuaucuccuuuuguggagugaauagcgacaccguuggcuggucuuggcccgauggggccgagcugcccuucacaauugacaaguga

SEQ ID NO: 211565 - RNA, 1410 nt, Artificial Sequence; identical to SEQ ID NO: 210712
  derived and/or modified CDS sequence (opt5) from neuraminidase__InfluenzaA__ADM14711

SEQ ID NO: 211566 - RNA, 1410 nt, Artificial Sequence
  derived and/or modified CDS sequence (opt5) from neuraminidase__InfluenzaA__ADM14720
augaaccccaaucagaagaucauuaccaucggcagcgugugcaugacaauugggauggccaaccugauccuccaaauuggaaauaucaucuccauuuggaucucucacagcauucagcugggcaaccagaaucagaucgagacguguaaccaauccgucauuaccuacgaaaauaacacauggguuaaucagaccuaugugaacaucucuaauacaaacuucgcugccgggcagagcguggucuccgugaaacuugcgggaaauucuagccugugcccuguuuccggcugggcuauuuacagcaaggacaacucuaucagaaucggguccaaaggagauguguuugucauucgggagccguucaucagcuguucuccccucgaaugccgcaccuuuuuccugacacagggcgcccuucugaaugacaagcauuccaacggcaccauuaaagauagaagcccuuaucggacgcucaugucuugucccaucggggaggugccuucccccuacaacagccgcuuugaauccguugccuggucugcuagcgccugccacgacggaauuaauuggcugaccaucggcaucuccgggccugauaacggagcuguggccguccugaaguauaauggcauuaucacagacaccauuaagagcuggagaaacaauauccuccggacacaagagucugagugugcgugcgugaacggguccuguuucaccgugaugacggauggaccgagcgacggccaggccucuuacaaaauuuuucgcaucgaaaagggcaaaaucgucaagagcguugagaugaaugcucccaacuaucauuacgaagagugcuccuguuacccugauucuagcgagauuacaugcgugugcagagacaauuggcacggguccaaccggcccugggugagcuucaaucagaaccuggaauaucagaucggauacauuuguucuggcgucuuuggggauaauccucgccccaacgacaaaaccggauccugcggcccggugagcucuaauggggccaacggaguuaagggcuucuccuuuaaguauggcaacgggguguggaucggaagaacaaaaagcauuuccucucggaauggcuucgagaugaucugggauccuaacggguggaccggaaccgacaauaacuuuagcauuaagcaagacaucgucggcaucaaugaaugguccggguacucuggcagcuucgugcagcaucccgagcuuacaggacuggauuguauucgcccuugcuucuggguugaacucaucagaggccggcccaaagagaacacgauuuggaccuccgggagcucuaucuccuuuuguggagugaauagcgacacagucggcuggucuuggcccgauggggcugagcugccuuucaccauugacaaguga

SEQ ID NO: 211567 - RNA, 1410 nt, Artificial Sequence
  derived and/or modified CDS sequence (opt5) from neuraminidase__InfluenzaA__ADM14730
augaaccccaaucagaagaucauuaccaucggcagcgugugcaugacaauugggauggccaaccugauccuccaaauuggaaauaucaucuccauuuggaucucucacagcauucagcugggcaaccagaaucagaucgagacguguaaccaauccauuaucaccuacgaaaauaacacaugggucaaucagaccuauguuaacauuucuaauacaaacuucgcugccgggcagagcgugguguccgucaaacuugcgggaaauucuagccugugcccuguguccggcugggcuguuuacagcaaggacaacucuaucagaaucggguccaaaggagaugugcucgucauucgggagccguuuaucagcuguucuccccuggaaugccgcaccuucuuucuuacacagggcgcccugcucaaugacaagcauuccaacggcaccauuaaagauagaagcccuuaucggacgcugaugucuugucccaucggggaggugccuucccccuacaacagccgcuucgaauccguugccuggucugcuagcgccugccacgacggaauuaauuggcugaccaucggcaucuccgggccugauaacggagcuguggccguccucaaguauaauggcauuaucacagacaccauuaagagcuggagaaacaauauccugcggacacaagagucugagugugcgugcgugaacggguccuguuuuaccgugaugacggauggaccgagcgacggccaggccucuuacaaaauuuuccgcaucgaaaagggcaaaaucgucaagagcguugagaugaaugcucccaacuaucauuacgaagagugcuccuguuacccugauucuagcgagauuacaugcgugugcagagacaauuggcacggguccaaccggcccugggugagcuuuaaucagaaccuugaauaucagaucggauacauuuguucuggcaucuucggggauaauccucgccccaacgacaaaaccggauccugcggcccggucagcucuaauggggccaacggagugaagggcuuuuccuucaaguauggcaacgggguuuggauuggaagaacaaaaagcaucuccucucggagcggcuuugagaugauuugggauccuaauggguggaccggaaccgacaacaauuucuccaucaagcaagacaucgugggcauuaacgaauggucuggguacagcggcuccuuuguccagcaucccgagcugacaggacucgauuguauccgcccuugcuucuggguggaacugauuagaggccggcccaaagagaauacgaucuggaccagcgggucuuccauuagcuucuguggaguuaacucugacacagugggcugguccuggcccgauggggcugagcuuccuuuuaccaucgacaaguga

SEQ ID NO: 211568 - RNA, 1350 nt, Artificial Sequence
  derived and/or modified CDS sequence (opt5) from neuraminidase__InfluenzaA__ADM14748
augaaccccaaucagaagaucauuaccaucggcagcgugugcaugacaauugggauggccaaccugauccuccaaauuggaaauaucaucuccauuuggaucucucacagcauucagcugggcaaccagaaucagaucgagacguguaaccaauccgucauuaccuacgaaaauaacacauggguuaaucagaccuaugugaacaucucuaauacaaacuucgcugccgggcagagcguggucuccgugaaacuugcgggaaauucuagccugugcccuguuuccggcugggcuauuuacagcaaggacaacucuaucagaaucugucggaccuuuuuccucacacagggggcccugcuuaaugauaaacauuccaacggaaccauuaaggaccgcagcccguauagaacgcugaugucuugccccaucggcgaggugccuucccccuacaacagccgguuugaaucugucgccugguccgcuagcgccugucacgauggcauuaauuggcucaccaucgggauuuccggaccugacaacggcgcuguggccguucugaaauauaaugggaucaucacagauaccauuaagucuuggcgcaacaauauccugagaacacaagagagcgaaugcgcgugugugaacggauccugcuucaccgucaugacggacggccccagcgaugggcaggccucuuacaagauuuuucggaucgagaaaggaaagauugugaaauccguggagaugaaugcuccuaacuaucauuacgaagaguguagcugcuacccggacucuagcgaaaucacaugugucugccgcgauaauuggcacggcuccaacagacccuggguuucuuucaaucagaaccucgaguaucagaucggcuacauuugcagcgggaucuuuggagacaauccucggcccaacgauaagaccggcuccugugggccugugagcucuaauggagccaacggcgugaaaggguucuccuuuaaguauggaaacggcgucuggauuggccgcacaaagagcaucucuuccagaaauggguucgagaugauuugggaccccaacggauggaccggcaccgauaauaacuuuagcaucaaacaagacauuguggggaucaaugaaugguccggauacucuggcagcuucguucagcauccggagcugacagggcuugacugcauccggccuuguuuuuggguggaacugauucgcggcagacccaaggagaacacgaucuggaccuccggaucuagcauuuccuucugcggcgucaauagcgauacagugggguggucuuggccugacggagcugaacuccccuucaccaucgauaaauga

SEQ ID NO: 211569 - RNA, 1410 nt, Artificial Sequence
  derived and/or modified CDS sequence (opt5) from neuraminidase__InfluenzaA__ADM14758
augaaccccaaucagaagaucauuaccaucggcagcgugugcaugacaauugggauggccaaccugauccuccaaauuggaaauaucaucuccauuuggaucucucacagcauucagcugggcaaccagaaucagaucgagacguguaaccaauccgucauuaccuacgaaaauaacacauggguuaaucagaccuaugugaacaucucuaauacaaacuucgcugccgggcagagcguggucuccgugaaacuugcgggaaauucuagccugugcccuguuuccggcugggcuauuuacagcaaggacaacucuaucagaaucggguccaaaggagauguguuugucauucgggagccguucaucagcuguucuccccucgaaugccgcaccuuuuuccugacacagggcgcccuucugaaugacaagcauuccaacggcaccauuaaagauagaagcccuuaucggacgcucaugucuugucccaucggggaggugccuucccccuacaacagccgcuuugaauccguugccuggucugcuagcgccugccacgacggaauuaauuggcugaccaucggcaucuccgggccugauaacggagcuguggccguccugaaguauaauggcauuaucacagacaccauuaagagcuggagaaacaauauccuccggacacaagagucugagugugcgugcgugaacggguccuguuucaccgugaugacggauggaccgagcgacggccaggccucuuacaaaauuuuucgcaucgaaaagggcaaaaucgucaagagcguugagauuaaugcucccaacuaucauuacgaagagugcuccuguuacccugauucuagcgagaucacaugcgugugcagagacaauuggcacggguccaaccggcccugggugagcuucaaucagaaccuggaauaucagauuggauacaucuguucuggcauuuuuggggauaauccucgccccaacgacaaaaccggauccugcggcccggucagcucuaauggggccaacggagugaagggcuucuccuuuaaguauggcaacgggguuuggaucggaagaacaaaaagcauuuccucucggaauggcuucgagaugaucugggauccuaacggguggaccggaaccgacaauaacuuuagcaucaagcaagacauugugggcaucaaugaaugguccggguacucuggcagcuucguccagcaucccgagcuuacaggacuggauuguauucgcccuugcuucuggguggaacucaucagaggccggcccaaagagaacacgauuuggaccuccgggagcucuaucuccuuuuguggaguuaauagcgacacagugggcuggucuuggcccgauggggcugagcugccuuucaccaucgacaaguga

SEQ ID NO: 211570 - RNA, 1410 nt, Artificial Sequence; identical to SEQ ID NO: 211569
  derived and/or modified CDS sequence (opt5) from neuraminidase__InfluenzaA__ADM14767

SEQ ID NO: 211571 - RNA, 1410 nt, Artificial Sequence; identical to SEQ ID NO: 208810
  derived and/or modified CDS sequence (opt5) from neuraminidase__InfluenzaA__ADM14777

SEQ ID NO: 211572 - RNA, 1410 nt, Artificial Sequence; identical to SEQ ID NO: 208810
  derived and/or modified CDS sequence (opt5) from neuraminidase__InfluenzaA__ADM14814

SEQ ID NO: 211573 - RNA, 1410 nt, Artificial Sequence; identical to SEQ ID NO: 208810
  derived and/or modified CDS sequence (opt5) from neuraminidase__InfluenzaA__ADM14823

SEQ ID NO: 211574 - RNA, 1410 nt, Artificial Sequence; identical to SEQ ID NO: 210433
  derived and/or modified CDS sequence (opt5) from neuraminidase__InfluenzaA__ADM14841

SEQ ID NO: 211575 - RNA, 1410 nt, Artificial Sequence; identical to SEQ ID NO: 210433
  derived and/or modified CDS sequence (opt5) from neuraminidase__InfluenzaA__ADM14859

SEQ ID NO: 211576 - RNA, 1410 nt, Artificial Sequence; identical to SEQ ID NO: 209947
  derived and/or modified CDS sequence (opt5) from neuraminidase__InfluenzaA__ADM14868

SEQ ID NO: 211577 - RNA, 1410 nt, Artificial Sequence; identical to SEQ ID NO: 210433
  derived and/or modified CDS sequence (opt5) from neuraminidase__InfluenzaA__ADM14878

SEQ ID NO: 211578 - RNA, 1410 nt, Artificial Sequence; identical to SEQ ID NO: 208810
  derived and/or modified CDS sequence (opt5) from neuraminidase__InfluenzaA__ADM14887

SEQ ID NO: 211579 - RNA, 1410 nt, Artificial Sequence
  derived and/or modified CDS sequence (opt5) from neuraminidase__InfluenzaA__ADM14896
augaaccccaaucagaagaucauuaccaucggcagcgugugcaugacaauugggauggccaaccugauccuccaaauuggaaauaucaucuccauuuggaucucucacagcauucagcugggcaaccagaaucagaucgagacguguaaccaauccgucauuaccuacgaaaauaacacauggguuaaucagaccuaugugaacaucucuaauacaaacuucgcugccgggcagagcguggucuccgugaaacuugcgggaaauucuagccugugcccuguuuccggcugggcuauuuacagcaaggacaacucuaucagaaucggguccaaaggagaugugcucgucauucgggagccguuuaucagcuguucuccccuggaaugccgcaccuucuuucuuacacagggcgcccugcucaaugacaagcauuccaacggcaccauuaaagauagaagcccuuaucggacgcugaugucuugucccaucggggaggugccuucccccuacaacagccgcuucgaauccguugccuggucugcuagcgccugccacgacggaauuaauuggcugaccaucggcaucuccgggccugauaacggagcuguggccguccucaaguauaauggcauuaucacagacaccauuaagagcuggagaaacaauauccugcggacacaagagucugagugugcgugcgugaacggguccuguuuuaccgugaugacggauggaccgagcgacggccaggccucuuacaaaauuuuccgcaucgaaaagggcaaaaucgucaagagcguugagaugaaugcucccaacuaucauuacgaagagugcuccuguuacccugauucuagcgagauuacaugcgugugcagagacaauuggcacggguccaaccggcccugggugagcuuuaaucagaaccuugaauaucagaucggauacauuuguucuggcaucuucggggauaauccucgccccaacgacaaaaccggauccugcggcccggucagcucuaauggggccaacggagugaagggcuuuuccuucaaguauggcaacgggguuuggauuggaagaacaaaaagcaucuccucucggaauggcuuugagaugauuugggauccuaacggguggaccggaaccgacaauaacuucagcaucaagcaagacaucgugggcauuaaugaaugguccggguacucuggcagcuuuguccagcaucccgagcugacaggacucgauuguauccgcccuugcuucuggguggaacugauuagaggccggcccaaagagaacacgaucuggaccuccgggagcucuauuuccuucuguggaguuaauagcgacacagugggcuggucuuggcccgauggggcugagcuuccuuuuaccaucgacaaguga

SEQ ID NO: 211580 - RNA, 1410 nt, Artificial Sequence; identical to SEQ ID NO: 208810
  derived and/or modified CDS sequence (opt5) from neuraminidase__InfluenzaA__ADM14905

SEQ ID NO: 211581 - RNA, 1410 nt, Artificial Sequence; identical to SEQ ID NO: 208810
  derived and/or modified CDS sequence (opt5) from neuraminidase__InfluenzaA__ADM14923

SEQ ID NO: 211582 - RNA, 1410 nt, Artificial Sequence; identical to SEQ ID NO: 210098
  derived and/or modified CDS sequence (opt5) from neuraminidase__InfluenzaA__ADM14932

SEQ ID NO: 211583 - RNA, 1410 nt, Artificial Sequence; identical to SEQ ID NO: 208810
  derived and/or modified CDS sequence (opt5) from neuraminidase__InfluenzaA__ADM14950

SEQ ID NO: 211584 - RNA, 1410 nt, Artificial Sequence; identical to SEQ ID NO: 209828
  derived and/or modified CDS sequence (opt5) from neuraminidase__InfluenzaA__ADM14959

SEQ ID NO: 211585 - RNA, 1410 nt, Artificial Sequence
  derived and/or modified CDS sequence (opt5) from neuraminidase__InfluenzaA__ADM14977
augaaccccaaucagaagaucauuaccaucggcagcgugugcaugacaauugggauggccaaccugauccuccaaauuggaaauaucaucuccauuuggaucucucacagcauucagcugggcaaccagaaucagaucgagacguguaaccaauccgucauuaccuacgaaaauaacacauggguuaaucagaccuaugugaacaucucuaauacaaacuucgcugccgggcagagcguggucuccgugaaacuugcgggaaauucuagccugugcccuguuaacggcugggcuauuuacuccaaggacaauagcgugagaaucgggucuaaaggagaugucuuugugauccgggagccguucauuuccuguagcccccucgaaugccgcaccuuuuuccugacacagggcgcccuucugaacgacaagcauucuaacggcaccaucaaagauagauccccuuaucggacgcucaugagcugucccauuggggagguuccuucucccuacaauucccgcuuugaaagcguggccugguccgcuucugccugccacgacggaaucaacuggcugaccauuggcaucagcgggccugauaauggagcugucgccgugcugaaguauaacggcaucauuacagacaccaucaaguccuggagaaauaacauucuccggacacaagagagcgagugugcgugcgugaaugggucuuguuucaccgucaugacggauggaccguccaacggccaggccagcuacaaaaucuuucgcauugaaaagggcaaaaucguuaagucuguggagaugaaugcucccaacuaucauuacgaagagugcagcuguuacccugacuccucugagaucacaugcgugugcagagauaauuggcacgggagcaaccggcccugggucuccuucaaucagaaccuggaauaucagauuggauacaucuguagcggcauuuuuggggacaauccucgccccaacgauaaaaccggaucuugcggcccgguguccagcaacggggccaauggaguuaagggcuucucuuuuaaguauggcaacgggguguggaucggaagaacaaaauccauuagcucccggaauggcuucgagaugaucugggacccuaacggguggaccggaaccgauaauaacuuuucuauuaagcaagacaucgucggcaucaaugaauggagcggguacuccggcucuuucgugcagcaucccgagcuuacaggacuggacuguauucgcccuugcuucuggguugaacucaucagaggccggcccaaagagaacacgauuuggaccagcggguccagcaucucuuuuuguggagucaauuccgauacagugggcuggagcuggcccgacggggcugagcugccuuucaccauugauaaguga

SEQ ID NO: 211586 - RNA, 1410 nt, Artificial Sequence; identical to SEQ ID NO: 210433
  derived and/or modified CDS sequence (opt5) from neuraminidase__InfluenzaA__ADM14987

SEQ ID NO: 211587 - RNA, 1410 nt, Artificial Sequence; identical to SEQ ID NO: 209977
  derived and/or modified CDS sequence (opt5) from neuraminidase__InfluenzaA__ADM26787

SEQ ID NO: 211588 - RNA, 1410 nt, Artificial Sequence; identical to SEQ ID NO: 210556
  derived and/or modified CDS sequence (opt5) from neuraminidase__InfluenzaA__ADM26798

SEQ ID NO: 211589 - RNA, 1410 nt, Artificial Sequence
  derived and/or modified CDS sequence (opt5) from neuraminidase__InfluenzaA__ADM26809
augaaccccaaucagaagaucauuaccaucggcagcgugucccugacaauuucuacgaucugcuucuuuaugcaaauugccauccucaucaccacagucacccugcacuucaaacaguacgaguuuaacagcccuccgaauaaccagguuaugcuuugugaacccacaauuaucgagagaaauauuaccgaaaucguguaucugacaaacaccacgauugagaaggaaaucugcccuaaacucgcugaguaccggaauugguccaagccccagugugacauuaccggguucgccccuuuuucuaaagauaacagcauccgccuguccgcgggaggcgacaucugggugacaagagagcccuaugucucuugcgauccugacaaguguuaccaauucgcucuugggcagggaaccacagugaauaacguucauagcaauaacaccgugcgggaucgcacgccguauagaacacugcucaugaaugaacugggcguccccuuucaccuggggaccaaacaggugugcauugccugguccucuagcuccugucaugacggaaaggccuggcuccacguuugcaucacaggcgaugacaagaacgcuaccgccagcuucauuuacaauggccggcugguggauucugucguguccuggagcaaagagauccuucgcacccaggaaucugagugugugugcauuaacgggacauguacggucguuaugaccgacggauccgcuagcggcaaggccgauacaaaaauccuguuuaucgaggaagggaagauugugcauaccuccacacucucuggaagcgcgcaacacguggaggaaugcuccugcuauccuagauaccccggcguccggugugugugccgcgacaacuggaaggggagcaauagaccuaucguugauauuaacaucaaagaccacucuauuguguccagcuacgucuguucuggacuggugggcgacacgccccggaagaaugauagcuccucuagcucccauugccuugacccgaacaaugaggaaggcgggcacggaguuaaaggcugggccuucgaugacgggaacgauguguggaugggacgcaccaucagcgagaagucuagacugggcuaugagacauuuaaagucaucgaagggugguccaaucauaagagcaaacuccagauuaaccgccaggugaucgucgaccggggaaauagaucuggcuacuccggcauuuucagcguggaggggaaguccuguaucaaccggugcuuuuauguugaacugauuagaggacgcaaggaggaaaccgaggugcuguggaccucuaauagcaucgucguguucuguggcacauccgggaccuacggaacaggcucuuggccugauggggcugaccucaaccugaugcccauuuga

SEQ ID NO: 211590 - RNA, 1410 nt, Artificial Sequence
  derived and/or modified CDS sequence (opt5) from neuraminidase__InfluenzaA__ADM26820
augaaccccaaucagaagaucauuaccaucggcagcgugucccugacaauuucuacgaucugcuucuuuaugcaaauugccauccucaucaccacagucacccugcacuucaaacaguacgaguuuaacagcccuccgaauaaccagguuaugcuuugugaacccacaauuaucgagagaaauauuaccgaaaucguguaucugacaaacaccacgauugagaaggaaaucugcccuaaacucgcugaguaccggaauugguccaagccccagugugacauuaccggguucgccccuuuuucuaaagauaacagcauccgccuguccgcgggaggcgacaucugggugacaagagagcccuaugucucuugcgauccugacaaguguuaccaauucgcucuugggcagggaaccacacugaauaacgugcauagcaauaacaccguucgggaucgcacgccguauagaacacuccugaugaaugaacugggcgugcccuuucaccucgggaccaagcaggucugcauugccugguccucuagcuccugucaugacggaaaagccuggcugcacgugugcaucacaggcgaugacaagaacgcuaccgccagcuucauuuacaauggccggcuuguugauucuguggucuccuggagcaaagagauccugcgcacccaggaaucugagugugugugcauuaacgggacauguacgguggucaugaccgacggauccgcuagcggcaaggccgauacaaaaauccucuuuaucgaggaagggaagauuguucauaccuccacacugucuggaagcgcgcaacacguggaggaaugcuccugcuauccuagauaccccggcgugcggugugucugccgcgacaacuggaaggggagcaauagaccuaucguggauauuaacaucaaagaccacucuauuguuuccagcuacguguguucuggacuugucggcgacacgccccggaagaaugauagcuccucuagcucccauugccuggacccgaacaaugaggaaggcgggcacggagugaaaggcugggccuucgaugacgggaacgauguuuggaugggacgcaccaucaaugagacaagcagacucggcuaugagaccuuuaaggugaucgaaggguggucuaacccuaaauccaagcugcagauuaaucggcaggucaucguggaccgcggaaacagaagcggcuacucuggcauuuucuccgucgaggggaaaagcuguaucaaucggugcuuuuauguggaacugauuagaggacgcaaggaggaaaccgagguucucuggacauccaacucuaucguggucuucuguggcaccagcgggacauacggaacgggcuccuggcccgauggggcugaccugaaucuuaugccuauuuga

SEQ ID NO: 211591 - RNA, 1350 nt, Artificial Sequence
  derived and/or modified CDS sequence (opt5) from neuraminidase__InfluenzaA__ADM31427
augaaccccaaucagaagaucauuaccaucggcagcgugugcaugauuaucgggauugucucccugaugcuccaaaucggaaacaugaucucuauuuggguuagccacuccauccagacaggcaaucagcaucaggccgagccuauuagaaacacgaauuuccugaccgaaaacgcuguggccucugugacacuugcggggaauagcucccuguguccgauccggggaugggcuguccacucuaaagacaacagcauucgcaucggcuccaagggggauguguuuguuauuagagagcccuucaucagcugcucucauauggaaugucggaccuuuuuccucacacaaggagcccugcuuaaugacaaacacuccaacggcaccgugaaggaucgcagcccucauagaacacugaugucuugccccgucggcgaggccccuucccccuacaauagccgguuugaaucuguggcuugguccgccagcgcuugucacgacgggaucuccuggcucaccauuggaaucucuggcccugauaacggggccguugcggugcugaaauauaauggaauuaucacggacaccauuaagagcuggggcaacaauauccugcgcacacaggaguccgagugcgccugugucaacgggagcugcuucaccgugaugacagauggaccgucuaacggccaggcuuccuacaagaucuuuaaaauugaaaagggcaaaguggucaagagcguugagcucaaugcccccaacuaucacuacgaagaguguucuugcuauccugacagcggggagaucauuugugugugcagagauaauuggcauggauccaaccggcccugggugucuuucaaucagaaccuggaauaccaaaucggcuauauuugcagcggggucuuuggagacaauccucgccccaacgauggcaccggguccuguggaccgaugagcccuaauggcgcuuacggcaucaaaggguucucuuuuaaguacggaaacggcguguggaucgggagaacgaaguccacaaauagccggucuggauucgagaugauuugggaccccaacggcuggaccgggacagauuccgaauuuagcguuaaacaggacaucguggccauuaccgacugguccggcuauucuggcagcuucguccagcacccugagcuuaccggacuggauugcauccgccccuguuucuggguggaacucauuagagggcggcccaaggaguccacaaucuggacgucuggaagcuccauuagcuuuugcggcguuaauucugacaccguguccuggagcuggccugauggggcggagcugccguucacaaucgacaaauga

SEQ ID NO: 211592 - RNA, 1410 nt, Artificial Sequence
  derived and/or modified CDS sequence (opt5) from neuraminidase__InfluenzaA__ADM31481
augaaccccaaucagaagaucauuaccaucggcagcgugugcaugacaauugggauggccaaccugauccuccaaauuggaaauaucaucuccauuuggaucucucacagcauucagcugggcaaccagaaucagaucgagacguguaaccaauccgucauuaccuacgaaaauaacacauggguuaaucagaccuaugugaacaucucuaauacaaacuucgcugccgggcagagcguggucuccgugaaacuugcgggaaauucuagccugugcccuguuuccggcugggcuauuuacagcaaggacaacucuaucagaaucggguccaaaggagauguguuugucauucgggagccguucaucagcuguucuccccucgaaugccgcaccuuuuuccugacacagggcgcccuucugaaugacaagcauuccaacggcaccauuaaagauagaagcccuuaucggacgcucaugucuugucccaucggggaggugccuucccccuacaacagccgcuuugaauccguugccuggucugcuagcgccugccacgacggaauuaauuggcugaccaucggcaucuccgggccugauaagggagcuguggccguccugaaguauaacggcauuaucacagacaccauuaaaagcuggagaaauaacauccuccggacacaagagucugagugugcgugcgugaauggguccuguuucaccgugaugacggauggaccgagcgacggccaggccucuuacaagauuuuucgcaucgaaaaaggcaagaucgucaaaagcguugagaugaacgcucccaauuaucauuacgaagagugcuccuguuacccugauucuagcgagauuacaugcgugugcagagacaacuggcacggguccaaucggcccugggugagcuucaaccagaaucuggaauaucagaucggauacauuuguucuggcaucuuuggggauaacccucgccccaaugacaagaccggauccugcggcccggucagcucuaacggggccaauggagugaagggcuucuccuuuaaauauggcaacgggguuuggauuggaagaacaaagagcaucuccucucggaacggcuucgagaugauuugggauccuaauggguggaccggaaccgacaacaauuuuagcaucaaacaagacaucgugggcauuaacgaaugguccggguacucuggcagcuucguccagcaucccgagcuuacaggacuggauuguauccgcccuugcuucuggguggaacucauuagaggccggcccaaggagaauacgaucuggaccuccgggagcucuauuuccuuuuguggaguuaacagcgacacagugggcuggucuuggcccgauggggcugagcugccuuucaccaucgacaaauga

SEQ ID NO: 211593 - RNA, 1410 nt, Artificial Sequence; identical to SEQ ID NO: 209393
  derived and/or modified CDS sequence (opt5) from neuraminidase__InfluenzaA__ADM31491

SEQ ID NO: 211594 - RNA, 1410 nt, Artificial Sequence; identical to SEQ ID NO: 211015
  derived and/or modified CDS sequence (opt5) from neuraminidase__InfluenzaA__ADM31501

SEQ ID NO: 211595 - RNA, 1410 nt, Artificial Sequence; identical to SEQ ID NO: 208810
  derived and/or modified CDS sequence (opt5) from neuraminidase__InfluenzaA__ADM31511

SEQ ID NO: 211596 - RNA, 1410 nt, Artificial Sequence; identical to SEQ ID NO: 211011
  derived and/or modified CDS sequence (opt5) from neuraminidase__InfluenzaA__ADM31521

SEQ ID NO: 211597 - RNA, 1410 nt, Artificial Sequence; identical to SEQ ID NO: 208810
  derived and/or modified CDS sequence (opt5) from neuraminidase__InfluenzaA__ADM31531

SEQ ID NO: 211598 - RNA, 1410 nt, Artificial Sequence; identical to SEQ ID NO: 210098
  derived and/or modified CDS sequence (opt5) from neuraminidase__InfluenzaA__ADM31541

SEQ ID NO: 211599 - RNA, 1410 nt, Artificial Sequence; identical to SEQ ID NO: 208810
  derived and/or modified CDS sequence (opt5) from neuraminidase__InfluenzaA__ADM31551

SEQ ID NO: 211600 - RNA, 1410 nt, Artificial Sequence; identical to SEQ ID NO: 208810
  derived and/or modified CDS sequence (opt5) from neuraminidase__InfluenzaA__ADM31561

SEQ ID NO: 211601 - RNA, 1410 nt, Artificial Sequence; identical to SEQ ID NO: 208810
  derived and/or modified CDS sequence (opt5) from neuraminidase__InfluenzaA__ADM31571

SEQ ID NO: 211602 - RNA, 1410 nt, Artificial Sequence; identical to SEQ ID NO: 209987
  derived and/or modified CDS sequence (opt5) from neuraminidase__InfluenzaA__ADM31581

SEQ ID NO: 211603 - RNA, 1410 nt, Artificial Sequence; identical to SEQ ID NO: 208810
  derived and/or modified CDS sequence (opt5) from neuraminidase__InfluenzaA__ADM31601

SEQ ID NO: 211604 - RNA, 1410 nt, Artificial Sequence; identical to SEQ ID NO: 210098
  derived and/or modified CDS sequence (opt5) from neuraminidase__InfluenzaA__ADM31611

SEQ ID NO: 211605 - RNA, 1410 nt, Artificial Sequence
  derived and/or modified CDS sequence (opt5) from neuraminidase__InfluenzaA__ADM31621
augaaccccaaucagaagaucauuaccaucggcagcgugugcaugacaauugggauggccaaccugauccuccaaauuggaaauaucaucuccauuuggaucucucacagcauucagcugggcaaccagaaucagaucgagacguguaaccaauccgucauuaccuacgaaaauaacacauggguuaaucagaccuaugugaacaucucuaauacaaacuucgcugccgggcagagcguggucuccgugaaacuugcgggaaauucuagccugugcccuguuuccggcugggcuauuuacagcaaggacaacucuaucagaaucggguccaaaggagauguguuugucauucgggagccguucaucagcuguucuucccucgaaugccgcaccuuuuuccugacacagggcgcccuucugaaugacaagcauagcaacggcaccauuaaagauagaucucccuaucggacgcucauguccuguccuaucggggaggugcccagcccuuacaacucccgcuuugaaucuguugccuggagcgcuuccgccugccacgacggaauuaauuggcugaccaucggcaucagcgggcccgauaacggagcuguggccguccugaaguauaauggcauuaucacagacaccauuaagucuuggagaaacaauauccuccggacacaagaguccgagugugcgugcgugaacgggagcuguuucaccgugaugacggauggaccuucugacggccaggccagcuacaaaauuuuucgcaucgaaaagggcaaaaucgucaaguccguugagaugaaugcuccgaacuaucauuacgaagagugcucuuguuaccccgauagcuccgagauuacaugcgugugcagagacaauuggcacgggagcaaccggccuugggugucuuucaaucagaaccuggaauaucagaucggauacauuuguuccggcaucuuuggggauaauccccgcccuaacgacaaaaccggaagcugcggccccgucucuuccaauggggccaacggagugaagggcuucagcuuuaaguauggcaacgggguuuggauuggaagaacaaaauccaucucuagccggaauggcuucgagaugauuugggauccgaacggguggaccggaaccgacaauaacuuuuccaucaagcaagacaucgugggcauuaaugaauggucuggguacagcggcuccuucguccagcauccugagcuuacaggacuggauuguauccgccccugcuucuggguggaacucauuagaggccggccuaaagagaacacgaucuggaccagcgggucuuccauuagcuuuuguggaguuaauucugacacagugggcugguccuggcccgauggggcugagcugcccuucaccaucgacaaguga

SEQ ID NO: 211606 - RNA, 1410 nt, Artificial Sequence; identical to SEQ ID NO: 210098
  derived and/or modified CDS sequence (opt5) from neuraminidase__InfluenzaA__ADM31631

SEQ ID NO: 211607 - RNA, 1410 nt, Artificial Sequence; identical to SEQ ID NO: 209987
  derived and/or modified CDS sequence (opt5) from neuraminidase__InfluenzaA__ADM31641

SEQ ID NO: 211608 - RNA, 1410 nt, Artificial Sequence; identical to SEQ ID NO: 210272
  derived and/or modified CDS sequence (opt5) from neuraminidase__InfluenzaA__ADM31651

SEQ ID NO: 211609 - RNA, 1410 nt, Artificial Sequence; identical to SEQ ID NO: 209987
  derived and/or modified CDS sequence (opt5) from neuraminidase__InfluenzaA__ADM31661

SEQ ID NO: 211610 - RNA, 1410 nt, Artificial Sequence
  derived and/or modified CDS sequence (opt5) from neuraminidase__InfluenzaA__ADM31671
augaaccccaaucagaagaucauuaccaucggcagcgugugcaugacaauugggauggccaaccugauccuccaaauuggaaauaucaucuccauuuggaucucucacagcacgcagcugggcaaccagaaucagauugagaccuguaaccaauccgucaucacauacgaaaauaacaccuggguuaaucagacauaugugaacauuucuaauaccaacuucgcugccgggcagagcguggucuccgcgaaacuugcuggaaauucuagccugugcccuguguccggcugggccaucuacagcaaggacaacucuauuagaaucggguccaaaggagauguuuuugugauccgggagccguucauuagcuguucuccccucgaaugccgcacauuuuuccugacccagggcgcccuucugaaugacaagcauuccaacggcacgaucaaagauagaagcccuuaucggacccucaugucuugucccauuggggaggucccuucccccuacaacagccgcuuugaauccguggcuuggucugccagcgcuugccacgacggaaucaauuggcugacaauuggcaucuccgggccugauaacggagccguugcggugcugaaguauaauggcaucauuaccgacacaaucaagagcuggagaaacaauauucuccggacccaagagucugagugugccugcgucaacggguccuguuucacggugaugacagauggaccgagcgacggccaggcuucuuacaaaaucuuucgcauugaaaagggcaaaaucgucaagagcguggagaugaaugcccccaacuaucauuacgaagagugcuccuguuacccugauucuagcgagauuaccugcguuugcagagacaauuggcacggguccaaccggcccugggugagcuucaaucagaaccuggaauaucagaucggauacaucuguucuggcauuuuuggggauaauccucgccccaacgacaaaacaggauccugcggcccggugagcucuaauggggcuaacggagucaagggcuucuccuuuaaguauggcaacgggguguggaucggaagaaccaaaagcauuuccucucggaauggcuucgagaugaucugggauccuaacggguggaccggaacagacaauaacuuuagcauuaagcaagacaucguuggcaucaaugaaugguccggguacucuggcagcuucgugcagcaucccgagcuuacgggacuggauuguauucgcccuugcuucugggucgaacucaucagaggccggcccaaagagaacaccauuuggacauccgggagcucuaucuccuuuuguggagugaauagcgacaccguuggcuggucuuggcccgauggggccgagcugccuuucacaauugacaaguga

SEQ ID NO: 211611 - RNA, 1410 nt, Artificial Sequence; identical to SEQ ID NO: 210098
  derived and/or modified CDS sequence (opt5) from neuraminidase__InfluenzaA__ADM31681

SEQ ID NO: 211612 - RNA, 1410 nt, Artificial Sequence
  derived and/or modified CDS sequence (opt5) from neuraminidase__InfluenzaA__ADM31691
augaaccccaaucagaagauccugaccauuggcagcgugugcaugacaaucgggauggccaaccucauucugcaaaucggaaauauuaucuccaucuggauuucucacagcauccagcuuggcaaccagaaucagacggagaccuguaaccaauccgucauuacauacgaaaauaacaccuggguuaaucagacauaugugaacaucucuaauaccaacuucgcugccgggcagagcguggucuccgugaaacuggcgggaaauucuagccucugcccuguuuccggcugggcuauuuacagcaaggacaacucuaucagaauuggguccaaaggagauguguuugucauccgggagccguucaucagcuguucuccccuggaaugccgcacauuuuuccuuacccagggcgcccugcucaaugacaagcauuccaacggcacgauuaaagauagaagcccuuaucggacccugaugucuugucccaucggggaggugccuucccccuacaacagccgcuuugaauccguugccuggucugcuagcgccugccacgacggaauuaauuggcugacaaucggcauuuccgggccugauaacggagcuguggccguccucaaguauaauggcaucaucaccgacacaauuaagagcuggagaaacaauauccugcggacccaagagucugagugugcgugcgugaacggguccuguuucacggugaugacagauggaccgagcgacggccaggccucuuacaaaauuuuucgcaucgaaaagggcaaaauugucaagagcguugagaugaaugcucccaacuaucauuacgaagagugcuccuguuacccugauucuagcgagauuaccugcgugugcagagacaauuggcacggguccaaccggcccugggugagcuucaaucagaaccuugaauaucagaucggauacaucuguucuggcaucuuuggggauaauccucgccccaacgacaaaacaggauccugcggcccggucagcucuaauggggccaacggagugaagggcuucuccuuuaaguauggcaacgggguuuggauuggaagaaccaaaagcaucuccucucggaauggcuucgagaugauuugggauccuaacggguggaccggaacagacaauaacuuuagcaucaagcaagacauugugggcaucaaugaaugguccggguacucuggcagcuucguccagcaucccgagcugacgggacucgauuguauccgcccuugcuucuggguggaacugauuagaggccggcccaaagagaacaccaucuggacauccgggagcucuauuuccuuuuguggaguuaauagcgacaccgugggcuggucuuggcccgauggggcugagcuuccuuucacaaucgacaaguga

SEQ ID NO: 211613 - RNA, 1410 nt, Artificial Sequence; identical to SEQ ID NO: 208810
  derived and/or modified CDS sequence (opt5) from neuraminidase__InfluenzaA__ADM31701

SEQ ID NO: 211614 - RNA, 1410 nt, Artificial Sequence; identical to SEQ ID NO: 208810
  derived and/or modified CDS sequence (opt5) from neuraminidase__InfluenzaA__ADM31711

SEQ ID NO: 211615 - RNA, 1410 nt, Artificial Sequence; identical to SEQ ID NO: 210098
  derived and/or modified CDS sequence (opt5) from neuraminidase__InfluenzaA__ADM31721

SEQ ID NO: 211616 - RNA, 1410 nt, Artificial Sequence
  derived and/or modified CDS sequence (opt5) from neuraminidase__InfluenzaA__ADM31731
augaaccccaaucagaagaucauuaucauuggcagcgugugcaugaccaucgggauggccaaccugauucuccaaaucggaaauaucauuuccaucuggauuucucacagcauccagcugggcaaccagaaucagauugagacauguaaccaauccgucaucacguacgaaaauaacaccuggguuaaucagacauaugugaacauuucuaauaccaacuucgcugccgggcagagcguggucuccgugaaacuugcgggaaauucuagccugugcccuguuuccggcugggcuaucuacagcaaggacaacucuaucagaauuggguccaaaggagauguguuugucauccgggagccguucauuagcuguucuccccucgaaugccgcacauuuuuccugacccagggcgcccuucugaaugacaagcauuccaacggcacaaucaaagauagaagcccuuaucggacccucaugucuugucccauuggggaggugccuucccccuacaacagccgcuuugaauccguugccuggucugcuagcgccugccacgacggaaucaauuggcugacgaucggcauuuccgggccugauaacggagcuguggccguccugaaguauaauggcaucauuaccgacacaaucaagagcuggagaaacaauauucuccggacccaagagucugagugugcgugcgugaacggguccuguuucacagugaugaccgauggaccgagcgacggccaggccucuuacaaaaucuuucgcaucgaaaagggcagaauugucaaaagcguugagaugaaugcucccaacuaucauuacgaagagugcuccuguuacccugauucuagcgagaucacgugcgugugccgggacaauuggcacggguccaaccgccccugggugagcuucaaucagaaccuggaauaucagauuggauacaucuguucuggcauuuuuggggauaauccuagacccaacgacaagacaggauccugcggcccggucagcucuaauggggccaacggagugaaaggcuucuccuuuaaguauggcaacgggguuuggaucggacggaccaagagcauuuccucucgcaauggcuucgagaugaucugggauccuaacggguggacaggaaccgacaauaacuuuagcaucaaacaagacauugugggcaucaaugaaugguccggguacucuggcagcuucguccagcaucccgagcuuaccggacuggauuguauuagaccuugcuucuggguggaacucauccggggccgccccaaggagaacacaauuuggacguccgggagcucuaucuccuuuuguggaguuaauagcgacaccgugggcuggucuuggcccgauggggcugagcugccuuucacaaucgacaaauga

SEQ ID NO: 211617 - RNA, 1410 nt, Artificial Sequence; identical to SEQ ID NO: 211185
  derived and/or modified CDS sequence (opt5) from neuraminidase__InfluenzaA__ADM31741

SEQ ID NO: 211618 - RNA, 1410 nt, Artificial Sequence; identical to SEQ ID NO: 208810
  derived and/or modified CDS sequence (opt5) from neuraminidase__InfluenzaA__ADM31751

SEQ ID NO: 211619 - RNA, 1410 nt, Artificial Sequence
  derived and/or modified CDS sequence (opt5) from neuraminidase__InfluenzaA__ADM31761
augaaccccaaucagaagaucauuaccaucggcagcgugugcaugacaauugggauggccaaccugauccuccaaauuggaaauaucaucuccauuuggaucucucacagcauucagcugggcaaccagaaucagaucgagacguguaaccaauccgucauuaccuacgaaaauaacacauggguuaaucagaccuaugugaacaucucuaauacaaacuucgcugccgggcagagcguggucuccgugaaacuugcgggaaauucuagccugugcccuguuuccggcugggcuauuuacagcaaggacaacucuaucagaaucggguccaaaggagauguguuugucauucgggagccguucaucagcuguucuccccucgaaugccgcaccuuuuuccugacacagggcgcccuucugaaugacaagcauuccaacggcaccauuaaagauagaagcccuuaucggacgcucaugucuugucccaucggggaggugccuucccccuacaacagccgcuuugaauccguugccuggucugcuagcgccugccacgacggaauuaauuggcugaccaucggcaucuccgggccugauaacggagcuguggccguccugaaguauaauggcauuaucacagacaccauuaagagcuggagaaacaauauccuccggacacaagagucugagugugcgugcgugaacggguccuguuucaccgugaugacggauggaccgagcgacggccaggccucuuacaaaauuuuucgcaucgaaaagggcaaaaucgucaagagcguugagaugaaugcucccaacuaucauuacgaagagugcuccuguuacccugauucuagcgagauuacaugcgugugcagagacaauuggcacggguccaaccggcccugggugagcuucaaucauaaccuggaauaucagaucggauacauuuguucuggcaucuuuggggauaauccucgccccaacgacaaaaccggauccugcggcccggucagcucuaauggggccaacggagugaagggcuucuccuuuaaguauggcaacgggguuuggauuggaagaacaaaaagcaucuccucucggaauggcuucgagaugauuugggauccuaacggguggaccggaaccgacaauaaguuuagcaucaaacaggacaucgugggcauuuccgaauggucuggguacagcggcuccuucguccaacaccccgagcuuacaggacuggauuguauccgcccuugcuucuggguggaacucauuagaggccggcccaaggagaacacgaucuggaccagcgggucuuccauuagcuuuuguggaguuaauucugacacagugggcugguccuggcccgauggggcugagcugccuuucaccaucgacaaauga

SEQ ID NO: 211620 - RNA, 1410 nt, Artificial Sequence
  derived and/or modified CDS sequence (opt5) from neuraminidase__InfluenzaA__ADM31771
augaaccccaaucagaagauccugaccauuggcagcgugugcaugacaaucgggauggccaaccucauucugcaaaucggaaauauuaucuccaucuggauuucucacagcauccagcuuggcaaccagaaucagacggagaccuguaaccaauccgucauuaucuacgaaaauaacacauggguuaaucagaccuaugugaacauuucuaauacaaacuucgcugccgggcagagcguggucuccgugaaacuggcgggaaauucuagccucugcccuguuuccggcugggcuaucuacagcaaggacaacucuauuagaaucggguccaaaggagauguguuugucauccgggagccguucauuagcuguucuccccuggaaugccgcaccuuuuuccuuacacagggcgcccugcucaaugacaagcauuccaacggcaccaucaaagauagaagcccuuaucggacgcugaugucuugucccauuggggaggugccuucccccuacaacagccgcuuugaauccguugccuggucugcuagcgccugccacgacggaaucaauuggcugaccauuggcaucuccgggccugauaacggagcuguggccguccucaaguauaauggcaucauuacagacaccaucaagagcuggagaaacaauauucugcggacacaagagucugagugugcgugcgugaacggguccuguuucaccgugaugacggauggaccgagcgacggccaggccucuuacaaaaucuuucgcauugaaaagggcaaaaucgucaagagcguugagaugaaugcucccaacuaucauuacgaagagugcuccuguuacccugauucuagcgagaucacaugcgugugcagagacaauuggcacggguccaaccggcccugggugagcuucaaucagaaccuugaauaucagauuggauacaucuguucuggcauuuuuggggauaauccucgccccaacgacaaaaccggauccugcggcccggucagcucuaauggggccaacggagugaagggcuucuccuuuaaguauggcaacgggguuuggaucggaagaacaaaaagcauuuccucucggaauggcuucgagaugaucugggauccuaacggguggaccggaaccgacaauaacuuuagcauuaagcaagacaucgugggcaucaaugaaugguccggguacucuggcagcuucguccagcaucccgagcugacaggacucgauuguauucgcccuugcuucuggguggaacugaucagaggccggcccaaagagaacacgauuuggaccuccgggagcucuaucuccuuuuguggaguuaauagcgacacagugggcuggucuuggcccgauggggcugagcuuccuuucaccauugacaaguga

SEQ ID NO: 211621 - RNA, 1410 nt, Artificial Sequence
  derived and/or modified CDS sequence (opt5) from neuraminidase__InfluenzaA__ADM31801
augaaccccaaucagaagaucauuaccaucggcagcgugugcaugacaauugggauggccaaccugauccuccaaauuggaaauaucaucuccauuuggaucucucacagcauucagcugggcaaccagaaucagaucgagacguguaaccaauccgucauuaccuacgaaaauaacacauggguuaaucagaccuaugugaacaucaauaacacaaauuucgcugccgggcagucuguggucagcgugaaacuugcgggaaacuccucucugugcccuguuagcggcugggcuauuuacuccaaggacaauagcaucagaaucgggucuaaaggagauguguuugucauucgggagccguucaucuccuguagcccccucgaaugccgcaccuuuuuccugacacagggcgcccuucugaacgacaagcauucuaacggcaccauuaaagauagauccccuuaucggacgcucaugagcugucccaucggggaggugccuucucccuacaauucccgcuuugaaagcguugccugguccgcuucugccugccacgacggaauuaacuggcugaccaucggcaucagcgggccugauaauggagcuguggccguccugaaguauaacggcauuaucacagacaccauuaaguccuggagaaauaacauccuccggacacaagagagcgagugugcgugcgugaaugggucuuguuucaccgugaugacggauggaccguccgacggccaggccagcuacaaaauuuuucgcaucgaaaagggcaaaaucgucaagucuguugagaugaacgcucccaauuaucauuacgaagagugcagcuguuacccugauuccucugagauuacaugcgugugcagagacaacuggcacgggagcaaucggcccuggguguccuucaaccagaaucuggaauaucagaucggauacauuuguagcggcaucuuuggggauaacccucgccccaaugacaaaaccggaucuugcggcccggucuccagcaacggggccaacggagugaagggcuucucuuuuaaguauggcaaugggguuuggauuggaagaacaaaauccaucagcucccggaacggcuucgagaugauuugggauccuaauggguggaccggaaccgacaacaaguuuucuaucaaacaagacaucgugggcauuaaugaauggagcggguacuccggcucuuucguccagcaucccgagcuuacaggacuggauuguauccgcccuugcuucuggguggaacucauuagaggccggcccaaggagaacacgaucuggaccagcggguccagcauuucuuuuuguggaguuaauuccgacacagugggcuggagcuggcccgauggggcugagcugccuuucaccaucgacaaauga

SEQ ID NO: 211622 - RNA, 1410 nt, Artificial Sequence
  derived and/or modified CDS sequence (opt5) from neuraminidase__InfluenzaA__ADM31811
augaaccccaaucagaagaucauuaccaucggcagcgugugcaugacaauugggauggccaaccugauccuccaaauuggaaauaucaucuccauuuggaucucucacagcauucagcugggcaaccagaaucagaucgagacguguaaccaauccgucauuaccuacgaaaauaacacauggguuaaucagaccuaugugaacaucucuaauacaaacuucgcugccgggcagagcguggucuccgugaaauuugcgggaaauucuagccuuugcccuguuuccggcugggcuauuuacagcaaggacaacucuaucagaaucggguccaaaggagauguguucgucauucgggagccguuuaucagcuguucuccccuggaaugccgcaccuucuuucucacacagggcgcccugcuuaaugacaagcauuccaacggcaccauuaaagauagaagcccuuaucggacgcugaugucuugucccaucggggaggugccuucccccuacaacagccgcuucgaauccguugccuggucugcuagcgccugccacgacggaauuaauuggcucaccaucggcaucuccgggccugauaacggagcuguggccguccugaaguauaauggcauuaucacagacaccauuaagagcuggagaaacaauauccugcggacacaagagucugagugugcgugcgugaacggguccuguuuuaccgugaugacggauggaccgagcgacggccaggccucuuacaaaauuuuccgcaucgaaaagggcaaaaucgucaagagcguugagaugaaugcucccaacuaucauuacgaagagugcuccuguuacccugauucuagcgagauuacaugcgugugcagagacaauuggcacggguccaaccggcccugggugagcuuuaaucagaaccucgaauaucagaucggauacauuuguucuggcaucuucggggauaauccucgccccaacgacaaaaccggauccugcggcccggucagcucuaauggggccaacggagugaagggcuuuuccuucaaguauggcaacgggguuuggauuggaagaacaaaaagcaucuccucucggaauggcuuugagaugauuugggauccuaacggguggaccggaaccgacaauaaguucagcaucaaacaagacaucgugggcauuaacgaaugguccggguacucuggcagcuucguccagcaucccgagcugacaggacuugauuguauccgcccuugcuuuuggguggaacugauuagaggccggcccaaggagaauacgaucuggaccuccgggagcucuauuuccuucuguggaguuaacagcgacacagugggcuggucuuggcccgauggggcugagcucccuuuuaccaucgacaaauga

SEQ ID NO: 211623 - RNA, 1410 nt, Artificial Sequence; identical to SEQ ID NO: 209987
  derived and/or modified CDS sequence (opt5) from neuraminidase__InfluenzaA__ADM31821

SEQ ID NO: 211624 - RNA, 1410 nt, Artificial Sequence; identical to SEQ ID NO: 208810
  derived and/or modified CDS sequence (opt5) from neuraminidase__InfluenzaA__ADM31831

SEQ ID NO: 211625 - RNA, 1410 nt, Artificial Sequence; identical to SEQ ID NO: 208810
  derived and/or modified CDS sequence (opt5) from neuraminidase__InfluenzaA__ADM31841

SEQ ID NO: 211626 - RNA, 1410 nt, Artificial Sequence
  derived and/or modified CDS sequence (opt5) from neuraminidase__InfluenzaA__ADM31851
augaaccccaaucagaagauccugaccauuggcagcgugugcaugacaaucgggauggccaaccucauucugcaaaucggaaauauuaucuccaucuggauuucucacagcauccagcuuggcaaccagaaucagacggagaccuguaaccaauccgucauuacauacgaaaauaacaccuggguuaaucagacauaugugaacaucucuaauaccaacuucgcugccgggcagagcguggucuccgugaaacuggcgggaaauucuagccucugcccuguuuccggcugggcuauuuacagcaaggacaacucuaucagaauuggguccaaaggagauguguuugucauccgggagccguucaucagcuguucuccccuggaaugccgcacauuuuuccuuacccagggcgcccugcucaaugacaagcauuccaacggcacgauuaaagauagaagcccuuaucggacccugaugucuugucccaucggggaggugccuucccccuacaacagccgcuuugaauccguugccuggucugcuagcgccugccacgacggaauuaauuggcugacaaucggcauuuccgggccugauaacggagcuguggccguccucaaguauaauggcaucaucaccgacacaauuaagagcuggagaaacaauauccugcggacccaagagucugagugugcgugcgugaacggguccuguuucacggugaugacagauggaccgagcgacggccaggccucuuacaaaauuuuucgcaucgaaagaggcaagauugucaaaagcguugagaugaaugcucccaacuaucauuacgaagagugcuccuguuacccugauucuagcgagauuaccugcgugugccgggacaauuggcacggguccaaccgccccugggugagcuucaaucagaaccuugaauaucagaucggauacaucuguucuggcaucuuuggggauaauccuagacccaacgacaagacaggauccugcggcccggucagcucuaauggggccaacggagugaaaggcuucuccuuuaaguauggcaacgggguuuggauuggacggaccaagagcaucuccucucgcaauggcuucgagaugauuugggauccuaacggguggaccggaacagacaauaacuuuagcaucaaacaagacauugugggcaucaaugaaugguccggguacucuggcagcuucguccagcaucccgagcugacgggacucgauuguaucagaccuugcuucuggguggaacugauucggggccgccccaaggagaacaccaucuggacauccgggagcucuauuuccuuuuguggaguuaauagcgacaccgugggcuggucuuggcccgauggggcugagcuuccuuucacaaucgacaaauga

SEQ ID NO: 211627 - RNA, 1410 nt, Artificial Sequence; identical to SEQ ID NO: 208810
  derived and/or modified CDS sequence (opt5) from neuraminidase__InfluenzaA__ADM31861

SEQ ID NO: 211628 - RNA, 1410 nt, Artificial Sequence; identical to SEQ ID NO: 208810
  derived and/or modified CDS sequence (opt5) from neuraminidase__InfluenzaA__ADM31871

SEQ ID NO: 211629 - RNA, 1410 nt, Artificial Sequence
  derived and/or modified CDS sequence (opt5) from neuraminidase__InfluenzaA__ADM31881
augaaccccaaucagaagaucauuaccaucggcagcgugugcaugacaauugggauggccaaccugauccuccaaauuggaaauacgaucuccaucuggauuucucacagcauccagcugggcaaccagaaucagauugagaccuguaaccaauccgucaucacauacgaaaauaacaccuggguuaaucagacauaugugaacauuucuaauaccaacuucgcugccgggcagagcguggucuccgugaaacuugcgggaaauucuagccugugcccuguuuccggcugggcuaucuacagcaaggacaacucuauuagaaucggguccaaaggagauguguuugucauccgggagccguucauuagcuguucuccccucgaaugccgcacauuuuuccugacccagggcgcccuucugaaugacaagcauuccaacggcacgaucaaagauagaagcccuuaucggacccucaugucuugucccauuggggaggugccuucccccuacaacagccgcuuugaauccguugccuggucugcuagcgccugccacgacggaaucaauuggcugacaauuggcaucuccgggccugauaacggagcuguggccguccugaaguauaauggcaucauuaccgacacaaucaagagcuggagaaacaauauucuccggacccaagagucugagugugcgugcgugaacggguccuguuucacggugaugacagauggaccgagcgacggccaggccucuuacaaaaucuuucgcauugaaaagggcaaaaucgucaagagcguugagaugaaugcucccaacuaucauuacgaagagugcuccuguuacccugauucuagcgagauuaccugcgugugcagagacaauuggcacggguccaaccggcccugggugagcuucaaucagaaccuggaauaucagaucggauacaucuguucuggcauuuuuggggauaauccucgccccaacgacaaaacaggauccugcggcccggucagcucuaauggggccaacggagugaagggcuucuccuuuaaguauggcaacgggguuuggaucggaagaaccaaaagcauuuccucucggaauggcuucgagaugaucugggauccuaacggguggaccggaacagacaauaacuuuagcauuaagcaagacaucgugggcaucaaugaaugguccggguacucuggcagcuucguccagcaucccgagcuuacgggacuggauuguauucgcccuugcuucuggguggaacucaucagaggccggcccaaagagaacaccauuuggacauccgggagcucuaucuccuuuuguggaguuaauagcgacaccgugggcuggucuuggcccgauggggcugagcugccuuucacaauugacaaguga

SEQ ID NO: 211630 - RNA, 1410 nt, Artificial Sequence; identical to SEQ ID NO: 208810
  derived and/or modified CDS sequence (opt5) from neuraminidase__InfluenzaA__ADM31891

SEQ ID NO: 211631 - RNA, 1410 nt, Artificial Sequence; identical to SEQ ID NO: 208800
  derived and/or modified CDS sequence (opt5) from neuraminidase__InfluenzaA__ADM31901

SEQ ID NO: 211632 - RNA, 1410 nt, Artificial Sequence; identical to SEQ ID NO: 210033
  derived and/or modified CDS sequence (opt5) from neuraminidase__InfluenzaA__ADM31911

SEQ ID NO: 211633 - RNA, 1410 nt, Artificial Sequence; identical to SEQ ID NO: 210033
  derived and/or modified CDS sequence (opt5) from neuraminidase__InfluenzaA__ADM31921

SEQ ID NO: 211634 - RNA, 1410 nt, Artificial Sequence; identical to SEQ ID NO: 210491
  derived and/or modified CDS sequence (opt5) from neuraminidase__InfluenzaA__ADM31931

SEQ ID NO: 211635 - RNA, 1410 nt, Artificial Sequence; identical to SEQ ID NO: 208800
  derived and/or modified CDS sequence (opt5) from neuraminidase__InfluenzaA__ADM31941

SEQ ID NO: 211636 - RNA, 1410 nt, Artificial Sequence; identical to SEQ ID NO: 210491
  derived and/or modified CDS sequence (opt5) from neuraminidase__InfluenzaA__ADM31951

SEQ ID NO: 211637 - RNA, 1410 nt, Artificial Sequence
  derived and/or modified CDS sequence (opt5) from neuraminidase__InfluenzaA__ADM31961
augaaccccaaucagaagaucauuaccaucggcagcgugugcauggccauugggauggcuaaccugauccuccaaauuggaaauaucaucuccauuuggaucucucacagcauucagcugggcaaccagaaucagaucgagacauguaaccaauccgucauuacguacgaaaauaacaccuggguuaaucagacauaugugaacaucucuaauaccaacuucgccgcggggcagagcguggucuccgugaaacuugcuggaaauucuagccugugcccuguuuccggcugggccauuuacagcaaggacaacucuaucagaaucggguccaaaggagauguguuugucauucgggagccguucaucagcuguucuccccucgaaugccgcacauuuuuccugacccagggcgcccuucugaaugacaagcauuccaacggcacaauuaaagauagaagcccuuaucggacccucaugucuugucccaucggggaggugccuucccccuacaacagccgcuuugaauccguugcuuggucugccagcgcuugccacgacggaauuaauuggcugacgaucggcaucuccgggccugauaacggagccguggcgguccugaaguauaauggcauuaucaccgacacaauuaagagcuggagaaacaauauccuccggacccaagagucugagugugccugcgugaacggguccuguuucacagugaugaccgauggaccgagcgacggccaggcuucuuacaaaauuuuucgcaucgaaaagggcaaaaucgucaagagcguugagaugaaugcccccaacuaucauuacgaagagugcuccuguuacccugauucuagcgagauuacgugcgugugcagagacaauuggcacggguccaaccggcccugggugagcuucaaucagaaccuggaauaucagaucggauacauuuguucuggcaucuuuggggauaauccucgccccaacgacaaaacaggauccugcggcccggucagcucuaauggggcuaacggagugaagggcuucuccuuuaaguauggcaacgggguuuggauuggaagaaccaaaagcaucuccucucggaauggcuucgagaugauuugggauccuaacggguggacaggaaccgacaauaacuuuagcaucaagcaagacaucgugggcauuaaugaaugguccggguacucuggcagcuucguccagcaucccgagcuuaccggacuggauuguauccgcccuugcuucuggguggaacucauuagaggccggcccaaagagaacacaaucuggacguccgggagcucuauuuccuuuuguggaguuaauagcgacaccgugggcuggucuuggcccgauggggccgagcugccuuucacaaucgacaaguga

SEQ ID NO: 211638 - RNA, 1410 nt, Artificial Sequence
  derived and/or modified CDS sequence (opt5) from neuraminidase__InfluenzaA__ADM31971
augaaccccaaucagaagaucauuaccaucggcagcgugugcaugacaauugggauggccaaccugauccuccaaauuggaaauaucaucuccauuuggaucucucacagcauucagcugggcaaccagaaucagaucgagacguguaaccaauccgucauuaccuacgaaaauaacacauggguuaaucagaccuaugugaacaucucuaauacaaacuucgcugccgggcagagcguggucuccaugaaacuugcgggaaauucuagccugugcccuguguccggcugggcuauuuacagcaaggacaacucuguuagaaucggguccaaaggagauguguuugucauccgggagccguucauuagcuguucuccccucgaaugccgcaccuuuuuccugacacagggcgcccuucugaaugacaagcauuccaacggcaccaucaaagauagaagcccuuaucggacgcucaugucuugucccauuggggaggugccuucccccuacaacagccgcuuugaauccguugccuggucugcuagcgccugccacgacggaaucaauuggcugaccauuggcaucuccgggccugauaacggagcuguggccguccugaaguauaauggcgugaucacagacaccauuaagagcuggagaaacaauauccuccggacacaagagucugagugugcgugcgugaacggguccuguuucaccgucaugacggauggaccgagcaauggccaggccucuuacaaaauuuuucgcaucgaaaagggcaaaauuguuaagagcguggagaugaacgcucccaauuaucauuacgaagagugcuccuguuacccugacucuagcgagaucacaugcgugugcagagauaacuggcacggguccaaucggcccugggucagcuucaaccagaaucuggaauaucagaucggauacauuuguucuggcaucuuuggggacaacccucgccccaaugauaaaaccggauccugcggcccggugagcucuaacggggccaacggaguuaagggcuucuccuuuaaguauggcaaugggguguggauuggaagaacaaaaagcaucuccucucggaacggcuucgagaugauuugggacccuaauggguggaccggaaccgauaacaauuuuagcaucaagcaagacauugucggcaucaacgaaugguccggguacucuggcagcuucgugcagcaucccgagcuuacaggacuggacuguauccgcccuugcuucuggguugaacucauuagaggccggcccaaagagaauacgaucuggaccuccgggagcucuauuuccuuuuguggagugaacagcgauacagucggcuggucuuggcccgacggggcugagcugccuuucaccaucgauaaguga

SEQ ID NO: 211639 - RNA, 1410 nt, Artificial Sequence; identical to SEQ ID NO: 210033
  derived and/or modified CDS sequence (opt5) from neuraminidase__InfluenzaA__ADM31981

SEQ ID NO: 211640 - RNA, 1410 nt, Artificial Sequence; identical to SEQ ID NO: 208800
  derived and/or modified CDS sequence (opt5) from neuraminidase__InfluenzaA__ADM31991

SEQ ID NO: 211641 - RNA, 1410 nt, Artificial Sequence; identical to SEQ ID NO: 208800
  derived and/or modified CDS sequence (opt5) from neuraminidase__InfluenzaA__ADM32001

SEQ ID NO: 211642 - RNA, 1410 nt, Artificial Sequence; identical to SEQ ID NO: 208800
  derived and/or modified CDS sequence (opt5) from neuraminidase__InfluenzaA__ADM32011

SEQ ID NO: 211643 - RNA, 1410 nt, Artificial Sequence; identical to SEQ ID NO: 208810
  derived and/or modified CDS sequence (opt5) from neuraminidase__InfluenzaA__ADM32021

SEQ ID NO: 211644 - RNA, 1410 nt, Artificial Sequence; identical to SEQ ID NO: 209780
  derived and/or modified CDS sequence (opt5) from neuraminidase__InfluenzaA__ADM32031

SEQ ID NO: 211645 - RNA, 1410 nt, Artificial Sequence; identical to SEQ ID NO: 210534
  derived and/or modified CDS sequence (opt5) from neuraminidase__InfluenzaA__ADM32051

SEQ ID NO: 211646 - RNA, 1410 nt, Artificial Sequence; identical to SEQ ID NO: 208810
  derived and/or modified CDS sequence (opt5) from neuraminidase__InfluenzaA__ADM32061

SEQ ID NO: 211647 - RNA, 1410 nt, Artificial Sequence; identical to SEQ ID NO: 208810
  derived and/or modified CDS sequence (opt5) from neuraminidase__InfluenzaA__ADM32071

SEQ ID NO: 211648 - RNA, 1410 nt, Artificial Sequence; identical to SEQ ID NO: 208810
  derived and/or modified CDS sequence (opt5) from neuraminidase__InfluenzaA__ADM32081

SEQ ID NO: 211649 - RNA, 1410 nt, Artificial Sequence; identical to SEQ ID NO: 210033
  derived and/or modified CDS sequence (opt5) from neuraminidase__InfluenzaA__ADM32091

SEQ ID NO: 211650 - RNA, 1410 nt, Artificial Sequence; identical to SEQ ID NO: 208810
  derived and/or modified CDS sequence (opt5) from neuraminidase__InfluenzaA__ADM32101

SEQ ID NO: 211651 - RNA, 1410 nt, Artificial Sequence; identical to SEQ ID NO: 208810
  derived and/or modified CDS sequence (opt5) from neuraminidase__InfluenzaA__ADM32111

SEQ ID NO: 211652 - RNA, 1410 nt, Artificial Sequence; identical to SEQ ID NO: 210491
  derived and/or modified CDS sequence (opt5) from neuraminidase__InfluenzaA__ADM32554

SEQ ID NO: 211653 - RNA, 1410 nt, Artificial Sequence; identical to SEQ ID NO: 208800
  derived and/or modified CDS sequence (opt5) from neuraminidase__InfluenzaA__ADM32564

SEQ ID NO: 211654 - RNA, 1410 nt, Artificial Sequence; identical to SEQ ID NO: 210033
  derived and/or modified CDS sequence (opt5) from neuraminidase__InfluenzaA__ADM32574

SEQ ID NO: 211655 - RNA, 1410 nt, Artificial Sequence; identical to SEQ ID NO: 208810
  derived and/or modified CDS sequence (opt5) from neuraminidase__InfluenzaA__ADM32584

SEQ ID NO: 211656 - RNA, 1410 nt, Artificial Sequence; identical to SEQ ID NO: 210491
  derived and/or modified CDS sequence (opt5) from neuraminidase__InfluenzaA__ADM32594

SEQ ID NO: 211657 - RNA, 1410 nt, Artificial Sequence; identical to SEQ ID NO: 208810
  derived and/or modified CDS sequence (opt5) from neuraminidase__InfluenzaA__ADM32604

SEQ ID NO: 211658 - RNA, 1410 nt, Artificial Sequence; identical to SEQ ID NO: 208810
  derived and/or modified CDS sequence (opt5) from neuraminidase__InfluenzaA__ADM32614

SEQ ID NO: 211659 - RNA, 1410 nt, Artificial Sequence; identical to SEQ ID NO: 208810
  derived and/or modified CDS sequence (opt5) from neuraminidase__InfluenzaA__ADM32624

SEQ ID NO: 211660 - RNA, 1410 nt, Artificial Sequence; identical to SEQ ID NO: 210491
  derived and/or modified CDS sequence (opt5) from neuraminidase__InfluenzaA__ADM32634

SEQ ID NO: 211661 - RNA, 1410 nt, Artificial Sequence; identical to SEQ ID NO: 208810
  derived and/or modified CDS sequence (opt5) from neuraminidase__InfluenzaA__ADM32644

SEQ ID NO: 211662 - RNA, 1410 nt, Artificial Sequence; identical to SEQ ID NO: 208810
  derived and/or modified CDS sequence (opt5) from neuraminidase__InfluenzaA__ADM32664

SEQ ID NO: 211663 - RNA, 1410 nt, Artificial Sequence; identical to SEQ ID NO: 210033
  derived and/or modified CDS sequence (opt5) from neuraminidase__InfluenzaA__ADM32674

SEQ ID NO: 211664 - RNA, 1410 nt, Artificial Sequence; identical to SEQ ID NO: 208810
  derived and/or modified CDS sequence (opt5) from neuraminidase__InfluenzaA__ADM32684

SEQ ID NO: 211665 - RNA, 1410 nt, Artificial Sequence; identical to SEQ ID NO: 208800
  derived and/or modified CDS sequence (opt5) from neuraminidase__InfluenzaA__ADM32694

SEQ ID NO: 211666 - RNA, 1410 nt, Artificial Sequence; identical to SEQ ID NO: 208810
  derived and/or modified CDS sequence (opt5) from neuraminidase__InfluenzaA__ADM32704

SEQ ID NO: 211667 - RNA, 1410 nt, Artificial Sequence; identical to SEQ ID NO: 210534
  derived and/or modified CDS sequence (opt5) from neuraminidase__InfluenzaA__ADM32714

SEQ ID NO: 211668 - RNA, 1410 nt, Artificial Sequence; identical to SEQ ID NO: 210534
  derived and/or modified CDS sequence (opt5) from neuraminidase__InfluenzaA__ADM32724

SEQ ID NO: 211669 - RNA, 1410 nt, Artificial Sequence; identical to SEQ ID NO: 208810
  derived and/or modified CDS sequence (opt5) from neuraminidase__InfluenzaA__ADM32734

SEQ ID NO: 211670 - RNA, 1410 nt, Artificial Sequence; identical to SEQ ID NO: 210033
  derived and/or modified CDS sequence (opt5) from neuraminidase__InfluenzaA__ADM32744

SEQ ID NO: 211671 - RNA, 1410 nt, Artificial Sequence; identical to SEQ ID NO: 210534
  derived and/or modified CDS sequence (opt5) from neuraminidase__InfluenzaA__ADM32754

SEQ ID NO: 211672 - RNA, 1410 nt, Artificial Sequence; identical to SEQ ID NO: 210033
  derived and/or modified CDS sequence (opt5) from neuraminidase__InfluenzaA__ADM32764

SEQ ID NO: 211673 - RNA, 1410 nt, Artificial Sequence
  derived and/or modified CDS sequence (opt5) from neuraminidase__InfluenzaA__ADM32774
augaaccccaaucagaagaucauuaucauuggcagcgugugcaugaccaucgggauggccaaccugauucuccaaaucggaaauaucauuuccaucuggauuucucacagcauccagcugggcaaccagaaucagauugagacauguaaccaauccgucacgaccuacgaaaauaacacauggguuaaucagaccuaugugaacaucucuaauacaaacuucgcugccgggcagagcguggucuccgugaaacuugcgggaaauucuagccugugcccuguuuccggcugggcuauuuacagcaaggacaacucuaucagaaucggguccaaaggagauguguuugucauucgggagccguucaucagcuguucuccccucgaaugccgcaccuuuuuccugacacagggcgcccuucugaaugacaagcauuccaacggcaccauuaaagauagaagcccuuaucggacgcucaugucuugucccaucggggaggugccuucccccuacaacagccgcuuugaauccguugccuggucugcuagcgccugccacgacggaauuaauuggcugaccaucggcaucuccgggccugauaacggagcuguggccguccugaaguauaauggcauuaucacagacaccauuaagagcuggagaaacaauauccuccggacacaagagucugagugugcgugcgugaacggguccuguuucaccgugaugacggauggaccgagcgacggccaggccucuuacaaaauuuuucgcaucgaaaagggcaaaaucgucaagagcguugagaugaaugcucccaacuaucauuacgaagagugcuccuguuacccugauucuagcgagauuacaugcgugugcagagacaauuggcacggguccaaccggcccugggugagcuucaaucagaaccuggaauaucagaucggauacauuuguucuggcaucuuuggggauaauccucgccccaacgacaaaaccggauccugcggcccggucagcucuaauggggccaacggagugaagggcuucuccuuuaaguauggcaacgggguuuggauuggaagaacaaaaagcaucuccucucggaauggcuucgagaugauuugggauccuaacggguggaccggaaccgacaauaacuuuagcaucaagcaagacaucgugggcauuaaugaaugguccggguacucuggcagcuucguccagcaucccgagcuuacaggacuggauuguauccgcccuugcuucuggguggaacucauuagaggccggcccaaagagaacacgaucuggaccuccgggagcucuauuuccuuuuguggaguuaauagcgacacagugggcuggucuuggcccgauggggcugagcugccuuucaccaucgacaaguga

SEQ ID NO: 211674 - RNA, 1410 nt, Artificial Sequence; identical to SEQ ID NO: 209780
  derived and/or modified CDS sequence (opt5) from neuraminidase__InfluenzaA__ADM32784

SEQ ID NO: 211675 - RNA, 1410 nt, Artificial Sequence; identical to SEQ ID NO: 210033
  derived and/or modified CDS sequence (opt5) from neuraminidase__InfluenzaA__ADM32794

SEQ ID NO: 211676 - RNA, 1410 nt, Artificial Sequence
  derived and/or modified CDS sequence (opt5) from neuraminidase__InfluenzaA__ADM32804
augaaccccaaucagaagaucauuaccaucggcagcgugugcaugacaauugggauggccaaccugauccuccaaauuggaaauaucaucuccauuuggaucucucacagcauucagcugggcaaccagaaucagaucgagacguguaaccaauccgucauuaccuacgaaaauaacacauggguuaaucagaccuaugugaacaucucuaauacaaacuucgcugccgggcagagcguggucuccgugaaacuuguuggaaauucuagccugugcccuguguccggcugggcgauuuacagcaaggacaacucugucagaaucggguccaaaggagauguguuuguuauccgggagccguucauuagcuguucuccccucgaaugccgcaccuuuuuccugacacagggcgcccuucugaaugacaagcauuccaacggcaccaucaaagauagaagcccuuaucggacgcucaugucuugucccauuggggaggugccuucccccuacaacagccgcuuugaauccgucgcuuggucugccagcgcuugccacgacggaaucaauuggcugaccauuggcaucuccgggccugauaacggagccguggcugugcugaaguauaauggcaucauuacagacaccaucaagagcuggagaaacaauauucuccggacacaagagucugagugugccugcgucaacggguccuguuucaccguuaugacggauggaccgagcaauggccaggcgucuuacaaaaucuuucgcauugaaaagggcaaaaucgucaagagcguggagaugaacgcccccaauuaucauuacgaagagugcuccuguuacccugacucuagcgagaucacaugcgugugcagagauaacuggcacggguccaaucggcccugggugagcuucaaccagaaucuggaauaucagauuggauacaucuguucuggcauuuuuggggacaacccucgccccaaugauaaaaccggauccugcggcccgguuagcucuaacggggcuaacggagugaagggcuucuccuuuaaguauggcaauggggucuggaucggaagaacaaaaagcauuuccucucggaacggcuucgagaugaucugggacccuaauggguggaccggaaccgauaacaauuuuagcauuaagcaagacaucguggaaaucaacgagugguccggcuacucugggagcuucguucagcaucccgaacuuacaggccuggacuguauucgcccuugcuucuggguggagcucaucagaggacggcccaaagagaauacgauuuggaccuccggcagcucuaucuccuuuuguggggucaacagcgauacagugggauggucuuggcccgacggcgccgaacugccuuucaccauugauaaguga

SEQ ID NO: 211677 - RNA, 1410 nt, Artificial Sequence
  derived and/or modified CDS sequence (opt5) from neuraminidase__InfluenzaA__ADM32814
augaaccccaaucagaagaucauuaccaucggcagcgugugcaugacaauugggauggccaaccugauccuccaaauuggaaauaucaucuccauuuggaucucucacagcauucagcugggcaaccagaaucaggucgagacguguaaccaauccguuaucaccuacgaaaauaacacaugggugaaucagaccuaugugaacauuucuaauacaaacuucgcugccgggcagagcgucguguccguuaaacuugcgggaaauucuagccugugcccuguguccggcugggcuaucuacagcaaggacaacucuauuagaaucggguccaaaggagaugucuuugugauccgggagccguucauuagcuguucuccccucgaaugccgcaccuuuuuccugacacagggcgcccuucugaaugacaagcauuccaacggcaccaucaaagauagaagcccuuaucggacgcucaugucuugucccauuggggagguuccuucccccuacaacagccgcuuugaauccguggccuggucugcuagcgccugccacgacggaaucaauuggcugaccauuggcaucuccgggccugauaacggagcugucgccgugcugaaguauaauggcaucauuacagacaccaucaagagcuggagaaacaauauucuccggacacaagagucugagugugcgugcgugaacggguccuguuucaccgucaugacggauggaccgagcgacggccaggccucuuacaaaaucuuucgcauugaaaagggcaaaaucguuaagagcguggagaugaaugcucccaacuaucauuacgaagagugcuccuguuacccugauucuagcgagaucacaugcgugugcagagacaauuggcacggguccaaccggcccugggucagcuucaaucagaaccuggaauaucagauuggauacaucuguucuggcauuuuuggggauaauccucgccccaacgacaaaaccggauccugcggcccggugagcucuaauggggccaacggaguuaagggcuucuccuuuaaguauggcaacgggguguggaucggaagaacaaaaagcauuuccucucggaauggcuucgagaugaucugggauccuaacggguggaccggaaccgacaauaacuuuagcauuaagcaagacaucgucggcaucaaugaaugguccggguacucuggcagcuucgugcagcaucccgagcuuacaggacuggauuguauucgcccuugcuucuggguugaacucaucagaggccggcccaaagagaacacgauuuggaccuccgggagcucuaucuccuuuuguggagugaauagcgacacagucggcuggucuuggcccgauggggcugagcugccuuucaccauugacaaguga

SEQ ID NO: 211678 - RNA, 1410 nt, Artificial Sequence; identical to SEQ ID NO: 208810
  derived and/or modified CDS sequence (opt5) from neuraminidase__InfluenzaA__ADM32824

SEQ ID NO: 211679 - RNA, 1410 nt, Artificial Sequence; identical to SEQ ID NO: 210033
  derived and/or modified CDS sequence (opt5) from neuraminidase__InfluenzaA__ADM32834

SEQ ID NO: 211680 - RNA, 1410 nt, Artificial Sequence; identical to SEQ ID NO: 208800
  derived and/or modified CDS sequence (opt5) from neuraminidase__InfluenzaA__ADM32844

SEQ ID NO: 211681 - RNA, 1410 nt, Artificial Sequence
  derived and/or modified CDS sequence (opt5) from neuraminidase__InfluenzaA__ADM32854
augaaccccaaucagaagaucauuaccaucggcagcgugugcacaacgauugggauggccaaccugauccuccaaauuggaaauaucaucuccauuuggaucucucacagcauucaguucggcaaccagaaucagaucgagaccuguaaccaauccgucauuacauacgaaaauaacaccuggguuaaucagacauaugugaacaucucuaauaccaacuuugcugccgggcagagcguggucuccgugaaacugguuggaaauucuagccuuugcccuguguccggcugggcgauuuacagcaaggacaacucugucagaaucggguccaaaggagauguguucguuauccgggagccguuuauuagcuguucuccccuggaaugccgcacauucuuucucacccagggcgcucugcuuaaugacaagcauuccaacggcacgaucaaagauagaagcccuuaucggacccugaugucuugucccauuggggaggugccuucccccuacaacagccgcuucgaauccgucgccuggucugccagcgcuugccacgacggaaucaauuggcucacaauuggcaucuccgggccugauaacggagccguggcugugcugaaguauaauggcaucauuaccgacacaaucaagagcuggagaaacaauauucugcggacccaagagucugagugugccugcgucaacggguccuguuuuacgguuaugacagauggaccgagcaauggccaggcgucuuacaaaaucuuccgcauugaaaagggcaaaaucgucaagagcguggagaugaacgcccccaauuaucauuacgaagagugcuccuguuacccugacucuagcgagauuaccugcgugugcagagauaacuggcacggguccaaucggcccugggugagcuuuaaccagaaucucgaauaucagaucggauacaucuguucuggcauuuucggggacaacccucgccccaaugauaaaacaggauccugcggcccgguuagcucuaacggggcuaacggagugaagggcuuuuccuucaaguauggcaauggggucuggaucggaagaaccaaaagcauuuccucucggaacggcuuugagaugaucugggacccuaauggguggaccggaacagauaacaauuucagcauuaagcaagacaucgugggcaucaacgaaugguccggguacucuggcagcuucguucagcaucccgagcugacgggacuugacuguauucgcccuugcuuuuggguggaacugaucagaggccggcccaaagagaauaccauuuggacauccgggagcucuaucuccuucuguggagucaacagcgauaccgugggcuggucuuggcccgacggggccgagcucccuuuuacaauugauaaguga

SEQ ID NO: 211682 - RNA, 1410 nt, Artificial Sequence; identical to SEQ ID NO: 208800
  derived and/or modified CDS sequence (opt5) from neuraminidase__InfluenzaA__ADM32864

SEQ ID NO: 211683 - RNA, 1410 nt, Artificial Sequence; identical to SEQ ID NO: 208810
  derived and/or modified CDS sequence (opt5) from neuraminidase__InfluenzaA__ADM32874

SEQ ID NO: 211684 - RNA, 1410 nt, Artificial Sequence
  derived and/or modified CDS sequence (opt5) from neuraminidase__InfluenzaA__ADM32884
augaaccccaaucagaagaucauuaccaucggcagcgugugcaugacaauugggauggccaaccugauccuccaaauuggaaauaucaucuccauuuggaucucucacagcauucagcugggcaaccagaaucagaucgagacguguaaccaauccgucauuaccuacgaaaauaacacauggguuaaucagaccuaugugaacaucucuaauacaaacuucgcuguggggcagagcgucguguccguuaaacuugccggaaauucuagccugugcccuguguccggcugggcgauuuacagcaaggacaacucuaucagaaucggguccaaaggagaugucuuugugauucgggagccguucaucagcuguucuccccucgaaugccgcaccuuuuuccugacacagggcgcccuucugaaugacaagcauuccaacggcaccauuaaagauagaagcccuuaucggacgcucaugucuugucccaucggggagguuccuucccccuacaacagccgcuuugaauccguggcuuggucugccagcgcuugccacgacggaauuaauuggcugaccaucggcaucuccgggccugauaacggagccgucgcugugcugaaguauaauggcauuaucacagacaccauuaagagcuggagaaacaauauccuccggacacaagagucugagugugccugcgugaacggguccuguuucaccgucaugacggauggaccgagcgacggccaggcgucuuacaaaauuuuucgcaucgaaaagggcaaaaucguuaagagcguggagaugaaugcccccaacuaucauuacgaagagugcuccuguuacccugauucuagcgagauuacaugcgugugcagagacaauuggcacggguccaaccggcccugggucagcuucaaucagaaccuggaauaucagaucggauacauuuguucuggcaucuuuggggauaauccucgccccaacgacaaaaccggauccugcggcccggugagcucuaauggggcuaacggaguuaagggcuucuccuuuaaguauggcaacgggguguggauuggaagaacaaaaagcaucuccucucggaauggcuucgagaugauuugggauccuaacggguggaccggaaccgacaauaaguuuagcaucaaacaagacaucgucggcauuaacgaaugguccggguacucuggcagcuucgugcagcaucccgagcuuacaggacuggauuguauccgcccuugcuucuggguugaacucauuagaggccggcccaaggagaauacgaucuggaccuccgggagcucuauuuccuuuuguggagugaacagcgacacagucggcuggucuuggcccgauggggccgagcugccuuucaccaucgacaaauga

SEQ ID NO: 211685 - RNA, 1410 nt, Artificial Sequence; identical to SEQ ID NO: 208810
  derived and/or modified CDS sequence (opt5) from neuraminidase__InfluenzaA__ADM32921

SEQ ID NO: 211686 - RNA, 1410 nt, Artificial Sequence; identical to SEQ ID NO: 208810
  derived and/or modified CDS sequence (opt5) from neuraminidase__InfluenzaA__ADM32931

SEQ ID NO: 211687 - RNA, 1410 nt, Artificial Sequence
  derived and/or modified CDS sequence (opt5) from neuraminidase__InfluenzaA__ADM32941
augaaccccaaucagaagaucauuaucauuggcagcgugugcaugaccaucgggauggccaaccugauucuccaaaucggaaauaucauuuccaucuggauuucucacagcauccagcugggcaaccagaaucagauugagacauguaaccaauccgucaucacguacgaaaauaacaccuggguuaaucagacauaugugaacauuucuaauaccaacuucgcugccgggcagagcguggucuccgugaaacuugcgggaaauucuagccugugcccuguuuccggcugggcuaucuacagcaaggacaacucuaucagaauuggguccaaaggagauguguuugucauccgggagccguucauuagcuguucuccccucgaaugccgcacauuuuuccugacccagggcgcccuucugaaugacaagcauuccaacggcacaaucaaagauagaagcccuuaucggacccucaugucuugucccauuggggaggugccuucccccuacaacagccgcuuugaauccguugccuggucugcuagcgccugccacgacggaaucaauuggcugacgaucggcauuuccgggccugauaacggagcuguggccguccugaaguauaauggcaucauuaccgacacaaucaagagcuggagaaacaauauucuccggacccaagagucugagugugcgugcgugaacggguccuguuucacagugaugaccgauggaccgagcgacggccaggccucuuacaaaaucuuucgcaucgaaaagggcaaaauugucaagagcguugagaugaaugcucccaacuaucauuacgaagagugcuccuguuacccugauucuagcgagaucacgugcgugugcagagacaauuggcacggguccaaccggcccugggugagcuucaaucagaaccuggaauaucagauuggauacaucuguucuggcauuuuuggggauaauccucgccccaacgacaaaacaggauccugcggcccggucagcucuaauggggccaacggagugaagggcuucuccuuuaaguauggcaacgggguuuggaucggaagaaccaaaagcauuaauucccggaacggcuucgagaugaucugggauccuaauggguggacaggaaccgacaacaauuuuucuaucaagcaagacauugugggcaucaacgaauggagcggguacuccggcucuuucguccagcaucccgagcuuaccggacuggauuguauucgcccuugcuucuggguggaacucaucagaggccggcccaaagagaauacaauuuggacgagcggguccagcaucucuuuuuguggaguuaacuccgacaccgugggcuggagcuggcccgauggggcugagcugccuuucacaaucgacaaguga

SEQ ID NO: 211688 - RNA, 1410 nt, Artificial Sequence; identical to SEQ ID NO: 208810
  derived and/or modified CDS sequence (opt5) from neuraminidase__InfluenzaA__ADM32951

SEQ ID NO: 211689 - RNA, 1410 nt, Artificial Sequence; identical to SEQ ID NO: 209393
  derived and/or modified CDS sequence (opt5) from neuraminidase__InfluenzaA__ADM32960

SEQ ID NO: 211690 - RNA, 1410 nt, Artificial Sequence; identical to SEQ ID NO: 208810
  derived and/or modified CDS sequence (opt5) from neuraminidase__InfluenzaA__ADM32969

SEQ ID NO: 211691 - RNA, 1410 nt, Artificial Sequence; identical to SEQ ID NO: 208810
  derived and/or modified CDS sequence (opt5) from neuraminidase__InfluenzaA__ADM32979

SEQ ID NO: 211692 - RNA, 1410 nt, Artificial Sequence; identical to SEQ ID NO: 210712
  derived and/or modified CDS sequence (opt5) from neuraminidase__InfluenzaA__ADM32988

SEQ ID NO: 211693 - RNA, 1410 nt, Artificial Sequence; identical to SEQ ID NO: 210712
  derived and/or modified CDS sequence (opt5) from neuraminidase__InfluenzaA__ADM32997

SEQ ID NO: 211694 - RNA, 1410 nt, Artificial Sequence; identical to SEQ ID NO: 208810
  derived and/or modified CDS sequence (opt5) from neuraminidase__InfluenzaA__ADM33006

SEQ ID NO: 211695 - RNA, 1410 nt, Artificial Sequence; identical to SEQ ID NO: 210712
  derived and/or modified CDS sequence (opt5) from neuraminidase__InfluenzaA__ADM33015

SEQ ID NO: 211696 - RNA, 1410 nt, Artificial Sequence
  derived and/or modified CDS sequence (opt5) from neuraminidase__InfluenzaA__ADM33025
augaaccccaaucagaagaucauuaccaucggcagcgugugcaugacaauugggauggccaaccugauccuccaaauuggaaauaucaucuccauuuggaucucucacagcauucagcugggcaaccagaaucagaucgagacguguaaccaauccgucauuaccuacgaaaauaacacauggguuaaucagaccuaugugaacaucucuaauacaaacuucgcugccgggcagagcguggucuccgugaaacuugcgggaaauucuagccugugcccuguuuccggcugggcuauuuacagcaaggacaacucuaucagaaucggguccaaaggagauguguuugucauucgggagccguucaucagcuguucuccccucgaaugccgcaccuuuuuccugacacagggcgcccuucugaaugacaagcauuccaacggcaccauuaaagauagaagcccuuaucggacgcucaugucuugucccaucggggaggugccuucccccuacaacagccgcuuugaauccguugccuggucugcuagcgccugccacgacggaauuaauuggcugaccaucggcaucuccgggccugauaacggagcuguggccguccugaaguauaauggcauuaucacagacaccauuaagagcuggagaucuaacauccuccggacacaagaguccgagugugcgugcgugaaugggagcuguuucaccgugaugacggauggaccgucugacggccaggccagcuacaaaauuuuucgcaucgaaaagggcaaaaucgucaaguccguugagaugaacgcucccaauuaucauuacgaagagugcucuuguuacccugauagcuccgagauuacaugcgugugcagagacaacuggcacgggagcaaucggcccugggugucuuucaaccagaaucuggaauaucagaucggauacauuuguuccggcaucuuuggggauaacccucgccccaaugacaaaaccggaagcugcggcccggucucuuccaacggggccaauggagugaagggcuucagcuuuaaguauggcaacgggguuuggauuggaagaacaaaauccaucucuagccggaacggcuucgagaugauuugggauccuaauggguggaccggaaccgacaacaauuuuuccaucaagcaagacaucgugggcauuaacgaauggucuggguacagcggcuccuucguccagcaucccgagcuuacaggacuggauuguauccgcccuugcuucuggguggaacucauuagaggccggcccaaagagaauacgaucuggaccagcgggucuuccauuagcuuuuguggaguuaacucugacacagugggcugguccuggcccgauggggcugagcugccuuucaccaucgacaaguga

SEQ ID NO: 211697 - RNA, 1410 nt, Artificial Sequence; identical to SEQ ID NO: 208810
  derived and/or modified CDS sequence (opt5) from neuraminidase__InfluenzaA__ADM33042

SEQ ID NO: 211698 - RNA, 1410 nt, Artificial Sequence; identical to SEQ ID NO: 208810
  derived and/or modified CDS sequence (opt5) from neuraminidase__InfluenzaA__ADM33062

SEQ ID NO: 211699 - RNA, 1410 nt, Artificial Sequence
  derived and/or modified CDS sequence (opt5) from neuraminidase__InfluenzaA__ADM33071
augaaccccaaucagaagaucauuaccaucggcagcgugugcaugacaauugggauggccaaccugauccuccaaauuggaaauaucaucuccauuuggaucucucacagcauucagcugggcaaccagaaucagaucgagacguguaaccaauccgucauuaccuacgaaaauaacacauggguuaaucagaccuaugugaacaucucuaauacaaacuucgcugccgggcagagcguggucuccgugaaacuugcgggaaauucuagccugugcccuguuuccggcugggcuauuuacagcaaggacaacucuaucagaaucggguccaaaggagauguguuugucauucgggagccguucaucagcuguucuccccucgaaugccgcaccuuuuuccugacacagggcgcccuucugaaugacaagcauuccaacggcaccauuaaagauagaagcccuuaucggacgcucaugucuugucccaucggggaggugccuucccccuacaacagccgcuuugaauccguugccuggucugcuagcgccugccacgacggaauuaauuggcugaccaucggcaucuccgggccugauaacggagcuguggccguccugaaguauaauggcauuaucacagacaccauuaagagcuggagaaacaauauccuccggacacaagagucugagugugcgugcgugaacggguccuguuucaccgugaugacggauggaccgagcgacggccaggccucuuacaaaauuuuucgcaucgaaaagggcaaaaucgucaagagcguugagaugaaugcucccaacuaucauuacgaagagugcuccuguuacccugauucuagcaaaauuacaugcgugugcagagacaauuggcacggguccaaccggcccugggugagcuucaaucagaaccuggaguaucagaucggauacauuuguucuggcaucuuuggggauaauccucgccccaacgacaagaccggauccugcggcccggucagcucuaauggggccaacggagugaagggcuucuccuuuaaauauggcaacgggguuuggauuggaagaacaaagagcaucuccucucggaauggcuucgaaaugauuugggauccuaacggguggaccggaaccgacaauaacuuuagcaucaaacaagacaucgugggcauuaaugagugguccggguacucuggcagcuucguccagcaucccgaacuuacaggacuggauuguauccgcccuugcuucuggguggagcucauuagaggccggcccaaggaaaacacgaucuggaccuccgggagcucuauuuccuuuuguggaguuaauggcgacacagugggguggagcuggcccgauggagcugagcugccuuucaccaucgacaaauga

SEQ ID NO: 211700 - RNA, 1410 nt, Artificial Sequence; identical to SEQ ID NO: 208810
  derived and/or modified CDS sequence (opt5) from neuraminidase__InfluenzaA__ADM33081

SEQ ID NO: 211701 - RNA, 1410 nt, Artificial Sequence; identical to SEQ ID NO: 209883
  derived and/or modified CDS sequence (opt5) from neuraminidase__InfluenzaA__ADM33091

SEQ ID NO: 211702 - RNA, 1410 nt, Artificial Sequence; identical to SEQ ID NO: 209883
  derived and/or modified CDS sequence (opt5) from neuraminidase__InfluenzaA__ADM33101

SEQ ID NO: 211703 - RNA, 1410 nt, Artificial Sequence; identical to SEQ ID NO: 209883
  derived and/or modified CDS sequence (opt5) from neuraminidase__InfluenzaA__ADM33111

SEQ ID NO: 211704 - RNA, 1410 nt, Artificial Sequence; identical to SEQ ID NO: 208810
  derived and/or modified CDS sequence (opt5) from neuraminidase__InfluenzaA__ADM33121

SEQ ID NO: 211705 - RNA, 1410 nt, Artificial Sequence; identical to SEQ ID NO: 208810
  derived and/or modified CDS sequence (opt5) from neuraminidase__InfluenzaA__ADM33130

SEQ ID NO: 211706 - RNA, 1410 nt, Artificial Sequence; identical to SEQ ID NO: 208810
  derived and/or modified CDS sequence (opt5) from neuraminidase__InfluenzaA__ADM33139

SEQ ID NO: 211707 - RNA, 1410 nt, Artificial Sequence; identical to SEQ ID NO: 208810
  derived and/or modified CDS sequence (opt5) from neuraminidase__InfluenzaA__ADM33149

SEQ ID NO: 211708 - RNA, 1410 nt, Artificial Sequence; identical to SEQ ID NO: 208810
  derived and/or modified CDS sequence (opt5) from neuraminidase__InfluenzaA__ADM33159

SEQ ID NO: 211709 - RNA, 1410 nt, Artificial Sequence; identical to SEQ ID NO: 208810
  derived and/or modified CDS sequence (opt5) from neuraminidase__InfluenzaA__ADM33169

SEQ ID NO: 211710 - RNA, 1410 nt, Artificial Sequence; identical to SEQ ID NO: 208810
  derived and/or modified CDS sequence (opt5) from neuraminidase__InfluenzaA__ADM33179

SEQ ID NO: 211711 - RNA, 1410 nt, Artificial Sequence; identical to SEQ ID NO: 208810
  derived and/or modified CDS sequence (opt5) from neuraminidase__InfluenzaA__ADM33188

SEQ ID NO: 211712 - RNA, 1410 nt, Artificial Sequence; identical to SEQ ID NO: 208810
  derived and/or modified CDS sequence (opt5) from neuraminidase__InfluenzaA__ADM33197

SEQ ID NO: 211713 - RNA, 1410 nt, Artificial Sequence; identical to SEQ ID NO: 208810
  derived and/or modified CDS sequence (opt5) from neuraminidase__InfluenzaA__ADM33206

SEQ ID NO: 211714 - RNA, 1410 nt, Artificial Sequence; identical to SEQ ID NO: 208810
  derived and/or modified CDS sequence (opt5) from neuraminidase__InfluenzaA__ADM33215

SEQ ID NO: 211715 - RNA, 1410 nt, Artificial Sequence; identical to SEQ ID NO: 208810
  derived and/or modified CDS sequence (opt5) from neuraminidase__InfluenzaA__ADM33224

SEQ ID NO: 211716 - RNA, 1410 nt, Artificial Sequence; identical to SEQ ID NO: 208810
  derived and/or modified CDS sequence (opt5) from neuraminidase__InfluenzaA__ADM33234

SEQ ID NO: 211717 - RNA, 1410 nt, Artificial Sequence; identical to SEQ ID NO: 209234
  derived and/or modified CDS sequence (opt5) from neuraminidase__InfluenzaA__ADM33243

SEQ ID NO: 211718 - RNA, 1410 nt, Artificial Sequence; identical to SEQ ID NO: 208810
  derived and/or modified CDS sequence (opt5) from neuraminidase__InfluenzaA__ADM33253

SEQ ID NO: 211719 - RNA, 1410 nt, Artificial Sequence; identical to SEQ ID NO: 209234
  derived and/or modified CDS sequence (opt5) from neuraminidase__InfluenzaA__ADM33262

SEQ ID NO: 211720 - RNA, 1410 nt, Artificial Sequence; identical to SEQ ID NO: 208840
  derived and/or modified CDS sequence (opt5) from neuraminidase__InfluenzaA__ADM33272

SEQ ID NO: 211721 - RNA, 1410 nt, Artificial Sequence; identical to SEQ ID NO: 208840
  derived and/or modified CDS sequence (opt5) from neuraminidase__InfluenzaA__ADM33282

SEQ ID NO: 211722 - RNA, 1410 nt, Artificial Sequence; identical to SEQ ID NO: 208810
  derived and/or modified CDS sequence (opt5) from neuraminidase__InfluenzaA__ADM33292

SEQ ID NO: 211723 - RNA, 1410 nt, Artificial Sequence; identical to SEQ ID NO: 208810
  derived and/or modified CDS sequence (opt5) from neuraminidase__InfluenzaA__ADM33302

SEQ ID NO: 211724 - RNA, 1410 nt, Artificial Sequence; identical to SEQ ID NO: 208800
  derived and/or modified CDS sequence (opt5) from neuraminidase__InfluenzaA__ADM33312

SEQ ID NO: 211725 - RNA, 1410 nt, Artificial Sequence; identical to SEQ ID NO: 208840
  derived and/or modified CDS sequence (opt5) from neuraminidase__InfluenzaA__ADM33322

SEQ ID NO: 211726 - RNA, 1410 nt, Artificial Sequence; identical to SEQ ID NO: 208840
  derived and/or modified CDS sequence (opt5) from neuraminidase__InfluenzaA__ADM33332

SEQ ID NO: 211727 - RNA, 1410 nt, Artificial Sequence; identical to SEQ ID NO: 208840
  derived and/or modified CDS sequence (opt5) from neuraminidase__InfluenzaA__ADM33342

SEQ ID NO: 211728 - RNA, 1410 nt, Artificial Sequence
  derived and/or modified CDS sequence (opt5) from neuraminidase__InfluenzaA__ADM33367
augaaccccaaucagaagaucauuaccaucggcagcgugugcaugacaauugggauggccaaccugauccuccaaauuggaaauaucaucuccauuuggaucucucacagcauucagcugggcaaccagaaucagaucgagacguguaaccaauccgucguuaccuacgaaaauaacacaugggugaaucagaccuaugugaacauuucuaauacaaacuucgcugccgggcagagcgucguguccguuaaacuugcgggaaauucuagccugugcccugugggcgggugggcuaucuacuccaaggacaacagcgucagaauuggaucuaaaggcgauguguuuguuauccgggagccguucaucuccuguagcccccucgaaugccgcaccuuuuuccugacacagggcgcccuucugaaugacaagcauucuaacgggaccauuaaagauagauccccuuaucggacgcucaugagcugucccaucggagaggugccuucucccuacaacucccgcuuugaaagcgucgccugguccgcuucugccugccacgacggcauuaauuggcugaccaucgggauuagcggaccugauaacggcgcuguggccgugcugaaguauaaugggaucaucacagacaccauuaaguccuggagaaacaauauccuccggacacaagagagcgagugugcgugcgucaacggaucuuguuucaccguuaugacggauggcccguccaauggccaggccagcuacaaaauuuuucgcaucgaaaaggggaaaauugugaagucuguggagaugaacgcucccaauuaucauuacgaagagugcagcuguuacccugacuccucugagaucacaugcgucugcagagauaacuggcacggaagcaaucggcccuggguguccuucaaccagaaucuggaauaucagaucggcuacauuuguagcgggaucuuuggagacaacccucgccccaaugauaaaaccggcucuugcgggccgguuuccagcaacggagccaacggcgugaagggcuucucuuuuaaguaugggaauggagucuggauuggcagaacaaaauccaucagcucccggaacggguucgagaugauuugggacccuaauggauggaccggcaccgauaacaauuuuucuaucaagcaagacauuguggggaucaacgaauggagcggcuacuccggaucuuucguucagcaucccgagcuuacaggccuggacuguauccgcccuugcuucuggguggaacucauuagagggcggcccaaagagaauacgaucuggaccagcggauccagcauuucuuuuuguggcgucaacuccgauacagugggguggagcuggcccgacggagcugagcugccuuucaccaucgauaaguga

SEQ ID NO: 211729 - RNA, 1410 nt, Artificial Sequence; identical to SEQ ID NO: 208840
  derived and/or modified CDS sequence (opt5) from neuraminidase__InfluenzaA__ADM33377

SEQ ID NO: 211730 - RNA, 1410 nt, Artificial Sequence; identical to SEQ ID NO: 208840
  derived and/or modified CDS sequence (opt5) from neuraminidase__InfluenzaA__ADM33387

SEQ ID NO: 211731 - RNA, 1410 nt, Artificial Sequence; identical to SEQ ID NO: 208810
  derived and/or modified CDS sequence (opt5) from neuraminidase__InfluenzaA__ADM33397

SEQ ID NO: 211732 - RNA, 1410 nt, Artificial Sequence; identical to SEQ ID NO: 208810
  derived and/or modified CDS sequence (opt5) from neuraminidase__InfluenzaA__ADM33407

SEQ ID NO: 211733 - RNA, 1410 nt, Artificial Sequence; identical to SEQ ID NO: 208840
  derived and/or modified CDS sequence (opt5) from neuraminidase__InfluenzaA__ADM33417

SEQ ID NO: 211734 - RNA, 1410 nt, Artificial Sequence; identical to SEQ ID NO: 208810
  derived and/or modified CDS sequence (opt5) from neuraminidase__InfluenzaA__ADM33427

SEQ ID NO: 211735 - RNA, 1410 nt, Artificial Sequence
  derived and/or modified CDS sequence (opt5) from neuraminidase__InfluenzaA__ADM33437
augaaccccaaucagaagaucauuaccaucggcagcgugugcaugacaauugggauggccaaccugauccuccaaauuggaaauaucaucuccauuuggaucucucacagcauucagcugggcaaccagaaucagaucgagacguguaaccaauccgucauuaccuacgaaaauaacacauggguuaaucagaccuaugugaacaucucuaauacaaacuucgcugccgggcagagcguggucuccgugaaacuugcgggaaauucuagccugugcccuguuuccggcugggcuauuuacagcaaggacaacucuaucagaaucggguccaaaggagauguguuugucauucgggagccguucaucagcuguucuccccucgaaugccgcaccuuuuuccugacacagggcgcccuucugaaugacaagcauuccaacggcaccauuaaagauagaagcccuuaucggacgcucaugucuugucccaucggggaggugccuuccgccuacaacagccgcuuugaauccguugcuuggucugccagcgcuugccacgacggaauuaauuggcugaccaucggcaucuccgggcccgauaacggagccguggcgguccugaaguauaauggcauuaucacagacaccauuaagagcuggagaaacaauauccuccggacacaagagucugagugugccugcgugaacggguccuguuucaccgugaugacggauggaccuagcgacggccaggcuucuuacaaaauuuuucgcaucgaaaagggcaaaaucgucaagagcguugagaugaaugccccgaacuaucauuacgaagagugcuccuguuaccccgauucuagcgagauuacaugcgugugcagagacaauuggcacggguccaaccggccuugggugagcuucaaucagaaccuggaauaucagaucggauacauuuguucuggcaucuuuggggauaauccccgcccuaacgacaaaaccggauccugcggccccgucagcucuaauggggcuaacggagugaagggcuucuccuuuaaguauggcaacgggguuuggauuggaagaacaaaaagcaucuccucucggaauggcuucgagaugauuugggauccgaacggguggaccggaaccgacaauaacuuuagcaucaagcaagacaucgugggcauuaaugaaugguccggguacucuggcagcuucguccagcauccugagcuuacaggacuggauuguauccgccccugcuucuggguggaacucauuagaggccggccuaaagagaacacgaucuggaccuccgggagcucuauuuccuuuuguggaguuaauagcgacacagugggcuggucuuggcccgauggggccgagcugcccuucaccaucgacaaguga

SEQ ID NO: 211736 - RNA, 1410 nt, Artificial Sequence; identical to SEQ ID NO: 209164
  derived and/or modified CDS sequence (opt5) from neuraminidase__InfluenzaA__ADM33443

SEQ ID NO: 211737 - RNA, 1410 nt, Artificial Sequence; identical to SEQ ID NO: 208810
  derived and/or modified CDS sequence (opt5) from neuraminidase__InfluenzaA__ADM52446

SEQ ID NO: 211738 - RNA, 1410 nt, Artificial Sequence; identical to SEQ ID NO: 208810
  derived and/or modified CDS sequence (opt5) from neuraminidase__InfluenzaA__ADM52456

SEQ ID NO: 211739 - RNA, 1410 nt, Artificial Sequence; identical to SEQ ID NO: 211015
  derived and/or modified CDS sequence (opt5) from neuraminidase__InfluenzaA__ADM52466

SEQ ID NO: 211740 - RNA, 1410 nt, Artificial Sequence; identical to SEQ ID NO: 208810
  derived and/or modified CDS sequence (opt5) from neuraminidase__InfluenzaA__ADM52486

SEQ ID NO: 211741 - RNA, 1410 nt, Artificial Sequence; identical to SEQ ID NO: 208800
  derived and/or modified CDS sequence (opt5) from neuraminidase__InfluenzaA__ADM52496

SEQ ID NO: 211742 - RNA, 1410 nt, Artificial Sequence; identical to SEQ ID NO: 208810
  derived and/or modified CDS sequence (opt5) from neuraminidase__InfluenzaA__ADM52506

SEQ ID NO: 211743 - RNA, 1410 nt, Artificial Sequence; identical to SEQ ID NO: 208800
  derived and/or modified CDS sequence (opt5) from neuraminidase__InfluenzaA__ADM52516

SEQ ID NO: 211744 - RNA, 1410 nt, Artificial Sequence; identical to SEQ ID NO: 208800
  derived and/or modified CDS sequence (opt5) from neuraminidase__InfluenzaA__ADM52527

SEQ ID NO: 211745 - RNA, 1410 nt, Artificial Sequence; identical to SEQ ID NO: 210033
  derived and/or modified CDS sequence (opt5) from neuraminidase__InfluenzaA__ADM52537

SEQ ID NO: 211746 - RNA, 1410 nt, Artificial Sequence; identical to SEQ ID NO: 210534
  derived and/or modified CDS sequence (opt5) from neuraminidase__InfluenzaA__ADM52547

SEQ ID NO: 211747 - RNA, 1410 nt, Artificial Sequence; identical to SEQ ID NO: 208800
  derived and/or modified CDS sequence (opt5) from neuraminidase__InfluenzaA__ADM52557

SEQ ID NO: 211748 - RNA, 1410 nt, Artificial Sequence; identical to SEQ ID NO: 208800
  derived and/or modified CDS sequence (opt5) from neuraminidase__InfluenzaA__ADM52567

SEQ ID NO: 211749 - RNA, 1410 nt, Artificial Sequence; identical to SEQ ID NO: 208800
  derived and/or modified CDS sequence (opt5) from neuraminidase__InfluenzaA__ADM52577

SEQ ID NO: 211750 - RNA, 1410 nt, Artificial Sequence; identical to SEQ ID NO: 208810
  derived and/or modified CDS sequence (opt5) from neuraminidase__InfluenzaA__ADM52587

SEQ ID NO: 211751 - RNA, 1410 nt, Artificial Sequence; identical to SEQ ID NO: 208810
  derived and/or modified CDS sequence (opt5) from neuraminidase__InfluenzaA__ADM52597

SEQ ID NO: 211752 - RNA, 1410 nt, Artificial Sequence; identical to SEQ ID NO: 208800
  derived and/or modified CDS sequence (opt5) from neuraminidase__InfluenzaA__ADM52607

SEQ ID NO: 211753 - RNA, 1410 nt, Artificial Sequence; identical to SEQ ID NO: 208800
  derived and/or modified CDS sequence (opt5) from neuraminidase__InfluenzaA__ADM52617

SEQ ID NO: 211754 - RNA, 1410 nt, Artificial Sequence; identical to SEQ ID NO: 210491
  derived and/or modified CDS sequence (opt5) from neuraminidase__InfluenzaA__ADM52627

SEQ ID NO: 211755 - RNA, 1410 nt, Artificial Sequence; identical to SEQ ID NO: 210033
  derived and/or modified CDS sequence (opt5) from neuraminidase__InfluenzaA__ADM52637

SEQ ID NO: 211756 - RNA, 1410 nt, Artificial Sequence; identical to SEQ ID NO: 210033
  derived and/or modified CDS sequence (opt5) from neuraminidase__InfluenzaA__ADM52647

SEQ ID NO: 211757 - RNA, 1410 nt, Artificial Sequence; identical to SEQ ID NO: 208800
  derived and/or modified CDS sequence (opt5) from neuraminidase__InfluenzaA__ADM52657

SEQ ID NO: 211758 - RNA, 1410 nt, Artificial Sequence; identical to SEQ ID NO: 210033
  derived and/or modified CDS sequence (opt5) from neuraminidase__InfluenzaA__ADM52667

SEQ ID NO: 211759 - RNA, 1410 nt, Artificial Sequence; identical to SEQ ID NO: 208800
  derived and/or modified CDS sequence (opt5) from neuraminidase__InfluenzaA__ADM52687

SEQ ID NO: 211760 - RNA, 1410 nt, Artificial Sequence; identical to SEQ ID NO: 208800
  derived and/or modified CDS sequence (opt5) from neuraminidase__InfluenzaA__ADM52697

SEQ ID NO: 211761 - RNA, 1410 nt, Artificial Sequence; identical to SEQ ID NO: 210491
  derived and/or modified CDS sequence (opt5) from neuraminidase__InfluenzaA__ADM52707

SEQ ID NO: 211762 - RNA, 1410 nt, Artificial Sequence
  derived and/or modified CDS sequence (opt5) from neuraminidase__InfluenzaA__ADM52717
augaaccccaaucagaagaucauuaccaucggcagcgugugcaugacaauugggauggccaaccugauccuccaaauuggaaauaucaucuccauuuggaucucucacagcauucagcugggcaaccagaaucagaucgagacguguaaccaauccgucauuaccuacgaaaauaacacauggguuaaucagaccuaugugaacaucucuaauacaaacuucgcugccgggcagagcgcgguguccgucaaacuugugggaaauucuagccugugcccuguuuccggcugggcuauuuacagcaaggacaacucugugagaaucggguccaaaggagaugucuuugugauccgggagccguucauuagcuguucuccccucgaaugccgcaccuuuuuccugacacagggcgcccuucugaaugacaagcauuccaacggcaccaucaaagauagaagcccuuaucggacgcucaugucuugucccauuggggagguuccuucccccuacaacagccgcuuugaauccguggccuggucugcuagcgccugccacgacggaaucaauuggcugaccauuggcaucuccgggccugauaacggagcugucgccgugcugaaguauaauggcaucauuacagacaccaucaagagcuggagaaacaauauucuccggacacaagagucugagugugcgugcgugaacggguccuguuucaccgucaugacggauggaccgagcaauggccaggccucuuacaaaaucuuucgcauugaaaagggcaaaaucguuaagagcguggagaugaacgcucccaauuaucauuacgaagagugcuccuguuacccugacucuagcgagaucacaugcgugugcagagauaacuggcacggguccaaucggcccugggucagcuucaaccagaaucuggaauaucagauuggauacaucuguucuggcauuuuuggggacaacccucgccccaaugauaaaaccggauccugcggcccggugagcucuaacggggccaacggaguuaagggcuucuccuuuaaguauggcaaugggguguggaucggaagaacaaaaagcauuuccucucggaacggcuucgagaugaucugggacccuaauggguggaccggaaccgauaacaauuuuagcauuaagcaagacaucgucggcaucaacgaaugguccggguacucuggcagcuucgugcagcaucccgagcuuacaggacuggacuguauucgcccuugcuucuggguugaacucaucagaggccggcccaaagagaauacgauuuggaccuccgggagcucuaucuccuuuuguggagugaacagcgauacagucggcuggucuuggcccgacggggcugagcugccuuucaccauugauaaguga

SEQ ID NO: 211763 - RNA, 1410 nt, Artificial Sequence
  derived and/or modified CDS sequence (opt5) from neuraminidase__InfluenzaA__ADM86402
augaaccccaaucagaagaucauuaccaucggcagcgugugcaugacaauugggauggccaaccugauccuccaaauuggaaauaucaucuccauuuggaucucucacagcauucagcugggcaaccagaaucagaucgagacguguaaccaauccgucauuaccuacgaaaauaacacauggguuaaucagaccuaugugaacaucucuaauacaaacuucgcugccgggcagagcguggcguccgucaaacuugcuggaaauucuagccugugcccuguguccggcugggccauuuacagcaaggacaacucuguuagaaucggguccaaaggagauguguuugucauccgggagccguucauuagcuguucuccccucgaaugccgcaccuuuuuccugacacagggcgcccuucugaaugacaagcauuccaacggcaccgugaaagauagaagcccuuaucggacgcucaugucuugucccaucggggagguuccuucccccuacaacagccgcuuugaauccguggcuuggucugccagcgcuugccacgacggaauuaauuggcugaccaucggcauuuccgggccugauaacggagccgucgcggugcugaaguauaauggcaucaucacagacaccauuaagagcuggagaaacaauauccuccggacacaagagucugagugugccugcgugaacggguccuguuucaccgucaugacggauggaccgagcgacggccaggcuucuuacaaaauuuuucgcaucgaaaagggcaaaauuguuaagagcguggagaugaaugcccccaacuaucauuacgaagagugcuccuguuacccugauucuagcgagaucacaugcgugugcagagacaauuggcacggguccaaccggcccugggucagcuucaaucagaaccuggaauaucagaucggauacauuuguucuggcaucuuuggggauaauccucgccccaacgacaaaaccggauccugcggcccggugagcucuaauggggcuaacggaguuaagggcuucuccuuuaaguauggcaacgggguguggauuggaagaacaaaaagcaucuccucucggaauggcuucgagaugauuugggauccuaacggguggaccggaaccgacaauaacuuuagcaucaagcaagacauugucggcaucaaugaaugguccggguacucuggcagcuucgugcagcaucccgagcuuacaggacuggauuguauccgcccuugcuucuggguugaacucauuagaggccggcccaaagagaacacgaucuggaccuccgggagcucuauuuccuuuuguggagugaauagcgacacagucggcuggucuuggcccgauggggccgagcugccuuucaccaucgacaaguga

SEQ ID NO: 211764 - RNA, 1410 nt, Artificial Sequence; identical to SEQ ID NO: 208810
  derived and/or modified CDS sequence (opt5) from neuraminidase__InfluenzaA__ADM86412

SEQ ID NO: 211765 - RNA, 1410 nt, Artificial Sequence
  derived and/or modified CDS sequence (opt5) from neuraminidase__InfluenzaA__ADM86422
augaaccccaaucagaagaucauuaccaucggcagcgugugcaugacaauugggauggccaaccugauccuccaaauuggaaauaucaucuccauuuggaucucucacagcauucagcugggcaaccagaaucagaucgagacguguaaccaauccgucauuaccuacgaaaauaacacauggguuaaucagaccuaugugaacaucucuaauacaaacuucguggcugggcagagcgucguguccguuaaacuugccggaaauucuagccugugcccuguguccggcugggcgauuuacagcaaggacaacucuaucagaaucggguccaaaggagaugucuuugugauucgggagccguucaucagcuguucuccccucgaaugccgcaccuuuuuccugacacagggcgcccuucugaaugacaagcauuccaacggcaccauuaaagauagaagcccuuaucggacgcucaugucuugucccaucggggagguuccuucccccuacaacagccgcuuugaauccguggcuuggucugccagcgcuugccacgacggaauuaauuggcugaccaucggcaucuccgggccugauaacggagccgucgcugugcugaaguauaauggcauuaucacagacaccauuaagagcuggagaaacaauauccuccggacacaagagucugagugugccugcgugaacggguccuguuucaccgucaugacggauggaccgagcgacggccaggcgucuuacaaaauuuuucgcaucgaaaagggcaaaguugucaagagcguggagaugaaugcccccaacuaucauuacgaagagugcuccuguuacccugauucuagcgagaucacaugcgugugcagagacaauuggcacggguccaaccggcccugggugagcuucaaucagaaccuggaauaucagauuggauacaucuguucuggcauuuuuggggauaauccucgccccaacgacaaaaccggauccugcggcccgguuagcucuaauggggcuaacggagugaagggcuucuccuuuaaguauggcaacggggucuggaucggaagaacaaaaagcauuuccucucggaauggcuucgagaugaucugggauccuaacggguggaccggaaccgacaauaacuuuagcauuaagcaagacaucgugggcaucaaugaaugguccggguacucuggcagcuucguucagcaucccgagcuuacaggacuggauuguauucgcccuugcuucuggguggaacucaucagaggccggcccaaagagaacacgauuuggaccuccgggagcucuaucuccuuuuguggagucaauagcgacacagugggcuggucuuggcccgauggggccgagcugccuuucaccauugacaaguga

SEQ ID NO: 211766 - RNA, 1410 nt, Artificial Sequence; identical to SEQ ID NO: 209664
  derived and/or modified CDS sequence (opt5) from neuraminidase__InfluenzaA__ADM86432

SEQ ID NO: 211767 - RNA, 1410 nt, Artificial Sequence
  derived and/or modified CDS sequence (opt5) from neuraminidase__InfluenzaA__ADM86443
augaaccccaaucagaagaucauuaccaucggcagcgugugcaugacaauugggauggccaaccugauccuccaaauuggaaauaucaucuccauuuggaucucucacagcauucagcugggcaaccagaaucagaucgagacguguaaccaauccgucauuaccuacgaaaauaacacauggguuaaucagaccuaugugaacaucucuaauacaaacuucgcugccgggcagagcguggucuccgugaaacuugcgggaaauucuagccugugcccuguuuccggcugggcuauuuacagcaaggacaacucuaucagaaucggguccaaaggagauguguuugucauucgggagccguucaucagcuguucuccccucgaaugccgcaccuuuuuccugacacagggcgcccuucugaaugacaagcauuccaacggcaccauuaaagauagaagcccuuaucggacgcucaugucuugucccaucggggaggugccuucccccuacaacagccgcuuugaauccguugccuggucugcuagcgccugccacgacggaauuaauuggcugaccaucggcaucuccgggccugauaacggagcuguggccguccugaaguauaauggcauuaucacagacaccauuaagagcuggagaaacaauauccuccggacacaagagucugagugugugugcgugaacggguccuguuucaccgucaugacggauggaccgagcgacggccaggcgucuuacaaaauuuuucgcaucgaaaagggcaaaaucguuaagagcguggagaugaaugcccccaacuaucauuacgaagagugcuccuguuacccugauucuagcgagauuacaugcgugugcagagacaauuggcacggguccaaccggcccugggucagcuucaaucagaaccuggaauaucagaucggauacauuuguucuggcaucuuuggggauaauccucgccccaacgacaaaaccggauccugcggcccggugagcucuaauggggcuaacggaguuaagggcuucuccuuuaaguauggcaacgggguguggauuggaagaacaaaaagcaucuccucucggaauggcuucgagaugauuugggauccuaacggguggaccggaaccgacaauaacuuuagcaucaagcaagacaucgucggcaugaaugaaugguccggguacucuggcagcuucgugcagcaucccgagcuuacaggacuggauuguauucgcccuugcuucuggguugaacucaucagaggccggcccaaagagaacacgauuuggaccuccgggagcucuaucuccuuuuguggagugaauagcgacacagucggcuggucuuggcccgauggggccgagcugccuuucaccauugacaaguga

SEQ ID NO: 211768 - RNA, 1410 nt, Artificial Sequence; identical to SEQ ID NO: 209393
  derived and/or modified CDS sequence (opt5) from neuraminidase__InfluenzaA__ADM86453

SEQ ID NO: 211769 - RNA, 1350 nt, Artificial Sequence
  derived and/or modified CDS sequence (opt5) from neuraminidase__InfluenzaA__ADM95377
augaaccccaaucagaagaucauuaccaucggcagcauuugcauggugacagggaucgucucccugaugcuccaaguuggaucuaugauuagcaucugggugucccacucuauccauacgggcaaccagcaccaggccgagccuauuagcaauaccaacuuccugacagaaaaagcuguggccuccgucaaacuugcgggaaauucuagccuguguccgaucaacgggugggcuguguacuccaaggacaauagcauuagaaucggcucuaagggggauguuuuugugauucgggagcccuucaucuccugcagccaucucgaaugucgcaccuuuuuccugacacagggagcccuucugaacgacaaacacucuaauggcaccgucaaggauagauccccucaucggacacucaugagcugccccaugggcgaggccccuucucccuauaacucccgcuuugaaagcguggcuugguccgccucugcuugucacgacgggaccagcuggcugacgauuggaaucuccggcccugauaauggggccguugcggugcugaaguacaacggaaucauuaccgacacaaucaaaagcuggagaaauaacauucuccggacccaagagucugagugcgccugugucaauggcuccugcuucacagugaugaccgaugggccgagcaacggacaggcuucucacaagaucuuuaaaauggaaaagggcaaagugauuaagagcgucgagcuggacgcccccaacuaucauuacgaagaguguuccugcuauccugaugcuggcgagaucacguguguuugccgcgacaauuggcacgggucuaacagacccugggugagcuucaaucagaaccuugaauaccagaucggauauauuugcuccggcguguuuggggauaauccucggcccaacgacggaacaggcagcugugggccggucucuuccaauggagccuacggcgugaagggcuucagcuuuaaauacgggaacggaguuuggaucggccgcaccaagucuacaaauuccagaagcggguucgagaugauuugggauccuaacggauggaccgaaaccgacucccgguuuucugugaaacaagacaucgucgcgauuacagauuggagcggcuauuccgggucuuucgugcagcaucccgagcugacgggccucgacugcauccgcccuuguuucuggguugaacugaucagaggacggcccaaggagagcaccauuuggacauccggcagcucuaucuccuuuugcggggugaauagcgauaccgucggauggucuuggcccgacggcgccgagcuuccuuucacaauugauaaauga

SEQ ID NO: 211770 - RNA, 1410 nt, Artificial Sequence; identical to SEQ ID NO: 208810
  derived and/or modified CDS sequence (opt5) from neuraminidase__InfluenzaA__ADM95650

SEQ ID NO: 211771 - RNA, 1410 nt, Artificial Sequence; identical to SEQ ID NO: 208810
  derived and/or modified CDS sequence (opt5) from neuraminidase__InfluenzaA__ADM95651

SEQ ID NO: 211772 - RNA, 1410 nt, Artificial Sequence
  derived and/or modified CDS sequence (opt5) from neuraminidase__InfluenzaA__ADM95652
augaaccccaaucagaagaucauuaccaucggcagcgugugcaugacaauugggauggccaaccugauccuccaaauuggaaauaucaucuccauuuggaucucucacagcauucagcugggcaaccagaaucagaucgagacguguaaccaauccgucauuaccuacgaaaauaacacauggguuaaucagaccuaugugaacaucucuaauacaaacuucgcugccgggcagagcguggucuccgugaaauuugcgggaaauucuagccuuugcccuguuuccggcugggcuauuuacagcaaggacaacucuaucagaaucggguccaaaggagauguguucgucauucgggagccguuuaucagcuguucuccccuggaaugccgcaccuucuuucucacacagggcgcccugcuuaaugacaagcauuccaacggcaccauuaaagauagaagcccuuaucggacgcugaugucuugucccaucggggaggugccuucccccuacaacagccgcuucgaauccguugccuggucugcuagcgccugccacgacggaauuaauuggcucaccaucggcaucuccgggccugauaacggagcuguggccguccugaaguauaauggcauuaucacagacaccauuaagagcuggagaaacaauauccugcggacacaagagucugagugugcgugcgugaacggguccuguuuuaccgugaugacggauggaccgagcgacggccaggccucuuacaaaauuuuccgcaucgaaaagggcaaaaucgucaagagcguugagaugaaugcucccaacuaucauuacgaagagugcuccuguuacccugauucuagcgagauuacaugcgugugcagagacaauuggcacggguccaaccggcccugggugagcuuuaaucagaaccucgaauaucagaucggauacauuuguucuggcaucuucggggauaauccucgccccaacgacaaaaccggaaauugcggcccggucuccagcaacggggccaacggagugaagggcuuuucuuucaaguauggcaaugggguuuggauuggaagaacaaaauccaucagcucccggaacggcuuugagaugauuugggauccuaauggguggaccggaaccgacaacaauuucucuaucaagcaagacaucgugggcauuaacgaauggagcggguacuccggcucuuucguccagcaucccgagcugacaggacuugauuguauccgcccuugcuuuuggguggaacugauuagaggccggcccaaagagaauacgaucuggaccagcggguccagcauuucuuucuguggaguuaacuccgacacagugggcuggagcuggcccgauggggcugagcucccuuuuaccaucgacaaguga

SEQ ID NO: 211773 - RNA, 1410 nt, Artificial Sequence
  derived and/or modified CDS sequence (opt5) from neuraminidase__InfluenzaA__ADM95654
augaaccccaaucagaagaucauuaccaucggcagcgugugcaugacaauugggauggccaaccugauccuccaaauuggaaauaucaucuccauuuggaucucucacagcauucagcugggcaaccagaaucagaucgagacguguaaccaauccgucauuaccuacgaaaauaacacauggguuaaucagaccuaugugaacaucucuaauacaaacuucgcugccgggcagagcguggucuccgugaaacuugcgggaaauucuagccugugcccuguuuccggcugggcuauuuacagcaaggacaacucuaucagaaucggguccaaaggagauguguuugucauucgggagccguucaucagcuguucuccccucgaaugccgcaccuuuuuccugacacagggcgcccuucugaaugacaagcauuccaacggcaccauuaaagauagaagcccuuaucggacgcucaugucuugucccaucggggaggugccuucccccuacaacagccgcuuugaauccguugccuggucugcuagcgccugccacgacggaauuaauuggcugaccaucggcaucuccgggccugauaacggagcuguggccguccugaaguauaauggcauuaucacagacaccauuaagagcuggagaaacaauauccuccggacacaagagucugagugugcgugcgugaacggguccuguuucaccgugaugacggauggaccgagcgacggccaggccucuuacaaaauuuuucgcaucgaaaagggcaaaaucgucaagagcguugagaugaaugcucccaacuaucauuacgaagagugcuccuguuacccugauucuagcgagauuacaugcgugugcagagacaauuggcacggguccaaccggcccugggugagcuucaaucagaaccuggaauaucagaucggauacauuuguucuggcaucuuuggggauaauccucgccccaacgacaaaaccggauccugcggcccggucagcucuaauggggccaacggagugaagggcuucuccuuuaaguauggcaacgggguuuggauuggaagaacaaaaagcaucuccucucggcauggcuucgagaugauuugggauccuaauggguggaccggaaccgacaacaauuuuagcaucaagcaagacaucgugggcacaaacgaaugguccggguacucuggcagcuucguccagcaccccgagcuuacgggacuggauuguauucgcccuugcuucuggguggaacucaucagaggccggcccaaagagaauaccauuuggacauccgggagcucuaucuccuuuuguggaguuaacagcgacaccgugggcuggucuuggcccgauggggcugagcugccuuucacaauugacaaguga

SEQ ID NO: 211774 - RNA, 1410 nt, Artificial Sequence
  derived and/or modified CDS sequence (opt5) from neuraminidase__InfluenzaA__ADM95655
augaaccccaaucagaagaucauuaccaucggcagcgugugcaugacaauugggauggccaaccugauccuccaaauuggaaauaucaucuccauuuggaucucucacagcauucagcugggcaaccagaaucagaucgagacguguaaccaauccgucauuaccuacgaaaauaacacauggguuaaucagaccuaugugaacaucucuaauacaaacuucgcugccgggcagagcguggucuccgugaaacuugcgggaaauucuagccugugcccuguuuccggcugggcuauuuacagcaaggacaacucuaucagaaucggguccaaaggagauguguuugucauucgggagccguucaucagcuguucuccccucgaaugccgcaccuuuuuccugacacagggcgcccuucugaaugacaagcauuccaacggcaccauuaaagauagaagcccuuaucggacgcucaugucuugucccaucggggaggugccuucccccuacaacagccgcuuugaauccguugccuggucugcuagcgccugccacgacggaauuaauuggcugaccaucggcaucuccgggccugauaacggagcuguggccguccugaaguauaauggcauuaucacagacaccauuaagagcuggagaaacaauauccuccggacacaagagucugagugugcgugcgugaacggguccuguuucaccgugaugacggauggaccgagcgacggccaggccucuuacaaaauuuuucgcaucgaaaagggcaaaaucgucaagagcguugagaugaaugcucccaacuaucauuacgaagagugcuccuguuacccugauucuagcgagauuacaugcgugugcagagacaauuggcacggguccaaccggcccugggugagcuucaaucagaaccuggaauaucagaucggauacauuuguucuggcaucuuuggggauaauccucgccccuccgacaaaaccggaagcugcggcccggucucuuccaacggggccaauggagugaagggcuucagcuuuaaguauggcaacgggguuuggauuggaagaacaaaauccaucucuagccggaacggcuucgagaugauuugggauccuaauggguggaccggaaccgacaacgacuuuuccaucaagcaagauaucgugggcauuaaugaauggucuggguacagcggcuccuucguccagcaucccgagcuuacaggacuggacuguauccgcccuugcuucuggguggaacucauuagaggccggcccaaagagaacacgaucuggaccagcgggucuuccauuagcuuuuguggaguuaauucugauacagugggcugguccuggcccgacggggcugagcugccuuucaccaucgauaaguga

SEQ ID NO: 211775 - RNA, 1410 nt, Artificial Sequence; identical to SEQ ID NO: 210422
  derived and/or modified CDS sequence (opt5) from neuraminidase__InfluenzaA__ADM95656

SEQ ID NO: 211776 - RNA, 1410 nt, Artificial Sequence; identical to SEQ ID NO: 209987
  derived and/or modified CDS sequence (opt5) from neuraminidase__InfluenzaA__ADM95658

SEQ ID NO: 211777 - RNA, 1410 nt, Artificial Sequence
  derived and/or modified CDS sequence (opt5) from neuraminidase__InfluenzaA__ADM95659
augaaccccaaucagaagaucauuaccaucggcagcgugugcaugacaauugggauggccaaccugauccuccaaauuggaaauaucaucuccauuuggaucucucacagcauucagcugggcaaccagaaucagaucgagacguguaaccaauccgucauuaccuacgaaaauaacacauggguuaaucagaccuaugugaacaucucuaauacaaacuucgcugccgggcagagcguggucuccgugaaacuugcgggaaauucuagccugugcccuguuuccggcugggcuauuuacagcaaggacaacucuaucagaaucggguccaaaggagauguguuugucauucgggagccguucaucagcuguucuccccucgaaugccgcaccuuuuuccugacacagggcgcccuucugaaugacaagcauuccaacggcaccauuaaagauagaagcccuuaucggacgcucaugucuugucccaucggggaggugccuucccccuacaacagccgcuuugaauccguugccuggucugcuagcgccugccacgacggaauuaauuggcugaccaucggcaucuccgggccugauaacggagcuguggccguccugaaguauaauggcauuaucacagacaccauuaagagcuggagaaacaauauccuccggacacaagagucugagugugcgugcgugaacggguccuguuucaccgugaugacggauggaccgagcgacggccaggccucuuacaaaauuuuucgcaucgaaaagggcaaaaucgucaagagcguugagaugaaugcucccaacuaucauuacgaagagugcuccuguuacccugauucuagcgagauuacaugcgugugcagagacaauuggcacggguccaaccggcccugggugagcuucaaucagaaccuggaauaucagaucggauacauuuguucuggcaucuuuggggauaauccucgccccaacgacaaaaccggauccugcggcccggucagcucuaauggggccaacggagugaagggcuucuccuuuaaguauggcaacgggguuuggauuggaagaacaaaaagcaucuccucucggagcggcuucgagaugauuugggauccuaauggguggaccggaaccgacaacaauuuuuccaucaagcaagacaucauuggcacaaacgaauggucuggguacagcggcuccuucgugcagcaucccgagcuuacgggacuggauuguauccgcccuugcuucugggucgaacucauuagaggccggcccaaagagaauaccaucuggacaagcgggucuuccauuagcuuuuguggagugaacucugacaccguuggcugguccuggcccgauggggcugagcugccuuucacaaucgacaaguga

SEQ ID NO: 211778 - RNA, 1410 nt, Artificial Sequence; identical to SEQ ID NO: 208810
  derived and/or modified CDS sequence (opt5) from neuraminidase__InfluenzaA__ADM95660

SEQ ID NO: 211779 - RNA, 1410 nt, Artificial Sequence
  derived and/or modified CDS sequence (opt5) from neuraminidase__InfluenzaA__ADM95661
augaaccccaaucagaagaucauuaccaucggcagcgugugcaugacaauugggauggccaaccugauccuccaaauuggaaauaucaucuccauuuggaucucucacagcauucagcugggcaaccagaaucagaucgagacguguaaccaauccgucauuaccuacgaaaauaacacauggguuaaucagaccuaugugaacaucucuaauacaaacuucgcugccgggcagagcguggucuccgugaaacuugcgggaaauucuagccugugcccuguuuccggcugggcuauuuacagcaaggacaacucuaucagaaucggguccaaaggagauguguuugucauucgggagccguucaucagcuguucuccccucgaaugccgcaccuuuuuccugacacagggcgcccuucugaaugacaagcauuccaacggcaccauuaaagauagaagcccuuaucggacgcucaugucuugucccaucggggaggugccuucccccuacaacagccgcuuugaauccguugccuggucugcuagcgccugccacgacggaauuaauuggcugaccaucggcaucuccgggccugauaacggagcuguggccguccugaaguauaauggcauuaucacagacaccauuaagagcuggagaaacaauauccuccggacacaagagucugagugugcgugcgugaacggguccuguuucaccgugaugacggauggaccgagcgacggccaggccucuuacaaaauuuuucgcaucgaaaagggcaaaaucgucaagagcguugagaugaaugcucccaacuaucauuacgaagagugcuccuguuacccugauucuagcgagauuacaugcgugugcagagacaauuggcacggguccaaccggcccugggugagcuucaaucagaaccuggaauaucagaucggauacauuuguucuggcaucuuuggggauaauccucgccccaacgacaaaaccggauccugcggcccggucagcucuaauggggccaacggagugaagggcuucuccuuuaaguauggcaacgggguuuggauuggaagaacaaaaagcaucuccucucggaauggcuucgagaugauuugggauccuaacggguggaccggaaccgacaauaacuuuagcaucaagcaagacaucgugggcacaaaugaaugguccggguacucuggcagcuucguccagcaucccgagcuuacgggacuggauuguauucgcccuugcuucuggguggaacucaucagaggccggcccaaagagaacaccauuuggacauccgggagcaucauuucuuuuuguggaguuaauuccgacaccgugggcuggagcuggcccgauggggcugagcugccuuucacaaucgacaaguga

SEQ ID NO: 211780 - RNA, 1410 nt, Artificial Sequence; identical to SEQ ID NO: 210422
  derived and/or modified CDS sequence (opt5) from neuraminidase__InfluenzaA__ADM95662

SEQ ID NO: 211781 - RNA, 1410 nt, Artificial Sequence
  derived and/or modified CDS sequence (opt5) from neuraminidase__InfluenzaA__ADM95663
augaaccccaaucagaagaucauuaccaucggcagcgugugcaugacaauugggauggccaaccugauccuccaaauuggaaauaucaucuccauuuggaucucucacagcauucagcugggcaaccagaaucagaucgagacguguaaccaauccgucauuaccuacgaaaauaacacauggguuaaucagaccuaugugaacaucucuaauacaaacuucgcugccgggcagagcguggucuccgugaaacuugcgggaaauucuagccugugcccuguuaacggcugggcuauuuacuccaaggacaauagcaucagaaucgggucuaaaggagauguguuugucauucgggagccguucaucuccuguagcccccucgaaugccgcaccuuuuuccugacacagggcgcccuucugaacgacaagcauucuaacggcaccauuaaagauagauccccuuaucggacgcucaugagcugucccaucggggaggugccuucucccuacaauucccgcuuugaaagcguugccugguccgcuucugccugccacgacggaauuaacuggcugaccaucggcaucagcgggccugauaauggagcuguggccguccugaaguauaacggcauuaucacagacaccauuaaguccuggagaaauaacauccuccggacacaagagagcgagugugcgugcgugaaugggucuuguuucaccgugaugacggauggaccguccgacggccaggccagcuacaaaauuuuucgcaucgaaaagggcaaaaucgucaagucuauugagaugaacgcucccaauuaucauuacgaagagugcagcuguuacccugauuccucugagaucacaugcguuugcagagacaacuggcacgggagcaaucggcccuggguguccuucaaccagaaucuggaauaucagauuggauacaucuguagcggcauuuuuggggauaacccucgccccaaugacaaaaccggaucuugcggcccgguguccagcaacggggccaacggagucaagggcuucucuuuuaaguauggcaaugggguguggaucggaagaacaaaauccauuagcucccggaacggcuucgagaugaucugggauccuaauggguggaccggaaccgacaacaauuuuucuaucaagcaagacauuguuggcacaaacgaauggagcggguacuccggcucuuucgugcagcaucccgagcuuacgggacuggauuguauccgcccuugcuucugggucgaacucauuagaggccggcccaaagagaauaccaucuggacaagcggguccauuaucagcuuuuguggagugaacucugacaccguuggcugguccuggcccgauggggcugagcugccuuucacaaucgacaaguga

SEQ ID NO: 211782 - RNA, 1410 nt, Artificial Sequence; identical to SEQ ID NO: 210422
  derived and/or modified CDS sequence (opt5) from neuraminidase__InfluenzaA__ADM95664

SEQ ID NO: 211783 - RNA, 1410 nt, Artificial Sequence; identical to SEQ ID NO: 210422
  derived and/or modified CDS sequence (opt5) from neuraminidase__InfluenzaA__ADM95665

SEQ ID NO: 211784 - RNA, 1410 nt, Artificial Sequence
  derived and/or modified CDS sequence (opt5) from neuraminidase__InfluenzaA__ADM95666
augaaccccaaucagaagaucauuaccaucggcagcgugugcaugacaauugggauggccaaccugauccuccaaauuggaaauaucaucuccauuuggaucucucacagcauucagcugggcaaccagaaucagaucgagacguguaaccaauccgucauuaccuacgaaaauaacacauggguuaaucagaccuaugugaacaucucuaauacaaacuucgcugccgggcagagcguggucuccgugaaacuugcgggaaauucuagccugugcccuguuaacggcugggcuauuuacuccaaggacaauagcaucagaaucgggucuaaaggagauguguuugucauucgggagccguucaucuccuguagcccccucgaaugccgcaccuuuuuccugacacagggcgcccuucugaacgacaagcauucuaacggcaccauuaaagauagauccccuuaucggacgcucaugagcugucccaucggggaggugccuucucccuacaauucccgcuuugaaagcguugccugguccgcuucugccugccacgacggaauuaacuggcugaccaucggcaucagcgggccugauaauggagcuguggccguccugaaguauaacggcauuaucacagacaccauuaaguccuggagaaauaacauccuccggacacaagagagcgagugugcgugcgugaaugggucuuguuucaccgugaugacggauggaccguccgacggccaggccagcuacaaaauuuuuaagaucgaaaaaggcaagaucgucaaaucuguugagaugaacgcucccaauuaucauuacgaagagugcagcuguuacccugauuccucugagauuacaugcgugugccgcgacaacuggcacgggagcaauagacccuggguguccuucaaccagaaucuggaauaucagaucggauacauuuguagcggcaucuuuggggauaacccucggcccaaugacaagaccggaucuugcggcccggucuccuucaacggggccaacggagugaagggcuuuagcuucaaauauggcaaugggguuuggauuggacgcacaaagucuaucuccagcagaaacggcuuugagaugauuugggauccuaauggguggaccggaaccgacaacaauuucuccaucaaacaagacaucgugggcacaaacgaauggucuggguacagcggcuccuucguccagcaucccgagcuuacgggacuggauuguauucggccuugcuuuuggguggaacucauccgcggcagacccaaggagaauaccauuuggacaucugggagcaucauuuccuucuguggaguuaacagcgacaccgugggcuggucuuggcccgauggggcugagcugccuuuuacaaucgacaaauga

SEQ ID NO: 211785 - RNA, 1410 nt, Artificial Sequence; identical to SEQ ID NO: 210422
  derived and/or modified CDS sequence (opt5) from neuraminidase__InfluenzaA__ADM95667

SEQ ID NO: 211786 - RNA, 1410 nt, Artificial Sequence; identical to SEQ ID NO: 210422
  derived and/or modified CDS sequence (opt5) from neuraminidase__InfluenzaA__ADM95668

SEQ ID NO: 211787 - RNA, 1410 nt, Artificial Sequence; identical to SEQ ID NO: 208810
  derived and/or modified CDS sequence (opt5) from neuraminidase__InfluenzaA__ADM95669

SEQ ID NO: 211788 - RNA, 1410 nt, Artificial Sequence; identical to SEQ ID NO: 208810
  derived and/or modified CDS sequence (opt5) from neuraminidase__InfluenzaA__ADM95670

SEQ ID NO: 211789 - RNA, 1410 nt, Artificial Sequence
  derived and/or modified CDS sequence (opt5) from neuraminidase__InfluenzaA__ADM95672
augaaccccaaucagaagaucauuaccaucggcagcgugugcaugacaauugggauggccaaccugauccuccaaauuggaaauaucaucuccauuuggaucucucacacgauucagcugggcaaccagaaucagaucgagaccuguaaccaaagcgucauuacauacgaaaauaacaccuggguuaaucagacauaugugaacaucuccaauaccaacuucgcugccgggcagucuguggucagcgugaaacuugcgggaaauuccucucugugcccuguuagcggcugggcuauuuacuccaaggacaacagcaucagaaucgggucuaaaggagauguguuugucauucgggagccguucaucuccuguagcccccucgaaugccgcacauuuuuccugacccagggcgcccuucugaaugacaagcauucuaacggcacgauuaaagauagauccccuuaucggacccucaugagcugucccaucggggaggugccuucucccuacaacucccgcuuugaaagcguugccugguccgcuucugccugccacgacggaauuaauuggcugacaaucggcaucagcgggccugauaacggagcuguggccguccugaaguauaauggcauuaucaccgacacaauuaaguccuggagaaacaauauccuccggacccaagagagcgagugugcgugcgugaacgggucuuguuucacggugaugacagauggaccguccgacggccaggccagcuacaaaauuuuucgcaucgaaaagggcaaaaucgucaagucuguugagaugaaugcucccaacuaucauuacgaagagugcagcuguuacccugauuccucugagauuaccugcgugugcagagacaauuggcacgggagcaaccggcccuggguguccuucaaucagaaccuggaauaucagaucggauacauuuguagcggcaucuuuggggauaauccucgccccaacgacaaaacaggaucuugcggcccggucuccagcaauggggccaacggagugaagggcuucucuuuuaaguauggcaacgggguuuggauuggaagaaccaaauccaucagcucccggaauggcuucgagaugauuugggauccuaacggguggaccggaacagacaauaacuuuucuaucaagcaagacaucgugggcacgaaugaauggagcggguacuccggcucuuucguccagcaucccgagcuuaccggacuggauuguauucgcccuugcuucuggguggaacucaucagaggccggcccaaagagaacacaauuuggaccagcggguccagcaucucuuuuuguggaguuaauuccgacacagugggcuggagcuggcccgauggggcugagcugccuuucaccauugacaaguga

SEQ ID NO: 211790 - RNA, 1410 nt, Artificial Sequence; identical to SEQ ID NO: 208810
  derived and/or modified CDS sequence (opt5) from neuraminidase__InfluenzaA__ADM95673

SEQ ID NO: 211791 - RNA, 1410 nt, Artificial Sequence; identical to SEQ ID NO: 210422
  derived and/or modified CDS sequence (opt5) from neuraminidase__InfluenzaA__ADM95674

SEQ ID NO: 211792 - RNA, 1410 nt, Artificial Sequence; identical to SEQ ID NO: 208810
  derived and/or modified CDS sequence (opt5) from neuraminidase__InfluenzaA__ADM95675

SEQ ID NO: 211793 - RNA, 1410 nt, Artificial Sequence
  derived and/or modified CDS sequence (opt5) from neuraminidase__InfluenzaA__ADM95677
augaaccccaaucagaagaucauuaccaucggcagcgugugcaugacaauugggauggccaaccugauccuccaaauuggaaauaucaucuccauuuggaucucucacagcauucagcugggcaaccagaaucagaucgagacguguaaccaauccgucauuaccuacgaaaauaacacauggguuaaucagaccuaugugaacaucucuaauacaaacuucgcugccgggcagagcguggucuccgugaaacuugcgggaaauucuagccugugcccuguuaacggcugggcuauuuacuccaaggacaauagcaucagaaucgggucuaaaggagauguguuugucauucgggagccguucaucuccuguagcccccucgaaugccgcaccuuuuuccugacacagggcgcccuucugaacgacaagcauucuaacggcaccauuaaagauagauccccuuaucggacgcucaugagcugucccaucggggaggugccuucucccuacaauucccgcuuugaaagcguugccugguccgcuucugccugccacgacggaauuaacuggcugaccaucggcaucagcgggccugauaauggagcuguggccguccugaaguauaacggcauuaucacagacaccauuaaguccuggagaaauaacauccuccggacacaagagagcgagugugcgugcgugaaugggucuuguuucaccgugaugacggauggaccguccgacggccaggccagcuacaaaauuuuucgcaucgaaaagggcaaaaucgucaagucuguugagaugaacgcucccaauuaucauuacgaagagugcagcuguuacccugauuccucugagauuacaugcgugugcagagacaacuggcacgggagcaaucggcccuggguguccuucaaccagaaucuggaauaucagaucggauacauuuguagcggcaucuuuggggauaacccucgccccaaugacaaaaccggaucuugcggcccggucuccagcaacggggccaacggagugaagggcuucucuuuuaaguauggcaaugggguuuggauuggaagaacaaaauccaucagcucccggaacggcuucgagaugauuugggauccuaauggguggaccggaaccgacaacaauuuuucuaucaagcaagacaucgugggcacaaacgaauggagcggguacuccggcucuuucguccagcaucccgagcuuacgggacuggauuguauucgcccuugcuucuggguggaacucaucagaggccggcccaaagagaauaccauuuggacaagcggguccaucauuagcuuuuguggaguuaacucugacaccgugggcugguccuggcccgauggggcugagcugccuuucacaaucgacaaguga

SEQ ID NO: 211794 - RNA, 1410 nt, Artificial Sequence
  derived and/or modified CDS sequence (opt5) from neuraminidase__InfluenzaA__ADM95678
augaaccccaaucagaagaucauuaccaucggcagcgugugcaugacaauugggauggccaaccugauccuccaaauuggaaauaucaucuccauuuggaucucucacagcauucagcugggcaaccagaaucagaucgagacguguaaccaauccgucauuaccuacgaaaauaacacauggguuaaucagaccuaugugaacaucucuaauacaaacuucgcugccgggcagagcguggucuccgugaaauuugcgggaaauucuagccuuugcccuguuuccggcugggcuauuuacagcaaggacaacucuaucagaaucggguccaaaggagauguguucgucauucgggagccguuuaucagcuguucuccccuggaaugccgcaccuucuuucucacacagggcgcccugcuuaaugacaagcauuccaacggcaccauuaaagauagaagcccuuaucggacgcugaugucuugucccaucggggaggugccuucccccuacaacagccgcuucgaauccguugccuggucugcuagcgccugccacgacggaauuaauuggcucaccaucggcaucuccgggccugauaacggagcuguggccguccugaaguauaauggcauuaucacagacaccauuaagagcuggagaaacaauauccugcggacacaagagucugagugugcgugcgugaacggguccuguuuuaccgugaugacggauggaccgagcgacggccaggccucuuacaaaauuuuccgcaucgaaaagggcaaaaucgucaagagcguugagaugaaugcucccaacuaucauuacgaagagugcuccuguuacccugauucuagcgagauuacaugcgugugcagagacaauuggcacggguccaaccggcccugggugagcuuuaaucagaaccucgaauaucagaucggauacauuuguucuggcaucuucggggauaauccucgccccaacgacaaaaccggauccugcggcccggucagcucuaauggggccaacggagugaagggcuuuuccuucaaguauggcaacgggguuuggauuggaagaacaaaaagcaucuccucucggaauggcuuugagaugauuugggauccuaacggguggaccggaaccgacaauaacuucagcaucaagcaagacaucgugggcauuaaugaaugguccggguacucuggcagcuucguccagcaucccgagcugacaggacuugauuguauccgcccuugcuuuuggguggaacugauuagaggccggcccaaagagaacacgaucuggaccuccgggagcucuauuuccuucuguggaguuaauagcgacacagugggcuggucuuggcccgauggggcugagcucccuuuuaccaucgacaaguga

SEQ ID NO: 211795 - RNA, 1410 nt, Artificial Sequence; identical to SEQ ID NO: 211793
  derived and/or modified CDS sequence (opt5) from neuraminidase__InfluenzaA__ADM95679

SEQ ID NO: 211796 - RNA, 1410 nt, Artificial Sequence; identical to SEQ ID NO: 211793
  derived and/or modified CDS sequence (opt5) from neuraminidase__InfluenzaA__ADM95680

SEQ ID NO: 211797 - RNA, 1410 nt, Artificial Sequence; identical to SEQ ID NO: 208810
  derived and/or modified CDS sequence (opt5) from neuraminidase__InfluenzaA__ADM95681

SEQ ID NO: 211798 - RNA, 1410 nt, Artificial Sequence
  derived and/or modified CDS sequence (opt5) from neuraminidase__InfluenzaA__ADM95682
augaaccccaaucagaagaucauuaccaucggcagcgugugcaugacaauugggauggccaaccugauccuccaaauuggaaauaucaucuccauuuggaucucucacagcauucagcugggcaaccagaaucagaucgagauuuguaaccaauccgucaucacguacgaaaauaacaccuggguuaaucagacauaugugaacauuucuaauaccaacuucgcugccgggcagagcguggucuccgugaaacuugcgggaaauucuagccugugcccuguuuccggcugggcuaucuacagcaaggacaacucuaucagaauuggguccaaaggagauguguuugucauccgggagccguucauuagcuguucuccccucgaaugccgcacauuuuuccugacccagggcgcccuucugaaugacaagcauuccaacggcacaaucaaagauagaagcccuuaucggacccucaugucuugucccauuggggaggugccuucccccuacaacagccgcuuugaauccguugccuggucugcuagcgccugccacgacggaaucaauuggcugacgaucggcauuuccgggccugauaacggagcuguggccguccugaaguauaauggcaucauuaccgacacaaucaagagcuggagaaacaauauucuccggacccaagagucugagugugcgugcgugaacggguccuguuucacagugaugaccgauggaccgagcgacggccaggccucuuacaaaaucuuucgcaucgaaaagggcaaaauugucaagagcguugagaugaaugcucccaacuaucauuacgaagagugcuccuguuacccugauucuagcgagaucacgugcgugugcagagacaauuggcacggguccaaccggcccugggugagcuucaaucagaaccuggaauaucagauuggauacaucuguucuggcauuuuuggggauaauccucgccccaacgacaaaacaggauccugcggcccggucagcucuaauggggccaacggagugaagggcuucuccuuuaaguauggcaacgggguuuggaucggaagaaccaaaagcauuuccucucggaauggcuucgagaugaucugggauccuaacggguggacaggaaccgacaauaacuuuagcaucaagcaagacauugugggcaccaaugaaugguccggguacucuggcagcuucguccagcaucccgagcuuacaggacuggauuguauccgcccuugcuucuggguggaacucauuagaggccggcccaaagagaacacgaucuggaccuccgggagcucuauuuccuuuuguggaguuaauagcgacacagugggcuggucuuggcccgauggggcugagcugccuuucaccaucgacaaguga

SEQ ID NO: 211799 - RNA, 1410 nt, Artificial Sequence
  derived and/or modified CDS sequence (opt5) from neuraminidase__InfluenzaA__ADM95683
augaaccccaaucagaagaucauuaccaucggcagcgugugcaugacaauugggauggccaaccugauccuccaaauuggaaauaucaucuccauuuggaucucucacagcauucagcugggcaaccagaaucagaucgagacguguaaccaauccgucauuaccuacgaaaauaacacauggguuaaucagaccuaugugaacaucucuaauacaaacuucgcugccgggcagagcguggucuccgugaaacuugcgggaaauucuagccugugcccuguuuccggcugggcuauuuacagcaaggacaacucuaucagaaucggguccaaaggagauguguuugucauucgggagccguucaucagcuguucuccccucgaaugccgcaccuuuuuccugacacagggcgcccuucugaaugacaagcauuccaacggcaccauuaaagauagaagcccuuaucggacgcucaugucuugucccaucggggaggugccuucccccuacaacagccgcuuugaauccguugccuggucugcuagcgccugccacgacggaauuaauuggcugaccaucggcaucuccgggccugauaacggagcuguggccguccugaaguauaauggcauuaucacagacaccauuaagagcuggagaaacaauauccuccggacacaagagucugagugugcgugcgugaacggguccuguuucaccgugaugacggauggaccgagcgacggccaggccucuuacaaaauuuuucgcaucgaaaagggcaaaaucgucaagagcguugagaugaaugcucccaacuaucauuacgaagagugcuccuguuacccugauucuagcgagauuacaugcgugugcagagacaauuggcacggguccaaccggcccugggugagcuucaaucagaaccuggaauaucagaucggauacauuuguucuggcaucuuuggggauaauccucgccccaacgacaaaaccggauccugcggcccggucagcucuaauggggccaacggagugaagggcuucuccuuuaaguauggcaacgggguuuggauuggaagaacaaaaagcaucuccucucggaauggcuucgagaugauuugggauccuaacggguggaccggaaccgacaauaacuuuagcaucaagcaagacaucgugggcauuaaugaaugguccggguacucuggcagcuucguccagcaucccgagcuuacaggacuggauuguauccgcccuugcuucuggguggaacucauuagaggccggcccaaagagaacacgaucuggaccuccgggagcucuauguccuuuuguggaguuaauagcgacacagugggcuggucuuggcccgauggggcugagcugccuuucaccauugacaaguga

SEQ ID NO: 211800 - RNA, 1410 nt, Artificial Sequence; identical to SEQ ID NO: 208810
  derived and/or modified CDS sequence (opt5) from neuraminidase__InfluenzaA__ADM95684

SEQ ID NO: 211801 - RNA, 1410 nt, Artificial Sequence
  derived and/or modified CDS sequence (opt5) from neuraminidase__InfluenzaA__ADM95685
augaaccccaaucagaagaucauuaccaucggcagcgugugcaugacaauugggauggccaaccugauccuccaaauuggaaauaucaucuccauuuggaucucucacagcauucagcugggcaaccagaaucagaucgagacguguaaccaauccgucauuaccuacgaaaauaacacauggguuaaucagaccuaugugaacaucucuaauacaaacuucgcugccgggcagagcguggucuccgugaaacuugcgggaaauucuagccugugcccuguuuccggcugggcuauuuacagcaaggacaacucuaucagaaucggguccaaaggagauguguuugucauucgggagccguucaucagcuguucuccccucgaaugccgcaccuuuuuccugacacagggcgcccuucugaaugacaagcauuccaacggcaccauuaaagauagaagcccuuaucggacgcucaugucuugucccaucggggaggugccuucccccuacaacagccgcuuugaauccguugccuggucugcuagcgccugccacgacggaauuaauuggcugaccaucggcaucuccgggccugauaacggagcuguggccguccugaaguauaauggcauuaucacagacaccauuaagagcuggagaaacaauauccuccggacacaagagucugagugugcgugcgugaacggguccuguuucaccgugaugacggauggaccgagcgacggccaggccucuuacaaaauuuuucgcaucgaaaagggcaaaaucgucaagagcguugagaugaaugcucccaacuaucauuacgaagagugcuccuguuacccugauucuagcgagauuacaugcgugugcagagacaauuggcacggguccaaccggcccugggugagcuucaaucagaaccuggaauaucagaucggauacauuuguucuggcaucuuuggggauaauccucgccccaacgacaaaaccggauccugcggcccggucagcucuaauggggccaacggagugaagggcuucuccuuuaaguauggcaacgggguuuggauuggaagaacaaaaagcaucuccucucggcauggcuucgagaugauuugggauccuaauggguggaccggaaccgacaacaauuuuagcaucaagcaagacaucgugggcacaaacgaaugguccggguacucuggcagcuucguccagcaccccgagcuuacgggacuggauuguauucgcccuugcuucuggguggaacucaucagaggccggcccaaagagaauaccguuuggacauccgggagcucuauuuccuuuuguggagugaacagcgacaccgucggcuggucuuggcccgauggggcugagcugccuuucacaaucgacaaguga

SEQ ID NO: 211802 - RNA, 1410 nt, Artificial Sequence
  derived and/or modified CDS sequence (opt5) from neuraminidase__InfluenzaA__ADM95686
augaaccccaaucagaagaucauuaccaucggcagcgugugcaugacaauugggauggccaaccugauccuccaaauuggaaauaucaucuccauuuggaucucucacagcauucagcugggcaaccagaaucagaucgagacguguaaccaauccgucauuaccuacgaaaauaacacauggguuaaucagaccuaugugaacaucucuaauacaaacuucgcugccgggcagagcguggucuccgugaaacuugcgggaaauucuagccugugcccuguuuccggcugggcuauuuacagcaaggacaacucuaucagaaucggguccaaaggagauguguuugucauucgggagccguucaucagcuguucuccccucgaaugccgcaccuuuuuccugacacagggcgcccuucugaaugacaagcauuccaacggcaccauuaaagauagaagcccuuaucggacgcucaugucuugucccaucggggaggugccuucccccuacaacagccgcuuugaauccguugccuggucugcuagcgccugccacgacggaauuaauuggcugaccaucggcaucuccgggccugauaacggagcuguggccguccugaaguauaauggcauuaucacagacaccauuaagagcuggagaaacaauauccuccggacacaagagucugagugugcgugcgugaacggguccuguuucaccgugaugacggauggaccgagcgacggccaggccucuuacaaaauuuuucgcaucgaaaagggcaaaaucgucaagagcguugagaugaaugcucccaacuaucauuacgaagagugcuccuguuacccugauucuagcgagauuacaugcgugugcagagacaauuggcacggguccaaccggcccugggugagcuucaaucagaaccuggaauaucagaucggauacauuuguucuggcaucuuuggggauaauccucgccccaacgacaaaaccggauccugcggcccggucagcucuaauggggccaacggagugaagggcuucuccuuuaaguauggcaacgggguuuggauuggaagaacaaaaagcaucuccucucggaauggcuucgagaugauuugggauccuaacggguggaccggaaccgacaaugacuuuagcaucaagcaagauaucgugggcauuaacgaaugguccggguacucuggcagcuucguccagcaucccgagcuuacaggacuggacuguauccgcccuugcuucuggguggaacucauuagaggccggcccaaagagaauacgaucuggaccuccgggagcucuauuuccuuuuguggaguuaacagcgauacagugggcuggucuuggcccgacggggcugagcugccuuucaccaucgauaaguga

SEQ ID NO: 211803 - RNA, 1410 nt, Artificial Sequence; identical to SEQ ID NO: 208810
  derived and/or modified CDS sequence (opt5) from neuraminidase__InfluenzaA__ADM95687

SEQ ID NO: 211804 - RNA, 1410 nt, Artificial Sequence
  derived and/or modified CDS sequence (opt5) from neuraminidase__InfluenzaA__ADM95688
augaaccccaaucagaagaucauuaccaucggcagcgugugcaugacaauugggauggccaaccugauccuccaaauuggaaauaucaucuccauuuggaucucucacagcauucagcugggcaaccagaaucagaucgagacguguaaccaauccgucauuaccuacgaaaauaacacauggguuaaucagaccuaugugaacaucucuaauacaaacuucgcugccgggcagagcguggucuccgugaaacuugcgggaaauucuagccugugcccuguuuccggcugggcuauuuacagcaaggacaacucuaucagaaucggguccaaaggagauguguuugucauucgggagccguucaucagcuguucuccccucgaaugccgcaccuuuuuccugacacagggcgcccuucugaaugacaagcauuccaacggcaccauuaaagauagaagcccuuaucggacgcucaugucuugucccaucggggaggugccuucccccuacaacagccgcuuugaauccguugccuggucugcuagcgccugccacgacggaauuaauuggcugaccaucggcaucuccgggccugauaacggagcuguggccguccugaaguauaauggcauuaucacagacaccauuaagagcuggagaaacaauauccuccggacacaagagucugagugugcgugcgugaacggguccuguuucaccgugaugacggauggaccgagcgacggccaggccucuuacaaaauuuuucgcaucgaaaagggcaaaaucgucaagagcguugagaugaaugcucccaacuaucauuacgaagagugcuccuguuacccugauucuagcgagauuacaugcgugugcagagacaauuggcacggguccaaccggcccugggugagcuucaaucagaaccuggaauaucagaucggauacauuuguucuggcaucuuuggggauaauccucgccccaacgacaaaaccggauccugcggcccggucagcucuaauggggccaacggagugaagggcuucuccuuuaaguauggcaacgggguuuggauuggaagaacaaaaagcaucuccucucggaauggcuucgagaugauuugggauccuaacggguggaccggaaccgacaauaacuuuagcaucaagcaagacaucgugggcacaaaugaaugguccggguacucuggcagcuucguccagcaucccgagcuuacgcgccuggauuguauuagaccuugcuucuggguggaacucauccggggacgccccaaagagaacaccauuuggacauccggcagcaucauuucuuuuugugggguuaauuccgacaccgugggauggagcuggcccgauggcgcugagcugccuuucacaaucgacaaguga

SEQ ID NO: 211805 - RNA, 1410 nt, Artificial Sequence; identical to SEQ ID NO: 211802
  derived and/or modified CDS sequence (opt5) from neuraminidase__InfluenzaA__ADM95689

SEQ ID NO: 211806 - RNA, 1410 nt, Artificial Sequence
  derived and/or modified CDS sequence (opt5) from neuraminidase__InfluenzaA__ADM95690
augaaccccaaucagaagaucauuaccaucggcagcgugugcaugacaauugggauggccaaccugauccuccaaauuggaaauaucaucuccauuuggaucucucacagcauucagcugggcaaccagaaucagaucgagacguguaaccaauccgucauuaccuacgaaaauaacacauggguuaaucagaccuaugugaacaucucuaauacaaacuucgcugccgggcagagcguggucuccgugaaacuugcgggaaauucuagccugugcccuguuuccggcugggcuauuuacagcaaggacaacucuaucagaaucggguccaaaggagauguguuugucauucgggagccguucaucagcuguucuccccucgaaugccgcaccuuuuuccugacacagggcgcccuucugaaugacaagcauuccaacggcaccauuaaagauagaagcccuuaucggacgcucaugucuugucccaucggggaggugccuucccccuacaacagccgcuuugaauccguugccuggucugcuagcgccugccacgacggaauuaauuggcugaccaucggcaucuccgggccugauaacggagcuguggccguccugaaguauaauggcauuaucacagacaccauuaagagcuggagaaacaauauccuccggacacaagagucugagugugcgugcgugaacggguccuguuucaccgugaugacggauggaccgagcgacggccaggccucuuacaaaauuuuucgcaucgaaaagggcaaaaucgucaagagcguugagaugaaugcucccaacuaucauuacgaagagugcuccuguuacccugauucuagcgagauuacaugcgugugcagagacaauuggcacggguccaaccggcccugggugagcuucaaucagaaccuggaauaucagaucggauacauuuguucuggcaucuuuggggauaauccucgccccaacgacaaaaccggauccugcggcccggucagcucuaauggggccaacggagugaagggcuucuccuuuaaguauggcaacgggguuuggauuggaagaacaaaaagcaucuccucucggaauggcuucgagaugauuugggauccuaacggguggaccggaaccgacaauaacuuuagcaucaagcaagacaucauuggcacaaaugaaugguccggguacucuggcagcuucgugcagcaucccgagcuuacgggacuggauuguauccgcccuugcuucugggucgaacucauuagaggccggcccaaagagaacaccaucuggacauccgggagcucuauuuccuuuuguggagugaauagcgacaccguuggcuggucuuggcccgauggggcugagcugccuuucacaaucgacaaguga

SEQ ID NO: 211807 - RNA, 1410 nt, Artificial Sequence; identical to SEQ ID NO: 208810
  derived and/or modified CDS sequence (opt5) from neuraminidase__InfluenzaA__ADM95691

SEQ ID NO: 211808 - RNA, 1410 nt, Artificial Sequence
  derived and/or modified CDS sequence (opt5) from neuraminidase__InfluenzaA__ADM95692
augaaccccaaucagaagaucauuaccaucggcagcgugugcaugacaauugggauggccaaccugauccuccaaauuggaaauaucaucuccauuuggaucucucacagcauucagcugggcaaccagaaucagaucgagacguguaaccaauccgucauuaccuacgaaaauaacacauggguuaaucagaccuaugugaacaucauuaauacaaacuucgcugccgggcagucuguggucagcgugaaacuugcgggaaauuccucucugugcccuguuagcggcugggcuaucuacuccaaggacaacagcaucagaauugggucuaaaggagauguguuugucauccgggagccguucauuuccuguagcccccucgaaugccgcaccuuuuuccugacacagggcgcccuucugaaugacaagcauucuaacggcaccaucaaagauagauccccuuaucggacgcucaugagcugucccauuggggaggugccuucucccuacaacucccgcuuugaaagcguugccugguccgcuucugccugccacgacggaaucaauuggcugaccaucggcauuagcgggccugauaacggagcuguggccguccugaaguauaauggcaucauuacagacaccaucaaguccuggagaaacaauauucuccggacacaagagagcgagugugcgugcgugaacgggucuuguuucaccgugaugacggauggaccguccgacggccaggccagcuacaaaaucuuucgcaucgaaaagggcaaaauugucaagucuguugagaugaaugcucccaacuaucauuacgaagagugcagcuguuacccugauuccucugagaucacaugcgugugcagagacaauuggcacgggagcaaccggcccuggguguccuucaaucagaaccuggaauaucagauuggauacaucuguagcggcauuuuuggggauaauccucgccccaacgacaaaaccggaucuugcggcccggucuccagcaauggggccaacggagugaagggcuucucuuuuaaguauggcaacgggguuuggaucggaagaacaaaauccauuagcucccggaauggcuucgagaugaucugggauccuaacggguggaccggaaccgacaauaacuuuucuaucaagcaagacauugugggcaucaaugaauggagcggguacuccggcucuuucguccagcaucccgagcuuacaggacuggauuguauucgcccuugcuucuggguggaacucaucagaggccggcccaaagagaacacgauuuggaccagcggguccagcaucucuuuuuguggaguuaauuccgacacagugggcuggagcuggcccgauggggcugagcugccuuucaccaucgacaaguga

SEQ ID NO: 211809 - RNA, 1410 nt, Artificial Sequence; identical to SEQ ID NO: 208810
  derived and/or modified CDS sequence (opt5) from neuraminidase__InfluenzaA__ADM95693

SEQ ID NO: 211810 - RNA, 1410 nt, Artificial Sequence; identical to SEQ ID NO: 208810
  derived and/or modified CDS sequence (opt5) from neuraminidase__InfluenzaA__ADM95694

SEQ ID NO: 211811 - RNA, 1410 nt, Artificial Sequence; identical to SEQ ID NO: 208810
  derived and/or modified CDS sequence (opt5) from neuraminidase__InfluenzaA__ADM95695

SEQ ID NO: 211812 - RNA, 1410 nt, Artificial Sequence; identical to SEQ ID NO: 211802
  derived and/or modified CDS sequence (opt5) from neuraminidase__InfluenzaA__ADM95696

SEQ ID NO: 211813 - RNA, 1410 nt, Artificial Sequence; identical to SEQ ID NO: 210422
  derived and/or modified CDS sequence (opt5) from neuraminidase__InfluenzaA__ADM95697

SEQ ID NO: 211814 - RNA, 1413 nt, Artificial Sequence
  derived and/or modified CDS sequence (opt5) from neuraminidase__InfluenzaA__ADM95698
augaaccccaaucagaagaucauuaccaucggcagcauuuccaucgccauugggaucaucucucugaugcuccaaauuggaaacaucauuagcaucugggcuucccacucuauucagacaggcagccagaauaacacggggaucugcaaucagagaauuaucaccuacgagaacaauacaugggugaaccauaccuaugucaauaucaacaauacaaacguuguggccgaagaggacaaaaccuccgugacacuggcgggaaauucuagccuuuguuccauuagcggcugggcuaucuacaccaaggauaacucuauucggaucggguccaaaggagacgucuucgugauucgcgaaccuuuuaucagcugcucucaccuggaguguagaacguucuuucucacccaaggcgcccugcuuaaugauaagcauuccaacggcacaguuaaagaccggagcccguaucgcgcccugaugucuugcccccucggggaagcuccuucccccuacaacagcaaguucgaguccguggccuggucugcuagcgccugucacgauggaaugggcuggcugaccaucgggauuuccggaccugacaauggcgcggucgccgugcugaaguauaacgggaucauuacaggaaccaucaaaagcuggaagaaacagauucucagaacgcaggagucugaaugcguuuguaugaauggcuccugcuuuacaaucaugaccgauggccccagcaacaaggcugccucuuacaaaaucuucaagauugagaaggggaaagugacaaagagcaucgaacugaaugcuccuaacuuucauuaugaggaguguuccugcuacccggacaccggaauugucaugugugugugccgggauaauuggcacggcucuaaccgccccugggugagcuucaaucagaaccuugacuaccaaaucggguauauuugcuccggagucuuuggcgauaauccuagacccgaagacggggagggaagcuguaacccuguuaccguggauggcgccaauggcgugaaaggguucucuuacaaguaugacaacggagucuggaucggccggacaaaauccaaucgccugagaaagggguuugaaaugauuugggaccccaacggauggacgaacaccgauagcgacuucucugugaaacaggauguuguggcgaucacagacugguccggcuacagcggguccuuuguccagcacccggagcucaccggccuggauugcauccggccuuguuucuggguggaacuuguucgcggacagcccagagagaauacaaccauuuggacgucuggcagcuccaucucuuucugcggggugaacagcgacacagccaauugguccuggccugauggagcugagcugcccuuuaccauugacaaguga

SEQ ID NO: 211815 - RNA, 1413 nt, Artificial Sequence
  derived and/or modified CDS sequence (opt5) from neuraminidase__InfluenzaA__ADM95699
augaaccccaaucagaagaucauuaccaucggcagcauuuccaucgccauugggaucaucucucugaugcuccaaauuggaaacaucauuagcaucugggcuucccacucuauucagacaggcagccagaauaacacggggaucugcaaucagagaauuaucaccuacgagaacaauacaugggugaaccauaccuaugucaauaucaacaauacaaacguuguggccgaagaggacaaaaccuccgugacacuggcgggaaauucuagccuuuguuccauuagcggcugggcuaucuacaccaaggauaacucuauucggaucggguccaaaggagacgucuucgugauucgcgaaccuuuuaucagcugcucucaccuggaguguagaacguucuuucucacccaaggcgcccugcuuaaugauaagcauuccaacggcacaguuaaagaccggagcccguaucgcgcccugaugucuugcccccucggggaagcuccuucccccuacaacagcaaguucgaguccguggccuggucugcuagcgccugucacgauggaaugggcuggcugaccaucgggauuuccggaccugacaauggcgcggucgccgugcugaaguauaacgggaucauuacaggaaccaucaaaagcuggaagaaacagauucucagaacgcaggagucugaaugcguuuguaugaauggcuccugcuuuacaaucaugaccgauggccccagcaacaaggcugccucuuacaaaaucuucaagauugagaaggggaaagugacaaagagcaucgaacugaaugcuccuaacuuuuauuacgaggaguguuccugcuacccggacaccggaauugucaugugugugugccgggauaauuggcauggcucuaaccgccccugggugagcuucaaucagaaccuugacuaucaaaucggguacauuugcuccggagucuuuggcgauaauccuagacccgaagacggggagggaagcuguaacccuguuaccguggauggcgccaauggcgugaaaggguucucuuauaaguacgacaacggagucuggaucggccggacaaaauccaaucgccugagaaagggguuugaaaugauuugggaccccaacggauggacgaacaccgauagcgacuucucugugaaacaggauguuguggcgaucacagacugguccggcuauagcggguccuuuguccagcacccggagcucaccggccuggauugcauccggccuuguuucuggguggaacuuguucgcggacugcccagagagaauacaaccauuuggacgucuggcagcuccaucucuuucugcggggugaacagcgacacagccaauugguccuggccugauggagcugagcuccccuuuaccauugacaaguga

SEQ ID NO: 211816 - RNA, 1413 nt, Artificial Sequence
  derived and/or modified CDS sequence (opt5) from neuraminidase__InfluenzaA__ADM95701
augaaccccaaucagaagaucauuaccaucggcagcauuuccaucgccauugggaucaucucucugaugcuccaaauuggaaacaucauuagcaucugggcuucccacucuauucagacaggcagccagaauaacacggggaucugcaaucagagaauuaucaccuacgagaacaauacaugggugaaccauaccuaugucaauaucaacaauacaaacguuguggccgaagaggacaaaaccuccgugacacuggcgggaaauucuagccuuuguuccauuagcggcugggcuaucuacaccaaggauaacucuauucggaucggguccaaaggagacgucuucgugauucgcgaaccuuuuaucagcugcucucaccuggaguguagaacguucuuucucacccaaggcgcccugcuuaaugauaagcauuccaacggcacaguuaaagaccggagcccguaucgcgcccugaugucuugcccccucggggaagcuccuucccccuacaacagcaaguucgaguccguggccuggucugcuagcgccugucacgauggaaugggcuggcugaccaucgggauuuccggaccugacaauggcgcggucgccgugcugaaguauaacgggaucauuacaggaaccaucaaaagcuggaagaaacagauucucagaacgcaggagucugaaugcguuuguaugaauggcuccugcuuuacaaucaugaccgauggccccagcaacaaggcugccucuuacaaaaucuucaagauugagaaggggaaagugacaaagagcaucgaacugaaugcuccuaacuuucauuaugaggaguguuccugcuacccggacaccggaauugucaugugugugugccgggauaauuggcacggcucuaaccgccccugggugagcuucaaucagaaccuugacuaccaaaucggguauauuugcuccggagucuuuggcgauaauccuagacccgaagacggggagggaagcuguaacccuguuaccguggauggcgccaauggcgugaaaggguucucuuacaaguaugacaacggagucuggaucggccggacaaaauccaaucgccugagaaagggguuugaaaugauuugggaccccaacggauggacgaacaccgauagcgacuucucugugaaacaggauguuguggcgaucacagacugguccggcuacagcggguccuuuguccagcacccggagcucaccggccuggauugcauccggccuuguuucuggguggaacuuguucgcggacugcccagagagaauacaaccauuuggacgucuggcagcuccaucucuuucugcggggugaacagcgacacagccaauugguccuggccugauggagcugagcuccccuuuaccauugacaaguga

SEQ ID NO: 211817 - RNA, 1413 nt, Artificial Sequence
  derived and/or modified CDS sequence (opt5) from neuraminidase__InfluenzaA__ADM95702
augaaccccaaucagaagaucauuaccaucggcagcauuuccaucgccauugggaucaucucucugaugcuccaaauuggaaacaucauuagcaucugggcuucccacucuauucagacaggcagacagaauaacacggggaucugcaaucagcggauuaucaccuacgagaacagcacaugggugaaucauaccuaugucaacaucaauaacacaaaaguuguggccggagaagacaagaccuccgugacacuggcgggcaauucuagccuuuguuccauuagcgggugggcuaucuacaccaaagauaacucuauucgcaucggauccaagggcgacgucuucgugauuagagagccuuuuaucagcugcucucaccuggaaugucggacguucuuucucacccaaggcgcccugcuuaaugauaaacauuccaacgggacaguuaaggaccgcagcccguauagagcccugaugucuugcccccucggagaggcuccuucccccuacaauagcaaguucgaauccguggccuggucugcuagcgccugucacgauggcaugggguggcugaccaucggaauuuccggcccugacaacggggcggucgccgugcugaaauauaacggaaucauuacaggcaccaucaagagcuggaaaaagcagauucuccggacgcaggagucugagugcguuuguaugaauggcuccugcuuuacaaucaugaccgaugggcccagcaacaaagcugccucuuacaagaucuucaagauugaaaaaggaaaggugacaaaaagcaucgagcugaaugcuccuaacuuuuauuacgaagaguguuccugcuacccggacaccggcauugucaugugugugugccgcgauaauuggcaugggucuaacagacccugggugagcuucaaucagaaccuugacuaucaaaucggauacauuugcuccggcgucuuuggggauaauccucggcccgaggacggagaaggcagcuguaacccuguuaccguggauggcgccaauggggugaagggauucucuuauaaauacggcaacggggucuggaucggacgcacaaaguccaauagacugcggaaaggcuuugaggugauuugggaccccaacggguggacgaauaccgacagcgauuucucuguuaagcaggacguggucgcgaucacagauugguccggcuauagcggauccuuugugcagcacccggaacucaccggccuggacugcauccgcccuuguuucuggguugagcuugugagagggcugccccgggaaaacacaaccauuuggacgucuggaagcuccaucucuuucugcggcgucaacagcgauacagccaauugguccuggccugacggggcugagcuccccuuuaccauugauaaguga

SEQ ID NO: 211818 - RNA, 1413 nt, Artificial Sequence
  derived and/or modified CDS sequence (opt5) from neuraminidase__InfluenzaA__ADM95704
augaaccccaaucagaagaucauuaccaucggcagcauuuccaucgccauugggaucaucucucugaugcuccaaauuggaaacaucgugagcauuugggcuucccacucuauccagacaggcagccagaauaacacggggauuugcaaucagagaaucauuaccuacgagaacaauacaugggucaaccauaccuauguuaauaucaacaauacaaacgugguggccgaagaggacaaaaccuccgucacacuggcgggaaauucuagccuuuguuccaucagcggcugggcuauuuacaccaaggauaacucuauccggauuggguccaaaggagacguguucguuauccgcgaaccuuuuauuagcugcucucaccuggaguguagaacguucuuucucacccaaggcgcccugcuuaaugauaagcauuccaacggcacagugaaagaccggagcccguaucgcgcccugaugucuugcccccucggggaagcuccuucccccuacaacagcaaguucgaguccgucgccuggucugcuagcgccugucacgauggaaugggcuggcugaccaucgggaucuccggaccugacaauggcgcgguggccguucugaaguauaacgggauuaucacaggaaccauuaaaagcuggaagaaacagauccucagaacgcaggagucugaaugcguguguaugaauggcuccugcuuuacaauuaugaccgauggccccagcaaccgggcugccucuuacaagaucuucaaaaucgagaaggggaaggucacaaaaagcauugaacugaaugcuccuaacuuucauuaugaggaguguuccugcuacccggacaccggaaucgugaugugugugugccgcgauaauuggcacggcucuaacagacccugggucagcuucaaucagaaccuugacuaccaaauuggguauaucugcuccggaguuuuuggcgauaauccucggcccgaagacggggagggaagcuguaacccugugaccguggauggcgccaauggcgucaagggguucucuuacaaauaugacaacggaguguggauuggccgcacaaaguccaauagacugcggaaaggguuugaaaugaucugggaccccaacggauggacgaacaccgauagcgacuucucuguuaagcaggauguggucgcgauuacagacugguccggcuacagcggguccuuugugcagcacccggagcucaccggccuggauugcauccgcccuuguuucuggguugaacuugugagaggacugccccgggagaauacaaccaucuggacgucuggcagcuccauuucuuucugcggggucaacagcgacacagccaauugguccuggccugauggagcugagcuccccuuuaccaucgacaaauga

SEQ ID NO: 211819 - RNA, 1413 nt, Artificial Sequence
  derived and/or modified CDS sequence (opt5) from neuraminidase__InfluenzaA__ADM95705
augaaccccaaucagaagaucauuaccaucggcagcauuuccaucgccauugggaucaucucucugaugcuccaaauuggaaacaucauuagcaucugggcuucccacucuauucagacaggcagacagaauaacacggggaucugcaaucagcggauuaucaccuacgagaacagcacaugggugaaucauaccuaugucaacaucaauaacacaaaaguuguggccggagaagacaagaccuccgugacacuggcgggcaauucuagccuuuguuccauuagcgggugggcuaucuacaccaaagauaacucuauucgcaucggauccaagggcgacgucuucgugauuagagagccuuuuaucagcugcucucaccuggaaugucggacguucuuucucacccaaggcgcccugcuuaaugauaaacauuccaacgggacaguuaaggaccgcagcccguauagagcccugaugucuugcccccucggagaggcuccuucccccuacaauagcaaguucgaauccguggccuggucugcuagcgccugucacgauggcaugggguggcugaccaucggaauuuccggcccugacaacggggcggucgccgugcugaaauauaacggaaucauuacaggcaccaucaagagcuggaaaaagcagauucuccggacgcaggagucugagugcguuuguaugaauggcuccugcuuuacaaucaugaccgaugggcccagcaacaaagcugccucuuacaagaucuucaagauugaaaaaggaaaggugacaaaaagcaucgagcugaaugcuccuaacuuuuauuacgaagaguguuccugcuacccggacaccggcauugucaugugugugugccgcgauaauuggcaugggucuaacagacccugggugagcuucaaucagaaccuugacuaucaaaucggauacauuugcuccggcgucuuuggggauaauccucggcccgaggacggagaaggcagcuguaacccuguuaccguggauggcgccaauggggugaagggauucucuuauaaauacggcaacggggucuggaucggacgcacaaaguccaauagacugcggaaaggcuuugagaugauuugggaccccaacggguggacgaauaccgacagcgauuucucugugaagcaggacguuguggcgaucacagauugguccggcuauagcggauccuuuguccagcacccggaacucaccggccuggacugcauccgcccuuguuucuggguggagcuuguuagagggcugccccgggaaaacacaaccauuuggacgucuggaagcuccaucucuuucugcggcgugaacagcgauacagccaauugguccuggccugacggggcugagcuccccuuuaccauugauaaguga

SEQ ID NO: 211820 - RNA, 1413 nt, Artificial Sequence; identical to SEQ ID NO: 211819
  derived and/or modified CDS sequence (opt5) from neuraminidase__InfluenzaA__ADM95706

SEQ ID NO: 211821 - RNA, 1413 nt, Artificial Sequence; identical to SEQ ID NO: 211819
  derived and/or modified CDS sequence (opt5) from neuraminidase__InfluenzaA__ADM95707

SEQ ID NO: 211822 - RNA, 1413 nt, Artificial Sequence; identical to SEQ ID NO: 209533
  derived and/or modified CDS sequence (opt5) from neuraminidase__InfluenzaA__ADM95708

SEQ ID NO: 211823 - RNA, 1410 nt, Artificial Sequence
  derived and/or modified CDS sequence (opt5) from neuraminidase__InfluenzaA__ADM95710
augaaccccaaucagaagaucauuaccaucggcagcgugucccugacaauuucuacgaucugcuucuuuaugcaaauugccauccucaucaccacagucacccugcacuucaaacaguacgaguuuaacagcccuccgaauaaccagguuaugcuuugugaacccacaauuaucgagagaaauauuaccgaaaucguguaucugacaaacaccacgauugagaaggaaaucugcccuaaacucgcugaguaccggaauugguccaagccccagugugacauuaccggguucgccccuuuuucuaaagauaacagcauccgccuguccgcgggaggcgacaucugggugacaagagagcccuaugucucuugcgauccugacaaguguuaccaauucgcucuugggcagggaaccacacugaauaacgugcauagcaauaacaccguucgggaucgcacgccguauagaacacuccugaugaaugaacugggcgugcccuuucaccucgggaccaagcaggucugcauugccugguccagcagcuccugucaugacggaaaagccuggcugcacgugugcaucacaggcgaugacaagaacgcuaccgccagcuucauuuacaauggccggcuuguugauucuguggucuccuggagcaaagagauccugcgcacccaggaaucugagugugugugcauuaacgggacauguacgguggucaugaccgacggauccgcuagcggcaaggccgauacaaaaauccucuuuaucgaggaagggaagauuguucauaccuccacacugucuggaagcgcgcaacacguggaggaaugcuccugcuauccuagauaccccggcgugcggugugucugccgcgacaacuggaaggggagcaauagaccuaucguggauauuaacaucaaagaccacaauauuguuucuuccuacguguguagcggacuugucggcgacacgccccggaagaacgauucuagcuccucuagccauugccuggacccgaauaacgaggaaggcgggcacggagugaaaggcugggccuucgaugacgggaaugauguuuggaugggacgcaccaucuccgagaagucuagacucggcuaugagacauuuaaagugaucgaaggguggucuaacccuaaguccaaacugcagauuaaucggcaggucaucguggaccgcggaaacagaagcggcuacucuggcauuuucuccgucgagggaaagagcuguaucaaucggugcuuuuauguggaacugauuagagggcgcaaggaggaaaccgauguucucuggaccuccaacucuaucguggucuucuguggcacaagcgggaccuacggaacaggcuccuggcccgacggggcugauauuaaucugaugccuaucuga

SEQ ID NO: 211824 - RNA, 1410 nt, Artificial Sequence; identical to SEQ ID NO: 208671
  derived and/or modified CDS sequence (opt5) from neuraminidase__InfluenzaA__ADM95711

SEQ ID NO: 211825 - RNA, 1410 nt, Artificial Sequence; identical to SEQ ID NO: 208671
  derived and/or modified CDS sequence (opt5) from neuraminidase__InfluenzaA__ADM95712

SEQ ID NO: 211826 - RNA, 1410 nt, Artificial Sequence; identical to SEQ ID NO: 208671
  derived and/or modified CDS sequence (opt5) from neuraminidase__InfluenzaA__ADM95713

SEQ ID NO: 211827 - RNA, 1410 nt, Artificial Sequence
  derived and/or modified CDS sequence (opt5) from neuraminidase__InfluenzaA__ADM95714
augaaccccaaucagaagaucauuaccaucggcagcgugucccugacaauuucuacgaucugcuucuuuaugcaaauugccauccucaucaccacagucacccugcacuucaaacaguacgaguuuaacagcccuccgaauaaccagguuaugcuuugugaacccacaauuaucgagagaaauauuaccgaaaucguguaucugacaaacaccacgauugagaaggaaaucugcccuaaacucgcugaguaccggaauugguccaagccccagugugacauuaccggguucgccccuuuuucuaaagauaacagcauccgccuguccgcgggaggcgacaucugggugacaagagagcccuaugucucuugcgauccugacaaguguuaccaauucgcucuugggcagggaaccacacugaauaacgugcauagcaauaacaccguucgggaucgcacgccguauagaacacuccugaugaaugaacugggcgugcccuuucaccucgggaccaagcaggucugcauugccugguccucuagcuccugucaugacggaaaagccuggcugcacgugugcaucacaggcgaugacaagaacgcuaccgccagcuucauuuacaauggccggcuuguugauucuguggucuccuggagcaaagagauccugcgcacccaggaaucugagugugugugcauuaacgggacauguacgguggucaugaccgacggauccgcuagcggcaaggccgauacaaaaauccucuuuaucgaggaagggaagauuguucauaccuccacacugucuggaagcgcgcaacacguggaggaaugcuccugcuauccuagauaccccggcgugcggugugucugccgcgacaacuggaaggggagcaauagaccuaucguggauauuaacaucaaagaccacucuauuguuuccagcuacguguguucuggacuugucggcgacacgccccggaagaaugauagcuccucuagcucccauugccuggacccgaacaaugaggaaggcgggcacggagugaaaggcugggccuucgaugacgggaacgauguuuggaugggacgcaccaucagcgagaagucuagacucggcuaugagacauuuaaagugaucgaagggugguccaauccuaagagcaaacugcagauuaaccggcaggucaucguggaccgcggaaauagaucuggcuacuccggcauuuucagcgucgaggggaaguccuguaucaaccggugcuuuuauguggaacugauuagaggacgcaaggaggaaaccgauguucucuggaccucuaauagcaucguggucuucuguggcacauccgggaccuacggaacaggcucuuggcccgacggggcugauauuaaccugaugccuaucuga

SEQ ID NO: 211828 - RNA, 1410 nt, Artificial Sequence; identical to SEQ ID NO: 208671
  derived and/or modified CDS sequence (opt5) from neuraminidase__InfluenzaA__ADM95715

SEQ ID NO: 211829 - RNA, 1410 nt, Artificial Sequence; identical to SEQ ID NO: 211827
  derived and/or modified CDS sequence (opt5) from neuraminidase__InfluenzaA__ADM95716

SEQ ID NO: 211830 - RNA, 1410 nt, Artificial Sequence; identical to SEQ ID NO: 211827
  derived and/or modified CDS sequence (opt5) from neuraminidase__InfluenzaA__ADM95717

SEQ ID NO: 211831 - RNA, 1410 nt, Artificial Sequence; identical to SEQ ID NO: 208671
  derived and/or modified CDS sequence (opt5) from neuraminidase__InfluenzaA__ADM95718

SEQ ID NO: 211832 - RNA, 1410 nt, Artificial Sequence
  derived and/or modified CDS sequence (opt5) from neuraminidase__InfluenzaA__ADM95719
augaaccccaaucagaagaucauuaccaucggcagcgugucccugacaauuucuacgaucugcuucuuuaugcaaauugccauccucaucaccacagucacccugcacuucaaacaguacgaguuuaacagcccuccgaauaaccagguuaugcuuugugaacccacaauuaucgagagaaauauuaccgaaaucguguaucugacaaacaccacgauugagaaggaaaucugcccuaaacucgcugaguaccggaauugguccaagccccagugugacauuaccggguucgccccuuuuucuaaagauaacagcauccgccuguccgcgggaggcgacaucugggugacaagagagcccuaugucucuugcgauccugacaaguguuaccaauucgcucuugggcagggaaccacacugaauaacgugcauagcaauaacaccguucgggaucgcacgccguauagaacacuccugaugaaugaacugggcgugcccuuucaccucgggaccaagcaggucugcauugccugguccucuagcuccugucaugacggaaaagccuggcugcacgugugcaucacaggcgaugacaagaacgcuaccgccagcuucauuuacaauggccggcuuguugauucuguggucuccuggagcaaagagauccugcgcacccaggaaucugagugugugugcauuaacgggacauguacgguggucaugaccgacggauccgcuagcggcaaggccgauacaaaaauccucuuuaucgaggaagggaagauuguucauaccuccacacugucuggaagcgcgcaacacguggaggaaugcuccugcuauccuagauaccccggcgugcggugugucugccgcgacaacuggaaggggagcaauagaccuaucguggauauuaacaucaaagaccacucuauuguuuccagcuacguguguucuggacuugucggcgacacgccccggaagaaugauagcuccucuagcucccauugccuggacccgaacaaugaggaaggcgggcacggagugaaaggcugggccuucgaugacgggaacgauguuuggaugggacgcaccaucagcgagaagucuagauccggcuaugagacauuuaaagugaucgaaggguggagcaauccuaagucuaaacuccagauuaaccggcaggucaucguggaccgcggaaauagauccggcuacagcggcauuuucuccgucgaggggaagucuuguaucaaccggugcuuuuauguggaacugauuagaggacgcaaggaggaaaccgagguucuguggaccagcaauuccaucguggucuucuguggcacaucugggaccuacggaacaggcagcuggcccgauggggcugacauuaaccucaugccuaucuga

SEQ ID NO: 211833 - RNA, 1410 nt, Artificial Sequence; identical to SEQ ID NO: 208671
  derived and/or modified CDS sequence (opt5) from neuraminidase__InfluenzaA__ADM95720

SEQ ID NO: 211834 - RNA, 1410 nt, Artificial Sequence; identical to SEQ ID NO: 208671
  derived and/or modified CDS sequence (opt5) from neuraminidase__InfluenzaA__ADM95721

SEQ ID NO: 211835 - RNA, 1410 nt, Artificial Sequence; identical to SEQ ID NO: 208671
  derived and/or modified CDS sequence (opt5) from neuraminidase__InfluenzaA__ADM95723

SEQ ID NO: 211836 - RNA, 1410 nt, Artificial Sequence
  derived and/or modified CDS sequence (opt5) from neuraminidase__InfluenzaA__ADM95724
augaaccccaaucagaagaucauuaccaucggcagcgugucccugacaauuucuacgaucugcuucuuuaugcaaauugccauccucaucaccacagucacccugcacuucaaacaguacgaguuuaacagcccuccgaauaaccagguuaugcuuugugaacccacaauuaucgagagaaauauuaccgaaaucguguaucugacaaacaccacgauugagaaggaaaucugcccuaaacucgcugaguaccggaauugguccaagccccagugugacauuaccggguucgccccuuuuucuaaagauaacagcauccgccuguccgcgggaggcgacaucugggugacaagagagcccuaugucucuugcgauccugacaaguguuaccaauucgcucuugggcagggaaccacacugaauaacgugcauagcaauaacaccguucgggaucgcacgccguauagaacacuccugaugaaugaacugggcgugcccuuucaccucgggaccaagcaggucugcauugccugguccucuagcuccugucaugacggaaaagccuggcugcacgugugcaucacaggcgaugacaagaacgcuaccgccagcuucauuuacaauggccggcuuguugauucuguggucuccuggagcaaagagauccugcgcacccaggaaucugagugugugugcauuaacgggacauguacgguggucaugaccgacggauccgcuagcggcaaggccgauacaaaaauccucuuuaucgaggaagggaagauuguucauaccuccacacugucuggaagcgcgcaacacguggaggaaugcuccugcuauccuagauaccccggcgugcggugugucugccgcgacaacuggaaggggagcaauagaccuaucguggauauuaacaucaaagaccacucuauuguuuccagcuacguguguucuggacuugucggcgacacgccccggaagaaugauagcuccucuagcucccauugccuggacccgaacaaugaggaaggcgggcacggagugaaaggcugggccuucgaugacgggaacgauguuuggaugggacgcaccaucagcgagaagucuagacucggcuaugagacauuuaaagugaucgaagggugguccaauccuaacagcaagcugcagauuaaucggcaggucaucguggaccgcggaaacagaucuggcuacuccggcauuuucagcgucgaggggaaauccuguaucaaucggugcuuuuauguggaacugauuagaggacgcaaggaggaaaccgagguucucuggaccucuaacagcaucguggucuucuguggcacauccgggaccuacggaacaggcucuuggcccgauggggcugacauuaaucugaugccuaucuga

SEQ ID NO: 211837 - RNA, 1410 nt, Artificial Sequence
  derived and/or modified CDS sequence (opt5) from neuraminidase__InfluenzaA__ADM95725
augaaccccaaucagaagaucauuaccaucggcagcgugucccugacaauuucuacgaucugcuucuuuaugcaaauugccauccucaucaccacagucacccugcacuucaaacaguacgaguuuaacccuccgcccaauaaccagguuaugcuuugugaaccuacaauuaucgagagaaauauuaccgaaaucguguaucugacaaacaccacgauugagaaggaagugugccccaaacucgcugaguaccggaauuggagcaagccucagugugacaucaccggguucgcccccuuuuccaaagauaacucuauucgccugagcgcgggaggcgacaucugggucacaagagagccuuauguguccugcgauccggacaaguguuaccaauucgcucuugggcagggaaccacacugaauaacguucauucuaauaacaccgugcgggaucgcacgcccuauagaacacuccugaugaaugaacugggcgucccuuuucaccucgggaccaaacaggugugcaucgccuggagcuccagcucuugucaugacggaaaggccuggcugcacguuugcauuacaggcgaugacaagaacgcuaccgccuccuucaucuacaauggccggcuuguggauagcgucgugucuugguccaaagagauucugcgcacccaggaaagcgagugugugugcaucaacgggacauguacggucguuauuaccgacggaucugcuuccggcaaggccgauacaaaaauccucuuuaucgaggaagggaagauugugcauaccagcacacuguccggaucugcgcaacacguggaggaaugcagcugcuaucccagauacccuggcguccggugugugugccgcgacaacuggaagggguccaauagacccaucguugauauuaacaucaaagaccacagcauugugucuuccuacgucuguagcggacuugugggcgacaccccgcggaagaaugauucuagcuccucuagccauugccuggacccuaacaaugaggaaggcgggcacggaguuaaaggcugggccuucgaugacgggaacgauguguggaugggacgcacgaucuccgaaaagagcagacucggcuaugagacauuuaaagucaucgagggguggucuaaucccaaguccaaacugcagauuaaccgccaggugaucgucgaccggggaaauagaagcggcuacucuggcauuuucuccguggagggaaagagcuguaucaaccggugcuuuuauguugaacugauuagagggcgcaaggaggaaaccgaugugcucuggaccuccaauucuaucgucguguucuguggcacaagcgggaccuacggaacaggcuccuggccugacggggcugauauuaaccugaugcccaucuga

SEQ ID NO: 211838 - RNA, 1410 nt, Artificial Sequence
  derived and/or modified CDS sequence (opt5) from neuraminidase__InfluenzaA__ADM95726
augaaccccaaucagaagaucauuaccaucggcagcgugucccugacaauuucuacgaucugcuucuuuaugcaaauugccauccucaucaccgcugucacacugcacuucaaacaguacgaguuuaacagcccuccgaauaaccagguuaugcuuugugaacccaccauuaucgagagaaauauuacagaaaucguguaucugaccaacacaaccauugagaaggaaaucugcccuaaacucgccgaguaccggaauugguccaagccccagugugacauuacgggguucgcgccuuuuucuaaagauaacagcauccgccuguccgcuggaggcgacaucugggugaccagagagcccuaugucucuugcgauccugacaaguguuaccaauucgcccuugggcagggaacaacccugaauaacgugcauagcaauaacacaguucgggaucgcaccccguauagaacgcuccugaugaaugaacugggcgugcccuuucaccucgggacaaagcaggucugcauugccugguccucuagcuccugucaugacggaaaggcuuggcugcacgugugcaucaccggcgaugacaaaaacgccacagcuagcuucauuuacaauggccggcuuguugauucuguggucuccuggagcaaagagauccugcgcacccaggaaucugagugugugugcauuaacgggaccuguacaguggucaugacggacggauccgccagcggcaaggcggauaccaaaauccucuuuaucgaggaagggaagauuguucauacauccacccugucuggaagcgcccaacacguggaggaaugcuccugcuauccuagauaccccggcgugcggugugucugccgcgacaacuggaaggggagcaauagaccuaucguggauauuaacaucaaagaccacucuauuguuuccagcuacguguguucuggacuugucggcgacacaccccggaagaaugauagcuccucuagcucccauugccuggacccgaacaaugaggaaggcgggcacggagugaaaggcugggcuuucgaugacgggaacgauguuuggaugggacgcaccaucagcgagaagucuagacucggcuaugagacguuuaaagugaucgaagggugguccaauccuaagagcaaacugcagauuaaccggcaggucaucguggaccgcggaaauagaucuggcuacuccggcauuuucagcgucgaggggaaguccuguaucaaccggugcuuuuauguggaacugauuagaggacgcaaggaggaaacagauguucucuggaccucuaauagcaucguggucuucuguggcaccuccgggacauacggaaccggcucuuggcccgacggggccgauauuaaccugaugccuaucuga

SEQ ID NO: 211839 - RNA, 1410 nt, Artificial Sequence; identical to SEQ ID NO: 208671
  derived and/or modified CDS sequence (opt5) from neuraminidase__InfluenzaA__ADM95727

SEQ ID NO: 211840 - RNA, 1410 nt, Artificial Sequence
  derived and/or modified CDS sequence (opt5) from neuraminidase__InfluenzaA__ADM95728
augaaccccaaucagaagaucauuaccaucggcagcgugucccugacaauuucuacgaucugcuucuuuaugcaaauugccauccucaucaccacagucacccugcacuucaaacaguacgaguuuaacagcccuccgaauaaccagguuaugcuuugugaacccacaauuaucgagagaaauauuaccgaaaucguguaucugacaaacaccacgauugagaaggaaaucugcccugagcucgcugaguaccggaauugguccaaaccccagugugacauuaccggguucgccccuuuuucuaaggauaacagcauccgccuguccgcgggaggcgacaucugggugacaagagaacccuaugucucuugcgauccugacaaauguuaccaauucgcucuugggcagggaaccacacugaauaacgugcauagcaauaacaccguucgggaucgcacgccguauagaacacuccugaugaaugagcugggcgugcccuuucaccucgggaccaagcaggucugcauugccugguccucuagcuccugucaugacggaaaggccuggcugcacgugugcaucacaggcgaugacaaaaacgcuaccgccagcuucauuuacaauggccggcuuguugauucuguggucuccuggagcaaggaaauccugcgcacccaggagucugagugugugugcauuaacgggacauguacgguggucaugaccgacggauccgcuagcggcaaagccgauacaaagauccucuuuaucgaagaggggaaaauuguucauaccuccacacugucuggaagcgcgcaacacguggaagagugcuccugcuauccuagauaccccggcgugcggugugucugccgcgacaacuggaaggggagcaauagaccuaucguggauauuaacaucaaggaccacucuauuguuuccagcuacguguguucuggacuugucggcgacacgccccggaaaaaugauagcuccucuagcucccauugccuggacccgaacaaugaagagggcgggcacggagugaagggcugggccuucgaugacgggaacgauguuuggaugggacgcaccaucagcgagaaaucuagacucggcuaugaaacauuuaaggugaucgaggggugguccaauccuaaaagcaagcugcagauuaaccggcaggucaucguggaccgcggaaauagaucuggcuacuccggcauuuucagcgucgaagggaaauccuguaucaaccggugcuuuuauguggagcugauuagaggacgcaaggaagagaccgagguucucuggaccucuaauagcaucguggucuucuguggcacauccgggaccuacggaacaggcucuuggcccgauggggcugacauuaaccugaugccuaucuga

SEQ ID NO: 211841 - RNA, 1410 nt, Artificial Sequence
  derived and/or modified CDS sequence (opt5) from neuraminidase__InfluenzaA__ADM95729
augaaccccaaucagaagaucauuaccaucggcagcgugucccugacaauuucuacgaucugcuucuuuaugcaaauugccauccucaucaccacagucacccugcacuucaaacaguacgaguuuaacagcccuccgaauaaccagguuaugcuuugugaacccacaauuaucgagagaaauauuaccgaaaucguguaucugacaaacaccacgauugagaaggaaaucugcccuaaacucgcugaguaccggaauugguccaagccccagugugacauuaccggguucgccccuuuuucuaaagauaacagcauccgccuguccgcgggaggcgacaucugggugacaagagagcccuaugucucuugcgauccugacaaguguuaccaauucgcucuugggcagggaaccacacugaauaacgugcauagcaauaacaccguucgggaucgcacgccguauagaacacuccugaugaaugaacugggcgugcccuuucaccucgggaccaagcaggucugcauugccugguccagcagcuccugucaugacggaaaagccuggcugcacgugugcaucacaggcgaugacaagaacgcuaccgccagcuucauuuacaauggccggcuuguugauucuguggucuccuggagcaaagagauccugcgcacccaggaaucugagugugugugcauuaacgggacauguacgguggucaugaccgacggauccgcuagcggcaaggccgauacaaaaauccucuuuaucgaggaagggaagauuguucauaccuccacacugucuggaagcgcgcaacacguggaggaaugcuccugcuauccuagauaccccggcgugcggugugucugccgcgacaacuggaaggggagcaauagaccuaucguggauauuaacaucaaagaccacucuauuguuuccagcuacguguguucuggacuugucggcgacacgccccggaagaaugauagcuccucucgcagccauugccuggacccgaacaaugaggaaggcgggcacggagugaaaggcugggccuucgaugacgggaacgauguuuggaugggaagaaccaucuccgagaagucucggcucggcuaugagacauuuaaagugaucgaaggguggucuaauccuaaguccaaacugcagauuaaccgccaggucaucguggacagaggaaaucggagcggcuacucuggcauuuucuccgucgagggaaagagcuguaucaacagaugcuuuuauguggaacugauucgcgggcggaaggaggaaaccgagguucucuggaccuccaauucuaucguggucuucuguggcacaagcgggaccuacggaacaggcuccuggcccgauggggcugacauuaaccugaugccuaucuga

SEQ ID NO: 211842 - RNA, 1410 nt, Artificial Sequence
  derived and/or modified CDS sequence (opt5) from neuraminidase__InfluenzaA__ADM95730
augaaccccaaucagaagaucauuaccaucggcagcgugucccugacaauuucuacgaucugcuucuuuaugcaaauugccauccucaucaccacagucacccugcacuucaaacaguacgaguuuaacagcccuccguccaaucagguuaugcuuugugaacccacaauuaucgagagaaacauuaccgaaaucguguaucugacaaauaccacgauugagaaggaaaucugcccuaaacucgcugaguaccggaacuggucuaagccccagugugacauuaccggguucgccccuuuuagcaaagauaauuccauccgccugucugcgggaggcgacaucugggugacaagagagcccuaugucagcugcgauccugacaaguguuaccaauucgcucuugggcagggaaccacacugaacaaugugcauuccaacaauaccguucgggaucgcacgccguauagaacacuccugaugaacgaacugggcgugcccuuucaccucgggaccaagcaggucugcauugccuggucuagcuccagcugucaugacggaaaagccuggcugcacgugugcaucacaggcgaugacaagaaugcuaccgccucuuucauuuacaacggccggcuuguugauuccguggucagcuggucuaaagagauccugcgcacccaggaauccgagugugugugcauuaaugggacauguacgguggucaugaccgacggaagcgcuuccggcaaggccgauacaaaaauccucuuuaucgaggaagggaagauuguucauaccucuacacugagcggauccgcgcaacacguggaggaaugcagcugcuauccuagauaccccggcgugcggugugucugccgcgacaacuggaaggggucuaacagaccuaucguggauauuaauaucaaagaccacuccauuguuagcucuuacguguguagcggacuugucggcgacacgccccggaagaacgauuccucuagcuccagccauugccuggacccgaauaacgaggaaggcgggcacggagugaaaggcugggccuucgaugacgggaaugauguuuggaugggacgcaccaucucugagaaguccagacucggcuaugagacauuuaaagugaucgaaggguggagcaacccuaagucuaaacugcagauuaaucggcaggucaucguggaccgcggaaacagauccggcuacagcggcauuuucuccgucgaggggaagucuuguaucaaucggugcuuuuauguggaacugauuagaggacgcaaggaggaaaccgagguucucuggaccagcaacuccaucguggucuucuguggcacaucugggaccuacggaacaggcagcuggcccgauggggcugacauuaaucugaugccuaucuga

SEQ ID NO: 211843 - RNA, 1410 nt, Artificial Sequence
  derived and/or modified CDS sequence (opt5) from neuraminidase__InfluenzaA__ADM95732
augaaccccaaucagaagaucauuaccaucggcagcgugucccugacaauuucuacgaucugcuucuuuaugcaaauugccauccucaucaccacagucacccugcacuucaaacaguacgaguuuaacagcccuccgaauaaccagguuaugcuuugugaacccacaauuaucgagagaaauauuaccgaaaucguguaucugacaaacaccacgauugagaaggaaaucugcccuaaacucgcugaguaccggaauugguccaagccccagugugacauuaccggguucgccccuuuuucuaaagauaacagcauccgccuguccgcgggaggcgacaucugggugacaagagagcccuaugucucuugcgauccugacaaguguuaccaauucgcucuugggcagggaaccacacugaauaacgugcauagcaaugauaccguucgggaccgcacgccguauagaacacuccugaugaacgaacugggcgugcccuuucaccucgggaccaagcaggucugcauugccugguccucuagcuccugucaugauggaaaagccuggcugcacgugugcaucacaggcgacgauaagaaugcuaccgccagcuucauuuacaacggccggcuuguugacucuaucguguccuggagcaaagagauucugcgcacccaggaaucugagugugucugcaucaaugggacauguacgguggugaugaccgauggauccgcuagcggcaaggccgacacaaaaauccucuuuauugaggaagggaagaucguccauaccuccacacugucuggaagcgcgcaacacguugaggaaugcuccugcuauccuagauaccccggcgugcggugugugugccgcgauaacuggaaggggagcaacagaccuauugucgacaucaauauuaaagaccggucuaucguguccagcuacguuuguucuggacuugugggcgauacgccccgcaagaacgacagcuccucuagcucccacugccuggauccgaauaacgaggaaggcgggcauggagucaaaggcugggccuucgacgaugggaaugacguguggaugggaagaaccaucagcgagaagucucggcucggcuaugagacauuuaaaguuauugaagggugguccaaccacaagagcaaacugcagaucaaucgccaggugauugucgauagaggaaaccggucuggcuacuccggcaucuucagcguggaggggaaguccuguauuaauagaugcuuuuaugucgaacugauccgcggacggaaggaggaaaccgaggugcucuggaccucuaacagcauuguuguguucuguggcacauccgggaccuacggaacaggcucuuggccugacggggcugauaucaaucugaugcccaucuga

SEQ ID NO: 211844 - RNA, 1410 nt, Artificial Sequence; identical to SEQ ID NO: 208671
  derived and/or modified CDS sequence (opt5) from neuraminidase__InfluenzaA__ADM95733

SEQ ID NO: 211845 - RNA, 1410 nt, Artificial Sequence; identical to SEQ ID NO: 208671
  derived and/or modified CDS sequence (opt5) from neuraminidase__InfluenzaA__ADM95734

SEQ ID NO: 211846 - RNA, 1410 nt, Artificial Sequence; identical to SEQ ID NO: 208671
  derived and/or modified CDS sequence (opt5) from neuraminidase__InfluenzaA__ADM95735

SEQ ID NO: 211847 - RNA, 1410 nt, Artificial Sequence; identical to SEQ ID NO: 208671
  derived and/or modified CDS sequence (opt5) from neuraminidase__InfluenzaA__ADM95736

SEQ ID NO: 211848 - RNA, 1410 nt, Artificial Sequence
  derived and/or modified CDS sequence (opt5) from neuraminidase__InfluenzaA__ADM95737
augaaccccaaucagaagaucauuaccaucggcagcgugucccugacaauuucuacgaucugcuucuuuaugcaaauugccauccucaucaccacagucacccugcacuucaaacaguacgaguuuaacagcccuccgaauaaccagguuaugcuuugugaacccacaauuaucgagagaaauauuaccgaaaucguguaucugacaaacaccacgauugagaaggaaaucugcccuaaacucgcugaguaccggaauugguccaagccccagugugacauuaccggguucgccccuuuuucuaaagauaacagcauccgccuguccgcgggaggcgacaucugggugacaagagagcccuaugucucuugcgauccugacaaguguuaccaauucgcucuugggcagggaaccacacugaauaacgugcauagcaauaacaccguucgggaucgcacgccguauagaacacuccugaugaaugaacugggcgugcccuuucaccucgggaccaagcaggucugcauugccugguccucuagcuccugucaugacggaaaagccuggcugcacgugugcaucacaggcgaugacaagaacgcuaccgccagcuucauuuacaauggccggcuuguugauucuguggucuccuggagcaaagagauccugcgcacccaggaaucugagugugugugcauuaacgggacauguacgguggucaugaccgacggauccgcuagcggcagagccgauacaaagauccucuuuaucgaggaagggaaaauuguucauaccuccacacugucuggaagcgcgcaacacguggaggaaugcuccugcuauccucgguaccccggcgugcgcugugucugcagagacaacuggaaggggagcaaucggccuaucguggauauuaacaucaaggaccacucuauuguuuccagcuacguguguucuggacuugucggcgacacgccccgcaaaaaugauagcuccucuagcucccauugccuggacccgaacaaugaggaaggcgggcacggagugaagggcugggccuucgaugacgggaacgauguuuggaugggaagaaccaucagcgagaaaucucggcucggcuaugagacauuuaaggugaucgaagggugguccaauccuaaaagcaagcugcagauuaaccgccaggucaucguggacagaggaaaucggucuggcuacuccggcauuuucagcgucgaggggaaauccuguaucaacagaugcuuuuauguggaacugauucgcggacggaaggaggaaaccgauguucucuggaccucuaauagcaucguggucuucuguggcacauccgggaccuacggaacaggcucuuggcccgacggggcugauauuaaccugaugccuaucuga

SEQ ID NO: 211849 - RNA, 1410 nt, Artificial Sequence; identical to SEQ ID NO: 208671
  derived and/or modified CDS sequence (opt5) from neuraminidase__InfluenzaA__ADM95738

SEQ ID NO: 211850 - RNA, 1410 nt, Artificial Sequence; identical to SEQ ID NO: 208671
  derived and/or modified CDS sequence (opt5) from neuraminidase__InfluenzaA__ADM95739

SEQ ID NO: 211851 - RNA, 1410 nt, Artificial Sequence
  derived and/or modified CDS sequence (opt5) from neuraminidase__InfluenzaA__ADM95740
augaaccccaaucagaagaucauuaccaucggcagcgugucccugacaauuucuacgaucugcuucuuuaugcaaauugccauccucaucaccacagucacccugcacuucaaacaguacgaguuuaacagcccuccgaauaaccagguuaugcuuugugaacccacaauuaucgagagaaauauuaccgaaaucguguaucugacaaacaccacgauugagaaggaaaucugcccuaaacucgcugaguaccggaauugguccaagccccagugugacauuaccggguucgccccuuuuucuaaagauaacagcauccgccuguccgcgggaggcgacaucugggugacaagagagcccuaugucucuugcgauccugacaaguguuaccaauucgcucuugggcagggaaccacacugaauaacgugcauagcaauaacaccguucgggaucgcacgccguauagaacacuccugaugaaugaacugggcgugcccuuucaccucgggaccaagcaggucugcauugccugguccucuagcuccugucaugacggaaaagccuggcugcacgugugcaucacaggcgaugacaagaacgcuaccgccagcuucauuuacaauggccggcuuguugauucuguggucuccuggagcaaagagauccugcgcacccaggaaucugagugugugugcauuaacgggacauguacgguggucaugaccgacggauccgcuagcggcaaggccgauacaaaaauccucuuuaucgaggaagggaagauuguucauaccuccacacugucuggaagcgcgcaacacguggaggaaugcuccugcuauccuagauaccccggcgugcggugugucugccgcgacaacuggaaggggagcaauagaccuaucguggauauuaacaucaaagaccacucuauuguuuccagcuacguguguucuggacuugucggcgacacgccccggaagaaugauagcuccucuagcucccauugccuggacccgaacgaugaggaaggcgggcacggagugaaaggcugggccuucgacgaugggaaugacguuuggaugggacgcaccaucagcgagaagucuagacucggcuaugagacauuuaaagugaucgaagggugguccaacccuaagagcaaacugcagauuaaucggcaggucaucguggaucgcggaaacagaucuggcuacuccggcauuuucagcgucgaggggaaguccuguaucaaucggugcuuuuauguggaacugauuagaggacgcaaggaggaaaccaaaguucucuggaccucuaacagcaucguggucuucuguggcacauccgggaccuacggaacaggcucuuggcccgacggggcugauauuaaucugaugccuaucuga

SEQ ID NO: 211852 - RNA, 1410 nt, Artificial Sequence; identical to SEQ ID NO: 211827
  derived and/or modified CDS sequence (opt5) from neuraminidase__InfluenzaA__ADM95741

SEQ ID NO: 211853 - RNA, 1410 nt, Artificial Sequence; identical to SEQ ID NO: 208671
  derived and/or modified CDS sequence (opt5) from neuraminidase__InfluenzaA__ADM95742

SEQ ID NO: 211854 - RNA, 1410 nt, Artificial Sequence
  derived and/or modified CDS sequence (opt5) from neuraminidase__InfluenzaA__ADM95743
augaaccccaaucagaagaucauuaccaucggcagcgugucccugacaauuucuacgaucugcuucuuuaugcaaauugccauccucaucaccacagucacccugcacuucaaacaguacgaguuuaacagcuccccuaauaaccagguuaugcuuugugaaccgacaauuaucgagagaaauauuaccgaaaucguguaucugacaaacaccacgauugagaaggaaaucugccccaaacucgcugaguaccggaauuggucuaagccucagugugacauuaccggguucgcccccuuuagcaaagauaacuccauccgccugucugcgggaggcgacaucugggugacaagagagccuuaugucagcugcgaucccgacaaguguuaccaauucgcucuugggcagggaaccacacugaauaacgugcauuccaauaacaccguucgggaucgcacgccuuauagaacacuccugaugaaugaacugggcgugccguuucaccucgggaccaagcaggucugcauugccuggucuagcuccagcugucaugacggaaaagccuggcugcacgugugcaucacaggcgaugacaagaacgcuaccgccucuuucauuuacaauggccggcuuguugauuccguggucagcuggucuaaagagauccugcgcacccaggaauccgagugugugugcauuaacgggacauguacgguggucaugaccgacggaagcgcuuccggcaaggccgauacaaaaauccucuuuaucgaggaagggaagauuguucauaccucuacacugagcggauccgcgcaacacguggaggaaugcagcugcuaucccagauacccuggcgugcggugugucugccgcgacaacuggaaggggucuaauagacccaucguggauauuaacaucaaagaccacuccauuguuagcucuuacguguguagcggacuugucggcgacaccccucggaagaaugauuccucuagcuccagccauugccuggaccccaacaaugaggaaggcgggcacggagugaaaggcugggccuucgaugacgggaacgauguuuggaugggacgcacgaucucugagaaguccagacucggcuaugagacauuuaaagugaucgaaggguggagcaauccgaagucuaaacugcagauuaaccggcaggucaucguggaccgcggaaauagauccggcuacagcggcauuuucuccgucgaggggaagucuuguaucaaccggugcuuuuauguggaacugauuagaggacgcaaggaggaaaccgagguucucuggaccagcaauuccaucguggucuucuguggcacaucugggaccuacggaacaggcagcuggccugauggggcugacauuaaccugaugcccaucuga

SEQ ID NO: 211855 - RNA, 1410 nt, Artificial Sequence; identical to SEQ ID NO: 208671
  derived and/or modified CDS sequence (opt5) from neuraminidase__InfluenzaA__ADM95744

SEQ ID NO: 211856 - RNA, 1410 nt, Artificial Sequence; identical to SEQ ID NO: 208810
  derived and/or modified CDS sequence (opt5) from neuraminidase__InfluenzaA__ADN05229

SEQ ID NO: 211857 - RNA, 1413 nt, Artificial Sequence; identical to SEQ ID NO: 209533
  derived and/or modified CDS sequence (opt5) from neuraminidase__InfluenzaA__ADN06292

SEQ ID NO: 211858 - RNA, 1413 nt, Artificial Sequence; identical to SEQ ID NO: 211002
  derived and/or modified CDS sequence (opt5) from neuraminidase__InfluenzaA__ADN06303

SEQ ID NO: 211859 - RNA, 1413 nt, Artificial Sequence
  derived and/or modified CDS sequence (opt5) from neuraminidase__InfluenzaA__ADN06314
augaaccccaaucagaagaucauuaccaucggcagcauuuccaucgccauugggaucaucucucugaugcuccaaauuggaaacaucauuagcaucugggcuucccacucuauucagacaggcagccagaauaacacggggaucugcaaucagagaauuaucaccuacgagaacuccacaugggugaaucauaccuaugucaacaucaauaacacaaauguuguggccggagaagacaaaaccucugugacacuggcgggcaacagcucccuuuguagcauuucugggugggcuaucuacaccaaggauaauuccauucggaucggaagcaaaggcgaggucuucgugauucgcgaaccuuuuaucucuugcucccaccuggaguguagaacguucuuucucacccaaggcgcccugcuuaacgacaagcauagcaaugggacaguuaaagaucggucuccguaucgcgcccugauguccugcccccucggagaagcuccuagccccuacaacuccaaguucgagucuguggccuggagcgcuuccgccugucacgacggcaugggguggcugaccaucggaauuagcggcccugauaacggggcggucgccgugcugaaguauaauggaaucauuacaggcaccaucaaaucuuggaagaaacagauucucagaacgcaggaguccgaaugcguuuguaugaacggcagcugcuuuacaaucaugaccgacgggcccucuaauaaggcugccagcuacaaaaucuucaagauugagaagggaaaagugacaaaguccaucgaacugaacgcuccuaauuuuuauuacgaggaguguucuugcuacccggauaccggcauugucaugugugugugccgggacaacuggcaugggagcaaucgccccuggguguccuucaaccagaaucuugauuaucaaaucggauacauuugcagcggcgucuuuggggacaacccuagacccgaagauggagagggcucuuguaauccuguuaccguggacggcgccaacggggugaaaggauucuccuauaaguacggcaauggggucuggaucggacggacaaaaagcaaccgccugagaaagggcuuugaaaugauuugggaucccaauggguggacgaacaccgacucugacuucuccgugaaacaggauguuguggcgaucacagacuggagcggcuauuccggaucuuuuguccagcacccggagcucaccggccuggauugcauccggccuuguuucuggguggaacuuguucgcgggcugcccagagagaacacaaccauuuggacgagcggauccucuaucagcuucugcggcgugaauggggacacagccaacugguccuggccugauggagcugagcuccccuuuaccauugacaaguga

SEQ ID NO: 211860 - RNA, 1413 nt, Artificial Sequence; identical to SEQ ID NO: 211002
  derived and/or modified CDS sequence (opt5) from neuraminidase__InfluenzaA__ADN06325

SEQ ID NO: 211861 - RNA, 1413 nt, Artificial Sequence
  derived and/or modified CDS sequence (opt5) from neuraminidase__InfluenzaA__ADN06347
augaaccccaaucagaagaucauuaccaucggcagcauuuccaucgccauugggaucaucucucugaugcuccaaauuggaaacaucauuagcaucugggcuucccacucuauucagacagagagccagaauaacacgggcaucugcaaucagagaauuaucaccuacgaaaacuccacaugggugaaucauaccuaugucaacaucaauaacacaaauguuguggccggggaggacaaaaccucugugacacuggcgggaaacagcucccuuuguagcauuucuggcugggcuaucuacaccaaggauaauuccauucggaucgggagcaaaggagacgucuucgugauucgcgaaccuuuuaucucuugcucccaccuggaguguagaacguucuuucucacccaaggcgcccugcuuaacgauaagcauagcaauggcacaguuaaagaccggucuccguaucgcgcccugauguccugcccccucggggaagcuccuagccccuacaacuccaaguucgagucuguggccuggagcgcuuccgccugucacgauggaaugggcuggcugaccaucgggauuagcggaccugacaacggcgcggucgccgugcugaaguauaaugggaucauuacaggaaccaucaaaucuuggaagaaacagauucucagaacgcaggaguccgaaugcguuuguaugaacggcagcugcuuuacaaucaugaccgauggccccucuaauaaggcugccagcuacaaaaucuucaagauugagaaggggaaagugacaaaguccaucgaacugaacgcuccuaauuuuuauuacgaggaguguucuugcuacccggacaccggaauugucaugugugugugccgggauaacuggcauggcagcaaucgccccuggguguccuucaaccagaaucuugacuaucaaaugggguacaucugcagcggagucuuuggcgauaacccuagacccgaagacggggagggaucuuguaauccuguuaacguggauggcgccaauggcgugaaaggguucuccuauaaguacggaaacggcgucuggauugggcggaccaaaagcaaucgccugagaaagggauuugaaaugaucugggaccccaacggcuggacaaacacggacucugauuucuccgugaaacaggacguuguggcgauuaccgauuggagcggguauuccggcucuuuuguccagcacccggagcucacaggacuggacugcauccggccuuguuucuggguggaacuuguucgcggccugcccagagagaauaccacaaucuggaccagcggguccucuauuagcuucugcggagugaacuccgauacggccaauuggagcuggccugacggcgcugagcuccccuuuacaaucgauaaguga

SEQ ID NO: 211862 - RNA, 1410 nt, Artificial Sequence; identical to SEQ ID NO: 211482
  derived and/or modified CDS sequence (opt5) from neuraminidase__InfluenzaA__ADN06369

SEQ ID NO: 211863 - RNA, 1410 nt, Artificial Sequence; identical to SEQ ID NO: 208810
  derived and/or modified CDS sequence (opt5) from neuraminidase__InfluenzaA__ADN26031

SEQ ID NO: 211864 - RNA, 1410 nt, Artificial Sequence; identical to SEQ ID NO: 208810
  derived and/or modified CDS sequence (opt5) from neuraminidase__InfluenzaA__ADN26032

SEQ ID NO: 211865 - RNA, 1410 nt, Artificial Sequence; identical to SEQ ID NO: 208810
  derived and/or modified CDS sequence (opt5) from neuraminidase__InfluenzaA__ADN26033

SEQ ID NO: 211866 - RNA, 1410 nt, Artificial Sequence; identical to SEQ ID NO: 208810
  derived and/or modified CDS sequence (opt5) from neuraminidase__InfluenzaA__ADN26034

SEQ ID NO: 211867 - RNA, 1410 nt, Artificial Sequence; identical to SEQ ID NO: 208810
  derived and/or modified CDS sequence (opt5) from neuraminidase__InfluenzaA__ADN26035

SEQ ID NO: 211868 - RNA, 1410 nt, Artificial Sequence; identical to SEQ ID NO: 208810
  derived and/or modified CDS sequence (opt5) from neuraminidase__InfluenzaA__ADN26036

SEQ ID NO: 211869 - RNA, 1410 nt, Artificial Sequence
  derived and/or modified CDS sequence (opt5) from neuraminidase__InfluenzaA__ADN26037
augaaccccaaucagaagaucauuaccaucggcagcgugugcaugacaauugggauggccaaccugauccuccaaauuggaaauaucaucuccauuuggaucucucacagcauucagcugggcaaccagaaucagaucgagacguguaaccaauccgucauuaccuacgaaaauaacacauggguuaaucagaccuaugugaacaucucuaauacaaacuucgcugccgggcagagcguggucuccgugaaacuugcgggaaauucuagccugugcccuguuuccggcugggcuauuuacagcaaggacaacucugugagaaucggguccaaaggagaugucuuugugauccgggagccguucauuagcuguucuccccucgaaugccgcaccuuuuuccugacacagggcgcccuucugaaugacaagcauuccaacggcaccaucaaagauagaagcccuuaucggacgcucaugucuugucccauuggggagguuccuucccccuacaacagccgcuuugaauccguggccuggucugcuagcgccugccacgacggaaucaauuggcugaccauuggcaucuccgggccugauaacggagcugucgccgugcugaaguauaauggcaucauuacagacaccaucaagagcuggagaaacaauauucuccggacacaagagucugagugugcgugcgugaacggguccuguuucaccgucaugacggauggaccgagcaauggccaggccucuuacaaaaucuuucgcauugaaaagggcaaaaucguuaagagcguggagaugaacgcucccaauuaucauuacgaagagugcuccuguuacccugacucuagcgagaucacaugcgugugcagagauaacuggcacggguccaaucggcccugggucagcuucaaccagaaucuggaauaucagauuggauacaucuguucuggcauuuuuggggacaacccucgccccaucgauaaaaccggauccugcggcccggugagcucuaauggggccaacggaguuaagggcuucuccuuuaaguauggcaacgggguguggauuggaagaacaaaaagcaucuccucucggaauggcuucgagaugauuugggacccuaacggguggaccggaaccgauaauaacuuuagcaucaagcaagacaucgucggcauuaaugaaugguccggguacucuggcagcuucgugcagcaucccgagcuuacaggacuggacuguauccgcccuugcuucuggguugaacucauuagaggccggcccaaagagaacacgaucuggaccuccgggagcucuauuuccuuuuguggagugaauagcgauacagucggcuggucuuggcccgacggggcugagcugccuuucaccaucgauaaguga

SEQ ID NO: 211870 - RNA, 1410 nt, Artificial Sequence; identical to SEQ ID NO: 208810
  derived and/or modified CDS sequence (opt5) from neuraminidase__InfluenzaA__ADN26038

SEQ ID NO: 211871 - RNA, 1410 nt, Artificial Sequence; identical to SEQ ID NO: 208810
  derived and/or modified CDS sequence (opt5) from neuraminidase__InfluenzaA__ADN26041

SEQ ID NO: 211872 - RNA, 1410 nt, Artificial Sequence; identical to SEQ ID NO: 208810
  derived and/or modified CDS sequence (opt5) from neuraminidase__InfluenzaA__ADN26042

SEQ ID NO: 211873 - RNA, 1410 nt, Artificial Sequence
  derived and/or modified CDS sequence (opt5) from neuraminidase__InfluenzaA__ADN26043
augaaccccaaucagaagaucauuaccaucggcagcgugugcaugacaauugggauggccaaccugauccuccaaauuggaaauaucaucuccauuuggaucucucacagcauucagcugggcaaccagaaucagaucgagacguguaaccaauccgucauuaccuacgaaaauaacacauggguuaaucagaccuaugugaacaucucuaauacaaacuucgcugccgggcagagcguggucuccgugaaacuugcgggaaauucuagccugugcccuguuuccggcugggcuauuuacagcaaggacaacucuaucagaaucggguccaaaggagauguguuugucauucgggagccguucaucagcuguucuccccucgaaugccgcaccuuuuuccugacacagggcgcccuucugaaugacaagcauuccaacggcaccauuaaagauagaagcccuuaucggacgcucaugucuugucccaucggggaggugccuucccccuacaacagccgcuuugaauccguugccuggucugcuagcgccugccacgacggaauuaauuggcugaccaucggcaucuccgggccugauaacggagcuguggccguccugaaguauaauggcauuaucacagacaccauuaagagcuggagaaacaauauccuccggacacaagagucugagugugcgugcgugaacggguccuguuucaccgugaugacggauggaccgagcgacggccaggccucuuacaaaauuuuucgcaucgaaaagggcaaaaucgucaagagcguugagaugaaugcucccaacuaucauuacgaagagugcuccuguuacccugauucuagcgagauuacaugcgugugcagagacaauuggcacggguccaaccggcccugggugagcuucaaucagaaccuggaauaucaggucggauacaucuguucuggcauuuuuggggauaauccucgccccaacgacaaaaccggauccugcggcccggugagcucuaauggggccaacggaguuaagggcuucuccuuuaaguauggcaacgggguguggaucggaagaacaaaaagcauuuccucucggaauggcuucgagaugaucugggauccuaacggguggaccggaaccgacaauaacuuuagcauuaagcaagacaucgucggcaucaaugaaugguccggguacucuggcagcuucgugcagcaucccgagcuuacaggacuggauuguauucgcccuugcuucuggguugaacucaucagaggccggcccaaagagaacacgauuuggaccuccgggagcucuaucuccuuuuguggagugaauagcgacacagucggcuggucuuggcccgauggggcugagcugccuuucaccauugacaaguga

SEQ ID NO: 211874 - RNA, 1410 nt, Artificial Sequence; identical to SEQ ID NO: 208810
  derived and/or modified CDS sequence (opt5) from neuraminidase__InfluenzaA__ADN26044

SEQ ID NO: 211875 - RNA, 1410 nt, Artificial Sequence; identical to SEQ ID NO: 208810
  derived and/or modified CDS sequence (opt5) from neuraminidase__InfluenzaA__ADN26045

SEQ ID NO: 211876 - RNA, 1410 nt, Artificial Sequence
  derived and/or modified CDS sequence (opt5) from neuraminidase__InfluenzaA__ADN26047
augaaccccaaucagaagaucauuaccaucggcagcgugugcaugacaauugggauggccaaccugauccuccaaauuggaaauaucaucuccauuuggaucucucacagcauucagcugggcaaccagaaucagaucgagacguguaaccaauccgucauuaccuacgaaaauaacacauggguuaaucagaccuaugugaacaucucuaauacaaacuucgcugccgggcagagcaugguguccgucaaacuuaccggaaauucuagccugugcccuguguccggcugggcgauuuacagcaaggacaacucuguuagaaucggguccaaaggagauguguuugucauccgggagccguucauuagcuguucuccccucgaaugccgcacauuuuuccugacccagggcgcccuucugaaugacaagcauuccaacggcacgaucaaagauagaagcccuuaucggacccucaugucuugucccauuggggaggugccuucccccuacaacagccgcuuugaauccguugcuuggucugccagcgcuugccacgacggaaucaauuggcugacaauuggcaucuccgggccugauaacggagccguggcuguccugaaguauaauggcaucauuaccgacacaaucaagagcuggagaaacaauauucuccggacccaagagucugagugugccugcgugaacggguccuguuucacggugaugacagauggaccgagcaauggccaggcgucuuacaaaaucuuucgcauugaaaagggcaaaaucgucaagagcguugagaugaacgcccccaauuaucauuacgaagagugcuccuguuacccugacucuagcgagauuaccugcgugugcagagauaacuggcacggguccaaucggcccugggugagcuucaaccagaaucuggaauaucagaucggauacaucuguucuggcauuuuuggggacaacccucgccccaaugauaaaacaggauccugcggcccggucagcucuaacggggcuaacggagugaagggcuucuccuuuaaguauggcaaugggguuuggaucggaagaaccaaaagcauuuccucucggaacggcuucgagaugaucugggacccuaauggguggaccggaacagauaacaauuuuagcauuaagcaagacaucgugggcaucaacgaaugguccggguacucuggcagcuucguccagcaucccgagcuuacgggacuggacuguauucgcccuugcuucuggguggaacucaucagaggccggcccaaagagaauaccauuuggacauccgggagcucuaucuccuuuuguggaguuaacagcgauaccgugggcuggucuuggcccgacggggccgagcugccuuucacaauugauaaguga

SEQ ID NO: 211877 - RNA, 1410 nt, Artificial Sequence; identical to SEQ ID NO: 208810
  derived and/or modified CDS sequence (opt5) from neuraminidase__InfluenzaA__ADN26048

SEQ ID NO: 211878 - RNA, 1410 nt, Artificial Sequence; identical to SEQ ID NO: 208810
  derived and/or modified CDS sequence (opt5) from neuraminidase__InfluenzaA__ADN26049

SEQ ID NO: 211879 - RNA, 1410 nt, Artificial Sequence; identical to SEQ ID NO: 208810
  derived and/or modified CDS sequence (opt5) from neuraminidase__InfluenzaA__ADN26050

SEQ ID NO: 211880 - RNA, 1410 nt, Artificial Sequence; identical to SEQ ID NO: 208810
  derived and/or modified CDS sequence (opt5) from neuraminidase__InfluenzaA__ADN26051

SEQ ID NO: 211881 - RNA, 1410 nt, Artificial Sequence; identical to SEQ ID NO: 208810
  derived and/or modified CDS sequence (opt5) from neuraminidase__InfluenzaA__ADN26052

SEQ ID NO: 211882 - RNA, 1410 nt, Artificial Sequence; identical to SEQ ID NO: 208800
  derived and/or modified CDS sequence (opt5) from neuraminidase__InfluenzaA__ADN26053

SEQ ID NO: 211883 - RNA, 1410 nt, Artificial Sequence; identical to SEQ ID NO: 208810
  derived and/or modified CDS sequence (opt5) from neuraminidase__InfluenzaA__ADN26054

SEQ ID NO: 211884 - RNA, 1410 nt, Artificial Sequence; identical to SEQ ID NO: 208810
  derived and/or modified CDS sequence (opt5) from neuraminidase__InfluenzaA__ADN26057

SEQ ID NO: 211885 - RNA, 1410 nt, Artificial Sequence; identical to SEQ ID NO: 208810
  derived and/or modified CDS sequence (opt5) from neuraminidase__InfluenzaA__ADN26058

SEQ ID NO: 211886 - RNA, 1410 nt, Artificial Sequence; identical to SEQ ID NO: 208810
  derived and/or modified CDS sequence (opt5) from neuraminidase__InfluenzaA__ADN26059

SEQ ID NO: 211887 - RNA, 1410 nt, Artificial Sequence; identical to SEQ ID NO: 209177
  derived and/or modified CDS sequence (opt5) from neuraminidase__InfluenzaA__ADN26060

SEQ ID NO: 211888 - RNA, 1410 nt, Artificial Sequence; identical to SEQ ID NO: 208810
  derived and/or modified CDS sequence (opt5) from neuraminidase__InfluenzaA__ADN26061

SEQ ID NO: 211889 - RNA, 1410 nt, Artificial Sequence; identical to SEQ ID NO: 208810
  derived and/or modified CDS sequence (opt5) from neuraminidase__InfluenzaA__ADN26063

SEQ ID NO: 211890 - RNA, 1410 nt, Artificial Sequence; identical to SEQ ID NO: 208810
  derived and/or modified CDS sequence (opt5) from neuraminidase__InfluenzaA__ADN26064

SEQ ID NO: 211891 - RNA, 1410 nt, Artificial Sequence; identical to SEQ ID NO: 209883
  derived and/or modified CDS sequence (opt5) from neuraminidase__InfluenzaA__ADN26065

SEQ ID NO: 211892 - RNA, 1410 nt, Artificial Sequence; identical to SEQ ID NO: 208810
  derived and/or modified CDS sequence (opt5) from neuraminidase__InfluenzaA__ADN26066

SEQ ID NO: 211893 - RNA, 1410 nt, Artificial Sequence; identical to SEQ ID NO: 208810
  derived and/or modified CDS sequence (opt5) from neuraminidase__InfluenzaA__ADN26067

SEQ ID NO: 211894 - RNA, 1410 nt, Artificial Sequence; identical to SEQ ID NO: 208810
  derived and/or modified CDS sequence (opt5) from neuraminidase__InfluenzaA__ADN26069

SEQ ID NO: 211895 - RNA, 1410 nt, Artificial Sequence; identical to SEQ ID NO: 208810
  derived and/or modified CDS sequence (opt5) from neuraminidase__InfluenzaA__ADN26070

SEQ ID NO: 211896 - RNA, 1410 nt, Artificial Sequence; identical to SEQ ID NO: 208810
  derived and/or modified CDS sequence (opt5) from neuraminidase__InfluenzaA__ADN26072

SEQ ID NO: 211897 - RNA, 1410 nt, Artificial Sequence; identical to SEQ ID NO: 208810
  derived and/or modified CDS sequence (opt5) from neuraminidase__InfluenzaA__ADN26073

SEQ ID NO: 211898 - RNA, 1410 nt, Artificial Sequence; identical to SEQ ID NO: 208810
  derived and/or modified CDS sequence (opt5) from neuraminidase__InfluenzaA__ADN26075

SEQ ID NO: 211899 - RNA, 1410 nt, Artificial Sequence; identical to SEQ ID NO: 208810
  derived and/or modified CDS sequence (opt5) from neuraminidase__InfluenzaA__ADN26076

SEQ ID NO: 211900 - RNA, 1410 nt, Artificial Sequence; identical to SEQ ID NO: 208810
  derived and/or modified CDS sequence (opt5) from neuraminidase__InfluenzaA__ADN26077

SEQ ID NO: 211901 - RNA, 1410 nt, Artificial Sequence; identical to SEQ ID NO: 208810
  derived and/or modified CDS sequence (opt5) from neuraminidase__InfluenzaA__ADN26078

SEQ ID NO: 211902 - RNA, 1410 nt, Artificial Sequence; identical to SEQ ID NO: 208810
  derived and/or modified CDS sequence (opt5) from neuraminidase__InfluenzaA__ADN26079

SEQ ID NO: 211903 - RNA, 1410 nt, Artificial Sequence; identical to SEQ ID NO: 208810
  derived and/or modified CDS sequence (opt5) from neuraminidase__InfluenzaA__ADN26080

SEQ ID NO: 211904 - RNA, 1410 nt, Artificial Sequence; identical to SEQ ID NO: 208810
  derived and/or modified CDS sequence (opt5) from neuraminidase__InfluenzaA__ADN26081

SEQ ID NO: 211905 - RNA, 1410 nt, Artificial Sequence; identical to SEQ ID NO: 208810
  derived and/or modified CDS sequence (opt5) from neuraminidase__InfluenzaA__ADN26082

SEQ ID NO: 211906 - RNA, 1410 nt, Artificial Sequence; identical to SEQ ID NO: 208810
  derived and/or modified CDS sequence (opt5) from neuraminidase__InfluenzaA__ADN26083

SEQ ID NO: 211907 - RNA, 1410 nt, Artificial Sequence; identical to SEQ ID NO: 210712
  derived and/or modified CDS sequence (opt5) from neuraminidase__InfluenzaA__ADN26084

SEQ ID NO: 211908 - RNA, 1410 nt, Artificial Sequence; identical to SEQ ID NO: 208810
  derived and/or modified CDS sequence (opt5) from neuraminidase__InfluenzaA__ADN26085

SEQ ID NO: 211909 - RNA, 1410 nt, Artificial Sequence; identical to SEQ ID NO: 208810
  derived and/or modified CDS sequence (opt5) from neuraminidase__InfluenzaA__ADN26086

SEQ ID NO: 211910 - RNA, 1410 nt, Artificial Sequence; identical to SEQ ID NO: 208810
  derived and/or modified CDS sequence (opt5) from neuraminidase__InfluenzaA__ADN26087

SEQ ID NO: 211911 - RNA, 1410 nt, Artificial Sequence; identical to SEQ ID NO: 208810
  derived and/or modified CDS sequence (opt5) from neuraminidase__InfluenzaA__ADN26088

SEQ ID NO: 211912 - RNA, 1410 nt, Artificial Sequence; identical to SEQ ID NO: 208810
  derived and/or modified CDS sequence (opt5) from neuraminidase__InfluenzaA__ADN26090

SEQ ID NO: 211913 - RNA, 1410 nt, Artificial Sequence; identical to SEQ ID NO: 208810
  derived and/or modified CDS sequence (opt5) from neuraminidase__InfluenzaA__ADN26091

SEQ ID NO: 211914 - RNA, 1410 nt, Artificial Sequence; identical to SEQ ID NO: 208810
  derived and/or modified CDS sequence (opt5) from neuraminidase__InfluenzaA__ADN26092

SEQ ID NO: 211915 - RNA, 1410 nt, Artificial Sequence; identical to SEQ ID NO: 208810
  derived and/or modified CDS sequence (opt5) from neuraminidase__InfluenzaA__ADN26093

SEQ ID NO: 211916 - RNA, 1410 nt, Artificial Sequence
  derived and/or modified CDS sequence (opt5) from neuraminidase__InfluenzaA__ADN26094
augaaccccaaucagaagaucauuaccaucggcagcgugugcaugacaauugggauggccaaccugauccuccaaauuggaaauaucaucuccauuuggaucucucacagcauucagcugggcaaccagaaucagaucgagacguguaaccaauccgucauuaccuacgaaaauaacacauggguuaaucagaccuaugugaacaucucuaauacaaacuucgcugccgggcagagcguggucuccgugaaacuugcgggaaauucuagccugugcccuguuuccggcugggcuauuuacagcaaggacaacucuaucagaaucggguccaaaggagauguguuugucauucgggagccguucaucagcuguucuccccucgaaugccgcaccuuuuuccugacacagggcgcccuucugaaugacaagcauuccaacggcaccauuaaagauagaagcccuuaucggacgcucaugucuugucccaucggggaggugccuucccccuacaacagccgcuuugaauccguugccuggucugcuagcgccugccacgacggaauuaauuggcugaccaucggcaucuccgggccugauaacggagcuguggccguccugaaguauaauggcauuaucacagacaccauuaagagcuggagaaacaauauccuccggacacaagagucugagugugcgugcgugaacggguccuguuucaccgugaugacggauggaccgagcgacggccaggccucuuacaaaauuuuucgcaucgaaaagggcaaaaucgucaagagcguugagaugaaugcucccaacuaucauuacgaagagugcuccuguuacccugauucuagcgagauuacaugcgugugcagagacaauuggcacggguccaaccggcccugggugagcuucaaucagaaccuggaauaucagaucggauacauuuguucuggcaucuuuggggauaauccucgccccaacgacaaaaccggauccugcggcccggucagcucuaauggggccaacggagugaagggcuucuccuuuaaguauggcaacgggguuuggauuggaagaacaaaaagcaucuccucucggaauggcuucgagaugauuugggauccuaacggguggaccggaaaggacaauaacuuuagcaucaaacaagacaucgugggcauuaaugaaugguccggguacucuggcagcuucguccagcaucccgagcuuaccggacuggauuguauccgcccuugcuucuggguggaacucauuagaggccggcccaaggagaacacaaucuggacguccgggagcucuauuuccuuuuguggaguuaauagcgacaccgugggcuggucuuggcccgauggggcugagcugccuuucacaaucgacaaauga

SEQ ID NO: 211917 - RNA, 1410 nt, Artificial Sequence; identical to SEQ ID NO: 210712
  derived and/or modified CDS sequence (opt5) from neuraminidase__InfluenzaA__ADN26095

SEQ ID NO: 211918 - RNA, 1410 nt, Artificial Sequence
  derived and/or modified CDS sequence (opt5) from neuraminidase__InfluenzaA__ADN26096
augaaccccaaucagaagaucauuaccaucggcagcgugugcaugacaauugggauggccaaccugauccuccaaauuggaaauaucaucuccauuuggaucucucacagcauucagcugggcaaccagaaucagaucgagacguguaaccaauccgucauuaccuacgaaaauaacacauggguuaaucagaccuaugugaacaucucuaauacaaacuucgcugccgggcagagcguggucuccgugaaacuugcgggaaauucuagccugugcccuguuaacggcugggcuauuuacuccaaggacaauagcaucagaaucgggucuaaaggagauguguuugucauucgggagccguucaucuccuguagcccccucgaaugccgcaccuuuuuccugacacagggcgcccuucugaacgacaagcauucuaacggcaccauuaaagauagauccccuuaucggacgcucaugagcugucccaucggggaggugccuucucccuacaauucccgcuuugaaagcguugccugguccgcuucugccugccacgacggaauuaacuggcugaccaucggcaucagcgggccugauaauggagcuguggccguccugaaguauaacggcauuaucacagacaccauuaaguccuggagaaauaacauccuccggacacaagagagcgagugugcgugcgugaaugggucuuguuucaccgugaugacggauggaccguccgacggccaggccagcuacaaaauuuuucgcaucgaaaagggcaaaaucgucaagucuguugagaugaacgcucccaauuaucauuacgaagagugcagcuguuacccugauuccucugagauuacaugcgugugcagagacaacuggcacgggagcaaucggcccuggguguccuucaaccagaaucuggaauaucagaucggauacauuuguagcggcaucuuuggggauaacccucgccccaaugacaaaaccggaucuugcggcccggucuccagcaacggggccaacggagugaagggcuucucuuuuaaguauggcaaugggguuuggauuggaagaaccaaaaacaucuccagccggaauggcuucgagaugauuugggauccuaacggguggacaggaaccgacaauaacuuuuccaucaagcaagacaucgugggcauuaaugaauggucuggguacagcggcuccuucguccagcaucccgagcuuacaggacuggauuguauccgcccuugcuucuggguggaacucauuagaggccggcccaaagagaacacgaucuggaccucugggagcuccauuagcuuuuguggaguuaauucugacacagugggcugguccuggcccgauggggcugagcugccuuucaccaucgacaaguga

SEQ ID NO: 211919 - RNA, 1410 nt, Artificial Sequence; identical to SEQ ID NO: 208810
  derived and/or modified CDS sequence (opt5) from neuraminidase__InfluenzaA__ADN26097

SEQ ID NO: 211920 - RNA, 1410 nt, Artificial Sequence; identical to SEQ ID NO: 208810
  derived and/or modified CDS sequence (opt5) from neuraminidase__InfluenzaA__ADN26098

SEQ ID NO: 211921 - RNA, 1410 nt, Artificial Sequence; identical to SEQ ID NO: 208810
  derived and/or modified CDS sequence (opt5) from neuraminidase__InfluenzaA__ADN26099

SEQ ID NO: 211922 - RNA, 1410 nt, Artificial Sequence; identical to SEQ ID NO: 208810
  derived and/or modified CDS sequence (opt5) from neuraminidase__InfluenzaA__ADN26100

SEQ ID NO: 211923 - RNA, 1410 nt, Artificial Sequence; identical to SEQ ID NO: 208810
  derived and/or modified CDS sequence (opt5) from neuraminidase__InfluenzaA__ADN26101

SEQ ID NO: 211924 - RNA, 1410 nt, Artificial Sequence
  derived and/or modified CDS sequence (opt5) from neuraminidase__InfluenzaA__ADN26102
augaaccccaaucagaagaucauuaccaucggcagcgugugcaugacaauugggauggccaaccugauccuccaaauuggaaauaucaucuccauuuggaucucucaccugauucagcuuggcaaccagaaucagaucgagacguguaaccaaagcgucauuaccuacgaaaauaacacauggguuaaucagaccuaugugaacaucuccaauacaaacuucgcugccgggcagucuguggucagcgugaaacuggcgggaaauuccucucucugcccuguuagcggcugggcuauuuacuccaaggacaacagcaucagaaucgggucuaaaggagauguguuugucauucgggagccguucaucuccuguagcccccuggaaugccgcaccuuuuuccuuacacagggcgcccugcucaaugacaagcauucuaacggcaccauuaaagauagauccccuuaucggacgcugaugagcugucccaucggggaggugccuucucccuacaacucccgcuuugaaagcguugccugguccgcuucugccugccacgacggaauuaauuggcugaccaucggcaucagcgggccugauaacggagcuguggccguccucaaguauaauggcauuaucacagacaccauuaaguccuggagaaacaauauccugcggacacaagagagcgagugugcgugcgugaacgggucuuguuucaccgugaugacggauggaccguccgacggccaggccagcuacaaaauuuuuaagaucgaaaaaggcaagaucgucaaaucuguugagaugaaugcucccaacuaucauuacgaagagugcagcuguuacccugauuccucugagauuacaugcgugugccgcgacaauuggcacgggagcaacagacccuggguguccuucaaucagaaccuugaauaucagaucggauacauuuguagcggcaucuuuggggauaauccucggcccaacgacaagaccggaucuugcggcccggucuccagcaauggggccaacggagugaagggcuucucuuuuaaauauggcaacgggguuuggauuggacgcacaaaguccaucagcuccagaaauggcuucgagaugauuugggauccuaacggguggaccggaaccgacaauaacuuuucuaucaaacaagacaucgugggcauuaaugaauggagcggguacuccggcucuuucguccagcaucccgagcugacaggacucgauuguauccggccuugcuucuggguggaacugauucgcggcagacccaaggagaacagcaucuggacguccgggagcucuauuuccuuuuguggaguuaauagcgacaccgugggcuggucuuggcccgauggggcugagcuuccuuucacaaucgacaaauga

SEQ ID NO: 211925 - RNA, 1410 nt, Artificial Sequence; identical to SEQ ID NO: 208810
  derived and/or modified CDS sequence (opt5) from neuraminidase__InfluenzaA__ADN26103

SEQ ID NO: 211926 - RNA, 1410 nt, Artificial Sequence; identical to SEQ ID NO: 208810
  derived and/or modified CDS sequence (opt5) from neuraminidase__InfluenzaA__ADN26104

SEQ ID NO: 211927 - RNA, 1410 nt, Artificial Sequence; identical to SEQ ID NO: 208810
  derived and/or modified CDS sequence (opt5) from neuraminidase__InfluenzaA__ADN26105

SEQ ID NO: 211928 - RNA, 1410 nt, Artificial Sequence; identical to SEQ ID NO: 208810
  derived and/or modified CDS sequence (opt5) from neuraminidase__InfluenzaA__ADN26106

SEQ ID NO: 211929 - RNA, 1410 nt, Artificial Sequence; identical to SEQ ID NO: 210712
  derived and/or modified CDS sequence (opt5) from neuraminidase__InfluenzaA__ADN26107

SEQ ID NO: 211930 - RNA, 1410 nt, Artificial Sequence; identical to SEQ ID NO: 210712
  derived and/or modified CDS sequence (opt5) from neuraminidase__InfluenzaA__ADN26108

SEQ ID NO: 211931 - RNA, 1410 nt, Artificial Sequence; identical to SEQ ID NO: 208810
  derived and/or modified CDS sequence (opt5) from neuraminidase__InfluenzaA__ADN26109

SEQ ID NO: 211932 - RNA, 1410 nt, Artificial Sequence; identical to SEQ ID NO: 209784
  derived and/or modified CDS sequence (opt5) from neuraminidase__InfluenzaA__ADN26110

SEQ ID NO: 211933 - RNA, 1410 nt, Artificial Sequence; identical to SEQ ID NO: 210712
  derived and/or modified CDS sequence (opt5) from neuraminidase__InfluenzaA__ADN26111

SEQ ID NO: 211934 - RNA, 1410 nt, Artificial Sequence; identical to SEQ ID NO: 209784
  derived and/or modified CDS sequence (opt5) from neuraminidase__InfluenzaA__ADN26112

SEQ ID NO: 211935 - RNA, 1410 nt, Artificial Sequence; identical to SEQ ID NO: 210712
  derived and/or modified CDS sequence (opt5) from neuraminidase__InfluenzaA__ADN26113

SEQ ID NO: 211936 - RNA, 1410 nt, Artificial Sequence
  derived and/or modified CDS sequence (opt5) from neuraminidase__InfluenzaA__ADN26114
augaaccccaaucagaagaucauuaccaucggcagcgugugcaugacaauugggauggccaaccugauccuccaaauuggaaauaucaucuccauuuggaucucucacagcauucagcugggcaaccagaaucagaucgagacguguaaccaauccgucauuaccuacgaaaauaacacauggguuaaucagaccuaugugaacaucaauaacacaaauuucgcugccgggcagucuguggucagcgugaaacuugcgggaaacuccucucugugcccuguuagcggcugggcuauuuacuccaaggacaauagcaucagaaucgggucuaaaggagauguguuugucauucgggagccguucaucuccuguagcccccucgaaugccgcaccuuuuuccugacacagggcgcccuucugaacgacaagcauucuaacggcaccauuaaagauagauccccuuaucggacgcucaugagcugucccaucggggaggugccuucucccuacaauucccgcuuugaaagcguugccugguccgcuucugccugccacgacggaauuaacuggcugaccaucggcaucagcgggccugauaauggagcuguggccguccugaaguauaacggcauuaucacagacaccauuaaguccuggagaaauaacauccuccggacacaagagagcgagugugcgugcgugaaugggucuuguuucaccgugaugacggauggaccguccgacggccaggccagcuacaaaauuuuucgcaucgaaaagggcaaaaucgucaagucuguugagaugaacgcucccaauuaucauuacgaagagugcagcuguuacccugauuccucugagauuacaugcgugugcagagacaacuggcacgggagcaaucggcccuggguguccuucaaccagaaucuggaauaucagaucggauacauuuguagcggcaucuuuggggauaacccucgccccaaugacaaaaccggaucuugcggcccggucuccagcaacggggccaacggagugaagggcuucucuuuuaaguauggcaaugggguuuggauuggaagaacaaaauccaucagcucccggaacggcuucgagaugauuugggauccuaauggguggaccggaaccgacaacaauuuuucuaucaagcaagacaucgugggcauuaacgaauggagcggguacuccggcucuuucguccagcaucccgagcuuacaggacuggauuguauccgcccuugcuucuggguggaacucauuagaggccggcccaaagagaauacgaucuggaccagcggguccagcauuucuuuuuguggaguuaacuccgacacagugggcuggagcuggcccgauggggcugagcugccuuucaccaucgacaaguga

SEQ ID NO: 211937 - RNA, 1410 nt, Artificial Sequence; identical to SEQ ID NO: 208810
  derived and/or modified CDS sequence (opt5) from neuraminidase__InfluenzaA__ADN26115

SEQ ID NO: 211938 - RNA, 1410 nt, Artificial Sequence
  derived and/or modified CDS sequence (opt5) from neuraminidase__InfluenzaA__ADN26116
augaaccccaaucagaagaucauuaccaucggcagcgugugcaugacaauugggauggccaaccugauccuccaaauuggaaauaucaucuccauuuggaucucucacagcauucagcugggcaaccagaaucagaucgagacguguaaccaauccgucauuaccuacgaaaauaacacauggguuaaucagaccuaugugaacaucucuaauacaaacuucgcugccgggcagagcguggucuccgugaaacuugcgggaaauucuagccugugcccuguuaacggcugggcuauuuacuccaaggacaauagcaucagaaucgggucuaaaggagauguguuugucauucgggagccguucaucuccuguagcccccucgaaugccgcaccuuuuuccugacacagggcgcccuucugaacgacaagcauucuaacggcaccauuaaagauagauccccuuaucggacgcucaugagcugucccaucggggaggugccuucucccuacaauucccgcuuugaaagcguugccugguccgcuucugccugccacgacggaauuaacuggcugaccaucggcaucagcgggccugauaauggagcuguggccguccugaaguauaacggcauuaucacagacaccauuaaguccuggagaaauaacauccuccggacacaagagagcgagugugcgugcgugaaugggucuuguuucaccgugaugacggauggaccguccgacggccaggccagcuacaaaauuuuucgcaucgaaaagggcaaaaucgucaagucuguugagaugaacgcucccaauuaucauuacgaagagugcagcuguuacccugauuccucugagauuacaugcgugugcagagacaacuggcacgggagcaaucggcccuggguguccuucaaccagaaucuggaauaucagaucggauacauuuguagcggcaucuuuggggauaacccucgccccaaugacaaaaccggaucuugcggcccggucuccagcaacggggccaacggagugaagggcuucucuuuuaaguauggcaaugggguuuggauuggaagaacaaaauccaucagcucccggaacggcuucgagaugauuugggauccuaauggguggaccggaaccgacaacaauuuuucuaucaagcaagacaucgugggcauuaacgaauggagcggguacuccggcucuuucguccagcaucccgagcuuacacgccuggauuguaucagaccuugcuucuggguggaacucauucggggacgccccaaagagaauacgaucuggaccagcggcuccagcauuucuuuuugugggguuaacuccgacacagugggauggagcuggcccgauggcgcugagcugccuuucaccaucgacaaguga

SEQ ID NO: 211939 - RNA, 1410 nt, Artificial Sequence; identical to SEQ ID NO: 210712
  derived and/or modified CDS sequence (opt5) from neuraminidase__InfluenzaA__ADN26117

SEQ ID NO: 211940 - RNA, 1410 nt, Artificial Sequence; identical to SEQ ID NO: 210712
  derived and/or modified CDS sequence (opt5) from neuraminidase__InfluenzaA__ADN26118

SEQ ID NO: 211941 - RNA, 1410 nt, Artificial Sequence; identical to SEQ ID NO: 208810
  derived and/or modified CDS sequence (opt5) from neuraminidase__InfluenzaA__ADN26119

SEQ ID NO: 211942 - RNA, 1410 nt, Artificial Sequence; identical to SEQ ID NO: 209784
  derived and/or modified CDS sequence (opt5) from neuraminidase__InfluenzaA__ADN26120

SEQ ID NO: 211943 - RNA, 1410 nt, Artificial Sequence; identical to SEQ ID NO: 210712
  derived and/or modified CDS sequence (opt5) from neuraminidase__InfluenzaA__ADN26121

SEQ ID NO: 211944 - RNA, 1410 nt, Artificial Sequence; identical to SEQ ID NO: 208810
  derived and/or modified CDS sequence (opt5) from neuraminidase__InfluenzaA__ADN26122

SEQ ID NO: 211945 - RNA, 1410 nt, Artificial Sequence; identical to SEQ ID NO: 208810
  derived and/or modified CDS sequence (opt5) from neuraminidase__InfluenzaA__ADN26123

SEQ ID NO: 211946 - RNA, 1410 nt, Artificial Sequence; identical to SEQ ID NO: 208810
  derived and/or modified CDS sequence (opt5) from neuraminidase__InfluenzaA__ADN26124

SEQ ID NO: 211947 - RNA, 1410 nt, Artificial Sequence; identical to SEQ ID NO: 209784
  derived and/or modified CDS sequence (opt5) from neuraminidase__InfluenzaA__ADN26125

SEQ ID NO: 211948 - RNA, 1410 nt, Artificial Sequence; identical to SEQ ID NO: 209784
  derived and/or modified CDS sequence (opt5) from neuraminidase__InfluenzaA__ADN26126

SEQ ID NO: 211949 - RNA, 1410 nt, Artificial Sequence; identical to SEQ ID NO: 209575
  derived and/or modified CDS sequence (opt5) from neuraminidase__InfluenzaA__ADN26127

SEQ ID NO: 211950 - RNA, 1410 nt, Artificial Sequence; identical to SEQ ID NO: 208810
  derived and/or modified CDS sequence (opt5) from neuraminidase__InfluenzaA__ADN26128

SEQ ID NO: 211951 - RNA, 1410 nt, Artificial Sequence; identical to SEQ ID NO: 209784
  derived and/or modified CDS sequence (opt5) from neuraminidase__InfluenzaA__ADN26129

SEQ ID NO: 211952 - RNA, 1410 nt, Artificial Sequence; identical to SEQ ID NO: 210712
  derived and/or modified CDS sequence (opt5) from neuraminidase__InfluenzaA__ADN26130

SEQ ID NO: 211953 - RNA, 1410 nt, Artificial Sequence
  derived and/or modified CDS sequence (opt5) from neuraminidase__InfluenzaA__ADN26131
augaaccccaaucagaagaucauuaccaucggcagcgugugcaugacaauugggauggccaaccugauccuccaaauuggaaauaucaucuccauuuggaucucucacagcauucagcugggcaaccagaaucagaucgagacguguaaccaauccgucauuaccuacgaaaauaacacauggguuaaucagaccuaugugaacaucucuaauacaaacuucgcugccgggcagagcguggucuccgugaaacuugcgggaaauucuagccugugcccuguuuccggcugggcuauuuacagcaaggacaacucuaucagaaucggguccaaaggagauguguuugucauucgggagccguucaucagcuguucuccccucgaaugccgcaccuuuuuccugacacagggcgcccuucugaaugacaagcauuccaacggcaccauuaaagauagaagcccuuaucggacgcucaugucuugucccaucggggaggugccuucccccuacaacagccgcuuugaauccguugccuggucugcuagcgccugccacgacggaauuaauuggcugaccaucggcaucuccgggccugauaacggagcuguggccguccugaaguauaauggcauuaucacagacaccauuaagagcuggagaaacaauauccuccggacacaagagucugagugugcgugcgugaacggguccuguuucaccgugaugacggauggaccgagcgacggccaggccucuuacaaaauuuuucgcaucgaaaagggcaaaaucgucaagagcguugagaugaaugcucccaacuaucauuacgaagagugcuccuguuacccugauucuagcgagauuacaugcgugugcagagacaauuggcacggguccaaccggcccugggugagcuucaaucagaaccuggaauaucagaucggauacauuuguucuggcaucuuuggggauaauccucgccccaacgacaaaaagggauccugcggcccggucagcucuaauggggccaacggagugaagggcuucuccuuuaaauauggcaacgggguuuggauuggaagaaccaagagcaucuccucucggaauggcuucgagaugauuugggauccuaacggguggacaggaaccgacaauaacuuuagcaucaaacaagacaucgugggcauuaaugaaugguccggguacucuggcagcuucguccagcaucccgagcuuaccggacuggauuguauccgcccuugcuucuggguggaacucauuagaggccggcccaaggagaacacaaucuggacguccgggagcucuauuucccuguguggaguuaauagcgacaccgugggcuggucuuggcccgauggggcugagcuuccuuuuacaaucgacaaauga

SEQ ID NO: 211954 - RNA, 1410 nt, Artificial Sequence; identical to SEQ ID NO: 210712
  derived and/or modified CDS sequence (opt5) from neuraminidase__InfluenzaA__ADN26132

SEQ ID NO: 211955 - RNA, 1410 nt, Artificial Sequence; identical to SEQ ID NO: 209784
  derived and/or modified CDS sequence (opt5) from neuraminidase__InfluenzaA__ADN26134

SEQ ID NO: 211956 - RNA, 1410 nt, Artificial Sequence; identical to SEQ ID NO: 208810
  derived and/or modified CDS sequence (opt5) from neuraminidase__InfluenzaA__ADN26135

SEQ ID NO: 211957 - RNA, 1410 nt, Artificial Sequence; identical to SEQ ID NO: 208810
  derived and/or modified CDS sequence (opt5) from neuraminidase__InfluenzaA__ADN26136

SEQ ID NO: 211958 - RNA, 1410 nt, Artificial Sequence; identical to SEQ ID NO: 208810
  derived and/or modified CDS sequence (opt5) from neuraminidase__InfluenzaA__ADN26137

SEQ ID NO: 211959 - RNA, 1410 nt, Artificial Sequence; identical to SEQ ID NO: 210712
  derived and/or modified CDS sequence (opt5) from neuraminidase__InfluenzaA__ADN26138

SEQ ID NO: 211960 - RNA, 1410 nt, Artificial Sequence; identical to SEQ ID NO: 209784
  derived and/or modified CDS sequence (opt5) from neuraminidase__InfluenzaA__ADN26140

SEQ ID NO: 211961 - RNA, 1410 nt, Artificial Sequence
  derived and/or modified CDS sequence (opt5) from neuraminidase__InfluenzaA__ADN26141
augaaccccaaucagaagaucauuaccaucggcagcgugugcaugacaauugggauggccaaccugauccuccaaauuggaaauaucaucuccauuuggaucucucacagcauucagcugggcaaccagaauagaaucgagacguguaaccaguccgucauuaccuacgaaaauaacacauggguuaaucaaaccuaugugaacaucucuaauacaaacuucgcugccgggcagagcguggucuccgugaaacuugcgggaaauucuagccugugcccuguuuccggcugggcuauuuacagcaaggacaacucuauccggaucggguccaaaggagauguguuugucauucgcgagccguucaucagcuguucuccccucgaaugcagaaccuuuuuccugacacagggcgcccuucugaaugacaagcauuccaacggcaccauuaaagaucggagcccuuaucgcacgcucaugucuugucccaucggggaggugccuucccccuacaacagcagauuugaauccguugccuggucugcuagcgccugccacgacggaauuaauuggcugaccaucggcaucuccgggccugauaacggagcuguggccguccugaaguauaauggcauuaucacagacaccauuaagagcuggcggaacaauauccuccgcacacaggagucugagugugcgugcgugaacggguccuguuucaccgugaugacggauggaccgagcgacggccaagccucuuacaaaauuuuuagaaucgaaaagggcaaaaucgucaagagcguugagaugaaugcucccaacuaucauuacgaagagugcuccuguuacccugauucuagcgagauuacaugcgugugccgggacaauuggcacggguccaaccgccccugggugagcuucaaucagaaccuggaauaucagaucggauacauuuguucuggcaucuuuggggauaauccuagacccaacgacaaaaccggauccugcggcccggucagcucuaauggggccaacggagugaagggcuucuccuuuaaguauggcaacgggguuuggauuggacggacaaaaagcaucuccucucgcaauggcuucgagaugauuugggauccuaacggguggaccggaaccgacaauaacuuuagcaucaagcaggacaucgugggcauuaaugaaugguccggguacucuggcagcuucguccaacaucccgagcuuacaggacuggauuguaucagaccuugcuucuggguggaacucauucggggccgccccaaagagaacacgaucuggaccuccgggagcucuauuuccuuuuguggaguuaauagcgacacagugggcuggucuuggcccgauggggcugagcugccuuucaccaucgacaaguga

SEQ ID NO: 211962 - RNA, 1410 nt, Artificial Sequence
  derived and/or modified CDS sequence (opt5) from neuraminidase__InfluenzaA__ADN26142
augaaccccaaucagaagaucauuaccaucggcagcgugugcaugacaauugggauggccaaccugauccuccaaauuggaaauaucaucuccauuuggaucucucacagcauucagcugggcaaccagaaucagaucgagacguguaaccaauccgucauuaccuacgaaaauaacacauggguuaaucagaccuaugugaacaucucuaauaacaauuucgcugccgggcagagcguggucuccgugaaacuugcgggaaacucuagccugugcccuguuaauggcugggcuauuuacuccaaggacaacagcaucagaaucgggucuaaaggagauguguuugucauucgggagccguucaucuccuguagcccccucgaaugccgcacauuuuuccugacccagggcgcccuucugaacgacaagcauucuaauggcacaauuaaagauagauccccuuaucggacccucaugagcugucccaucggggaggugccuucucccuacaacucccgcuuugaaagcguugccugguccgcuucugccugccacgacggaauuaauuggcugacgaucggcaucagcgggccugauaacggagcuguggccguccugaaguauaauggcauuaucaccgacacaauuaaguccuggagaaacaauauccuccggacccaagagagcgagugugcgugcgugaacgggucuuguuucacagugaugaccgauggaccguccgacggccaggccagcuacaaaauuuuucgcaucgaaaagggcaaaaucgucaagucuguugagaugaaugcucccaacuaucauuacgaagagugcagcuguuacccugauuccucugagauuacgugcgugugcagagacaauuggcacgggagcaaccggcccuggguguccuucaaucagaaccuggaauaucagaucggauacauuuguagcggcaucuuuggggauaauccucgccccaacgacaaaacaggaucuugcggcccggucuccagcaacggggccaauggagugaagggcuucucuuuuaaguauggcaacgggguuuggauuggaagaaccaaauccaucagcucccggaauggcuucgagaugauuugggauccuaacggguggacaggaaccgacaauaacuuuucuaucaagcaagacaucgugggcauuaaugaauggagcggguacuccggcucuuucguccagcaucccgagcuuaccggacuggauuguauccgcccuugcuucuggguggaacucauuagaggccggcccaaagagaacacaaucuggacgagcggguccagcauuucuuuuuguggaguuaauuccgacaccgugggcuggagcuggcccgauggggcugagcugccuuucacaaucgacaaguga

SEQ ID NO: 211963 - RNA, 1410 nt, Artificial Sequence; identical to SEQ ID NO: 208810
  derived and/or modified CDS sequence (opt5) from neuraminidase__InfluenzaA__ADN26143

SEQ ID NO: 211964 - RNA, 1410 nt, Artificial Sequence; identical to SEQ ID NO: 210712
  derived and/or modified CDS sequence (opt5) from neuraminidase__InfluenzaA__ADN26144

SEQ ID NO: 211965 - RNA, 1410 nt, Artificial Sequence; identical to SEQ ID NO: 210712
  derived and/or modified CDS sequence (opt5) from neuraminidase__InfluenzaA__ADN26145

SEQ ID NO: 211966 - RNA, 1410 nt, Artificial Sequence; identical to SEQ ID NO: 208810
  derived and/or modified CDS sequence (opt5) from neuraminidase__InfluenzaA__ADN26146

SEQ ID NO: 211967 - RNA, 1410 nt, Artificial Sequence; identical to SEQ ID NO: 210712
  derived and/or modified CDS sequence (opt5) from neuraminidase__InfluenzaA__ADN26147

SEQ ID NO: 211968 - RNA, 1410 nt, Artificial Sequence; identical to SEQ ID NO: 208810
  derived and/or modified CDS sequence (opt5) from neuraminidase__InfluenzaA__ADN26148

SEQ ID NO: 211969 - RNA, 1410 nt, Artificial Sequence; identical to SEQ ID NO: 210712
  derived and/or modified CDS sequence (opt5) from neuraminidase__InfluenzaA__ADN26149

SEQ ID NO: 211970 - RNA, 1410 nt, Artificial Sequence
  derived and/or modified CDS sequence (opt5) from neuraminidase__InfluenzaA__ADN26150
augaaccccaaucagaagaucauuaccaucggcagcgugugcaugacaauugggauggccucccugauccuccaaauuggaaacaucaucucuauuuggaucagccacuccauucagcugggcaaucagaaccagaucgagacguguaaucaaucugucauuaccuacgaaaacaauacauggguuaaccagaccuaugugaauaucagcaacacaaauuucgcugccgggcaguccguggucucugugaaacuugcgggaaacagcucccugugcccuguuagcggcugggcuauuuacucuaaggacaauuccaucagaaucgggagcaaaggagauguguuugucauucgggagccguucaucucuuguagcccccucgaaugccgcaccuuuuuccugacacagggcgcccuucugaacgacaagcauuccaauggcaccauuaaagauagaucuccuuaucggacgcucauguccugucccaucggggaggugccuagccccuacaacucccgcuuugaaucuguugccuggagcgcuuccgccugccacgacggaauuaacuggcugaccaucggcaucagcgggccugauaauggagcuguggccguccugaaguauaacggcauuaucacagacaccauuaagucuuggagaaauaacauccuccggacacaagaguccgagugugcgugcgugaaugggagcuguuucaccgugaugacggauggaccgucugacggccaggccagcuacaaaauuuuucgcaucgaaaagggcaaaaucgucaaguccguugagaugaacgcucccaauuaucauuacgaagagugcucuuguuacccugauagcuccgagauuacaugcgugugcagagacaacuggcacgggagcaaucggcccugggugucuuucaaccagaaucuggaauaucagaucggauacauuuguuccggcaucuuuggggauaacccucgccccaaugacaaaaccggaagcugcggcccggucucuuccaacggggccaauggagugaagggcuucagcuuuaaguauggcaacgggguuuggauuggaagaacaaaauccaucucuagccggaacggcuucgagaugauuugggauccuaauggguggaccggaaccgacaacaauuuuuccaucaagcaagacaucgugggcauuaacgaauggucuggguacagcggcuccuucguccagcaucccgagcuuacaggacuggauuguauccgcccuugcuucuggguggaacucauuagaggccggcccaaagagaauacgaucuggaccagcgggucuuccauuagcuuuuguggaguuaacucugacacagugggcugguccuggcccgauggggcugagcugccuuucaccaucgacaaguga

SEQ ID NO: 211971 - RNA, 1410 nt, Artificial Sequence; identical to SEQ ID NO: 209784
  derived and/or modified CDS sequence (opt5) from neuraminidase__InfluenzaA__ADN26151

SEQ ID NO: 211972 - RNA, 1410 nt, Artificial Sequence
  derived and/or modified CDS sequence (opt5) from neuraminidase__InfluenzaA__ADN26152
augaaccccaaucagaagaucauuaccaucggcagcgugugcaugacaauugggauggccaaccugauccuccaaauuggaaauaucaucuccauuuggaucucucacagcauucagcugggcaaccagaaucagaucgagacguguaaccaauccgucauuaccuacgaaaauaacacauggguuaaucagaccuaugugaacaucucuaauacaaacuucgcugccgggcagagcguggucuccaugaaacuugcgggaaauucuagccugugcccugugaacggcugggcuauuuacuccaaggacaauagcaucagaaucgggucuaaaggagauguuuuugugauucgggagccguucaucuccuguagcccccucgaaugccgcaccuuuuuccugacacagggcgcccuucugaacgacaagcauucuaacggcaccauuaaagauagauccccuuaucggacgcucaugagcugucccaucggggaggucccuucucccuacaauucccgcuuugaaagcguggccugguccgcuucugccugccacgacggaauuaacuggcugaccaucggcaucagcgggccugauaauggagcuguugccgugcugaaguauaacggcauuaucacagacaccauuaaguccuggagaaauaacauccuccggacacaagagagcgagugugcgugcgucaaugggucuuguuucaccgugaugacggauggaccguccgacggccaggccagcuacaaaauuuuucgcaucgaaaagggcaaaaucgugaagucugucgagaugaacgcucccaauuaucauuacgaagagugcagcuguuacccugauuccucugagauuacaugcguuugcagagacaacuggcacgggagcaaucggcccuggguguccuucaaccagaaucuggaauaucagaucggauacauuuguagcggcaucuuuggggauaacccucgccccaaugacaaaaccggaucuugcggcccgguguccagcaacggggccaacggagucaagggcuucucuuuuaaguauggcaaugggguguggauuggaagaacaaaauccaucagcucccggaacggcuucgagaugauuugggauccuaauggguggacccgcaccgacaacaauuuuucuaucaagcaagacaucguuggaauuaacgaauggagcggcuacuccgggucuuucgugcagcaucccgagcuuacaggccuggauuguaucagaccuugcuucugggucgaacucauucggggacgccccaaagagaauacgaucuggaccagcggcuccagcauuucuuuuuguggggugaacuccgacacaguuggauggagcuggcccgauggcgcugagcugccuuucaccaucgacaaguga

SEQ ID NO: 211973 - RNA, 1410 nt, Artificial Sequence; identical to SEQ ID NO: 210712
  derived and/or modified CDS sequence (opt5) from neuraminidase__InfluenzaA__ADN26153

SEQ ID NO: 211974 - RNA, 1410 nt, Artificial Sequence; identical to SEQ ID NO: 209393
  derived and/or modified CDS sequence (opt5) from neuraminidase__InfluenzaA__ADN26154

SEQ ID NO: 211975 - RNA, 1410 nt, Artificial Sequence; identical to SEQ ID NO: 208810
  derived and/or modified CDS sequence (opt5) from neuraminidase__InfluenzaA__ADN26155

SEQ ID NO: 211976 - RNA, 1410 nt, Artificial Sequence; identical to SEQ ID NO: 209784
  derived and/or modified CDS sequence (opt5) from neuraminidase__InfluenzaA__ADN26157

SEQ ID NO: 211977 - RNA, 1410 nt, Artificial Sequence; identical to SEQ ID NO: 208810
  derived and/or modified CDS sequence (opt5) from neuraminidase__InfluenzaA__ADN26159

SEQ ID NO: 211978 - RNA, 1410 nt, Artificial Sequence; identical to SEQ ID NO: 208810
  derived and/or modified CDS sequence (opt5) from neuraminidase__InfluenzaA__ADN26161

SEQ ID NO: 211979 - RNA, 1410 nt, Artificial Sequence
  derived and/or modified CDS sequence (opt5) from neuraminidase__InfluenzaA__ADN26162
augaaccccaaucagaagaucauuaccaucagcuccgugugcaugacagucggcauggccaaccugauucuccaaaucgggaauauuaucucuaucuggauuagccacuccauccagcugggaaaccagaaucagauugagacguguaaccaaucuguuaucaccuacgaaaauaacacaugggugaaucagaccuaugugaacauuagcaauacaaacuucgcugccggccaguccgucgugucuguuaaacuugcggggaauagcucccugugcccugugagcggaugggcuaucuacucuaaggacaacuccauuagaaucggcagcaaaggggaugucuuugugauccgggagccguucauuucuuguucuccccucgaaugccgcaccuuuuuccugacacagggagcccuucugaaugacaagcauagcaacggcaccaucaaagauagaucuccuuaucggacgcucauguccugucccauuggcgagguuccuagccccuacaacucccgcuuugaaucuguggccuggagcgcuuccgccugccacgacgggaucaauuggcugaccauuggaaucagcggcccugauaacggggcugucgccgugcugaaguauaauggaaucauuacagacaccaucaagucuuggagaaacaauauucuccggacacaagaguccgagugugcgugcgugaacggcagcuguuucaccgucaugacggaugggccgucugacggacaggccagcuacaaaaucuuucgcauugaaaagggcaaaaucguuaaguccguggagaugaaugcucccaacuaucauuacgaagagugcucuuguuacccugauagcuccgagaucacaugcgugugcagagacaauuggcacggcagcaaccggcccugggucucuuucaaucagaaccuggaauaucagauuggguacaucuguuccggaauuuuuggcgauaauccucgccccaacgacaaaaccgggagcugcggaccggugucuuccaauggcgccaacgggguuaagggauucagcuuuaaguauggcaacggcguguggaucgggagaacaaaauccauuucuagccggaauggauucgagaugaucugggauccuaacggcuggaccgggaccgacaauaacuuuuccauuaagcaagacaucgucggaaucaaugaauggucuggcuacagcggguccuucgugcagcaucccgagcuuacaggccuggauuguauucgcccuugcuucuggguugaacucaucagaggacggcccaaagagaacacgauuuggaccagcggcuccuccaucagcuuuuguggggucaauucugacacagugggaugguccuggcccgauggcgcugagcugccuuucaccauugacaaguga

SEQ ID NO: 211980 - RNA, 1410 nt, Artificial Sequence
  derived and/or modified CDS sequence (opt5) from neuraminidase__InfluenzaA__ADN26163
augaaccccaaucagaagaucauuaccaucggcagcgugugcaugacaauugggauggccaaccugauccuccaaauuggaaauaucaucuccauuuggaucucucacagcauucagcugggcaaccagaaucagaucgagacguguaaccaauccgucauuaccuacgaaaauaacacauggguuaaucagaccuaugugaacaucucuaauacaaacuucgcugccgggcagagcguggucuccgugaaacuugcgggaaauucuagccugugcccuguuuccggcugggcuauuuacagcaaggacaacucuaucagaaucggguccaaaggagauguguuugucauucgggagccguucaucagcuguucuccccucgaaugccgcaccuuuuuccugacacagggcgcccuucugaaugacaagcauuccaacggcaccauuaaagauagaagcccuuaucggacgcucaugucuugucccaucggggaggugccuucccccuacaacagccgcuuugaauccguugccuggucugcuagcgccugccacgacggaauuaauuggcugaccaucggcaucuccgggccugauaacggagcuguggccguccugaaguauaauggcauuaucacagacaccauuaagagcuggagaaacaauauccuccggacacaagagucugagugugcgugcgugaacggguccuguuucaccgugaugacggauggaccgagcgacggccaggccucuuacaaaauuuuucgcaucgaaaagggcaaaaucgucaagagcguugagaugaaugcucccaacuaucauuacgaagagugcuccuguuacccugauucuagcgagauuacaugcgugugcagagacaauuggcacggguccaaccggcccugggugagcuucaaucagaaccuggaauaucagaucggauacauuuguucuggcaucuuuggggauaauccucgccccaacgacaaaaccggauccugcggcccggucagcucuaauggggccaacggagugaagggcuucuccuuuaaguauggcaacgggguuuggauuggaagaacaaaaagcaucuccucucggaauggcuucgagaugauuugggauccuaacggguggaccggaaccgacaauaacuuuagcaucaagcaagacaucauuggcaucaaugaaugguccggguacucuggcagcuucgugcagcaucccgagcuuacaggacuggauuguauucgcccuugcuucugggucgaacucaucagaggccggcccaaagagaacacgauuuggaccuccgggagcucuaucuccuuuuguggagugaauagcgacacaguuggcuggucuuggcccgauggggcugagcugccuuucaucauugacaaguga

SEQ ID NO: 211981 - RNA, 1410 nt, Artificial Sequence
  derived and/or modified CDS sequence (opt5) from neuraminidase__InfluenzaA__ADN26164
augaaccccaaucagaagaucauuaccaucggcagcgugugcaugacaauugggauggccaaccugauccuccaaauuggaaauaucaucuccauuuggaucucucacagcauucagcugggcaaccagaaucagaucgagacguguaaccaauccgucauuaccuacgaaaauaacacauggguuaaucagaccuaugugaacaucucuaauacaaacuucgcugccgggcagagcguggucuccgugaaacuugcgggaaauucuagccugugcccuguuuccggcugggcuauuuacagcaaggacaacucuaucagaaucggguccaaaggagauguguuugucauucgggagccguucaucagcuguucuccccucgaaugccgcaccuuuuuccugacacagggcgcccuucugaaugacaagcauuccaacggcaccauuaaagauagaagcccuuaucggacgcucaugucuugucccaucggggaggugccuucccccuacaacagccgcuuugaauccguugccuggucugcuagcgccugccacgacggaauuaauuggcugaccaucggcaucuccgggccugauaacggagcuguggccguccugaaguauaauggcauuaucacagacaccauuaagagcuggagaaacaauauccuccggacacaagagucugagugugcgugccugaacggguccuguuucaccgugaugacggauggaccgagcgacggccaggccucuuacaaaauuuuucgcaucgaaaagggcaaaaucgucaagagcguggagaugaaugcucccaacuaucauuacgaagagugcuccuguuacccugauucuagcgagauuacaugcguuugcagagacaauuggcacggguccaaccggcccugggugagcuucaaucagaaccuugaauaucagaucggauacauuuguucuggcaucuuuggggauaauccucgccccaacgacaaaaccggauccugcggcccggugagcucuaauggggccaacggagucaagggcuucuccuuuaaguauggcaacgggguguggauuggaagaacaaaaagcaucuccucucggaauggcuucgagaugauuugggauccuaacggguggaccggaaccgacaaugacuuuagcaucaagcaagauaucguuggcauuaacgaaugguccggguacucuggcagcuucgugcagcaucccgagcugacaggacucgacuguauccgcccuugcuucugggucgaacugauuagaggccggcccaaagagaauacgaucuggaccuccgggagcucuauuuccuuuuguggagugaacagcgauacaguuggcuggucuuggcccgacggggcugagcuuccuuucaccaucgauaaguga

SEQ ID NO: 211982 - RNA, 1410 nt, Artificial Sequence; identical to SEQ ID NO: 210767
  derived and/or modified CDS sequence (opt5) from neuraminidase__InfluenzaA__ADN26168

SEQ ID NO: 211983 - RNA, 1410 nt, Artificial Sequence; identical to SEQ ID NO: 210033
  derived and/or modified CDS sequence (opt5) from neuraminidase__InfluenzaA__ADN26178

SEQ ID NO: 211984 - RNA, 1410 nt, Artificial Sequence; identical to SEQ ID NO: 208810
  derived and/or modified CDS sequence (opt5) from neuraminidase__InfluenzaA__ADN26868

SEQ ID NO: 211985 - RNA, 1410 nt, Artificial Sequence; identical to SEQ ID NO: 208810
  derived and/or modified CDS sequence (opt5) from neuraminidase__InfluenzaA__ADN26869

SEQ ID NO: 211986 - RNA, 1410 nt, Artificial Sequence; identical to SEQ ID NO: 208810
  derived and/or modified CDS sequence (opt5) from neuraminidase__InfluenzaA__ADN26870

SEQ ID NO: 211987 - RNA, 1410 nt, Artificial Sequence
  derived and/or modified CDS sequence (opt5) from neuraminidase__InfluenzaA__ADN26871
augaaccccaaucagaagaucauuaccaucggcagcgugugcaugacaauugggauggccaaccugauccuccaaauuggaaauaucaucuccauuuggaucucucacagcauucagcugggcaaccagaaucagaucgagacguacaaccaauccgucauuaccuaugaaaauaacacauggguuaaucagaccuacgugaacaucucuaauacaaacuucgcugccgggcagagcguggucuccgugaaacuugcgggaaauucuagccuguguccuguuuccggcugggcuauuuauagcaaggacaacucuaucagaaucggguccaaaggagauguguuugucauucgggagccguucaucagcugcucuccccucgaaugucgcaccuuuuuccugacacagggcgcccuucugaaugacaagcauuccaacggcaccauuaaagauagaagcccuuaccggacgcucaugucuugccccaucggggaggugccuucccccuauaacagccgcuuugaauccguugccuggucugcuagcgccugucacgacggaauuaauuggcugaccaucggcaucuccgggccugauaacggagcuguggccguccugaaguacaauggcauuaucacagacaccauuaagagcuggagaaacaauauccuccggacacaagagucugagugcgcgugugugaacggguccugcuucaccgugaugacggauggaccgagcgacggccaggccucuuauaaaauuuuucgcaucgaaaagggcaaaaucgucaagagcguugagaugaaugcucccaacuaccauuacgaagaguguuccugcuauccugauucuagcgagauuacaugugugugcagagacaauuggcacggguccaaccggcccugggugagcuucaaucagaaccuggaauaccagaucggauauauuugcucuggcaucuuuggggauaauccucgccccaacgacaaaaccggauccuguggcccggucagcucuaauggggccaacggagugaagggcuucuccuuuaaguacggcaacgggguuuggauuggaagaacaaaaagcaucuccucucggaauggcuucgagaugauuugggauccuaacggguggaccggaaccgacaauaacuuuagcaucaagcaagacaucgugggcauuaaugaaugguccggguauucuggcagcuucguccagcaucccgagcuuacaggacuggauugcauccgcccuuguuucuggguggaacucauuagaggccggcccaaagagaacacgaucuggaccuccgggagcucuauuuccuuuugcggaguuaauagcgacacagugggcuggucuuggcccgauggggcugagcugccuuucaccaucgacaaguga

SEQ ID NO: 211988 - RNA, 1410 nt, Artificial Sequence
  derived and/or modified CDS sequence (opt5) from neuraminidase__InfluenzaA__ADN26872
augaaccccaaucagaagaucauuaccaucggcagcgugugcaugacaauugggauggccaaccugauccuccaaauuggaaauaucaucuccauuuggaucucucacagcauucagcugggcaaccagaaucagaucgagacguguaaccaauccgucauuaccuacgaaaauaacacauggguuaaucagaccuaugugaacaucucuaauacaaacuucgcugccgggcuuagcguggucuccgugaaacuggcgggaaauucuagccucugcccuguuuccggcugggcuauuuacagcaaggacaacucuaucagaaucggguccaaaggagauguguuugucauucgggagccguucaucagcuguucuccccuggaaugccgcaccuuuuuccuuacacagggcgcccugcucaaugacaagcauuccaacggcaccauuaaagauagaagcccuuaucggacgcugaugucuugucccaucggggaggugccuucccccuacaacagccgcuuugaauccguugccuggucugcuagcgccugccacgacggaauuuccuggcugaccaucggcaucagcgggccugauaauggagcuguggccguccucaaguauaacggcauuaucacagacaccauuaagucuuggagaaauaacauccugcggacacaggaguccgagugugcgugcgugaaugggagcuguuucaccgugaugacggauggaccgucugacggccaagccagcuacaaaauuuuucgcaucgaaaagggcaaaaucgucaaguccguugagaugaacgcucccaauuaucauuacgaagagugcucuuguuacccugauagcuccgagauuacaugcgugugcagagacaacuggcacgggagcaaucggcccugggugucuuucaaccagaaucuugaauaucagaucggauacauuuguuccggcaucuuuggggauaacccucgccccaaugacaaaaccggaagcugcggcccggucucuuccaacggggccaauggagugaagggcuucagcuuuaaguauggcaacgggguuuggauuggaagaacaaaauccaucucuagccggaacggcuucgagaugauuugggauccuaauggguggaccggaaccgacaacaauuuuuccaucaagcaggacaucgugggcauuaacgaauggucuggguacagcggcuccuucguccaacaucccgagcugacaggacucgauuguauccgcccuugcuucuggguggaacugauuagaggccggcccaaagagaauacgaucuggaccagcgggucuuccauuagcuuuuguggaguuaacucugacacagugggcugguccuggcccgauggggcugagcuuccuuucaccaucgacaaguga

SEQ ID NO: 211989 - RNA, 1410 nt, Artificial Sequence; identical to SEQ ID NO: 208810
  derived and/or modified CDS sequence (opt5) from neuraminidase__InfluenzaA__ADN26873

SEQ ID NO: 211990 - RNA, 1410 nt, Artificial Sequence; identical to SEQ ID NO: 208810
  derived and/or modified CDS sequence (opt5) from neuraminidase__InfluenzaA__ADN26874

SEQ ID NO: 211991 - RNA, 1410 nt, Artificial Sequence; identical to SEQ ID NO: 208810
  derived and/or modified CDS sequence (opt5) from neuraminidase__InfluenzaA__ADN26875

SEQ ID NO: 211992 - RNA, 1410 nt, Artificial Sequence; identical to SEQ ID NO: 208810
  derived and/or modified CDS sequence (opt5) from neuraminidase__InfluenzaA__ADN26876

SEQ ID NO: 211993 - RNA, 1410 nt, Artificial Sequence; identical to SEQ ID NO: 208810
  derived and/or modified CDS sequence (opt5) from neuraminidase__InfluenzaA__ADN26877

SEQ ID NO: 211994 - RNA, 1410 nt, Artificial Sequence; identical to SEQ ID NO: 208810
  derived and/or modified CDS sequence (opt5) from neuraminidase__InfluenzaA__ADN26878

SEQ ID NO: 211995 - RNA, 1410 nt, Artificial Sequence; identical to SEQ ID NO: 209947
  derived and/or modified CDS sequence (opt5) from neuraminidase__InfluenzaA__ADN26879

SEQ ID NO: 211996 - RNA, 1410 nt, Artificial Sequence; identical to SEQ ID NO: 208810
  derived and/or modified CDS sequence (opt5) from neuraminidase__InfluenzaA__ADN26880

SEQ ID NO: 211997 - RNA, 1410 nt, Artificial Sequence; identical to SEQ ID NO: 208810
  derived and/or modified CDS sequence (opt5) from neuraminidase__InfluenzaA__ADN26881

SEQ ID NO: 211998 - RNA, 1410 nt, Artificial Sequence; identical to SEQ ID NO: 208810
  derived and/or modified CDS sequence (opt5) from neuraminidase__InfluenzaA__ADN26882

SEQ ID NO: 211999 - RNA, 1410 nt, Artificial Sequence; identical to SEQ ID NO: 208810
  derived and/or modified CDS sequence (opt5) from neuraminidase__InfluenzaA__ADN26883

SEQ ID NO: 212000 - RNA, 1413 nt, Artificial Sequence
  derived and/or modified CDS sequence (opt5) from neuraminidase__InfluenzaA__ADN89064
augaaccccaaucagaagaucauuaccaucggcagcauuuccaucgccauugggaucaucucucugaugcuccaaauuggaaacaucauuagcaucugggcuucccacucuauucagacaggcagccagaauaacacggggaucugcaaucagagaauuaucaccuacgagaacuccacaugggugaaucauaccuaugugaacaucaauaacacaaauguuguggccggagaagacaaaaccucugugacacuggcgggcaacagcucccuuuguagcauuucugggugggcuaucuacaccaaggauaauuccauucggaucggaagcaaaggcgacgucuucgugauucgcgagccuuuuaucucuugcucccaccuggaauguagaacguucuuucucacccaaggcgcccugcuuaacgauaagcauagcaaugggacaguuaaagaccggucuccguaucgcgcccugauguccugcccccucggagaggcuccuagccccuacaacuccaaguucgaaucuguggccuggagcgcuuccgccugucacgauggcaugggguggcugaccaucggaauuagcggcccugacaacggggcggucgccgugcugaaguauaauggaaucauuacaggcaccaucaaaucuuggaagaaacagauucucagaacgcaggaguccgagugcguuuguaugaacggcagcugcuuuacaaucaugaccgaugggcccucuaauaaggcugccagcuacaaaaucuucaagauugaaaagggaaaagugacaaaguccaucgagcugaacgcuccuaauuuuuauuacgaagaguguucuugcuacccggacaccggcauugucaugugugugugccgggauaacuggcaugggagcaaucgccccuggguguccuucaaccagaaucuugacuaucaaaucggauacauuugcagcggcgucuuuggggauaacccuagacccgaggacggagaaggcucuuguaauccuguuaccguggauggcgccaacggggugaaaggauucuccuauaaguacggcaauggggucuggaucggacggacaaaaagcaaccgccugagacggggcuuugagaugauuugggaccccaauggguggacgaacaccgacucugauuucuccgugaagcaggacguuguggcgaucacagauuggagcggcuauuccggaucuuuuguccagcacccggaacucaccggccuggacugcauccgcccuuguuucuggguggagcuuguuagagggcugccccgggaaaacacaaccauuuggacgagcggauccucuaucagcuucugcggcgucaauuccgauacagccaacuggagcuggccugacggggcugagcuccccuuuaccauugauaaauga

SEQ ID NO: 212001 - RNA, 1413 nt, Artificial Sequence; identical to SEQ ID NO: 209533
  derived and/or modified CDS sequence (opt5) from neuraminidase__InfluenzaA__ADN89075

SEQ ID NO: 212002 - RNA, 1413 nt, Artificial Sequence
  derived and/or modified CDS sequence (opt5) from neuraminidase__InfluenzaA__ADN89086
augaaccccaaucagaagaucauuaccaucggcagcauuuccaucgccauugggaucaucucucugaugcuccaaauuggaaacaucauuagcaucugggcuucccacucuauucagacaggcagccagaauaacacggggaucugcaaucagagaauuaucaccuacgagaacuccacaugggugaaucauaccuaugugaacaucaauaacacaaauguuguggccggagaagacaaaaccucugugacacuggcgggcaacagcucccuuuguagcauuucugggugggcuaucuacaccaaggauaauuccauucggaucggaagcaaaggcgacgucuucgugauucgcgagccuuuuaucucuugcucccaccuggaauguagaacguucuuucucacccaaggcgcccugcuuaacgauaagcauagcaaugggacaguuaaagaccggucuccguaucgcgcccugauguccugcccccucggagaggcuccuagccccuacaacuccaaguucgaaucuguggccuggagcgcuuccgccugucacgauggcaugggguggcugaccaucggaauuagcggcccugacaacggggcggucgccgugcugaaguauaauggaaucauuacaggcaccaucaaaucuuggaagaaacagauucucagaacgcaggaguccgagugcguuuguaugaacggcagcugcuuuacaaucaugaccgaugggcccucuaauaagacagcuagcuacaaaaucuucaagauugaaaagggaaaagugaccaaguccaucgagcugaacgccccuaauuuuuauuacgaagaguguucuugcuacccggacaccggcauugucaugugugugugccgggauaacuggcaugggagcaaucgccccuggguguccuucaaccagaaucuugacuaucaaaucggauacauuugcagcggcgucuuuggggauaacccuagacccgaggacggagaaggcucuuguaauccuguuacaguggauggcgcuaacggggugaaaggauucuccuauaaguacggcaauggggucuggaucggacggacgaaaagcaaccgccugagaaagggcuuugagaugauuugggaccccaauggguggaccaacacagacucugauuucuccgugaaacaggacguuguggccaucaccgauuggagcggcuauuccggaucuuuuguccagcacccggaacucacaggccuggacugcauccggccuuguuucuggguggagcuuguucgcgggcugcccagagaaaacaccacgauuuggacaagcggauccucuaucagcuucugcggcgucaauuccgauaccgcgaacuggagcuggccugacggggccgagcuccccuuuaccauugauaaguga

SEQ ID NO: 212003 - RNA, 1413 nt, Artificial Sequence; identical to SEQ ID NO: 209533
  derived and/or modified CDS sequence (opt5) from neuraminidase__InfluenzaA__ADN89097

SEQ ID NO: 212004 - RNA, 1413 nt, Artificial Sequence
  derived and/or modified CDS sequence (opt5) from neuraminidase__InfluenzaA__ADN89108
augaaccccaaucagaagaucauuaccaucggcagcauuuccaucgccauugggaucaucucucugaugcuccaaauuggaaacaucauuagcaucugggcuucccacucuauucagacaggcagccagaauaacacggggaucugcaaucagagaauuaucaccuacgagaacuccacaugggugaaucauaccuaugucaacaucaauaacacaaauguuguggccggagaagacaaaaccucugugacacuggcgggcaacagcucccuuuguagcauuucugggugggcuaucuacaccaaggauaauuccauucggaucggaagcaaaggcgacgucuucgugauucgcgagccuuuuaucucuugcucccaccuggaauguagaacguucuuucucacccaaggcgcccugcuuaacgauaagcauagcaaugggacaguuaaagaccggucuccguaucgcgcccugauguccugcccccucggagaggcuccuagccccuacaacuccaaguucgaaucuguggccuggagcgcuuccgccugucacgauggcaugggguggcugaccaucggaauuagcggcccugacaacggggcggucgccgugcugaaguauaauggaaucauuacaggcaccaucaaaucuuggaagaaacagauucucagaacgcaggaguccgagugcguuuguaugaacggcagcugcuuuacaaucaugaccgaugggcccucuaauaaggcugccagcuacaaaaucuucaagauugaaaagggaaaagugacaaaguccaucgagcugaacgcuccuaauuuuuauuacgaagaguguucuugcuacccggacaccggcauugucaugugugugugccgggauaacuggcaugggagcaaucgccccuggguguccuucaaccagaaucuugacuaucaaaucggauacauuugcagcggcgucuuuggggauaacccuagacccgaggacggagaaggcucuuguaauccuguuaccguggauggcgccaacggggugaaaggauucuccuauaaguacggcaauggggucuggaucggacggacaaaaagcaaccgccugagaaagggcuuugagaugauuugggaccccaauggguggacgaacaccgacucugauuucuccgugaaacaggacguugugagcaucacagauugguccggcuauucuggcagcuuuguccagcacccggaacucaccggacuggacugcauccggccuuguuucuggguggagcuuguucgcgggcugcccagagaaaacacaaccauuuggacguccggaucuagcaucuccuucugcggcgugaauagcgauacagcgaacuggucuuggccugacggggccgagcuccccuuuaccauugauaaguga

SEQ ID NO: 212005 - RNA, 1413 nt, Artificial Sequence
  derived and/or modified CDS sequence (opt5) from neuraminidase__InfluenzaA__ADN89119
augaaccccaaucagaagaucauuaccaucggcagcauuuccaucgccauugggaucaucucucugaugcuccaaauuggaaacaucauuagcaucugggcuucccacucuauucagacaggcagccagaauaacacggggaucugcaaucagagaauuaucaccuacgagaacuccacaugggugaaucauaccuaugugaacaucaauaacacaaauguuguggccggagaagacaaaaccucugugacacuggcgggcaacagcucccuuuguagcauuucugggugggcuaucuacaccaaggauaauuccauucggaucggaagcaaaggcgacgucuucgugauucgcgagccuuuuaucucuugcucccaccuggaauguagaacguucuuucucacccaaggcgcccugcuuaacgauaagcauagcaaugggacaguuaaagaccggucuccguaucgcgcccugauguccugcccccucggagaggcuccuagccccuacaacuccaaguucgaaucuguggccuggagcgcuuccgccugucacgauggcaugggguggcugaccaucggaauuagcggcccugacaacggggcggucgccgugcugaaguauaauggaaucauuacaggcaccaucaaaucuuggaagaaacagauucucagaacgcaggaguccgagugcguuuguaugaacggcagcugcuuuacaaucaugaccgaugggcccucuaauaaggcugccagcuacaaaaucuucaagauugaaaagggaaaagugacaaaguccaucgagcugaacgcuccuaauuuuuauuacgaagaguguucuugcuacccggacaccggcauugucaugugugugugccgggauaacuggcaugggagcaaucgccccuggguguccuucaaccagaaucuugacuaucaaaucggauacauuugcagcggcgucuuuggggauaacccuagacccgaggacggagaaggcucuuguaauccuguuaccgugaacggcgccgauggggugaaaggauucuccuauaaguacggcaauggggucuggaucggacggacaaaaagcaaccgccugagaaagggcuuugagaugauuugggaccccaauggguggacgaacaccgacucugauuucuccgugaaacaggacguuguggcgaucacagauuggagcggcuauuccggaucuuuuguccagcacccggaacucaccggccuggacugcacacggccuuguuucuggguggagcuuguucgcgggcugcccagagaaaacaccacgaucuggacaagcggauccucuauuagcuucugcggcgucaauuccgauaccgccaacuggagcuggccugacggggcugagcuccccuuuaccaucgauaaguga

SEQ ID NO: 212006 - RNA, 1413 nt, Artificial Sequence
  derived and/or modified CDS sequence (opt5) from neuraminidase__InfluenzaA__ADN89130
augaaccccaaucagaagaucauuaccaucggcagcauuuccaucgccauugggaucaucucucugaugcuccaaauuggaaacaucauuagcaucugggcuucccacucuauucagacaggcagccagaauaacacggggaucugcaaucagagaauuaucaccuacgagaacuccacaugggugaaucauaccuaugucaacaucaauaacacaaauguuguggccggagaagacaaaaccucugugacacuggcgggcaacagcucccuuuguagcauuucugggugggcuaucuacaccaaggauaauuccauucggaucggaagcaaaggcgacgucuucgugauucgcgagccuuuuaucucuugcucccaccuggaauguagaacguucuuucucacccaaggcgcccugcuuaacgauaagcauagcaaugggacaguuaaagaccggucuccguaucgcgcccugauguccugcccccucggagaggcuccuagccccuacaacuccaacuucgaaucuguggccuggagcgcuuccgccugucacgauggcaugggguggcugaccaucggaauuagcggcccugacaauggggcggucgccgugcugaaguauaacggaaucauuacaggcaccaucaagucuuggaaaaagcagauucucagaacgcaggaguccgagugcguuuguaugaauggcagcugcuuuacaaucaugaccgaugggcccucuaacaaagcugccagcuacaagaucuucaaaauugaaaagggaaaggugacaaaauccaucgagcugaaugcuccuaacuuuuauuacgaagaguguucuugcuacccggacaccggcauugucaugugugugugccgggauaauuggcaugggagcaaccgccccuggguguccuucaaucagaaccuugacuaucaaaucggauacauuugcagcggcgucuuuggggauaauccuagacccgaggacggagaaggcucuuguaacccuguuaccguggauggcgccaauggggugaagggauucuccuauaaauacggcaacggggucuggaucggacggacaaagagcaaucgccugagaaaaggcuuugagaugauuugggaccccaacggguggacgaacaccgacucugauuucuccgugaagcaggacguuguggcgaucacagauuggagcggcuauuccggaucuuuuguccagcacccggaacucaccggccuggacugcauccggccuuguuucuggguggagcuuguucgcgggcugcccagagaaaauacaaccauuuggacgagcggauccucuaucagcuucugcggcgugaacggggauacagccaauugguccuggccugacggagcugagcuccccuuuaccauugauaaauga

SEQ ID NO: 212007 - RNA, 1413 nt, Artificial Sequence; identical to SEQ ID NO: 212004
  derived and/or modified CDS sequence (opt5) from neuraminidase__InfluenzaA__ADN89141

SEQ ID NO: 212008 - RNA, 1413 nt, Artificial Sequence
  derived and/or modified CDS sequence (opt5) from neuraminidase__InfluenzaA__ADN89152
augaaccccaaucagaagaucauuaccaucggcagcauuuccaucgccauugggaucaucucucugaugcuccaaauuggaaacaucauuagcaucugggcuucccacucuauucagacaggcagccagaauaacacggggaucugcaaucagagaauuaucaccuacgagaacuccacaugggugaaucauaccuaugucaacaucaauaacacaaauguuguggccggagaagacaaaaccucugugacacuggcgggcaacagcucccuuuguagcauuucugggugggcuaucuacaccaaggauaauuccauucggaucggaagcaaaggcgacgucuucgugauucgcgagccuuuuaucucuugcucccaccuggaauguagaacguucuuucucacccaaggcgcccugcuuaacgauaagcauagcaaugggacaguuaaagaccggucuccguaucgcgcccugauguccugcccccucggagaggcuccuagccccuacaacuccaaguucgaaucuguggccuggagcgcuuccgccugucacgauggcaugggguggcugaccaucggaauuagcggcccugacaacggggcggucgccgugcugaaguauaauggaaucauuacaggcaccaucaaaucuuggaagaaacagauucucagaacgcaggaguccgagugcguuuguaugaacggcagcugcuuuacaaucaugaccgaugggcccucuaauaaggcugccagcuacaaaaucuucaagauugaaaagggaaaagugacaaaguccaucgagcugaacgcuccuaauuuuuauuacgaagaguguucuugcuacccggacaccggcauugucaugugugugugccgggauaacuggcaugggagcaaucgccccuggguguccuucaaccagaaucuugacuaucaaaucggauacauuugcagcggcgucuuuggggauaacccuagacccgaggacggagaaggcucuuguaauccuguuaccaucgauggcgccaacggggugaaaggauucuccuauaaguacggcaaugggguguggauuggacggacaaaaagcaaccgccugagaaagggcuuugagaugaucugggaccccaauggguggacgaacaccgacucugauuucuccgucaaacaggacgugguugcgaucacagauuggagcggcuauuccggaucuuuugugcagcacccggaacucaccggccuggacugcauucggccuuguuucugggucgagcuugugcgcgggcugcccagagaaaacacaaccaucuggacgagcggauccucuauuagcuucugcggcguuaauuccgauacagccaacuggagcuggccugacggggcugagcuccccuuuaccaucgauaaguga

SEQ ID NO: 212009 - RNA, 1413 nt, Artificial Sequence
  derived and/or modified CDS sequence (opt5) from neuraminidase__InfluenzaA__ADN89163
augaaccccaaucagagaaucauuaccaucggcagcauuuccaucgccauugggaucaucucucugaugcuccaaauuggaaacaucauuagcaucugggcuucccacucuauucagacaggcagccagaauaacacggggaucugcaaucagcggauuaucaccuacgagaacuccacaugggugaaucauaccuaugucaacaucaauaacacaaauguuguggccggagaagacaagaccucugugacacuggcgggcaacagcucccuuuguagcauuucugggugggcuaucuacaccaaagauaauuccauucgcaucggaagcaagggcgacgucuucgugauuagagagccuuuuaucucuugcucccaccuggaaugucggacguucuuucucacccaaggcgcccugcuuaacgauaaacauagcaaugggacagccaaggaccgcucuccguauagagcucugauguccugcccccucggagaggccccuagccccuacaacuccaaauucgaaucuguugcuuggagcgccuccgcgugucacgauggcaugggguggcugaccaucggaauuagcggcccugacaacggggccguggcuguccugaaguauaauggaaucauuacaggcaccaucaagucuuggaaaaagcagauucuccggacgcaggaguccgagugcguguguaugaacggcagcugcuuuacaaucaugaccgaugggcccucuaauaaagccgcuagcuacaagaucuucaaaauugaaaagggaaagguuacaaaauccaucgagcugaacgccccuaauuuuuauuacgaagaguguucuugcuacccggacaccggcauugugaugugugucugccgcgauaacuggcaugggagcaauagacccuggguguccuucaaccagaaucuugacuaucaaaucggauacauuugcagcggcguguuuggggauaacccucggcccgaggacggagaaggcucuuguaauccugucaccguugauggcgcgaacggggugaagggauucuccuauaaauacggcaaugggguguggaucggacgcacaaagagcaacagacugcggaaaggcuuugagaugauuugggaccccaauggguggacgaacaccgacucugauuucuccgucaagcaggacgugguugccaucacagauuggagcggcuauuccggaucuuuugugcagcacccggaacucaccggccuggacugcauccgcccuuguuucugggucgagcuugugagagggcugccccgggaaaacacaaccauuuggacgagcggauccucuaucagcuucugcggcguuaauuccgauacagcuaacuggagcuggccugacggggccgagcuccccuuuaccauugauaaauga

SEQ ID NO: 212010 - RNA, 1413 nt, Artificial Sequence; identical to SEQ ID NO: 211002
  derived and/or modified CDS sequence (opt5) from neuraminidase__InfluenzaA__ADN89174

SEQ ID NO: 212011 - RNA, 1413 nt, Artificial Sequence; identical to SEQ ID NO: 212004
  derived and/or modified CDS sequence (opt5) from neuraminidase__InfluenzaA__ADN89185

SEQ ID NO: 212012 - RNA, 1413 nt, Artificial Sequence
  derived and/or modified CDS sequence (opt5) from neuraminidase__InfluenzaA__ADN89196
augaaccccaaucagaagaucauuaccaucggcagcauuuccaucgccauugggaucaucucucugaugcuccaaauuggaagcaucauuuccaucugggcuucucacagcauucagacaggcucccagaacaauacggggaucugcaaccagagaauuaucaccuacgagaauagcacaugggugaaccauaccuaugucaauaucaacaauacaaacguuguggccggagaagacaaaaccagcgugacacuggcgggcaauuccagccuuuguucuauuuccgggugggcuaucuacaccaaggauaacagcauucggaucggaucuaaaggcgacgucuucgugauucgcgagccuuuuaucuccugcagccaccuggaauguagaacguucuuucucacccaaggcgcccugcuuaaugauaagcauucuaacgggacaguuaaagaccgguccccguaucgcgcccugaugagcugcccccucggagaggcuccuucccccuacaauucuaaguucgaaagcguggccugguccgcuagcgccugucacgauggcaugggguggcugaccaucggaauuucuggcccugacaacggggcggucgccgugcugaaguauaacggaaucauuacaggcaccaucaaauccuggaagaaacagauucucagaacgcaggagagcgagugcguuuguaugaauggcucuugcuuuacaaucaugaccgaugggcccagcaacaaggcugccuccuacaaaaucuucaagauugaaaagggaaaagugacaaagucuaucgagcugaaugcuccuaacuuuuauuacgaagaguguagcugcuacccggacaccggcauugucaugugugugugccgggauaauuggcauggguccaaccgccccugggugagcuucaaucagaaccuugacuaucaaaugggauacaucugcucuggcgucuuuggggauaauccuagacccgaggacggagaaggcuccuguaacccuguuaccguggauggcgccaauggggugaaaggauucagcuauaaguacggcaacggggucuggauuggacggacaaaaucuaaucgccugagaaagggcuuugagaugaucugggaccccaacggguggacgaauaccgacuccgauuucagccucaaacaggacgugguugcgauuacagauugguccggcuauucuggaucuuuugugcagcacccggaacugaccggccuugacugcauccggccuuguuucugggucgagcuggugcgcgggcuccccagagaaaacacaaccaucuggacguccggaucuagcauuuccuucugcggcguuaacagcgauacagccaauuggucuuggccugacggggcugagcugcccuuuaccaucgauaaguga

SEQ ID NO: 212013 - RNA, 1413 nt, Artificial Sequence; identical to SEQ ID NO: 212012
  derived and/or modified CDS sequence (opt5) from neuraminidase__InfluenzaA__ADN89207

SEQ ID NO: 212014 - RNA, 1413 nt, Artificial Sequence
  derived and/or modified CDS sequence (opt5) from neuraminidase__InfluenzaA__ADN89218
augaaccccaaucagaagaucauuaccaucggcagcauuuccaucgccauugggaucaucucucugaugcuccaaauuggaaacaucauuagcaucugggcuucccacucuauucagccuggcagccagaauaacacagggaucugcaaucagagaauuaucacguacgagaacuccaccugggugaaucauacauaugucaacaucaauaacaccaauguuguggccggagaagacaaaacaucugugacccuggcgggcaacagcucccuuuguagcauuucugggugggcuaucuacacaaaggauaauuccauucggaucggaagcaaaggcgacgucuucgugauucgcgagccguuuaucucuugcucccaccuggaauguagaaccuucuuucucacgcaaggcgcccugcuuaacgauaagcauagcaaugggaccguuaaagaccggucucccuaucgcgcccugauguccugcccucucggagaggcucccagcccuuacaacuccaaguucgaaucuguggccuggagcgcuuccgccugucacgauggcaugggguggcugacaaucggaauuagcggccccgacaacggggcggucgccgugcugaaguauaauggaaucauuaccggcacaaucaaaucuuggaagaaacagauucucagaacccaggaguccgagugcguuuguaugaacggcagcugcuuuacgaucaugacagaugggccuucuaauaaggcugccagcuacaaaaucuucaagauugaaaagggaaaagugaccaaguccaucgagcugaacgcuccgaauuuuuauuacgaagaguguucuugcuaccccgacacaggcauugucaugugugugugccgggauaacuggcaugggagcaaucgcccuuggguguccuucaaccagaaucuugacuaucaaaucggauacauuugcagcggcgucuuuggggauaaccccagaccugaggacggagaaggcucuuguaaucccguuaccguggauggcgccaacggggugaaaggauucuccuauaaguacggcaauggggucuggaucggacggaccaaaagcaaccgccugagaaagggcuuugagaugauuugggacccgaauggguggacaaacacggacucugauuucuccgugaaacaggacguuguggcgaucaccgauuggagcggcuauuccggaucuuuuguccagcacccugaacucacaggccuggacugcauccggcccuguuucuggguggagcuuguucgcgggcugccuagagaaaacaccacaauuuggaccagcggauccucuaucagcuucugcggcgugaauggggauacggccaacugguccuggcccgacggagcugagcuccccuuuacaauugauaaguga

SEQ ID NO: 212015 - RNA, 1413 nt, Artificial Sequence
  derived and/or modified CDS sequence (opt5) from neuraminidase__InfluenzaA__ADN89229
augaaccccaaucagaagaucauuaccaucggcagcauuuccaucgccauugggaucaucucucugaugcuccaaauuggaaacaucauuagcaucugggcuucccacucuauucagacaggcagccagaauaacacggggaucugcaaucagagaauuaucaccuacgagaacuccacaugggugaaucauaccuaugugaacaucaauaacacaaauguuguggccggagaagacaaaaccucugugacacuggcgggcaacagcucccuuuguagcauuucugggugggcuaucuacaccaaggauaauuccauucggaucggaagcaaaggcgacgucuucgugauucgcgagccuuuuaucucuugcucccaccuggaauguagaacguucuuucucacccaaggcgcccugcuuaacgauaagcauagcaaugggacaguuaaagaccggucuccguaucgcgcccugauguccugcccccucggagaggcuccuagccccuacaacuccaaguucgaaucuguggccuggagcgcuuccgccugucacgauggcaugggguggcugaccaucggaauuagcggcccugacaacggggcggucgccgugcugaaguauaauggaaucauuacaggcaccaucaaaucuuggaagaaacagauucucagaacgcaggaguccgagugcguuuguaugaacggcagcugcuuuacaaucaugaccgaugggcccucuaauaaggcugccagcuacaaaaucuucaagauugaaaagggaaaagugacaaaguccaucgagcugaacgcuccuaauuuuuauuacgaagaguguucuugcuacccggacaccggcauugucaugugugugugccgggauaacuggcaugggagcaaucgccccuggguguccuucaaccagaaucuugacuaucaaaucggauacauuugcagcggcgucuuuggggauaacccuagacccgaggacggagaaggcucuuguaauccuguuaccguggauggcgccaacggggugaaaggauucuccuauaaguacggcaauggggucuggaucggacggacaaaaagcaaccgccugagaaagggcuuugagaugauuugggaccccaauggguggacgaacaccgacucugauuucuccgugaaacaggacguuguggcgacaaccgauuggagcggcuauuccggaucuuuuguccagcacccggaacucacaggccuggacugcauccggccuuguuucuggguggagcuuguucgcgggcugcccagagaaaacaccacgaucuggacaagcggauccucuauuagcuucugcggcgucaauuccgauaccgccaacuggagcuggccugacggggcugagcuccccuuuaccaucgauaaguga

SEQ ID NO: 212016 - RNA, 1413 nt, Artificial Sequence
  derived and/or modified CDS sequence (opt5) from neuraminidase__InfluenzaA__ADN89240
augaaccccaaucagaagaucauuaccaucggcagcauuuccaucgccauugggaucaucucucugaugcuccaaauuggaaacaucauuagcaucugggcuucccacucuauucagacaggcagccagaauaacacggggaucugcaaucagagaauuaucaccuacgagaacuccacaugggugaaucauaccuaugucaacaucaauaacacaaauguuguggccggagaagacaaaaccucugugacacuggcgggcaacagcucccuuuguagcauuucugggugggcuaucuacaccaaggauaauuccauucggaucggaagcaaaggcgacgucuucgugauucgcgagccuuuuaucucuugcucccaccuggaauguagaacguucuuucucacccaaggcgcccugcuuaacgauaagcauagcaaugggacaguuaaagaccggucuccguaucgcgcccugauguccugcccccucggagaggcuccuagccccuacaacuccaaguucgaaucuguggccuggagcgcuuccgccugucacgauggcaugggguggcugaccaucggaauuagcggcccugacaacggggcggucgccgugcugaaguauaauggaaucauuacaggcaccaucaaaucuuggaagaaacagauucucagaacgcaggaguccgagugcguuuguaugaacggcagcugcuuuacaaucaugaccgaugggcccucuaauaaggcugccagcuacaaaaucuucaagauugaaaagggaaaagugacaaaguccaucgagcugaacgcuccuaauuuuuauuacgaagaguguucuugcuacccggacaccggcauugucaugugugugugccgggauaacuggcaugggagcaaucgccccuggguguccuucaaccagaaucuugacuaucaaaucggauacauuugcagcggcgucuuuggggauaacccuagacccgaggacggagaaggcucuuguaauccuguuaccguggauggcgccaacggggugaaaggauucuccuauaaguacggcaauggggucuggaucggacggacaaaaagcaaccgccugagaaagggcuuugagaugauuugggaccccaauggguggacgaacaccgacucugauuucuccgugaaacaggacguuguggcgaucacagauuggagcggcuauuccggaucuuuuguccagcacccggaacucaccggccuggacugcauccggccuuguuucuggguggagcuuguucgcgggcugcccagagaaaacacaaccauuuggacgagcggauccucuaucagcuucugcggcgugaauggggauacagccaacugguccuggccugacggagcugagcuccccuuuaccauugauaaguga

SEQ ID NO: 212017 - RNA, 1413 nt, Artificial Sequence; identical to SEQ ID NO: 209533
  derived and/or modified CDS sequence (opt5) from neuraminidase__InfluenzaA__ADN89251

SEQ ID NO: 212018 - RNA, 1413 nt, Artificial Sequence; identical to SEQ ID NO: 209533
  derived and/or modified CDS sequence (opt5) from neuraminidase__InfluenzaA__ADN89262

SEQ ID NO: 212019 - RNA, 1413 nt, Artificial Sequence; identical to SEQ ID NO: 209533
  derived and/or modified CDS sequence (opt5) from neuraminidase__InfluenzaA__ADN89273

SEQ ID NO: 212020 - RNA, 1413 nt, Artificial Sequence; identical to SEQ ID NO: 209533
  derived and/or modified CDS sequence (opt5) from neuraminidase__InfluenzaA__ADN89284

SEQ ID NO: 212021 - RNA, 1413 nt, Artificial Sequence; identical to SEQ ID NO: 209533
  derived and/or modified CDS sequence (opt5) from neuraminidase__InfluenzaA__ADN89295

SEQ ID NO: 212022 - RNA, 1413 nt, Artificial Sequence; identical to SEQ ID NO: 209533
  derived and/or modified CDS sequence (opt5) from neuraminidase__InfluenzaA__ADN89306

SEQ ID NO: 212023 - RNA, 1413 nt, Artificial Sequence
  derived and/or modified CDS sequence (opt5) from neuraminidase__InfluenzaA__ADN89317
augaaccccaaucagagaaucauuaccaucggcagcauuuccaucgccauugggaucaucucucugaugcuccaaauuggaaacaucauuagcaucugggcuucccacucuauucagacaggcagccagaauaacacggggaucugcaaucagcggauuaucaccuacgagaacuccacaugggugaaucauaccuaugucaacaucaauucuacaaacguuguggccggagaagacaagaccagcgugacacuggcgggcaauuccagccuuuguucuauuuccgggugggcuaucuacaccaaagauaacagcauucgcaucggaucuaagggcgacgucuucgugauuagagagccuuuuaucuccugcagccaccuggaaugucggacguucuuucucacccaaggcgcccugcuuaaugauaaacauucuaacgggacaguuaaggaccgcuccccguauagagcccugaugagcugcccccucggagaggcuccuucccccuacaauucuaaauucgaaagcguggccugguccgcuagcgccugucacgauggcaugggguggcugaccaucggaauuucuggcccugacaacggggcggucgccgugcugaaguauaacggaaucauuacaggcaccaucaaguccuggaaaaagcagauucuccggacgcaggagagcgagugcguuuguaugaauggcucuugcuuuacaaucaugaccgaugggcccagcaacaaagcugccuccuacaagaucuucaaaauugaaaagggaaaggugacaaaaucuaucgagcugaaugcuccuaacuuuuauuacgaagaguguagcugcuacccggacaccggcauugucaugugugugugccgcgauaauuggcauggguccaacagacccugggugagcuucaaucagaaccuugacuaucaaaucggauacauuugcucuggcgucuuuggggauaauccucggcccgaggacggagaaggcuccuguaacccuguuaccguggauggcgccaauggggugaagggauucagcuauaaauacggcaacggggucuggaucggacgcacaaagucuaauagacugcggaaaggcuuugagaugauuugggaccccaacggguggacgaauaccgacuccgauuucagcgugaagcaggacguuguggcgaucacagauugguccggcuauucuggcagcuuuguccagcacccggaacucaccggacuggacugcauccgcccuuguuucuggguggagcuuguuagagggcugccccgggaaaacacaaccauuuggacguccggaucuagcaucuccuucugcggcgugaacggggauacagccaauuggagcuggccugacggagcugagcuccccuuuaccauugauaaauga

SEQ ID NO: 212024 - RNA, 1413 nt, Artificial Sequence
  derived and/or modified CDS sequence (opt5) from neuraminidase__InfluenzaA__ADN89328
augaaccccaaucagaagaucauuaccaucggcagcauuuccaucgccauugggaucaucucucugaugcuccaaauuggaagcaucauuuccaucugggcuucucacagcauucagacaggcucccagaacaauacggggaucugcaaccagagaauuaucaccuacgagaauagcacaugggugaaccauaccuaugucaauaucaacaauacaaacguuguggccggagaagacaaaaccagcgugacacuggcgggcaauuccagccuuuguucuauuuccgggugggcuaucuacaccaaggauaacagcauucggaucggaucuaaaggcgacgucuucgugauucgcgagccuuuuaucuccugcagccaccuggaauguagaacguucuuucucacccaaggcgcccugcuuaaugauaagcauucuaacgggacaguuaaagaccgguccccguaucgcgcccugaugagcugcccccucggagaggcuccuucccccuacaauucuaaguucgaaagcguggccugguccgcuagcgccugucacgauggcaugggguggcugaccaucggaauuucuggcccugacaacggggcggucgccgugcugaaguauaacggaaucauuacaggcaccaucaaauccuggaagaaacagauucucagaacgcaggagagcgagugcguuuguaugaauggcucuugcuuuacaaucaugaccgaugggcccagcaacaaggcugccuccuacaaaaucuucaagauugaaaagggaaaagugacaaagucuaucgagcugaaugcuccuaacuuuuauuacgaagaguguagcugcuacccggacaccggcauugucaugugugugugccgggauaauuggcauggguccaaccgccccugggugagcuucaaucagaaccuugacuaucaaaucggauacauuugcucuggcgucuuuggggauaauccuagacccgaggacggagaaggcuccuguaacccuguuaccguggauggcgccaauggggugaaaggauucagcuauaaguacggcaacggggucuggaucggacggacaaaaucuaaucgccugagaaagggcuuugagaugauuugggaccccaacggguggacgaauaccgacuccgauuucagcgugaaacaggacguuguggcgaucacagauugguccggcuauucuggaucuuuuguccagcacccggaacucaccggccuggacugcauccggccuuguuucuggguggagcuuguucgcgggcugcccagagaaaacacaaccauuugggccuccggaucuagcaucuccuucugcggcgugaacagcgauacggcuaauuggucuuggccugacggggccgagcuccccuuuacaauugauaaguga

SEQ ID NO: 212025 - RNA, 1413 nt, Artificial Sequence; identical to SEQ ID NO: 212009
  derived and/or modified CDS sequence (opt5) from neuraminidase__InfluenzaA__ADN89339

SEQ ID NO: 212026 - RNA, 1413 nt, Artificial Sequence; identical to SEQ ID NO: 212015
  derived and/or modified CDS sequence (opt5) from neuraminidase__InfluenzaA__ADN89350

SEQ ID NO: 212027 - RNA, 1413 nt, Artificial Sequence
  derived and/or modified CDS sequence (opt5) from neuraminidase__InfluenzaA__ADN89361
augaaccccaaucagaagaucauuaccaucggcagcauuuccaucgccauugggaucaucucucugaugcuccaaauuggaagcaucauuuccaucugggcuucucacagcauucagacaggcucccagaacaauacggggaucugcaaccagagaauuaucaccuacgagaauagcacaugggugaaccauaccuaugucaauaucaacaauacaaacguuguggccggagaagacaaaaccagcgugacacuggcgggcaauuccagccuuuguucuauuuccgggugggcuaucuacaccaaggauaacagcauucggaucggaucuaaaggcgacgucuucauuauccgcgagccuuuuaucuccugcagccaccuggaauguagaacguucuuucucacccaaggcgcccugcuuaaugauaagcauucuaacgggacagugaaagaccgguccccguaucgcgcccugaugagcugcccccucggagaggcuccuucccccuacaauucuaaguucgaaagcguugccugguccgcuagcgccugucacgauggcaugggguggcugaccauuggaaucucuggcccugacaacggggcgguggccguccugaaguauaacggaauuaucacaggcaccauuaaauccuggaagaaacagauccucagaacgcaggagagcgagugcguguguaugaauggcucuugcuuuacaaucaugaccgaugggcccagcaacaaggcugccuccuacaaaauuuucaagaucgaaaagggaaaaguuacaaagucuauugagcugaaugcuccuaacuuuuauuacgaagaguguagcugcuacccggacaccggcaucgugaugugugucugccgggauaauuggcauggguccaaccgccccugggugagcuucaaucagaaccuugacuaucaaauuggauacaucugcucuggcguguuuggggauaauccuagacccgaggacggagaaggcuccuguaacccugucaccguugauggcgccaauggggugaaaggauucagcuauaaguacggcaacgggguguggauuggacggacaaaaucuaaucgccugagaaagggcuuugagaugaucugggaccccaacggguggacgaauaccgacuccgauuucagcgucaaacaggacgugguugcgaucacagauugguccggcuauucuggaucuuuugugcagcacccggaacucaccggccuggacugcauucggccuuguuucugggucgagcuugugcgcgggcugcccagagaaaacacaaccaucuggacguccggaucuagcauuuccuucugcggcguuaacagcgauacagccaauuggucuuggccugacggggcugagcuccccuuuaccaucgauaaguga

SEQ ID NO: 212028 - RNA, 1413 nt, Artificial Sequence
  derived and/or modified CDS sequence (opt5) from neuraminidase__InfluenzaA__ADN89372
augaaccccaaucagaagaucauuaccaucggcagcauuuccaucgccauugggaucaucucucugaugcuccaaauuggaaacaucauuagcaucugggcuucccacucuauucagacaggcagccagaauaacacggggaucugcaaucagagaauuaucaccuacgagaacuccacaugggugaaucauaccuaugucaacaucaauaacacaaauauuguugccggagaagacaaaaccucugugacacuggcgggcaacagcucccuuuguagcaucucugggugggcuauuuacaccaaggauaauuccauccggauuggaagcaaaggcgacguguucgucauccgcgagccuuuuaucucuugcucccaccuggaauguagaacguucuuucucacccaaggcgcccugcuuaacgauaagcauagcaaugggacagugaaagaccggucuccguaucgcgcccugauguccugcccccucggagaggcuccuagccccuacaacuccaaguucgaaucuguugccuggagcgcuuccgccugucacgauggcaugggguggcugaccauuggaaucagcggcccugacaacggggcgguggccguccugaaguauaauggaauuaucacaggcaccauuaaaucuuggaagaaacagauccucagaacgcaggaguccgagugcguguguaugaacggcagcugcuuuacaaucaugaccgaugggcccucuaauaaggcugccagcuacaaaauuuucaagaucgaaaagggaaaaguuacaaaguccauugagcugaacgcuccuaauuuuuauuacgaagaguguucuugcuacccggacaccggcaucgugaugugugucugccgggauaacuggcaugggagcaaucgccccuggguguccuucaaccagaaucuugacuaucaaauuggauacaucugcagcggcguguuuggggauaacccuagacccgaggacggagaaggcucuuguaauccugucaccguuaacggcgccgauggggugaaaggauucuccuauaaguacggcaaugggguguggauuggacggacaaaaagcaaccgccugagaaagggcuuugagaugaucugggaccccaauggguggacgaacaccgacucugauuucuccgucaaacaggacgugguugcgaucacagauuggagcggcuauuccggaucuuuugugcagcacccggaacucaccggccuggacugcauucggccuuguuucugggucgagcuugugcgcgggcugcccagagaaaacacaaccaucuggacgagcggauccucuauuagcuucugcggcguuaauuccgauacagccaacuggagcuggccugacggggcugagcuccccuuuaccaucgauaaguga

SEQ ID NO: 212029 - RNA, 1413 nt, Artificial Sequence; identical to SEQ ID NO: 212004
  derived and/or modified CDS sequence (opt5) from neuraminidase__InfluenzaA__ADN89383

SEQ ID NO: 212030 - RNA, 1413 nt, Artificial Sequence
  derived and/or modified CDS sequence (opt5) from neuraminidase__InfluenzaA__ADN89405
augaaccccaaucagaagaucauuaccaucggcagcauuuccaucgccauugggaucaucucucugaugcuccaaauuggaagcaucauuuccaucugggcuucucacagcauucagacaggcucccagaacaauacggggaucugcaaccagagaauuaucaccuacgagaauagcacaugggugaaccauaccuaugucaauaucaacaauacaaacguuguggccggagaagacaaaaccagcgugacacuggcgggcaauuccagccuuuguucuaccuccgggugggcuauuuacacgaaggauaacagcauccggauuggaucuaaaggcgacgucuucgugauccgcgagccuuuuauuuccugcagccaccuggaauguagaaccuucuuucucacacaaggcgcccugcuuaaugauaagcauucuaacgggaccguuaaagaccgguccccguaucgcgcccugaugagcugcccccucggagaggcuccuucccccuacaauucuaaguucgaaagcguggccugguccgcuagcgccugucacgauggcaugggguggcugacaaucggaaucucuggcccugacaacggggcggucgccgugcugaaguauaacggaauuaucaccggcacgauuaaauccuggaagaaacagauccucagaacacaggagagcgagugcguuuguaugaauggcucuugcuuuaccauuaugacagaugggcccagcaacaaggcugccuccuacaaaaucuucaagaucgaaaagggaaaagugaccaagucuauugagcugaaugcuccuaacuuuuauuacgaagaguguagcugcuacccggacaccggcaucgucaugugugugugccgggauaauuggcauggguccaaccgccccugggugagcuucaaucagaaccuugacuaucaaauuggauacaucugcucuggcgucuuuggggauaauccuagacccgaggacggagaaggcuccuguaacccuguuacaguggauggcgccaauggggugaaaggauucagcuauaaguacggcaacggggucuggauuggacggacgaaaucuaaucgccugagaaagggcuuugagaugaucugggaccccaacggguggaccaauacagacuccgauuucagcgugaaacaggacguuguggcgauuaccgauugguccggcuauucuggaucuuuuguccagcacccggaacucacaggccuggacugcauccggccuuguuucuggguggagcuuguucgcgggcugcccagagaaaacaccacgaucuggacauccggaucuagcauuuccuucugcggcgugaacagcgauaccgccaauuggucuuggccugacggggcugagcuccccuuuaccaucgauaaguga

SEQ ID NO: 212031 - RNA, 1413 nt, Artificial Sequence
  derived and/or modified CDS sequence (opt5) from neuraminidase__InfluenzaA__ADN89416
augaaccccaaucagaagaucauuaccaucggcagcauuuccaucgccauugggaucaucucucugaugcuccaaauuggaaacaucauuagcaucugggcuucccacucuauucagacaggcagccagaauaacacggggaucugcaaucagagaauuaucaccuacgagaacuccacaugggugaaucauaccuaugucaacaucaauaacacaaauguuguggccggagaagacaaaaccucugugacacuggcgggcaacagcucccuuuguagcauuucugggugggcuaucuacaccaaggauaauuccauucggaucggaagcaaaggcgacgucuucgugauucgcgagccuuuuaucucuugcucccaccuggaauguagaacguucuuucucacccaaggcgcccugcuuaacgauaagcauagcaaugggacaguuaaagaccggucuccguaucgcgcccugauguccugcccccucggagaggcuccuagccccuacaacuccaaguucgaaucuguggccuggagcgcuuccgccugucacgauggcaugggguggcugaccaucggaauuagcggcccugacaacggggcggucgccgugcugaaguauaauggaaucauuacaggcaccaucaaaucuuggaagaaacagauucucagaacgcaggaguccgagugcguuuguaugaacggcagcugcuuuacaaucaugaccgaugggcccucuaauaaggcugccagcuacaaaaucuucaagauugaaaagggaaaagugacaaaguccaucgagcugaacgcuccuaauuuuuauuacgaagaguguucuugcuacccggacaccggcauugucaugugugugugccgggauaacuggcaugggagcaaucgccccuggguguccuucaaccagaaucuugacuaucaaaucggauacauuugcagcggcguccugggggauaacccuagacccgaggacggagaaggcucuuguaauccuguuaccguggauggcgccaacggggugaaaggauuuuccuauaaguacggcaauggggucuggaucggacggacaaaaagcaaccgccucagaaagggcuucgagaugauuugggaccccaauggguggacgaacaccgacucugauuuuuccgugaaacaggacguuguggcgaucacagauuggagcggcuauuccggaucuuucguccagcacccggaacugaccggccuugacugcauccggccuuguuuuuggguggagcugguucgcgggcuccccagagaaaacacaaccauuuggacgagcggauccucuaucagcuucugcggcgugaauggggauacagccaacugguccuggccugacggagcugagcugcccuucaccauugauaaguga

SEQ ID NO: 212032 - RNA, 1413 nt, Artificial Sequence
  derived and/or modified CDS sequence (opt5) from neuraminidase__InfluenzaA__ADN89427
augaaccccaaucagaagaucauuaccaucggcagcauuuccaucgccauugggaucaucucucugaugcuccaaauuggaagcaucauuuccaucugggcuucucacagcauucagacaggcucccagaacaauacggggaucugcaaccagagaauuaucaccuacgagaauagcacaugggugaaccauaccuaugucaauaucaacaauacaaacguuguggccggagaagacaaaaccagcgugacacuggcgggcaauuccagccuuuguucuauuuccgggugggcuaucuacaccaaggauaacagcauucggaucggaucuaaaggcgacgucuucgugauucgcgagccuuuuaucuccugcagccaccuggaauguagaacguucuuucucacccaaggcgcccugcuuaaugauaagcauucuaacgggacaguuaaagaccgguccccguaucgcgcccugaugagcugcccccucggagaggcuccuucccccuacaauucuaaguucgaaagcguggccugguccgcuagcgccugucacgauggcaugggguggcugaccaucggaauuucuggcccugacaacggggcggucgccgugcugaaguauaacggaaucauuacaggcaccaucaaauccuggaagaaacagauucucagaacgcaggagagcgagugcguuuguaugaauggcucuugcuuuacaaucaugaccgaugggcccagcaacaaggcugccuccuacaaaaucuucaagauugaaaagggaaaagugacaaagucuaucgagcugaaugcuccuaacuuuuauuacgaagaguguagcugcuacccggacaccggcauugucaugugugugugccgggauaauuggcauggguccaaccgccccugggugagcuucaaucagaaccuugacuaucaaaucggauacauuugcucuggcgucuuuggggauaauccuagacccgaggacggagaaggcuccuguaacccuguuaccguggauggcgccaauggggugaaaggauucagcuauaaguacggcaacggggucuggaucggacggacaaaaucuaaucgccugagaaagggcuuugagaugauuugggaccccaacggguggacgaauaccgacuccgauuucagcgugaaacaggacguuguggcgaucacagauugguccggcuauucuggaucuuuuguccagcacccggaacucaccggccuggacugcauccggccuuguuucuggguggagcuuguucgcgggcugcccagagaaaacacaaccauuuggacguccggaucuagcaucuccuucugcggcguggauagcgacgccgcugauuggucuuggccugacggggccgagcuccccuuuacaauugauaaguga

SEQ ID NO: 212033 - RNA, 1413 nt, Artificial Sequence; identical to SEQ ID NO: 209533
  derived and/or modified CDS sequence (opt5) from neuraminidase__InfluenzaA__ADN89438

SEQ ID NO: 212034 - RNA, 1413 nt, Artificial Sequence
  derived and/or modified CDS sequence (opt5) from neuraminidase__InfluenzaA__ADN89449
augaaccccaaucagaagaucauuaccaucggcagcauuuccaucgccauugggaucaucucucugaugcuccaaauuggaaacaucauuagcaucugggcuucccacucuauucagacaggcagccagaauaacacggggaucugcaaucagagaauuaucaccuacgagaacuccacaugggugaaucauaccuaugugaacaucaauaacacaaauguuguggccggagaagacaaaccuucugugacccuggcgggcaacagcucccuuuguagcauuucugggugggcuaucuacacaaaggauaauuccauucggaucggaagcaaaggcgacgucuucgugauucgcgagccguuuaucucuugcucccaccuggaauguagaaccuucuuucucacgcaaggcgcccugcuuaacgauaagcauagcaaugggaccguuaaagaccggucucccuaucgcgcccugauguccugcccucucggagaggcucccagcccuuacaacuccaaguucgaaucuguggccuggagcgcuuccgccugucacgauggcaugggguggcugacaaucggaauuagcggccccgacaacggggcggucgccgugcugaaguauaauggaaucauuaccggcacaaucaaaucuuggaagaaacagauucucagaacccaggaguccgagugcguuuguaugaacggcagcugcuuuacgaucaugacagaugggccuucuaauaaggcugccagcuacaaaaucuucaagauugaaaagggaaaagugaccaaguccaucgagcugaacgcuccgaauuuuuauuacgaagaguguucuugcuaccccgacacaggcauugucaugugugugugccgggauaacuggcaugggagcaaucgcccuuggguguccuucaaccagaaucuugacuaucaaaucggauacauuugcagcggcgucuuuggggauaaccccagaccugaggacggagaaggcucuuguaaucccguuaccguggauggcgccaacggggugaaaggauucuccuauaaguacggcaauggggucuggaucggacggaccaaaagcaaccgccugagaaagggcuuugagaugauuugggacccgaauggguggacaaacacggacucugauuucuccgugaaacaggacguuguggcgaucaccgauuggagcggcuauuccggaucuuuuguccagcacccugaacucacaggccuggacugcauccggcccuguuucuggguggagcuuguucgcgggcugccuagagaaaacaccacaauuuggaccagcggauccucuaucagcuucugcggcgucaauuccgauacggccaacuggagcuggcccgacggggcugagcuccccuuuacaauugauaaguga

SEQ ID NO: 212035 - RNA, 1413 nt, Artificial Sequence; identical to SEQ ID NO: 211002
  derived and/or modified CDS sequence (opt5) from neuraminidase__InfluenzaA__ADN89460

SEQ ID NO: 212036 - RNA, 1413 nt, Artificial Sequence; identical to SEQ ID NO: 209533
  derived and/or modified CDS sequence (opt5) from neuraminidase__InfluenzaA__ADN89482

SEQ ID NO: 212037 - RNA, 1413 nt, Artificial Sequence
  derived and/or modified CDS sequence (opt5) from neuraminidase__InfluenzaA__ADN89493
augaaccccaaucagaagaucauuaccaucggcagcauuuccaucgccauugggaucaucucucugaugcuccaaauuggaaacaucauuagcaucugggcuucccacucuauucagacagagagccagaauaacacgggcaucugcaaucagagaauuaucaccuacgaaaacuccacaugggugaaucauaccuaugugaacaucaauaacacaaauguuguggccggggaggacaaaaccucugugacacuggcgggaaacagcucccuuuguagcauuucuggcugggcuaucuacaccaaggauaauuccauucggaucgggagcaaaggagacgucuucgugauucgcgaaccuuuuaucucuugcucccaccuggaguguagaacguucuuucucacccaaggcgcccugcuuaacgauaagcauagcaauggcacaguuaaagaccggucuccguaucgcgcccugauguccugcccccucggggaagcuccuagccccuacaacuccaaguucgagucuguggccuggagcgcuuccgccugucacgauggaaugggcuggcugaccaucgggauuagcggaccugacaacggcgcggucgccgugcugaaguauaaugggaucauuacaggaaccaucaaaucuuggaagaaacagauucucagaacgcaggaguccgaaugcguuuguaugaacggcagcugcuuuacaaucaugaccgauggccccucuaauaaggcugccagcuacaaaaucuucaagauugagaaggggaaagugacaaaguccaucgaacugaacgcuccuaauuuuuauuacgaggaguguucuugcuacccggacaccggaauugucaugugugugugccgggauaacuggcauggcagcaaucgccccuggguguccuucaaccagaaucuugacuaucaaaugggguacaucugcagcggagucuuuggcgauaacccuagacccgaagacggggagggaucuuguaauccuguuaccguggauggcgccaacggcgugaaaggguucuccuauaaguacggaaauggcgucuggauugggcggacaaaaagcaaccgccugagaaagggauuugaaaugaucugggaccccaauggcuggacgaacaccgacucugauuucuccgugaaacaggacguuguggcgauuacagauuggagcggguauuccggcucuuuuguccagcacccggagcucaccggacuggacugcauccggccuuguuucuggguggaacuuguucgcggccugcccagagagaacacaaccaucuggacgagcggguccucuauuagcuucugcggagucaauuccgauacagccaacuggagcuggccugacggcgcugagcuccccuuuaccaucgauaaguga

SEQ ID NO: 212038 - RNA, 1413 nt, Artificial Sequence; identical to SEQ ID NO: 209533
  derived and/or modified CDS sequence (opt5) from neuraminidase__InfluenzaA__ADN89504

SEQ ID NO: 212039 - RNA, 1413 nt, Artificial Sequence
  derived and/or modified CDS sequence (opt5) from neuraminidase__InfluenzaA__ADN89515
augaaccccaaucagaagaucauuaccaucggcagcauuuccaucgccauugggaucaucucucugaugcuccaaauuggaaacaucauuagcaucugggcuucccacucuauucagacaggcagccagaauaacacggggaucugcaaucagagaauuaucaccuacgagaacuccacaugggugaaucauaccuaugucaacaucaauaacacaaauguuguggccggagaagacaaaaccucugugacacuggcgggcaacagcucccuuuguagcauuucugggugggcuaucuacaccaaggauaauuccauucggaucggaagcaaaggcgacgucuucgugauucgcgagccuuuuaucucuugcucccaccuggaauguagaacguucuuucucacccaaggcgcccugcuuaacgauaagcauagcaaugggacaguuaaagaccggucuccguaucgcgcccugauguccugcccccucggagaggcuccuagccccuacaacuccaaguucgaaucuguggccuggagcgcuuccgccugucacgauggcaugggguggcugaccaucggaauuagcggcccugacaacggggcggucgccgugcugaaguauaauggaaucauuacaggcaccaucaaaucuuggaagaaacagauucucagaacgcaggaguccgagugcguuuguaugaacggcagcugcuuuacaaucaugaccgaugggcccucuaauaaggcugccagcuacaaaaucuucaagauugaaaagggaaaagugacaaaguccaucgagcugaacgcuccuaauuuuuauuacgaagaguguucuugcuacccggacaccggcauugucaugugugugugccgggauaacuggcaugggagcaaucgccccuggguguccuucaaccagaaucuugacuaucaaaucggauacauuugcagcggcgucuuuggggauaacccuagacccgaggacggagaaggcucuuguaauccuguuaccguggauggcgccaacggggugaaaggauucuccuauaaguacggcaauggggucuggaucggacggacaaaaagcaaccgccugagaaagggcuuugagaugauuugggaccccaauggguggacgaacaccgacucugauuucacagugaaacaggacguuguggcgaucaccgauugguccggcuauagcggauccuuuguccagcacccggaacucacaggccuggacugcauccggccuuguuucuggguggagcuuguucgcgggcugcccagagaaaacaccacgauuuggacaucuggaagcuccaucucuuucugcggcgugaauagcgauaccgccaacugguccuggccugacggggcugagcuccccuuuaccauugauaaguga

SEQ ID NO: 212040 - RNA, 1413 nt, Artificial Sequence; identical to SEQ ID NO: 209533
  derived and/or modified CDS sequence (opt5) from neuraminidase__InfluenzaA__ADN89526

SEQ ID NO: 212041 - RNA, 1413 nt, Artificial Sequence; identical to SEQ ID NO: 212004
  derived and/or modified CDS sequence (opt5) from neuraminidase__InfluenzaA__ADN89537

SEQ ID NO: 212042 - RNA, 1413 nt, Artificial Sequence; identical to SEQ ID NO: 209533
  derived and/or modified CDS sequence (opt5) from neuraminidase__InfluenzaA__ADN89548

SEQ ID NO: 212043 - RNA, 1413 nt, Artificial Sequence; identical to SEQ ID NO: 209533
  derived and/or modified CDS sequence (opt5) from neuraminidase__InfluenzaA__ADN89570

SEQ ID NO: 212044 - RNA, 1413 nt, Artificial Sequence
  derived and/or modified CDS sequence (opt5) from neuraminidase__InfluenzaA__ADN89581
augaaccccaaucagaagaucauuaccaucggcagcauuuccaucgccauugggaucaucucucugaugcuccaaauuggaaacaucauuagcaucugggcuucccacucuauucagacaggcagccagaauaacacggggaucugcaaucagagaauuaucaccuacgagaacuccacaugggugaaucauaccuaugucaacaucaauaacacaaauguuguggccggagaagacaaaaccucugugacacuggcgggcaacagcucccuuuguagcauuucugggugggcuaucuacaccaaggauaauuccauucggaucggaagcaaaggcgacgucuucgugauucgcgagccuuuuaucucuugcucccaccuggaauguagaacguucuuucucacccaaggcgcccugcuuaacgauaagcauagcaaugggacaguuaaagaccggucuccguaucgcgcccugauguccugcccccucggagaggcuccuagccccuacaacuccaaguucgaaucuguggccuggagcgcuuccgccugucacgauggcaugggguggcugaccaucggaauuagcggcccugacaacggggcggucgccgugcugaaguauaauggaaucauuacaggcaccaucaaaucuuggaagaaacagauucucagaacgcaggaguccgagugcguuuguaugaacggcagcugcuuuacaaucaugaccgaugggcccucuaauaagacagcuagcuacaaaaucuucaagauugaaaagggaaaagugaccaaguccaucgagcugaacgccccuaauuuuuauuacgaagaguguucuugcuacccggacaccggcauugucaugugugugugccgggauaacuggcaugggagcaaucgccccuggguguccuucaaccagaaucuugacuaucaaaucggauacauuugcagcggcgucuuuggggauaacccuagacccgaggacggagaaggcucuuguaauccuguuacaguggauggcgcuaacggggugaaaggauucuccuauaaguacggcaauggggucuggaucggacggacgaaaagcaaccgccugagaaagggcuuugagaugauuugggaccccaauggguggaccaacacagacucugauuucuccgugaaacaggacguuguggccaucaccgauuggagcggcuauuccggaucuuuuguccagcacccggaacucacaggccuggacugcauccggccuuguuucuggguggagcuuguucgcgggcugcccagagaaaacaccacgauuuggacaagcggauccucuaucagcuucugcggcgugaauggggauaccgcgaacugguccuggccugacggagccgagcuccccuuuaccauugauaaguga

SEQ ID NO: 212045 - RNA, 1413 nt, Artificial Sequence; identical to SEQ ID NO: 211002
  derived and/or modified CDS sequence (opt5) from neuraminidase__InfluenzaA__ADN89592

SEQ ID NO: 212046 - RNA, 1413 nt, Artificial Sequence; identical to SEQ ID NO: 211002
  derived and/or modified CDS sequence (opt5) from neuraminidase__InfluenzaA__ADN89603

SEQ ID NO: 212047 - RNA, 1413 nt, Artificial Sequence; identical to SEQ ID NO: 212012
  derived and/or modified CDS sequence (opt5) from neuraminidase__InfluenzaA__ADN89614

SEQ ID NO: 212048 - RNA, 1413 nt, Artificial Sequence; identical to SEQ ID NO: 212031
  derived and/or modified CDS sequence (opt5) from neuraminidase__InfluenzaA__ADN89625

SEQ ID NO: 212049 - RNA, 1413 nt, Artificial Sequence; identical to SEQ ID NO: 209533
  derived and/or modified CDS sequence (opt5) from neuraminidase__InfluenzaA__ADN89636

SEQ ID NO: 212050 - RNA, 1413 nt, Artificial Sequence; identical to SEQ ID NO: 209533
  derived and/or modified CDS sequence (opt5) from neuraminidase__InfluenzaA__ADN89647

SEQ ID NO: 212051 - RNA, 1413 nt, Artificial Sequence; identical to SEQ ID NO: 209533
  derived and/or modified CDS sequence (opt5) from neuraminidase__InfluenzaA__ADN89658

SEQ ID NO: 212052 - RNA, 1413 nt, Artificial Sequence; identical to SEQ ID NO: 211002
  derived and/or modified CDS sequence (opt5) from neuraminidase__InfluenzaA__ADN89669

SEQ ID NO: 212053 - RNA, 1413 nt, Artificial Sequence; identical to SEQ ID NO: 209533
  derived and/or modified CDS sequence (opt5) from neuraminidase__InfluenzaA__ADN89680

SEQ ID NO: 212054 - RNA, 1413 nt, Artificial Sequence; identical to SEQ ID NO: 209533
  derived and/or modified CDS sequence (opt5) from neuraminidase__InfluenzaA__ADN89691

SEQ ID NO: 212055 - RNA, 1413 nt, Artificial Sequence; identical to SEQ ID NO: 212031
  derived and/or modified CDS sequence (opt5) from neuraminidase__InfluenzaA__ADN89702

SEQ ID NO: 212056 - RNA, 1413 nt, Artificial Sequence; identical to SEQ ID NO: 209533
  derived and/or modified CDS sequence (opt5) from neuraminidase__InfluenzaA__ADN89713

SEQ ID NO: 212057 - RNA, 1413 nt, Artificial Sequence; identical to SEQ ID NO: 209533
  derived and/or modified CDS sequence (opt5) from neuraminidase__InfluenzaA__ADN89724

SEQ ID NO: 212058 - RNA, 1413 nt, Artificial Sequence; identical to SEQ ID NO: 209533
  derived and/or modified CDS sequence (opt5) from neuraminidase__InfluenzaA__ADN89735

SEQ ID NO: 212059 - RNA, 1413 nt, Artificial Sequence; identical to SEQ ID NO: 209533
  derived and/or modified CDS sequence (opt5) from neuraminidase__InfluenzaA__ADN89746

SEQ ID NO: 212060 - RNA, 1413 nt, Artificial Sequence; identical to SEQ ID NO: 209533
  derived and/or modified CDS sequence (opt5) from neuraminidase__InfluenzaA__ADN89757

SEQ ID NO: 212061 - RNA, 1413 nt, Artificial Sequence; identical to SEQ ID NO: 209533
  derived and/or modified CDS sequence (opt5) from neuraminidase__InfluenzaA__ADN89768

SEQ ID NO: 212062 - RNA, 1413 nt, Artificial Sequence; identical to SEQ ID NO: 212008
  derived and/or modified CDS sequence (opt5) from neuraminidase__InfluenzaA__ADN89779

SEQ ID NO: 212063 - RNA, 1413 nt, Artificial Sequence; identical to SEQ ID NO: 209533
  derived and/or modified CDS sequence (opt5) from neuraminidase__InfluenzaA__ADN89790

SEQ ID NO: 212064 - RNA, 1413 nt, Artificial Sequence
  derived and/or modified CDS sequence (opt5) from neuraminidase__InfluenzaA__ADN89801
augaaccccaaucagaagaucauuaccaucggcagcauuuccaucgccauugggacaaucucucugaugcuccaaaucggaaacauuaucagcauuugggcuucccacucuauccagacgggcagccagaauaacaccgggauuugcaaucagagaaucauuacauacaaaaacuccaccugggugaaucauacauaugucaacaucaauaacaccaauguuguggccggagaggacaagacaucugugacccuggcgggcaacagcucccuuuguagcaucucugggugggcuauuuacacgaaagauaauuccauccggauuggaagcaagggcgacgucuucgugauccgcgaaccuuuuauuucuugcucccaccuggaguguagaaccuucuuucucacacaaggcgcccugcuuaacgauaaacauagcaaugggaccguuaaggaccggucuccguaucgcgcccugauguccugcccccucggagaagcuccuagccccuacaacuccaaguucgagucuguggccuggagcgcuuccgccugucacgauggcaugggguggcugacaaucggaaucagcggcccugacaacggggcggucgccgugcugaaauauaauggaauuaucaccggcacgauuaagucuuggaaaaagcagauccucagaacacaggaauccgagugcguuuguaugaacggcagcugcuuuaccauuaugacagaugggcccucuaauaaagcugccagcuacaagaucuucaagaucgagaaaggaaaggugaccaaauccauugaacugaacgcuccuaauuuuuauuacgaggaauguucuugcuacccggacaccggcaucgucaugugugugugccgggauaacuggcaugggagcaaucgccccuggguguccuucaaccagaaucuugacuaucaaauuggauacaucugcagcggcgucuuuggggauaacccuagacccgaggacggagagggcucuuguaauccuguuacaguggauggcgccaacggggugaagggauucuccuauaaauacggcaauggggucuggauuggacggacgaaguccaaccgccugagaaaaggcuuugaaaugaucugggaccccaauggguggaccaacacagacucugauuucuccgugaagcaggacguuguggcgauuaccgauuggagcggcuauuccggaucuuuuguccagcacccggagcucacaggccuggacugcauccggccuuguuucuggguggaacuuguucgcgggcugcccagagagaacaccacgaucuggacaagcggauccucuauuagcuucugcggcgugaauagcgauaccgccaacuggagcuggccugacggggcugaacuccccuuuaccaucgauaaguga

SEQ ID NO: 212065 - RNA, 1413 nt, Artificial Sequence
  derived and/or modified CDS sequence (opt5) from neuraminidase__InfluenzaA__ADN89823
augaaccccaaucagaagaucauuaccaucggcagcauuuccaucgccauugggaucaucucucugaugcuccaaauuggaagcaucauuuccaucugggcuucucacagcauucauacaggcucccagaacaauacggggaucugcaaccagagaauuaucaccuacgagaauagcacaugggugaaccacaccuaugucaauaucaacaauacaaacguuguggccggagaagacaaaaccagcgugacacuggcgggcaauuccagccuuuguucuauuuccgggugggcuaucuacaccaaggauaacagcauucggaucggaucuaaaggcgacgucuucgugauucgcgagccuuuuaucuccugcagccaucuggaauguagaacguucuuucucacccagggcgcccugcuuaaugauaagcacucuaacgggacaguuaaagaccgguccccguaucgcgcccugaugagcugcccccucggagaggcuccuucccccuacaauucuaaguucgaaagcguggccugguccgcuagcgccugucaugauggcaugggguggcugaccaucggaauuucuggcccugacaacggggcggucgccgugcugaaguauaacggaaucauuacaggcaccaucaaauccuggaagaaacaaauucucagaacgcaggagagcgagugcguuuguaugaauggcucuugcuuuacaaucaugaccgaugggcccagcaacaaggcugccuccuacaaaaucuucaagauugaaaagggaaaagugacaaagucuaucgagcugaaugcuccuaacuuuuauuacgaagaguguagcugcuacccggacaccggcauugucaugugugugugccgggauaauuggcacggguccaaccgccccugggugagcuucaaucagaaccuugacuaucagaucggauacauuugcucuggcgucuuuggggauaauccuagacccgaggacggagaaggcuccuguaacccuguuaccguggauggcgccaauggggugaaaggauucagcuauaaguacggcaacggggucuggaucggacggacaaaaucuaaucgccugagaaagggcuuugagaugauuugggaccccaacggguggacgaauaccgacuccgauuucagcgugaaacaagacguuguggcgaucacagauugguccggcuauucuggaucuuuuguccagcacccggaacucaccggccuggacugcauccggccuuguuucuggguggagcuuguucgcgggcugcccagagaaaacacaaccauuuggacguccggaucuagcaucuccuucugcggcgugaacagcgauacagccaauuggucuuggccugacggggcugagcuccccuuuaccauugauaaguga

SEQ ID NO: 212066 - RNA, 1413 nt, Artificial Sequence; identical to SEQ ID NO: 211002
  derived and/or modified CDS sequence (opt5) from neuraminidase__InfluenzaA__ADN89834

SEQ ID NO: 212067 - RNA, 1413 nt, Artificial Sequence; identical to SEQ ID NO: 212004
  derived and/or modified CDS sequence (opt5) from neuraminidase__InfluenzaA__ADN89845

SEQ ID NO: 212068 - RNA, 1413 nt, Artificial Sequence; identical to SEQ ID NO: 209533
  derived and/or modified CDS sequence (opt5) from neuraminidase__InfluenzaA__ADN89856

SEQ ID NO: 212069 - RNA, 1410 nt, Artificial Sequence; identical to SEQ ID NO: 211482
  derived and/or modified CDS sequence (opt5) from neuraminidase__InfluenzaA__ADN89867

SEQ ID NO: 212070 - RNA, 1410 nt, Artificial Sequence; identical to SEQ ID NO: 211482
  derived and/or modified CDS sequence (opt5) from neuraminidase__InfluenzaA__ADN89878

SEQ ID NO: 212071 - RNA, 1410 nt, Artificial Sequence; identical to SEQ ID NO: 211482
  derived and/or modified CDS sequence (opt5) from neuraminidase__InfluenzaA__ADN89889

SEQ ID NO: 212072 - RNA, 1410 nt, Artificial Sequence; identical to SEQ ID NO: 211482
  derived and/or modified CDS sequence (opt5) from neuraminidase__InfluenzaA__ADN89900

SEQ ID NO: 212073 - RNA, 1410 nt, Artificial Sequence; identical to SEQ ID NO: 211482
  derived and/or modified CDS sequence (opt5) from neuraminidase__InfluenzaA__ADN89911

SEQ ID NO: 212074 - RNA, 1410 nt, Artificial Sequence
  derived and/or modified CDS sequence (opt5) from neuraminidase__InfluenzaA__ADN89922
augaaccccaaucagaagaucauuaccaucggcagcgugucccugacaauuucuacgaucugcuucuuuaugcaaauugccauccucaucaccacagucacccugcacuucaaacaguacaaguuuaacagcccuccgaauaaccagguuaugcuuugugagcccacaauuaucgaaagaaauauuaccgagaucguguaucugacaaacaccacgauugaaaaagagaucugcccuaagcucgcugaauaccggaauugguccaaaccccagugugacauuaccggguucgccccuuuuucuaaggauaacagcauccgccuguccgcgggaggcgacaucugggugacaagagagcccuaugucucuugcgauccugacaaguguuaccaauucgcucuugggcagggaaccacacugaauaacgugcauagcaauaacaccguucgggaucgcacgccguauagaacacuccugaugaaugagcugggcgugcccuuucaccucgggaccaaacaggucugcauugccugguccagcagcuccugucaugacggaaaggccuggcugcacgugugcaucacaggcgaugacaaaaacgcuaccgccagcuucauuuacaauggccggcuuguugauucuguggucuccuggagcaaggaaauccugcgcacccaggagucugaaugugugugcauuaacgggacauguacgguggucaugaccgacggauccgcuagcggcaaagccgauacaaagauccucuuuaucgaggaggggaagauuguucauaccuccacacugucuggaagcgcgcaacacguggaagagugcuccugcuauccuagauaccccggcgugcggugugucugccgcgacaacuggaaagggagcaauagaccuaucguggauauuaacaucaaggaccacucuauuguuuccagcuacguguguucuggacuugucggcgacacgccccggaaaaaugauagcuccucuagcucccauugccuggacccgaacaaugaagagggcgggcacggagugaagggcugggccuucgaugacgggaacgauguuuggaugggacgcaccaucaaugaaacaagcagacucggcuaugagaccuuuaaagugaucgagggguggucuaacccuaaguccaaacugcagauuaaucggcaggucaucguggaccgcggaaacagaagcggcuacucuggcauuuucuccgucgaagggaagucuuguaucaaucggugcuuuuauguggagcugauuagaggacgcaaggaagagaccgaaguucucuggacauccaacucuaucguggucuucuguggcaccagcgggacauacggaacgggcuccuggcccgauggggcugaccugaauauuaugccuaucuga

SEQ ID NO: 212075 - RNA, 1410 nt, Artificial Sequence; identical to SEQ ID NO: 211482
  derived and/or modified CDS sequence (opt5) from neuraminidase__InfluenzaA__ADN89933

SEQ ID NO: 212076 - RNA, 1410 nt, Artificial Sequence; identical to SEQ ID NO: 211482
  derived and/or modified CDS sequence (opt5) from neuraminidase__InfluenzaA__ADN89955

SEQ ID NO: 212077 - RNA, 1410 nt, Artificial Sequence; identical to SEQ ID NO: 211482
  derived and/or modified CDS sequence (opt5) from neuraminidase__InfluenzaA__ADN89966

SEQ ID NO: 212078 - RNA, 1410 nt, Artificial Sequence; identical to SEQ ID NO: 211482
  derived and/or modified CDS sequence (opt5) from neuraminidase__InfluenzaA__ADN89977

SEQ ID NO: 212079 - RNA, 1410 nt, Artificial Sequence; identical to SEQ ID NO: 211482
  derived and/or modified CDS sequence (opt5) from neuraminidase__InfluenzaA__ADN89988

SEQ ID NO: 212080 - RNA, 1410 nt, Artificial Sequence; identical to SEQ ID NO: 211482
  derived and/or modified CDS sequence (opt5) from neuraminidase__InfluenzaA__ADN89999

SEQ ID NO: 212081 - RNA, 1410 nt, Artificial Sequence; identical to SEQ ID NO: 211482
  derived and/or modified CDS sequence (opt5) from neuraminidase__InfluenzaA__ADN90010

SEQ ID NO: 212082 - RNA, 1410 nt, Artificial Sequence; identical to SEQ ID NO: 211482
  derived and/or modified CDS sequence (opt5) from neuraminidase__InfluenzaA__ADN90021

SEQ ID NO: 212083 - RNA, 1410 nt, Artificial Sequence; identical to SEQ ID NO: 211482
  derived and/or modified CDS sequence (opt5) from neuraminidase__InfluenzaA__ADN90032

SEQ ID NO: 212084 - RNA, 1410 nt, Artificial Sequence; identical to SEQ ID NO: 211482
  derived and/or modified CDS sequence (opt5) from neuraminidase__InfluenzaA__ADN90043

SEQ ID NO: 212085 - RNA, 1410 nt, Artificial Sequence; identical to SEQ ID NO: 211482
  derived and/or modified CDS sequence (opt5) from neuraminidase__InfluenzaA__ADN90054

SEQ ID NO: 212086 - RNA, 1410 nt, Artificial Sequence; identical to SEQ ID NO: 211482
  derived and/or modified CDS sequence (opt5) from neuraminidase__InfluenzaA__ADN90065

SEQ ID NO: 212087 - RNA, 1410 nt, Artificial Sequence; identical to SEQ ID NO: 211482
  derived and/or modified CDS sequence (opt5) from neuraminidase__InfluenzaA__ADN90076

SEQ ID NO: 212088 - RNA, 1410 nt, Artificial Sequence; identical to SEQ ID NO: 211482
  derived and/or modified CDS sequence (opt5) from neuraminidase__InfluenzaA__ADN90087

SEQ ID NO: 212089 - RNA, 1410 nt, Artificial Sequence; identical to SEQ ID NO: 211482
  derived and/or modified CDS sequence (opt5) from neuraminidase__InfluenzaA__ADN90098

SEQ ID NO: 212090 - RNA, 1410 nt, Artificial Sequence; identical to SEQ ID NO: 211482
  derived and/or modified CDS sequence (opt5) from neuraminidase__InfluenzaA__ADN90109

SEQ ID NO: 212091 - RNA, 1410 nt, Artificial Sequence; identical to SEQ ID NO: 211482
  derived and/or modified CDS sequence (opt5) from neuraminidase__InfluenzaA__ADN90120

SEQ ID NO: 212092 - RNA, 1410 nt, Artificial Sequence; identical to SEQ ID NO: 211482
  derived and/or modified CDS sequence (opt5) from neuraminidase__InfluenzaA__ADN90131

SEQ ID NO: 212093 - RNA, 1410 nt, Artificial Sequence; identical to SEQ ID NO: 211482
  derived and/or modified CDS sequence (opt5) from neuraminidase__InfluenzaA__ADN90142

SEQ ID NO: 212094 - RNA, 1410 nt, Artificial Sequence; identical to SEQ ID NO: 211482
  derived and/or modified CDS sequence (opt5) from neuraminidase__InfluenzaA__ADN90153

SEQ ID NO: 212095 - RNA, 1410 nt, Artificial Sequence; identical to SEQ ID NO: 211482
  derived and/or modified CDS sequence (opt5) from neuraminidase__InfluenzaA__ADN90164

SEQ ID NO: 212096 - RNA, 1410 nt, Artificial Sequence; identical to SEQ ID NO: 211482
  derived and/or modified CDS sequence (opt5) from neuraminidase__InfluenzaA__ADN90186

SEQ ID NO: 212097 - RNA, 1410 nt, Artificial Sequence; identical to SEQ ID NO: 211482
  derived and/or modified CDS sequence (opt5) from neuraminidase__InfluenzaA__ADN90197

SEQ ID NO: 212098 - RNA, 1410 nt, Artificial Sequence
  derived and/or modified CDS sequence (opt5) from neuraminidase__InfluenzaA__ADN90208
augaaccccaaucagaagaucauuaccaucggcagcgugucccugacaauuucuacgaucugcuucuuuaugcaaauugccauccucaucaccacagucacccugcacuucaaacaguacaaguuuaacagcccuccgaauaaccagguuaugcuuugugagcccacaauuaucgaaagaaauauuaccgagaucguguaucugacaaacaccacgauugaaaaagagaucugcccuaagcucgcugaauaccggaauugguccaaaccccagugugacauuaccggguucgccccuuuuucuaaggauaacagcauccgccuguccgcgggaggcgacaucugggugacaagagagcccuaugucucuugcgauccugacaaguguuaccaauucgcucuugggcagggaaccacacugaauaacgugcauagcaauaacaccguucgggaucgcacgccguauagaacacuccugaugaaugagcugggcgugcccuuucaccucgggaccaaacaggucugcauugccugguccucuagcuccugucaugacggaaaggccuggcugcacgugugcaucacaggcgaugacaaaaacgcuaccgccagcuucauuuacaauggccggcuuguugauucuguggucuccuggagcaaggaaauccugcgcacccaggagucugaaugugugugcauuaacgggacauguacgguggucaugaccgacggauccgcuagcggcaaagccgauacaaagauccucuuuaucgaggaggggaagauuguucauaccuccacacugucuggaagcgcgcaacacguggaagagugcuccugcuauccuagauaccccggcgugcggugugucugccgcgacaacuggaaagggagcaauagaccuaucguggauauuaacaucaaggaccacucuauuguuuccagcuacguguguucuggacuugucggcgacacgccccggaaaaaugauagcuccucuagcucccauugccuggacccgaacaaugaagagggcgggcacggagugaagggcugggccuucgaugacgggaacgauguuuggaugggacgcaccaucaaugaaacaagcagacucggcuaugagaccuuuaaagugaucgagggguggucuaacccuaaguccaaacugcagauuaaucggcaggucaucguggaccgcagcaacagaucuggauacuccggcauuuucagcgucgaaggcaaguccuguaucaaucggugcuuuuauguggagcugauuagagggcgcaaggaagagaccgaaguucucuggacaucuaacagcaucguggucuucuguggaaccuccggcacauacgggacgggaucuuggcccgauggcgcugaccugaaucuuaugccuauuuga

SEQ ID NO: 212099 - RNA, 1410 nt, Artificial Sequence; identical to SEQ ID NO: 211482
  derived and/or modified CDS sequence (opt5) from neuraminidase__InfluenzaA__ADN90219

SEQ ID NO: 212100 - RNA, 1410 nt, Artificial Sequence
  derived and/or modified CDS sequence (opt5) from neuraminidase__InfluenzaA__ADN92469
augaaccccaaucagaagaucauuaccaucggcagcgugucccugacaauuucuacgaucugcuucuuuaugcaaauugccauccucaucaccacagucacccugcacuucaaacaguacgaguuuaacagcccuccgaauaaccagguuaugcuuugugaacccacaauuaucgagagaaauauuaccgaaaucguguaucugacaaacaccacgauugagaaggaaaucugcccuaaacucgcugaguaccggaauugguccaagccccagugugacauuaccggguucgccccuuuuucuaaagauaacagcauccgccuguccgcgggaggcgacaucugggugacaagagagcccuaugucucuugcgauccugacaaguguuaccaauucgcucuugggcagggaaccacacugaauaacgugcauagcaauaacaccguucgggaucgcacgccguauagaacacuccugaugaaugaacugggcgugcccuuucaccucgggaccaagcaggucugcauugccugguccucuagcuccugucaugacggaaaagccuggcugcacgugugcaucacaggcgaugacaagaacgcuaccgccagcuucauuuacaauggccggcuuguugauucuguggucuccuggagcaaagagauccugcgcacccaggaaucugagugugugugcauuaacgggacauguacgguggucaugaccgacggauccgcuagcgagaaggccgauacaaaaauccucuuuaucgaagagggcaagauuguucauaccuccacacugucugggagcgcgcaacacguggaagagugcuccugcuauccuagauaccccggagugcggugugucugccgcgacaacuggaagggcagcaauagaccuaucguggauauuaacaucaaagaccacucuauuguuuccagcuacguguguucugggcuugucggagacacgccccggaagaaugauagcuccucuagcucccauugccuggacccgaacaaugaagagggcggccacggggugaaaggaugggccuucgaugacggcaacgauguuuggauggggcgcaccaucagcgagaagucuagacucggauaugaaacauuuaaagugaucgagggcugguccaauccuaagagcaaacugcagauuaaccggcaggucaucguggaccgcgggaauagaucuggauacuccggcauuuucagcgucgaaggcaaguccuguaucaaccggugcuuuuauguggagcugauuagagggcgcaaggaagagaccgagguucucuggaccucuaauagcaucguggucuucuguggaacauccggcaccuacgggacaggaucuuggcccgauggcgcugacauuaaccugaugccuaucuga

SEQ ID NO: 212101 - RNA, 1410 nt, Artificial Sequence; identical to SEQ ID NO: 211327
  derived and/or modified CDS sequence (opt5) from neuraminidase__InfluenzaA__ADN92480

SEQ ID NO: 212102 - RNA, 1410 nt, Artificial Sequence; identical to SEQ ID NO: 211327
  derived and/or modified CDS sequence (opt5) from neuraminidase__InfluenzaA__ADN92491

SEQ ID NO: 212103 - RNA, 1410 nt, Artificial Sequence
  derived and/or modified CDS sequence (opt5) from neuraminidase__InfluenzaA__ADN92502
augaaccccaaucagaagaucauuaccaucggcagcgugucccugacaauuucuacgaucugcuucuuuaugcaaauugccauccucaucaccacagucacccugcacuucaaacaguacgaguuuaacagcccuccgaauaaccagguuaugcuuugugaacccacaauuaucgagagaaauauuaccgaaaucguguaucugacaaacaccacgauugagaaggaaaucugcccuaaacucgcugaguaccggaauugguccaagccccagugugacauuaccggguucgccccuuuuucuaaagauaacagcauccgccuguccgcgggaggcgacaucugggugacaagagagcccuaugucucuugcgauccugacaaguguuaccaauucgcucuugggcagggaaccacacugaauaacgugcauagcaauaacaccguucgggaucgcacgccguauagaacacuccugaugaaugaacugggcgugcccuuucaccucgggaccaagcaggucugcauugccugguccucuagcuccugucaugacggaaaagccuggcugcacgugugcaucacaggcgaugacaagaacgcuaccgccagcuucauuuacaauggccggcuuguugauucuguggucuccuggagcaaagagauccugcgcacccaggaaucugagugugugugcauuaacgggacauguacgguggucaugaccgacggauccgcuagcggcaaggccgauacaaaaauccucuuuaucgaggaagggaagauuguucauaccuccacacugucuggaagcgcgcaacacguggaggaaugcuccugcuauccuagauaccccggcgugcggugugucugccgcgacaacuggaaggggagcaauagaccuaucguggauauuaacaucaaagaccacucuauuguuuccagcuacguguguucuggacuugucggcgacacgccccggaagaaugauagcuccucuagcucccauugccuggacccgaacaaugaggaaggcgggaacggagugaaaggcugggccuucgaugacgggaaugauguuuggaugggacgcaccaucagcgagaagucuagacucggcuaugagacauuuaaagugaucgaagggugguccaacccuaagagcaaacugcagauuaaucggcaggucaucguggaccgcggaaacagaucuggcuacuccggcauuuucagcgucgaggggaaguccuguaucaaucggugcuuuuauguggaacugauuagaggacgcaaggaggaaaacgagguucucuggaccucuaauagcaucguggucuucuguggcaccuccgggacauacggaaccggcucuuggcccgauggggcugacauuaaccugaugccuaucuga

SEQ ID NO: 212104 - RNA, 1410 nt, Artificial Sequence; identical to SEQ ID NO: 208810
  derived and/or modified CDS sequence (opt5) from neuraminidase__InfluenzaA__ADN92512

SEQ ID NO: 212105 - RNA, 1410 nt, Artificial Sequence; identical to SEQ ID NO: 208810
  derived and/or modified CDS sequence (opt5) from neuraminidase__InfluenzaA__ADN92522

SEQ ID NO: 212106 - RNA, 1410 nt, Artificial Sequence; identical to SEQ ID NO: 208810
  derived and/or modified CDS sequence (opt5) from neuraminidase__InfluenzaA__ADN92532

SEQ ID NO: 212107 - RNA, 1410 nt, Artificial Sequence; identical to SEQ ID NO: 208810
  derived and/or modified CDS sequence (opt5) from neuraminidase__InfluenzaA__ADN92542

SEQ ID NO: 212108 - RNA, 1410 nt, Artificial Sequence; identical to SEQ ID NO: 208810
  derived and/or modified CDS sequence (opt5) from neuraminidase__InfluenzaA__ADN92552

SEQ ID NO: 212109 - RNA, 1410 nt, Artificial Sequence; identical to SEQ ID NO: 208810
  derived and/or modified CDS sequence (opt5) from neuraminidase__InfluenzaA__ADO00733

SEQ ID NO: 212110 - RNA, 1410 nt, Artificial Sequence
  derived and/or modified CDS sequence (opt5) from neuraminidase__InfluenzaA__ADO00743
augaaccccaaucagaagaucauuaccaucggcagcgugugcaugacaauugggauggccaaccugauccuccaaauuggaaauaucaucuccauuuggaucucucacagcauucagcugggcaaccagaaucagaucgagacguguaaccaauccgucauuaccuacgaaaauaacacauggguuaaucagaccuaugugaacaucucuaauacaaacuucgcugccgggcagagcguggucuccgcgaaacuugcuggaaauucuagccugugcccuguguccggcugggccauuuacagcaaggacaacucuaucagaaucggguccaaaggagauguuuuugugauucgggagccguucaucagcuguucuccccucgaaugccgcaccuuuuuccugacacagggcgcccuucugaaugacaagcauuccaacggcaccauuaaagauagaagcccuuaucggacgcucaugucuugucccaucggggaggucccuucccccuacaacagccgcuuugaauccguggcuuggucugccagcgcuugccacgacggaauuaauuggcugaccaucggcaucuccgggccugauaacggagccguugcggugcugaaguauaauggcauuaucacagacaccauuaagagcuggagaaacaauauccuccggacacaagagucugagugugccugcgucaacggguccuguuucaccgugaugacggauggaccgagcgacggccaggcuucuuacaaaauuuuucgcaucgaaaagggcaaaaucgucaagagcguggagaugaaugcccccaacuaucauuacgaagagugcuccuguuacccugauucuagcgagauuacaugcguuugcagagacaauuggcacggguccaaccggcccugggugagcuucaaucagaaccuggaauaucagaucggauacauuuguucuggcaucuuuggggauaauccucgccccaacgacaaaaccggauccugcggcccggugagcucuaauggggcuaacggagucaagggcuucuccuuuaaguauggcaacgggguguggauuggaagaacaaaaagcaucuccucucggaauggcuucgagaugauuugggauccuaacggguggaccggaaccgacaauaacuuuagcauccgccaagacaucguuggcauuaaugaaugguccggguacucuggcagcuucgugcagcaucccgagcuuacaggacuggauuguaucagaccuugcuucugggucgaacucauucggggccgccccaaggagaacacgaucuggaccuccgggagcucuauuuccuuuuguggagugaauagcgacacaguuggcuggucuuggcccgauggggccgagcugccuuucaccaucgacaaauga

SEQ ID NO: 212111 - RNA, 1410 nt, Artificial Sequence; identical to SEQ ID NO: 209987
  derived and/or modified CDS sequence (opt5) from neuraminidase__InfluenzaA__ADO00753

SEQ ID NO: 212112 - RNA, 1410 nt, Artificial Sequence; identical to SEQ ID NO: 208810
  derived and/or modified CDS sequence (opt5) from neuraminidase__InfluenzaA__ADO12146

SEQ ID NO: 212113 - RNA, 1410 nt, Artificial Sequence; identical to SEQ ID NO: 208810
  derived and/or modified CDS sequence (opt5) from neuraminidase__InfluenzaA__ADO12156

SEQ ID NO: 212114 - RNA, 1410 nt, Artificial Sequence; identical to SEQ ID NO: 208810
  derived and/or modified CDS sequence (opt5) from neuraminidase__InfluenzaA__ADO12166

SEQ ID NO: 212115 - RNA, 1410 nt, Artificial Sequence; identical to SEQ ID NO: 208810
  derived and/or modified CDS sequence (opt5) from neuraminidase__InfluenzaA__ADO12176

SEQ ID NO: 212116 - RNA, 1410 nt, Artificial Sequence; identical to SEQ ID NO: 208810
  derived and/or modified CDS sequence (opt5) from neuraminidase__InfluenzaA__ADO12186

SEQ ID NO: 212117 - RNA, 1410 nt, Artificial Sequence; identical to SEQ ID NO: 208810
  derived and/or modified CDS sequence (opt5) from neuraminidase__InfluenzaA__ADO12196

SEQ ID NO: 212118 - RNA, 1410 nt, Artificial Sequence; identical to SEQ ID NO: 208810
  derived and/or modified CDS sequence (opt5) from neuraminidase__InfluenzaA__ADO12206

SEQ ID NO: 212119 - RNA, 1410 nt, Artificial Sequence; identical to SEQ ID NO: 208810
  derived and/or modified CDS sequence (opt5) from neuraminidase__InfluenzaA__ADO12216

SEQ ID NO: 212120 - RNA, 1410 nt, Artificial Sequence; identical to SEQ ID NO: 208810
  derived and/or modified CDS sequence (opt5) from neuraminidase__InfluenzaA__ADO12226

SEQ ID NO: 212121 - RNA, 1410 nt, Artificial Sequence; identical to SEQ ID NO: 208810
  derived and/or modified CDS sequence (opt5) from neuraminidase__InfluenzaA__ADO12246

SEQ ID NO: 212122 - RNA, 1410 nt, Artificial Sequence; identical to SEQ ID NO: 208810
  derived and/or modified CDS sequence (opt5) from neuraminidase__InfluenzaA__ADO12266

SEQ ID NO: 212123 - RNA, 1410 nt, Artificial Sequence
  derived and/or modified CDS sequence (opt5) from neuraminidase__InfluenzaA__ADO12276
augaaccccaaucagaagaucauuaccaucggcagcgugugcaugacaauugggauggccaaccugauccuccaaauuggaaauaucaucuccauuuggaucucucacagcauucagcugggcaaccagaaucagaucgagacguguaaccaauccgucauuaccuacgaaaauaacacauggguuaaucagaccuaugugaacaucucuaauacaaacuucgcugccgggcagagcguggucuccgugaaacuugcgggaaauucuagccugugcccuguuuccggcugggcuauuuacagcaaggacaacucuaucagaaucggguccaaaggagauguguuugucauucgggagccguucaucagcuguucuccccucgaaugccgcaccuuuuuccugacacagggcgcccuucugaaugacaagcauuccaacggcaccauuaaagauagaagcccuuaucggacgcucaugucuugucccaucggggaggugccuucccccuacaacagccgcuuugaauccguugccuggucugcuagcgccugccacgacggaauuaauuggcugaccaucggcaucuccgggccugauaacggagcuguggccguccugaaguauaauggcauuaucacagacaccauuaagagcuggagaaacaauauccuccggacacaagagucugagugugcgugcgugaacggguccuguuucaccgugaugacggauggaccgagcgacggccaggccucuuacaaaauuuuucgcaucgaaaagggcaaaaucgucaagagcguugagaugaaugcucccaacuaucauuacgaagagugcuccuguuacccugauucuagcgagauuacaugcgugugcagagacaauuggcacggguccaaccggcccugggugagcuucaaucagaaccuggaauaucagaucggauacauuuguucuggcaucuuuggggauaauccucgccccaacgacaaauccggaagcugcggcccggucucuuccaauggggccaacggagugaagggcuucagcuuuaaguauggcaacgggguuuggauuggaagaaccaaauccaucucuagccggaauggcuucgagaugauuugggauccuaacggguggacaggaaccgacaauaacuuuuccaucaagcaagacaucgugggcauuaaugaauggucuggguacagcggcuccuucguccagcaucccgagcuuaccggacuggauuguauccgcccuugcuucuggguggaacucauuagaggccggcccaaagagaacacaaucuggacgagcgggucuuccauuagcuuuuguggaguuaauucugacaccgugggcugguccuggcccgauggggcugagcugccuuucacaaucgacaaguga

SEQ ID NO: 212124 - RNA, 1410 nt, Artificial Sequence; identical to SEQ ID NO: 208810
  derived and/or modified CDS sequence (opt5) from neuraminidase__InfluenzaA__ADO12286

SEQ ID NO: 212125 - RNA, 1410 nt, Artificial Sequence; identical to SEQ ID NO: 208810
  derived and/or modified CDS sequence (opt5) from neuraminidase__InfluenzaA__ADO12296

SEQ ID NO: 212126 - RNA, 1410 nt, Artificial Sequence; identical to SEQ ID NO: 208810
  derived and/or modified CDS sequence (opt5) from neuraminidase__InfluenzaA__ADO12306

SEQ ID NO: 212127 - RNA, 1410 nt, Artificial Sequence
  derived and/or modified CDS sequence (opt5) from neuraminidase__InfluenzaA__ADO12316
augaaccccaaucagaagaucauuaccaucggcagcgugugcaugacaauugggauggccaaccugauccuccaaauuggaaauaucaucuccauuuggaucucucacagcauucagcugggcaaccagaaucagaucgagacguguaaccaauccgucauuaccuacgaaaauaacacauggguuaaucagaccuaugugaacaucucuaauacaaacuucgcugccgggcagagcguggucuccgugaaacuugcgggaaauucuagccugugcccuguuuccggcugggcuauuuacagcaaggacaacucuaucagaaucggguccaaaggagauguguuugucauucgggagccguucaucagcuguucuccccucgaaugccgcaccuuuuuccugacacagggcgcccuucugaaugacaagcauuccaacggcaccauuaaagauagaagcccuuaucggacgcucaugucuugucccaucggggaggugccuucccccuacaacagccgcuuugaauccguugccuggucugcuagcgccugccacgacggaauuaauuggcugaccaucggcaucuccgggccugauaacggagcuguggccguccugaaguauaauggcauuaucacagacaccauuaagagcuggagaaacaauauccuccggacacaagagucugagugugcgugcgugaacggguccuguuucaccgugaugacggauggaccgagcgacggccaggccucuuacaaaauuuuucgcaucgaaaagggcaaaaucgucaagagcguugagaugaaugcucccaacuaucauuacgaagagugcuccuguuacccugauucuagcgagauuacaugcgugugcagagacaauuggcacggguccaaccggcccugggugagcuucaaucagaaccuggaauaucagaucggauacauuuguucuggcaucuuuggggauaauccucgccccaacgacaaaaccggauccugcggcccggucagcucuaauggggccaacggagugaagggcuucuccuuuaaguauggcgaugggguuuggauuggaagaacaaaaagcaucuccucucggaacggcuucgagaugauuugggacccuaauggguggaccggaaccgacaacaauuuuagcaucaagcaagauaucgugggcauuaacgaaugguccggguacucuggcagcuucguccagcaucccgagcuuacaggacuggacuguauccgcccuugcuucuggguggaacucauuagaggccggcccaaagagaauacgaucuggaccuccgggagcucuauuuccuuuuguggaguuaacagcgauacagugggcuggucuuggcccgacggggcugagcugccuuucaccaucgauaaguga

SEQ ID NO: 212128 - RNA, 1410 nt, Artificial Sequence; identical to SEQ ID NO: 208810
  derived and/or modified CDS sequence (opt5) from neuraminidase__InfluenzaA__ADO12326

SEQ ID NO: 212129 - RNA, 1410 nt, Artificial Sequence; identical to SEQ ID NO: 208810
  derived and/or modified CDS sequence (opt5) from neuraminidase__InfluenzaA__ADO12336

SEQ ID NO: 212130 - RNA, 1410 nt, Artificial Sequence; identical to SEQ ID NO: 208810
  derived and/or modified CDS sequence (opt5) from neuraminidase__InfluenzaA__ADO12346

SEQ ID NO: 212131 - RNA, 1410 nt, Artificial Sequence; identical to SEQ ID NO: 208810
  derived and/or modified CDS sequence (opt5) from neuraminidase__InfluenzaA__ADO12356

SEQ ID NO: 212132 - RNA, 1410 nt, Artificial Sequence; identical to SEQ ID NO: 208810
  derived and/or modified CDS sequence (opt5) from neuraminidase__InfluenzaA__ADO12366

SEQ ID NO: 212133 - RNA, 1410 nt, Artificial Sequence; identical to SEQ ID NO: 208810
  derived and/or modified CDS sequence (opt5) from neuraminidase__InfluenzaA__ADO12376

SEQ ID NO: 212134 - RNA, 1410 nt, Artificial Sequence; identical to SEQ ID NO: 208810
  derived and/or modified CDS sequence (opt5) from neuraminidase__InfluenzaA__ADO12386

SEQ ID NO: 212135 - RNA, 1410 nt, Artificial Sequence; identical to SEQ ID NO: 208810
  derived and/or modified CDS sequence (opt5) from neuraminidase__InfluenzaA__ADO12396

SEQ ID NO: 212136 - RNA, 1410 nt, Artificial Sequence; identical to SEQ ID NO: 208810
  derived and/or modified CDS sequence (opt5) from neuraminidase__InfluenzaA__ADO12406

SEQ ID NO: 212137 - RNA, 1410 nt, Artificial Sequence; identical to SEQ ID NO: 209577
  derived and/or modified CDS sequence (opt5) from neuraminidase__InfluenzaA__ADO12416

SEQ ID NO: 212138 - RNA, 1410 nt, Artificial Sequence; identical to SEQ ID NO: 208810
  derived and/or modified CDS sequence (opt5) from neuraminidase__InfluenzaA__ADO12426

SEQ ID NO: 212139 - RNA, 1410 nt, Artificial Sequence; identical to SEQ ID NO: 208810
  derived and/or modified CDS sequence (opt5) from neuraminidase__InfluenzaA__ADO12436

SEQ ID NO: 212140 - RNA, 1410 nt, Artificial Sequence; identical to SEQ ID NO: 208810
  derived and/or modified CDS sequence (opt5) from neuraminidase__InfluenzaA__ADO12446

SEQ ID NO: 212141 - RNA, 1410 nt, Artificial Sequence; identical to SEQ ID NO: 208810
  derived and/or modified CDS sequence (opt5) from neuraminidase__InfluenzaA__ADO12456

SEQ ID NO: 212142 - RNA, 1410 nt, Artificial Sequence; identical to SEQ ID NO: 208810
  derived and/or modified CDS sequence (opt5) from neuraminidase__InfluenzaA__ADO12466

SEQ ID NO: 212143 - RNA, 1410 nt, Artificial Sequence; identical to SEQ ID NO: 208810
  derived and/or modified CDS sequence (opt5) from neuraminidase__InfluenzaA__ADO12476

SEQ ID NO: 212144 - RNA, 1410 nt, Artificial Sequence; identical to SEQ ID NO: 208810
  derived and/or modified CDS sequence (opt5) from neuraminidase__InfluenzaA__ADO12486

SEQ ID NO: 212145 - RNA, 1410 nt, Artificial Sequence; identical to SEQ ID NO: 208810
  derived and/or modified CDS sequence (opt5) from neuraminidase__InfluenzaA__ADO12496

SEQ ID NO: 212146 - RNA, 1410 nt, Artificial Sequence; identical to SEQ ID NO: 208810
  derived and/or modified CDS sequence (opt5) from neuraminidase__InfluenzaA__ADO12506

SEQ ID NO: 212147 - RNA, 1410 nt, Artificial Sequence; identical to SEQ ID NO: 208810
  derived and/or modified CDS sequence (opt5) from neuraminidase__InfluenzaA__ADO12516

SEQ ID NO: 212148 - RNA, 1410 nt, Artificial Sequence; identical to SEQ ID NO: 208810
  derived and/or modified CDS sequence (opt5) from neuraminidase__InfluenzaA__ADO12526

SEQ ID NO: 212149 - RNA, 1410 nt, Artificial Sequence; identical to SEQ ID NO: 208810
  derived and/or modified CDS sequence (opt5) from neuraminidase__InfluenzaA__ADO12536

SEQ ID NO: 212150 - RNA, 1410 nt, Artificial Sequence; identical to SEQ ID NO: 208810
  derived and/or modified CDS sequence (opt5) from neuraminidase__InfluenzaA__ADO12546

SEQ ID NO: 212151 - RNA, 1410 nt, Artificial Sequence; identical to SEQ ID NO: 208810
  derived and/or modified CDS sequence (opt5) from neuraminidase__InfluenzaA__ADO12556

SEQ ID NO: 212152 - RNA, 1410 nt, Artificial Sequence; identical to SEQ ID NO: 208810
  derived and/or modified CDS sequence (opt5) from neuraminidase__InfluenzaA__ADO12566

SEQ ID NO: 212153 - RNA, 1410 nt, Artificial Sequence; identical to SEQ ID NO: 208810
  derived and/or modified CDS sequence (opt5) from neuraminidase__InfluenzaA__ADO12576

SEQ ID NO: 212154 - RNA, 1410 nt, Artificial Sequence
  derived and/or modified CDS sequence (opt5) from neuraminidase__InfluenzaA__ADO12586
augaaccccaaucagaagaucauuaccaucggcagcgugugcaugacaauugggauggccaaccugauccuccaaauuggaaauaucaucuccauuuggaucucucacagcauucagcugggcaaccagaaucagaucgagacguguaaccaauccgucauuaccuacgaaaauaacacauggguuaaucagaccuaugugaacaucucuaauacaaacuucgcugccgggcagagcguggucuccgugaaacuugcgggaaauucuagccugugcccuguuuccggcugggcuauuuacagcaaggacaacucuaucagaaucggguccaaaggagauguguuugucauucgggagccguucaucagcuguucuccccucgaaugccgcaccuuuuuccugacacagggcgcccuucugaaugacaagcauuccaacggcaccauuaaagauagaagcccuuaucggacgcucaugucuugucccaucggggaggugccuucccccuacaacagccgcuuugaauccguugccuggucugcuagcgccugccacgacggaauuaauuggcugaccaucggcaucuccgggccugauagcggagcuguggccguccugaaguauaacggcauuaucacagacaccauuaagucuuggagaaauaacauccuccggacacaagaguccgagugugcgugcgugaaugggagcuguuucaccgugaugacggauggaccgucugacggccaggccagcuacaaaauuuuucgcaucgaaaagggcaaaaucgucaaguccguugagaugaacgcucccaauuaucauuacgaagagugcucuuguuacccugauagcuccgagauuacaugcgugugcagagacaacuggcacgggagcaaucggcccugggugucuuucaaccagaaucuggaauaucagaucggauacauuuguuccggcaucuuuggggauaacccucgccccaaugacaaaaccggaagcugcggcccggucucuuccaacggggccaauggagugaagggcuucagcuuuaaguauggcaacgggguuuggauuggaagaacaaaauccaucucuagccggaacggcuucgagaugauuugggauccuaauggguggaccggaaccgacaacaauuuuuccaucaagcaagacaucgugggcauuaacgaauggucuggguacagcggcuccuucguccagcaucccgagcuuacaggacuggauuguauccgcccuugcuucuggguggaacucauuagaggccggcccaaagagaauacgaucuggaccagcgggucuuccauuagcuuuuguggaguuaacucugacacagugggcugguccuggcccgauggggcugagcugccuuucaccaucgacaaguga

SEQ ID NO: 212155 - RNA, 1410 nt, Artificial Sequence; identical to SEQ ID NO: 212154
  derived and/or modified CDS sequence (opt5) from neuraminidase__InfluenzaA__ADO12596

SEQ ID NO: 212156 - RNA, 1410 nt, Artificial Sequence; identical to SEQ ID NO: 208810
  derived and/or modified CDS sequence (opt5) from neuraminidase__InfluenzaA__ADO12606

SEQ ID NO: 212157 - RNA, 1410 nt, Artificial Sequence; identical to SEQ ID NO: 208810
  derived and/or modified CDS sequence (opt5) from neuraminidase__InfluenzaA__ADO12616

SEQ ID NO: 212158 - RNA, 1410 nt, Artificial Sequence; identical to SEQ ID NO: 208810
  derived and/or modified CDS sequence (opt5) from neuraminidase__InfluenzaA__ADO12626

SEQ ID NO: 212159 - RNA, 1410 nt, Artificial Sequence; identical to SEQ ID NO: 208810
  derived and/or modified CDS sequence (opt5) from neuraminidase__InfluenzaA__ADO14355

SEQ ID NO: 212160 - RNA, 1401 nt, Artificial Sequence
  derived and/or modified CDS sequence (opt5) from neuraminidase__InfluenzaA__ADO21028
augaaccccaaucagaagaucauugccaucggcagcgugucccugaccauugcuacaaucugcuuccucaugcaaauugccauccuggcgacgaccaugacacuucacuuuaaacagaacgaguguucuaauccuagcaacaaucaggucguuccgugcgaacccaccaucauugagagaaacaucgugcaucugaauagcacaaccauugaaaaggagaucuguccuaaaguggcugaauacaagaacuggucuaaaccccagugccaaauuacagggagcgccccuuucuccaagggaaauucuauccggcucagcgccggcggggacauuugggucacccgcgagcccuauguguccuguagccugggaaagugcuaccaguuugcucuuggccaggggacgacccugaaaaacaagcacucuaauggaacaacccaugauagaguuccucaccggacacuccugauguccgagcugggcgugccguuccaucucggcaccaaacaggucuguaucgccugguccucuuccagcugccacgacgggaaggcuuggcugcacguguguguuacgggagaugacaaaaacgccacagcgucuaucauuuaugauggcaugcuuguggacuccaucgggagcugguccaagaauauucugcgcacccaagaaucugagugcgucuguaucaacggaacaugcaccguggugaugaccgauggcagcgccuccgggaaggcugacacacggauucucuuuaucagagaaggaaaaaucguccauauuagcccccugucuggcuccgcccagcacguugaggagugcagcuguuacccucgcuaucccgaagugagaugcgugugucgggauaauuggaagggcucuaaccgcccuguccuuuacaucaacauggcugacuauagcauugaguccucuuacgugugcagcgggcugguuggagauacgcccagaaaugacgauuccuacucuagcuccaacugucgggacccgaauaacgaacgcggcgccccuggggugaaaggaugggcguucgacaauggcaacgauaucuggauggggagaaccauuaaggaggacagccggucuggauaugaaacauuucgcgucgugggcggcuggaccacagccaauuccaaaagccagaucaacagacagguuaucguggauuccgacaauuggucuggguacagcggaauuuucuccgucgagggcaagaacugcaucaaucgguguuuuuauguggagcucauuagagggcgcccccaagaaacccgggucugguggacgucuaacagcaucauuguguucugcggaacauccggcaccuacgggaccggcagcuggccugauggagcuaauaucaacuuuaugcccauuuga

SEQ ID NO: 212161 - RNA, 1401 nt, Artificial Sequence
  derived and/or modified CDS sequence (opt5) from neuraminidase__InfluenzaA__ADO21039
augaaccccaaucagaagaucauugccaucggcagcgugucccugaccauugcuacaaucugcuuccucaugcaaauugccauccuggcgacgaccaugacacuucacuuuaaacagaacgaguguucuaauccuagcaacaaucaggucguuccgugcgaacccaccaucauugagagaaacaucgugcaucugaauagcacaaccauugaaaaggagaucuguccuaaaguggcugaauacaagaacuggucuaaaccccagugccaaauuacagggagcgccccuuucuccaagggaaauucuauccggcucagcgccggcggggacauuugggucacccgcgagcccuauguguccuguagccugggaaagugcuaccaguuugcucuuggccaggggacgacccugaaaaacaagcacucuaauggaacaacccaugauagagacccucaccggacacuccugauguccgagcugggcguuccguuccaucucggcaccaaacagguguguaucgccugguccucuuccagcugccacgaugggaaggcuuggcugcacgucugugugacgggagacgauaaaaacgccacagcgucuaucauuuaugacggcaugcuuguugauuccaucgggagcugguccaagaauauucugcgcacccaagaaucugagugcguguguaucaacggaacaugcaccgucgugaugaccgacggcagcgccuccgggaaggcugauacacggauucucuuuaucagagaaggaaaaaucgugcauauuagcccccugucuggcuccgcccagcacgucgaggagugcagcuguuacccucgcuaucccgaaguuagaugcgugugucgggacaauuggaagggcucuaaccgcccugugcuuuacaucaacauggcugauuauacgauugagagcuccuacgucugcucugggcuggugggagacacccccagaaaugaugacagcuacuccagcucuaacugucgggacccgaauaacgaacgcggcgccccugggguuaaaggaugggcguucgauaauggcaacgacaucuggauggggagaacaauuaaggaggauucccggagcggauaugaaaccuuucgcguggucggcggcuggacaaccgccaauucuaaaucccagaucaacagacaggugaucguugacagcgauaauugguccggguacucuggaauuuucagcguggagggcaagaacugcaucaaucgguguuuuuaugucgagcucauuagagggcgcccccaagaaacgcgggugugguggacauccaacucuaucauugucuucugcggaaccagcggcaccuacgggacaggcuccuggccugacggagcuaauaucaacuuuaugcccauuuga

SEQ ID NO: 212162 - RNA, 1401 nt, Artificial Sequence
  derived and/or modified CDS sequence (opt5) from neuraminidase__InfluenzaA__ADO21050
augaaccccaaucagaagaucauugccaucggcagcgugucccugaccauugcuacaaucugcuuccucaugcaaauugccauccuggcgacgaccaugacacuucacuuuaaacagaacgaguguucuaauccuagcaacaaucaggucguuccgugcgaacccaccaucauugagagaaacaucgugcaucugaauagcacaaccauugaaaaggagaucuguccuaaaguggcugaauacaagaacuggucuaaaccccagugccaaauuacagggagcgccccuuucuccaagggaaauucuauccggcucagcgccggcggggacauuugggucacccgcgagcccuauguguccuguagccugggaaagugcuaccaguuugcucuuggccaggggacgacccugaaaaacaagcacucuaauggaacaacccaugauagaggcccucaccggacacuccugauguccgagcugggcguuccguuccaucucgggaccaaacagguguguaucgccugguccucuuccagcugccacgacggaaaggcuuggcugcacgucugugugacgggcgaugacaaaaacgccacagcgucuaucauuuaugaugggaugcuuguugacuccaucggaagcugguccaagaauauucugcgcacccaagaaucugagugcguguguaucaacggcacaugcaccgucgugaugaccgaugggagcgccuccggaaaggcugacacacggauucucuuuaucagagaaggcaaaaucgugcauauuagcccccugucuggcuccgcccagcacgucgaggagugcagcuguuacccucgcuaucccgaaguuagaugcgugugucgggauaauuggaaggggucuaaccgcccugugcuuuacaucaacauggcugacuauagcauugaguccucuuacgucugcagcggacuggugggcgauacgcccagaaaugacgauuccuacucuagcuccaacugucgggacccgaauaacgaaagcggggccccuggaguuaaaggcugggcguucgacaaugggaacgauaucuggaugggacgcaccauuaaggaggacucuagauccggcuaugaaacauuucggguggucggcggguggaccacagccaauagcaaaucccagaucaaccgccaggugaucguugauucugacaauuggagcggauacuccggcauuuucucuguggaggggaagaacugcaucaauagauguuuuuaugucgagcucauucggggaagaccccaagaaacccgcgugugguggacgagcaacuccaucauugucuucugcggcacaagcgggaccuacggcaccggaucuuggccugauggcgcuaauaucaacuuuaugcccauuuga

SEQ ID NO: 212163 - RNA, 1410 nt, Artificial Sequence
  derived and/or modified CDS sequence (opt5) from neuraminidase__InfluenzaA__ADO25095
augaaccccaaucagaagaucauuaccaucggcagcgugugcaugacaauugggauggccaaccugauccuccaaauuggaaauaucaucuccauuuggaucucucacagcauucagcugggcaaccagaaucagaucgagacguguaaccaauccauuaucaccuacgaaaauaacacaugggucaaucagaccuauguuaacauuucuaauacaaacuucgcugccgggcagagcgugguguccgucaaacuugcgggaaauucuagccugugcccuguguccggcugggcuaucuacagcaaggacaacucuaucagaauuggguccaaaggagauguuuuugugauccgggagccguucauuagcuguucuccccucgaaugccgcaccuuuuuccugacacagggcgcccuucugaaugacaagcauuccaacggcaccaucaaagauagaagcccuuaucggacgcucaugucuugucccauuggggaggucccuucccccuacaacagccgcuuugaauccguggccuggucugcuagcgccugccacgacggaaucaauuggcugaccaucggcauuuccgggccugauaacggagcuguugccgugcugaaguauaauggcaucauuacagacaccaucaagagcuggagaaacaauauucuccggacacaagagucugagugugcgugcgucaacggguccuguuucaccgugaugacggauggaccgagcgacggccaggccucuuacaaaaucuuucgcaucgaaaagggcaaaauugucaagagcguggagaugaaugcucccaacuaucauuacgaagagugcuccuguuacccugauucuagcgagaucacaugcguuugcagagacaauuggcacggguccaaccggcccugggugagcuucaaucagaaccuggaauaucagauuggauacaucuguucuggcauuuuuggggauaauccucgccccaacgacaaaaccggauccugcggcccggugagcucuaauggggccaacggagucaagggcuucuccuuuaaguauggcaacgggguguggaucggaagaacaaaaagcauuuccucucggagcggcuucgagaugaucugggauccuaauggguggaccggaaccgacaacaauuuuuccaucaagcaagacauuguuggcaucaacgaauggucuggguacagcggcuccuucgugcagcaucccgagcuuacaggacuggauuguauucgcccuugcuucugggucgaacucaucagaggccggcccaaagagaauacgauuuggaccagcgggucuuccaucagcuuuuguggagugaacucugacacaguuggcugguccuggcccgauggggcugagcugccuuucaccaucgacaaguga

SEQ ID NO: 212164 - RNA, 1410 nt, Artificial Sequence
  derived and/or modified CDS sequence (opt5) from neuraminidase__InfluenzaA__ADO25105
augaaccccaaucagaagaucauuaccaucggcagcgugugcaugacaauugggauggccaaccugauccuccaaauuggaaauaucaucuccauuuggaucucucacagcauucagcugggcaaccagaaucagaucgggacguguaaccaauccgucauuaccuacgagacaaauaccuggguuaaccagacauaugugaauaucucuaacaccaauuucgcugccggacagagcguggucuccgugaaacuugcgggcaacucuagccugugcccuguuuccgggugggcuauuuacagcaaggacaauucuaucagaaucggauccaaaggcgauguguuugucauucgggaaccguucaucagcuguucuccccucgagugccgcacauuuuuccugacccagggcgcccuucugaacgacaagcauuccaaugggacgauuaaagauagaagcccuuaucggacccucaugucuugucccaucggagaagugccuucccccuacaacagccgcuuugaguccguugccuggucugcuagcgccugccacgacggcauuaacuggcugacaaucgggaucuccggaccugauaauggcgcuguggccguccugaaguauaacgggauuaucaccgacacaauuaagagcuggagaaauaacauccuccggacccaagaaucugagugugcgugcgugaauggauccuguuucacggugaugacagauggcccgagcgaccgccaggccucuuacaaaauuuuuagaaucgagaagggcaaaaucgucaagagcguugaaaugaacgcucccaauuaucauuacgaggaaugcuccuguuacccugauucuagcgagauuaccugcgugugccgggacaacuggcacggguccaaucgccccugggugagcuucaaccagaaucuggaguaucagaucggauacauuuguucuggcaucuuuggggauaacccuagacccaaugacaaaacaggauccugcggcccggucagcucuaacggggccaauggagugaagggcuucuccuuuaaguauggcaacgggguuuggauuggacggaccaaaagcaucuccucucgcaacggcuucgaaaugauuugggauccuaauggguggaccggaacagacaacaauuuuagcaucaagcaagacaucgugggcauuaacgagugguccggguacucuggcagcuucguccagcaucccgaacuuacgggacuggauuguaucagaccuugcuucuggguggagcucauucggggccgccccaaagaaaauaccaucuggacauccgggagcucuauuuccuuuuguggaguuaacagcgacaccgugggcuggucuuggcccgauggggcugagcugccuuucacaaucgacaaguga

SEQ ID NO: 212165 - RNA, 1410 nt, Artificial Sequence; identical to SEQ ID NO: 210591
  derived and/or modified CDS sequence (opt5) from neuraminidase__InfluenzaA__ADO25115

SEQ ID NO: 212166 - RNA, 1410 nt, Artificial Sequence; identical to SEQ ID NO: 210591
  derived and/or modified CDS sequence (opt5) from neuraminidase__InfluenzaA__ADO25125

SEQ ID NO: 212167 - RNA, 1410 nt, Artificial Sequence
  derived and/or modified CDS sequence (opt5) from neuraminidase__InfluenzaA__ADO25135
augaaccccaaucagaagaucauuaccaucggcagcgugugcaugacaauugggauggccaaccugguccuccaaaucggaaauauuaucuccaucuggauuucucacagcauccagcugggcaaccagaaucagauugagacguguaaccaauccguuaucaccuacgaaaauaacacaugggugaaucagaccuaugugaacauuucuaauacaaacuucgcugccgggcagagcgucguguccguuaaacuugcgggaaauucuagccugugcccuguguccggcugggcuaucuacagcaaggacaacucuauuagaaucggguccaaaggagaugucuuugugauccgggagccguucauuagcuguucuccccucgaaugccgcaccuuuuuccugacacagggcgcccuucugaaugacaagcauuccaacggcaccaucaaagauagaagcccuuaucggacgcucaugucuugucccauuggggagguuccuucccccuacaacagccgcuuugaauccguggccuggucugcuagcgccugccacgacggaaucaauuggcugaccauuggcaucuccgggccugauaacggagcugucgccgugcugaaguauaauggcaucauuacagacaccaucaagagcuggagaaacaauauucuccggacacaagagucugagugugcgugcgugaacggguccuguuucaccgucaugacggauggaccgagcgacggccaggccucuuacaaaaucuuucgcauugaaaagggcaaaaucguuaagagcguggagaugaaugcucccaacuaucauuacgaagagugcuccuguuacccugauucuagcgagaucacaugcgugugcagagacaauuggcacggguccaaccggcccugggucagcuucaaucagaaccuggaauaucagauuggauacaucuguucuggcauuuuuggggauaauccucgccccaacgacaaaaccggauccugcggcccggugagcucuaauggggccaacggaguuaagggcuucuccuuuaaguauggcaacgggguguggaucggaagaacaaaaagcauuuccucucggaauggcuucgagaugaucugggauccuaacggguggaccggaaccgacaauaacuuuagcauuaagcaagacaucgucggcaucaaugaaugguccggguacucuggcagcuucgugcagcaucccgagcuuacaggacuggauuguauucgcccuugcuucuggguugaacucaucagaggccggcccaaagagaacacgauuuggaccuccgggagcucuaucuccuuuuguggagugaauagcgacacagucggcuggucuuggcccgauggggcugagcugccuuucaccauugacaaguga

SEQ ID NO: 212168 - RNA, 1410 nt, Artificial Sequence; identical to SEQ ID NO: 210161
  derived and/or modified CDS sequence (opt5) from neuraminidase__InfluenzaA__ADO25145

SEQ ID NO: 212169 - RNA, 1410 nt, Artificial Sequence; identical to SEQ ID NO: 208810
  derived and/or modified CDS sequence (opt5) from neuraminidase__InfluenzaA__ADO25155

SEQ ID NO: 212170 - RNA, 1410 nt, Artificial Sequence; identical to SEQ ID NO: 208810
  derived and/or modified CDS sequence (opt5) from neuraminidase__InfluenzaA__ADO25165

SEQ ID NO: 212171 - RNA, 1410 nt, Artificial Sequence; identical to SEQ ID NO: 208810
  derived and/or modified CDS sequence (opt5) from neuraminidase__InfluenzaA__ADO25175

SEQ ID NO: 212172 - RNA, 1410 nt, Artificial Sequence
  derived and/or modified CDS sequence (opt5) from neuraminidase__InfluenzaA__ADO25185
augaaccccaaucagaagaucauuaccaucggcagcgugugcaugacaauugggauggccaaccugauccuccaaauuggaaauaucaucuccauuuggaucucucacagcauucagcugggcaaccagaaucagaucgagacguguaaccaauccgucauuaccuacgaaaauaacacauggguuaaucagaccuaugugaacaucucuaauacaaacuucgcugccgggcagagcguggucuccgugaaacuugcgggaaauucuagccugugcccuguuuccggcugggcuauuuacagcaaggacaacucuaucagaaucggguccaaaggagauguguuugucauucgggagccguucaucagcuguucuccccucgaaugccgcaccuuuuuccugacacagggcgcccuucugaaugacaagcauuccaacggcaccauuaaagauagaagcccuuaucggacgcucaugucuugucccaucggggaggugccuucccccuacaacagccgcuuugaauccguugccuggucugcuagcgccugccacgacggaauuaauuggcugaccaucggcaucuccgggccugauaacggagcuguggccguccugaaguauaauggcauuaucacagacaccauuaagagcuggagaaacaauauccuccggacacaagagucugagugugcgugcgugaacggguccuguuucaccgugaugacggauggaccgagcgacggccaggccucuuacaaaauuuuucgcaucgaaaagggcaaaaucgucaagagcguugagaugaaugcucccaacuaucauuacgaagagugcuccuguuacccugauucuagcgagauuacaugcgugugcagagacaauuggcacggguccaaccggcccugggugagcuucaaucagaaccuggaauaucagaucggauacauuuguucuggcaucuuuggggauaauccucgccccaacgacaaaaccggauccugcggcccggucagcucuaauggggccaacggagugaagggcuucuccuuuaaguauggcaacgggguuuggauuggaagaacaaaaagcauguccucucggaauggcuucgagaugaucugggauccuaacggguggaccggaaccgacaauaacuuuagcauuaagcaagacaucgugggcaucaaugaaugguccggguacucuggcagcuucguccagcaucccgagcuuacaggacuggauuguauucgcccuugcuucuggguggaacucaucagaggccggcccaaagagaacacgauuuggaccuccgggagcucuaucuccuuuuguggaguuaauagcgacacagugggcuggucuuggcccgauggggcugagcugccuuucaccauugacaaguga

SEQ ID NO: 212173 - RNA, 1410 nt, Artificial Sequence; identical to SEQ ID NO: 211239
  derived and/or modified CDS sequence (opt5) from neuraminidase__InfluenzaA__ADO25195

SEQ ID NO: 212174 - RNA, 1410 nt, Artificial Sequence; identical to SEQ ID NO: 209947
  derived and/or modified CDS sequence (opt5) from neuraminidase__InfluenzaA__ADO25205

SEQ ID NO: 212175 - RNA, 1410 nt, Artificial Sequence; identical to SEQ ID NO: 210161
  derived and/or modified CDS sequence (opt5) from neuraminidase__InfluenzaA__ADO25215

SEQ ID NO: 212176 - RNA, 1410 nt, Artificial Sequence; identical to SEQ ID NO: 208810
  derived and/or modified CDS sequence (opt5) from neuraminidase__InfluenzaA__ADO25225

SEQ ID NO: 212177 - RNA, 1410 nt, Artificial Sequence; identical to SEQ ID NO: 210161
  derived and/or modified CDS sequence (opt5) from neuraminidase__InfluenzaA__ADO25235

SEQ ID NO: 212178 - RNA, 1410 nt, Artificial Sequence; identical to SEQ ID NO: 208810
  derived and/or modified CDS sequence (opt5) from neuraminidase__InfluenzaA__ADO25245

SEQ ID NO: 212179 - RNA, 1410 nt, Artificial Sequence; identical to SEQ ID NO: 208810
  derived and/or modified CDS sequence (opt5) from neuraminidase__InfluenzaA__ADO25255

SEQ ID NO: 212180 - RNA, 1410 nt, Artificial Sequence; identical to SEQ ID NO: 210591
  derived and/or modified CDS sequence (opt5) from neuraminidase__InfluenzaA__ADO25265

SEQ ID NO: 212181 - RNA, 1410 nt, Artificial Sequence; identical to SEQ ID NO: 210402
  derived and/or modified CDS sequence (opt5) from neuraminidase__InfluenzaA__ADO25275

SEQ ID NO: 212182 - RNA, 1410 nt, Artificial Sequence; identical to SEQ ID NO: 210161
  derived and/or modified CDS sequence (opt5) from neuraminidase__InfluenzaA__ADO25285

SEQ ID NO: 212183 - RNA, 1413 nt, Artificial Sequence
  derived and/or modified CDS sequence (opt5) from neuraminidase__InfluenzaA__ADO27623
augaaccccaaucagaagaucauuaccaucggcagcauuuccaucgccauugggaucaucucucugaugcuccaaauuggaaacaucauuagcaucugggcuucccacucuauucagacaggcagccagaauaacacggggaucugcaaucagagaauuaucaccuacgagaacuccacaugggugaaucauaccuaugucaacaucaauaacacaaauguugccgcgggagaagacaaaaccucugugacacuggcuggcaacagcucccuuuguagcauuucugggugggccaucuacaccaaggauaauuccauucggaucggaagcaaaggcgacguguucgucauucgcgagccuuuuaucucuugcucccaccuggaauguagaacguucuuucucacccaaggcgcccugcuuaacgauaagcauagcaaugggacagugaaagaccggucuccguaucgcgcucugauguccugcccccucggagaggccccuagccccuacaacuccaaguucgaaucuguugcuuggagcgccuccgcgugucacgauggcaugggguggcugaccaucggaauuagcggcccugacaacggggccguggcuguccugaaguauaauggaaucauuacaggcaccaucaaaucuuggaagaaacagauucucagaacgcaggaguccgagugcguguguaugaacggcagcugcuuuacaaucaugaccgaugggcccucuaauaaggccgcuagcuacaaaaucuucaagauugaaaagggaaaaguuacaaaguccaucgagcugaacgccccuaauuuuuauuacgaagaguguucuugcuacccggacaccggcauugugaugugugucugccgggauaacuggcaugggagcaaucgccccuggguguccuucaaccagaaucuugacuaucaaaucggauacauuugcagcggcguguuuggggauaacccuagacccgaggacggagaaggcucuuguaauccugucaccguugauggcgcgaacggggugaaaggauucuccuauaaguacggcaaugggguguggaucggacggacaaaaagcaaccgccugagaaagggcuuugagaugauuugggaccccaauggguggacgaacaccgacucugauuucuccgucaaacaggacgugguugccaucacagauuggagcggcuauuccggaucuuuugugcagcacccggaacucaccggccuggacugcauccggccuuguuucugggucgagcuugugcgcgggcugcccagagaaaacacaaccauuuggacgagcggauccucuaucagcuucugcggcguuaauuccgauacagcuaacuggagcuggccugacggggccgagcuccccuuuaccauugauaaguga

SEQ ID NO: 212184 - RNA, 1410 nt, Artificial Sequence; identical to SEQ ID NO: 208810
  derived and/or modified CDS sequence (opt5) from neuraminidase__InfluenzaA__ADO30410

SEQ ID NO: 212185 - RNA, 1410 nt, Artificial Sequence; identical to SEQ ID NO: 210161
  derived and/or modified CDS sequence (opt5) from neuraminidase__InfluenzaA__ADO30420

SEQ ID NO: 212186 - RNA, 1410 nt, Artificial Sequence; identical to SEQ ID NO: 209518
  derived and/or modified CDS sequence (opt5) from neuraminidase__InfluenzaA__ADP95343

SEQ ID NO: 212187 - RNA, 1410 nt, Artificial Sequence; identical to SEQ ID NO: 208800
  derived and/or modified CDS sequence (opt5) from neuraminidase__InfluenzaA__ADP95353

SEQ ID NO: 212188 - RNA, 1410 nt, Artificial Sequence; identical to SEQ ID NO: 208800
  derived and/or modified CDS sequence (opt5) from neuraminidase__InfluenzaA__ADP95363

SEQ ID NO: 212189 - RNA, 1410 nt, Artificial Sequence; identical to SEQ ID NO: 208800
  derived and/or modified CDS sequence (opt5) from neuraminidase__InfluenzaA__ADP95373

SEQ ID NO: 212190 - RNA, 1410 nt, Artificial Sequence; identical to SEQ ID NO: 208800
  derived and/or modified CDS sequence (opt5) from neuraminidase__InfluenzaA__ADP95383

SEQ ID NO: 212191 - RNA, 1410 nt, Artificial Sequence; identical to SEQ ID NO: 208800
  derived and/or modified CDS sequence (opt5) from neuraminidase__InfluenzaA__ADP95393

SEQ ID NO: 212192 - RNA, 1410 nt, Artificial Sequence
  derived and/or modified CDS sequence (opt5) from neuraminidase__InfluenzaA__ADQ43774
augaaccccaaucagaagaucauuaccaucggcagcgggugcaugacaauuggaauggccaaccugauccuccaaauuggcaauaucaucuccauuuggaucucucacagcauucagcuggggaaccagaaucagaucgagacguguaaccaauccgugauuaccuacgaaaauaacacaugggucaaucagaccuauguuaacaucucuaauacaaacuucgcugccggacagagcgugguguccgucaaacuugcgggcaauucuagccugugcccuguguccgggugggcuauuuacagcaaggacaacucuaucagaaucggauccaaaggcgauguuuuugugauucgggagccguucaucagcuguucuccccucgaaugccgcaccuuuuuccugacacagggcgcccuucugaaugacaagcauuccaacgggaccauuaaagauagaagcccuuaucggacgcucaugucuugucccaucggagaggucccuucccccuacaacagccgcuuugaauccguggccuggucugcuagcgccugccacgacggcauuaauuggcugaccaucgggaucuccggaccugauaacggcgcuguugccgugcugaaguauaaugggauuaucacagacaccauuaagagcuggagaaacaauauccuccggacacaagagucugagugugcgugcgucaacggauccuguuucaccgugaugacggauggcccgagcgacggccaggccucuuacaaaauuuuucgcaucgaaaaggggaaaaucgucaagagcguggagaugaaagcucccaauuaucauuacgaagagugcuccuguuacccugauucuagcgagauuacaugcguuugcagagacaacuggcacggauccaaucggcccugggugagcuucaaccagaaucuggaauaucagaucggcuacauuuguucugggaucuuuggagauaacccucgccccaaugacaagaccggcuccugcgggccggugagcucuaacggagccaauggcgucaagggcuucuccuuuaaauaugggaacggaguguggauuggcagaacaaagagcaucuccucucggaacggguucgagaugauuugggauccuaauggauggaccggcaccgacaacaauuuuagcaucaaacaagacaucguugggauuaacgaaugguccggcuacucuggcagcuucgugcagcaucccgagcuuacaggacuggauuguauccgcccuugcuucugggucgaacucauuagagggcggcccaaggagaauacgaucuggaccuccggaagcucuauuuccuuuuguggcgugaacagcgacacaguuggguggucuuggcccgauggagcugagcugccuuucaccaucgacaaauga

SEQ ID NO: 212193 - RNA, 1410 nt, Artificial Sequence
  derived and/or modified CDS sequence (opt5) from neuraminidase__InfluenzaA__ADQ92578
augaaccccaaucagaagaucauuaccaucggcagcgugucccugacaauuucuacgaucugcuucuuuaugcaaauugccauccucaucaccacagucacccugcacuucaaacaguacgaguuuaacagcccuccgaauaaccagguuauucuuugugaacccacaaucauugagagaaauaucaccgaaauuguguaucugacaaacgcuaccaucgagaaggaaauuugcccuaaacucgccgaguaccggaauugguccaagccccagugugacaucacgggguucgcgccuuuuucuaaagauaacagcauccgccuguccgcuggaggcgacauuugggugaccagagagcccuaugucucuugcgauccugacaaguguuaccaauucgcccuugggcagggaacaacccugaauaacgugcauagcaauaacacaguucgggaucgcaccccguauagaacgcuccugaugaaugaacugggcgugcccuuucaccucgggacaaagcaggucugcaucgccugguccucuagcuccugucaugacggaaaggcuuggcugcacgugugcauuaccggcgaugacaaaaacgccacagcuagcuucaucuacaauggccggcuuguugauucuguggucuccuggagcaaagagauucugcgcacccaggaaucugagugugugugcaucaacgggaccuguacaguggucaugacggacggauccgccagcggcaaggcggauaccaaaauccucuuuauugaggaagggaagaucguucauacauccacccugucuggaagcgcccaacacguggaggaaugcuccugcuauccuagauaccccggcgugcggugugucugccgcgacaacuggaaggggagcaauagaccuauuguggauaucaacauuaaagaccacucuaucguuuccagcuacguguguucuggacuugucggcgacacaccccggaagaaugauagcuccucuagcucccauugccuggacccgaacaaugaggaaggcgggcacggagugaaaggcugggcuuucgaugacgggaacgauguuuggaugggacgcaccaucagcgagaagucuagacucggcuaugagacguuuaaagugauugaagggugguccaauccuaagagcaaacugcagaucaaccggcaggucauuguggaccgcggaaauagaucuggcuacuccggcaucuucagcgucgaggggaaguccuguauuaaccggugcuuuuauguggaacugaucagaggacgcaaggaggaaacagagguucucuggaccucuaauagcauuguggucuucuguggcaccuccgggacauacggaaccggcucuuggcccgauggggccgacaucaaccugaugccuaucuga

SEQ ID NO: 212194 - RNA, 1410 nt, Artificial Sequence; identical to SEQ ID NO: 208671
  derived and/or modified CDS sequence (opt5) from neuraminidase__InfluenzaA__ADR32364

SEQ ID NO: 212195 - RNA, 1410 nt, Artificial Sequence
  derived and/or modified CDS sequence (opt5) from neuraminidase__InfluenzaA__ADT64478
augaaccccaaucagaagaucauuaccaucggcagcgugugcaugacaauugggauggccaaccugauccuccaaauuggaaauaucaucuccauuuggaucggccacucuauucagcuggggaaccagaaucagaucgagacguguaaccaaagcgucauuaccuacgaaaauaacacauggguuaaucagaccuaugugaacaucuccaauacaaacuucgcugccggacagucuguggucagcgugaaacuugcgggcaauuccucucugugcccuguuagcgggugggcuauuuacuccaaggacaacagcgugagaaucggaucuaaaggcgaugucuuugugauccgggagccguucauuuccuguagcccccucgaaugccgcaccuuuuuccugacacagggcgcccuucugaaugacaagcauucuaacgggaccaucaaagauagauccccuuaucggacgcucaugagcugucccauuggagagguuccuucucccuacaacucccgcuuugaaagcguggccugguccgcuucugccugccacgacggcaucaauuggcugaccauugggaucagcggaccugauaacggcgcugucgccgugcugaaguauaaugggaucauuacagacaccaucaaguccuggagaaacaauauucuccggacacaagagagcgagugugcgugcgugaacggaucuuguuucaccgucaugacggauggcccguccaauggccaggccagcuacaaaaucuuucgcauugaaaaggggaaaaucguuaagucuguggagaugaacgcucccaauuaucauuacgaagagugcagcuguuacccugacuccucugagaucacaugcgugugcagagauaacuggcacggaagcaaucggcccugggucuccuucaaccagaaucuggaauaucagauuggcuacaucuguagcgggauuuuuggagacaacccucgccccaaugauaaaaccggcucuugcgggccgguguccagcaacggagccaacggcguuaagggcuucucuuuuaaguaugggaauggaguguggaucggcagaacaaaauccauuagcucccggaacggguucgagaugaucugggacccuaauggauggaccggcaccgauaacaauuuuucuauuaagcaagacaucgucgggaucaacgaauggagcggcuacuccggaucuuucgugcagcaucccgagcuuacaggccuggacuguauucgcccuugcuucuggguugaacucaucagagggcggcccaaagagaauacgauuuggaccagcggauccagcaucucuuuuuguggcgugaacuccgauacagucggguggagcuggcccgacggagcugagcugccuuucaccauugauaaguga

SEQ ID NO: 212196 - RNA, 1410 nt, Artificial Sequence
  derived and/or modified CDS sequence (opt5) from neuraminidase__InfluenzaA__ADT78889
augaaccccaaucagaagaucauuaccaucggcagcgugucccugacaauugccacggucugcuuccucaugcaaaucgcuauucugguuaccacagugacccuucacuuuaaacagcaugagugugacucuccugccagcaaccaggugaugccgugcgaacccaucaucauugagagaaauaucacagaaauugucuaccugaacaauaccacaaucgagaaggaaauuuguccuaaagugguugaguaucggaacugguccaagccccagugccaaaucaccggguucgcgccuuuuucuaaagauaauagcauucgccucuccgcuggaggcgacaucugggugacgagagagcccuacgucucuugugauccugggaagugcuaucaguucgcccugggacagggcaccacacuugacaacaagcacagcaaugauaccauccaugaccggauuccgcaccgcacacugcucaugaacgaacugggggugcccuuucaucugggaaccagacagguuuguguggccugguccucuagcuccugccacgauggcaaggcuuggcuccacgucugugugacgggcgacgauaaaaaugccacagcuagcuucaucuacgacgggcggcugguggauucuauuggauccuggagccaaaacauccuucgcacccaggagucugaaugcgucuguauuaauggcacaugcaccguugugaugaccgacggguccgccagcggcagagcggauacacggauccuguuuaucgaggagggaaaaauugugcauaucuccccucucucugggagcgcccagcacgucgaagagugcuccuguuauccccgcuacccugacgugagaugcauuugucgggacaacuggaagggaagcaaucgccccguuaucgauauuaacauggaagacuauucuaucgauuccagcuacgugugcucuggccuggucggcgacacgccgagaaacgaugaccggagcuccaauucuaacugucgcgauccuaauaacgagagagggaaucccggagugaaaggcugggcuuucgacaacggggaugacguuuggaugggacggaccaucagcaaggaucuuagauccggcuacgaaacauuuaaggugauugggggauggagcaccccuaauucuaaaucccagaucaaccgccaagucauuguggacagcaauaacuggucuggcuauuccggcaucuucagcgucgaggggaaguccugcauuaaucgguguuuuuacguggagcugaucagaggacgccagcaggaaacacggguuugguggaccucuaacagcauuguggucuucugcggcacguccgggacauauggaaccggcucuuggcccgacggggccaauaucagcuuuaugcccaucuga

SEQ ID NO: 212197 - RNA, 1410 nt, Artificial Sequence
  derived and/or modified CDS sequence (opt5) from neuraminidase__InfluenzaA__ADT78899
augaaccccaaucagaagaucauuaccaucggcagcgugucccugacaauugccacggucugcuuccucaugcaaaucgcuauucuggccaccacaguuacccuucacuuuaaacagcaugagugugacucuccugcgagcaaccaggugaugccgugcgaacccaucaucauugagagaaauaucacagaaauuguguaccugaacaauaccacaaucgagaaggaaauuuguccugaggucguggaguaucggaacugguccaaaccccagugccaaaucaccggguucgcuccuuuuucuaaggauaauagcauucgccucuccgccggaggcgacaucuggguuaugagagaacccuacgugucuuguaacccugggaaaugcuaucaguucgcccugggacagggcacgacccuugauaauaagcacagcaacgggacaauccaugaccggauuccgcaccgcacccugcucaugaaugagcugggaguccccuuucaucugggcacaaaacagguguguguugcuugguccucuagcuccugccacgauggcaaggccuggcuccacgugugugucaccggggacgauagaaacgcuacggccagcuucaucuacgacggacggcugguggauucuauuggcuccuggagccaaaauauccuucgcacacaggaaucugagugcguguguauuaacgggaccugcacagucguuaugaccgacggauccgcgagcggcagagccgauacccggauccuguuuaucaaggaggggaaaauugugcauaucuccccucucucuggaagcgcucagcacauugaagagugcuccuguuauccccgcuacccugacgugagaugcaucugucgggauaauuggaagggcagcaaccgccccgucauugacaucaacauggaagacuauucuaucgauuccagcuacgugugcucuggccugguuggggacacaccgagaaaugaugacagcuccucuaacagcaauugucgggauccuaacaaugagcgcggaaaccccggcgugaaagggugggccuucgacaauggagaugacgucuggaugggcagaacgauuuccaaggaucuucggagcggguacgaaaccuuuaaggugaucggaggcuggucuacaccuaacuccaaaagccagguuaauagacaagugauugucgacaacaauaacuggucuggcuauuccgggaucuucagcguggagggaaaguccugcauuaaucgcuguuuuuacgucgagcugauccggggcagaccccaggaaacccgcgugugguggacaucuagcuccauuguuguguucugcgggaccucuggaacguauggcacagggagcuggcccgauggcgcuaacaucaauuuuaugccuaucuga

SEQ ID NO: 212198 - RNA, 1410 nt, Artificial Sequence
  derived and/or modified CDS sequence (opt5) from neuraminidase__InfluenzaA__ADT78963
augaaccccaaucagaagaucauuaccaucggcagcgugucccugacaauugccacggucugcuuccucaugcaaaucgcuauucuggccaccacaguuacccuucacuuuaaacagcaugagugugacucuccugcgagcaaccaggugaugccgugcgaacccaucaucauugagagaaauaucacagaaauuguguaccugaacaauaccacaaucgagaaggaaauuuguccugaggucguggaguaucggaacugguccaaaccccagugccaaaucaccggguucgcuccuuuuucuaaggauaauagcauucgccucuccgccggaggcgacaucuggguuacgagagaacccuacgugucuugugauccugggaaaugcuaucaguucgcccugggacagggcaccacacuugacaacaagcacagcaaugauaccauccaugaccggauuccgcaccgcacacugcucaugaacgagcuggggguccccuuucaucugggaaccagacagguguguguugcuugguccucuagcuccugccacgauggcaaggccuggcuccacgugugugucacgggcgacgaucggaaugcuacagccagcuucaucuacgacgggcgccugguggauucuauuggauccuggagccaaaacauccuuagaacccaggaaucugagugcguguguauuaauggcacaugcaccgucguuaugaccgacggguccgcgagcggacgggccgauacacgcauccuguuuaucaaagagggcaagauugugcauaucuccccucucucugggagcgcucagcacguggaagagugcuccuguuaucccagauacccugacguccggugcauuugucgcgacaacuggaaaggaagcaauagacccgugaucgauauuaacauggaagacuauucuaucgauuccagcuacguuugcucuggccuggugggcgacacgccgcggaacgaugaccgcagcuccaauucuaacuguagagauccuaauaacgagcgggggaaucccggagucaagggcugggccuucgacaacgggaaugauguguggaugggaagaaccaucagcaaagaccuucgcuccggcuacgaaacauuuaagguuauugggggauggagcaccccuaacucuaagucccaggugaaucggcaagucaucguggauaacaauaacuggagcggcuauucuggcauuuucuccgucgaggggaaaagcugcaucaauagauguuuuuacguggagcugauucgcggacggcagcaggaaacaagaguuugguggaccuccaacucuaucguggucuucugcggcacgagcgggacauauggaaccggcuccuggcccgacggggcuaauauuaacuuuaugcccaucuga

SEQ ID NO: 212199 - RNA, 1410 nt, Artificial Sequence
  derived and/or modified CDS sequence (opt5) from neuraminidase__InfluenzaA__ADT79001
augaaccccaaucagaagaucauuaccaucggcagcauuucccugacaaucgccacgauuugcuuccucaugcaaaucgcuauccuggugaccacagucacccuucacuuuaaacaguacgagugugacucuccugccaacaaucagguuaugccgugcgaacccauuaucauugagagaaacaucacagaaauuguguaucugaccaauacaaccaucgagaaggaaauuuguccuaaacucguggaguaccggaacuggagcaagccccagugcaaaaucacgggguucgcgccuuuuuccaaggauaauucuauccgccugagcgcuggaggcgacauuugggucaccagagagcccuauguguccugugauccugggaagugcuaccaauucgcccuuggacagggcacaacccuggacaacaaacauucuaaugauacaauccacgaccggauuccgcaucgcacccuccugaugaacgaacuggggguucccuuucaccucggaacgagacagguguguaucgccuggagcuccagcucuugccaugauggcaaggcuuggcugcacgucugugugacaggcgacgauaaaaaugccaccgcuuccuucauuuaugacgggcggcuuguugauagcaucggaucuuggucccagaacauccugcgcacacaagagagcgaaugcguguguauuaaugggaccugcaccgucgugaugacagacggcucugccuccggaaaggcggauacgagaauccucuuuauugaggagggcaaaaucgugcacauuagcccucuguccgggucugcccagcaugucgaagagugcagcuguuacccccgguauccuggaguucgcugcaucuguagagacaacuggaagggcuccaaucggcccgugguggacaucaacgucaaggauuacagcauugacucuuccuacgugugcagcggccuuguuggggauaccccgcgcaacaaugacagaucuagcuccucuuauugucggaacccuaauaacgaacgcggaaaucacggcgugaaagggugggcuuucgaugacggaaacgaugucuggaugggcagaacaaucagcaaggacucccggagcggguacgagaccuuuaaagugauuggaggcuggucuacacccaauuccaagagccagaucaacagacagguuauuguggauucugacaaucgcuccggcuauagcgggaucuucuccgucgaaggaaaaucuugcauuaaccgguguuuuuacguggagcugaucagaggccgcgagcaagaaacccgggucugguggacgagcaauuccaucgugguuuucugcgggacaucuggaaccuauggcaccgggagcuggccugauggcgccgacauuaaccucaugcccaucuga

SEQ ID NO: 212200 - RNA, 1410 nt, Artificial Sequence; identical to SEQ ID NO: 206190
  derived and/or modified CDS sequence (opt5) from neuraminidase__InfluenzaA__ADT79021

SEQ ID NO: 212201 - RNA, 1410 nt, Artificial Sequence
  derived and/or modified CDS sequence (opt5) from neuraminidase__InfluenzaA__ADT79041
augaaccccaaucagaagaucauuaccaucggcagcgugucccugacaauugccacggucugcuuccucaugcaaaucgcuauucugguuaccacagugacccuucacuuuagacaguacgagugugacucuccugccaacaaucaggugaugccgugcgaacccaucaucauugagcggaacaucacagaaauugucuaucugaauaacaccacaaucgagaaagaaauuuguccuaagcucguggaguaccgcaauuggagcaaaccccagugcaagaucaccggguucgcgccuuuuuccaaagauaacucuauuagacugagcgcuggaggcgacaucuggguuacgcgggagcccuauguguccugugauccugggaagugcuaccaauucgcccuuggacagggcaccacacuggacaauaagcauucuaacgauaccauccacgaccgcauuccgcauagaacacuccugaugaaugaacuggggguccccuuucaccucggaacccgccagguguguaucgccuggagcuccagcucuugccaugauggcaaggcuuggcugcacguuugugugacgggcgacgauaaaaacgccacagcuuccuucauuuaugacgggcggcuugucgauagcaucggaucuuggucccagaauauucugagaacccaagagagcgaaugcguguguaucaacggcacaugcaccguggucaugaccgacgggucugccuccggacgggcggauacaaaaauccucuuuauugaggagggcaagaucguucacauuagcccucuguccgggucugcccagcauguggaagagugcagcuguuacccccgcuauccuggagugagaugcaucugucgggacaauuggaaaggcuccaaccgccccgucguggacauuaacguugaagauuacagcaucgacucuuccuacgugugcagcggccuugucggggauacgccgagaaauaacgaccggucuagcaauuccaacugucgcaauccuaacaaugagagaggaaaccacggcgugaaggggugggcuuucgaugacggaaaugauguuuggaugggccggaccaucucuaaggaccugagaagcggguaugaaacauuuaaagugauuggaggcugguccacccccaacagcaagucucagaucaaucgccaggucauuguggauuccgacaaccggagcggcuacucugggaucuucuccgucgagggaaaaagcugcauuaauagauguuuuuauguggagcucauccgcggccgggaacaagagacaagaguuugguggaccuccaacucuauuguggucuucugcgggacgagcggaacauacggcaccggguccuggccugauggcgccgacaucaaucugaugcccaucuga

SEQ ID NO: 212202 - RNA, 1410 nt, Artificial Sequence; identical to SEQ ID NO: 207832
  derived and/or modified CDS sequence (opt5) from neuraminidase__InfluenzaA__ADT79121

SEQ ID NO: 212203 - RNA, 1410 nt, Artificial Sequence
  derived and/or modified CDS sequence (opt5) from neuraminidase__InfluenzaA__ADT79131
augaaccccaaucagaagaucauuaccaucggcagcgugucccugacaauugccacggucugcuuccucaugcaaaucgcuauucuggccaccacaguuacccuucacuuuaaacagcaugagugugacucuccugcgagcaaccaggugaugccgugcgaacccaucaucauugagagaaauaucacagaaauuguguaccugaacaauaccacaaucgagaaggaaauuuguccugaggucguggaguaucggaacugguccaaaccccagugccaaaucaccggguucgcuccuuuuucuaaggauaauagcauucgccucuccgccggaggcgacaucuggguuacgagagaacccuacgugucuugugauccugggaaaugcuaucaguucgcccugggacagggcaccacacuugacaacaagcacagcaaugggaccauccaugaucggauuccgcaccgcacacugcucaugaacgagcugggaguccccuuucaucugggcaccaaacagguguguguugcuugguccucuagcuccugccacgacggcaaggccuggcuccacgugugugucacgggggaugacagaaaugcuacagccagcuucaucuacgauggacggcuggaagacucuauuggcuccuggagccaaaacauccuucgcacccaggagucugagugcguguguauuaaugggacaugcaccguggucaugaccgauggauccgcgagcggcagagccgacacacggauccuguuuaucaaggaagggaaaauuguucauaucuccccucucucuggaagcgcucagcacauugaggaaugcuccuguuauccccgcuacccugaugugagaugcaucugucgggacaacuggaagggcagcaaucgccccgugcuggacauuucuauggaggauuauuccaucgacagcucuuacgucugcagcggccuugugggggauacgccgagaaacgacgauuccucuagcaacuccaauugucgggacccuaacaaugaacgcggaaaccccggcguuaaagggugggccuucgauaauggagacgauguguggaugggcagaaccaucagcaaggaccugcggucuggguacgagacauuuaaggucauuggaggcugguccaccccuaacagcaaaucucaggugaauagacaaguuaucguggauaacaauaacugguccggcuauagcgggauuuucuccgucgagggaaagucuugcaucaaucgcuguuuuuacguggaacucauucggggcagaagccaggagacacgcgucugguggaccuccaacucuaucgugguuuucugcgggacgagcggaacauauggcaccggguccuggcccgacggcgcuaauauuaacuuuaugcccaucuga

SEQ ID NO: 212204 - RNA, 1410 nt, Artificial Sequence; identical to SEQ ID NO: 208810
  derived and/or modified CDS sequence (opt5) from neuraminidase__InfluenzaA__ADT79234

SEQ ID NO: 212205 - RNA, 1410 nt, Artificial Sequence; identical to SEQ ID NO: 208800
  derived and/or modified CDS sequence (opt5) from neuraminidase__InfluenzaA__ADT79244

SEQ ID NO: 212206 - RNA, 1410 nt, Artificial Sequence
  derived and/or modified CDS sequence (opt5) from neuraminidase__InfluenzaA__ADU25480
augaaccccaaucagaagaucauuaucauuagcuccaucugccugauuaacggcaucaccucucucauccugcaaauugggaauaucauuagcaucuggauuucccacucuauccagauuggaaaccagaaucagacagagacguguagccaaaacaucaucaccuacgaaaauaacacaugggugaaucagaccuaugucaacauuuccaauaacaauuucguugccgagcaggcuguggugucuaugaaacuugccggcagcuccccucugugcccggucagcgggugggcgaucuacucuaaggacaacuccgugagaauuggaagcaaaggcgauguuuuugugauccgggaacccuucauuucuuguucccaucucgagugccgcacauuuuuccugacccagggggcccuucugaaugacaagcacagcaacggaacaaucaaagauagaucuccuuaucggacccucauguccugucccaucggcgaagucccuagccccuacaacucccgcuuugagucuguggcuuggagcgccuccgcuugccaugacggcacgagcuggcugaccauugggaucucuggaccugauaauggcgccguugcugugcugaaguauaacgacauuaucacagauaccauuaaguccuggagaaauaacauccuccggacacaagagagcgaaugugucugcgugaaugggucuuguuucaccgugaugacggacggaccgagcaacggccaggccuccuacaaaaucuuuaagauugagaaagggaaggucguuaaaucuguggaacugaaugcgcccaacuaucacuacgaggagugcagcuguuacccugauuccggagaaaucauuugcgugugccgcgacaauuggcauggcagcaacagacccugggucucuuucaaucagaaccuugaguaucagaucggcuacauuuguuccgggauccugggagauaauccucggcccaacgaccgcacaggcagcugcgggccggugucucucaauggagccaacggcguuaagggguuuuccuucaaguauggaaacggcguguggauuggcagaaccaaaagcuccucuagccgguccggguuugaaaugaucugggauccuaauggauggacagagaccgacaacaauuuccuggucaagcaagacaucgugggcaugaccgauuggucuggguacagcggauccuuuguucagcaccccgaacuuacaggcaugaacuguaugcgcccuugcuucuggguggagcugauuagagggcggcccaaagagaauacgaucuggaccagcggaucuuccauuagcuucuguggcgucaacucugacacaguggauugguccuggcccgacggcgcugaacucccuuuuaccaucgauaaguga

SEQ ID NO: 212207 - RNA, 1410 nt, Artificial Sequence; identical to SEQ ID NO: 208810
  derived and/or modified CDS sequence (opt5) from neuraminidase__InfluenzaA__ADU59780

SEQ ID NO: 212208 - RNA, 1410 nt, Artificial Sequence
  derived and/or modified CDS sequence (opt5) from neuraminidase__InfluenzaA__ADU59789
augaaccccaaucagaagaucauuaccaucggcagcgugugcaugacaauugggauggccaaccugauccuccaaauuggaaauaucaucuccauuuggaucucucacagcauucagcugggcaaccagaaucagaucgagacguguaaccaauccgucauuaccuacgaaaauaacacauggguuaaucagaccuaugugaacgugucuaauacaaacuucgcugccgggcagagcgucguguccguuaaacuugcgggaaauucuagccugugcccuguguccggcugggcuaucuacagcaaggacaacucuauuagaaucggguccaaaggagaugucuuugugauccgggagccguucauuagcuguucuccccucgaaugccgcaccuuuuuccugacacagggcgcccuucugaaugacaagcauuccaacggcaccaucaaagauagaagcccuuaucggacgcucaugucuugucccauuggggagguuccuucccccuacaacagccgcuuugaauccguggccuggucugcuagcgccugccacgacggaaucaauuggcugaccauuggcaucuccgggccugauaacggagcugucgccgugcugaaguauaauggcaucauuacagacaccaucaagagcuggagaaacaauauucuccggacacaagagucugagugugcgugcgugaacggguccuguuucaccgucaugacggauggaccgagcgacggccaggccucuuacaaaaucuuucgcauugaaaagggcaaaaucguuaagagcguggagaugaaugcucccaacuaucauuacgaagagugcuccuguuacccugauucuagcgagaucacaugcgugugcagagacaauuggcacggguccaaccggcccugggucagcuucaaucagaaccuggaauaucagauuggauacaucuguucuggcauuuuuggggauaauccucgccccaacgacaaaaccggauccugcggcccggugagcucuaauggggccaacggaguuaagggcuucuccuuuaaguauggcaacgggguguggaucggaagaacaaaaagcauuuccucucggaauggcuucgagaugaucugggauccuaacggguggaccggaaccgacaauaacuuuagcauuaagcaagacaucgucggcaucaaugaaugguccggguacucuggcagcuucgugcagcaucccgagcuuacaggacuggauuguauucgcccuugcuucuggguugaacucaucagaggccggcccaaagagaacacgauuuggaccuccgggagcucuaucuccuuuuguggagugaauagcgacacagucggcuggucuuggcccgauggggcugagcugccuuucaccauugacaaguga

SEQ ID NO: 212209 - RNA, 1410 nt, Artificial Sequence; identical to SEQ ID NO: 208810
  derived and/or modified CDS sequence (opt5) from neuraminidase__InfluenzaA__ADU59829

SEQ ID NO: 212210 - RNA, 1410 nt, Artificial Sequence
  derived and/or modified CDS sequence (opt5) from neuraminidase__InfluenzaA__ADU59838
augaaccccaaucagaagaucauuaucauuggcagcgugugcaugaccaucgggauggccaaccugauucuccaaaucggaaauaucauuuccaucuggauuucucacagcauccagcugggcaaccagaaucagauugagacauguaaccaauccgucaucacguacgaaaauaacaccuggguuaaucagacauaugugaacauuucuaauaccaacuucgcugccgggcagagcguggucuccgugaaacuugcgggaaauucuagccugugcccuguuuccggcugggcuaucuacagcaaggacaacucuaucagaauuggguccaaaggagauguguuugucauccgggagccguucauuagcuguucuccccucgaaugccgcacauuuuuccugacccagggcgcccuucugaaugacaagcauuccaacggcacaaucaaagauagaagcccuuaucggacccucaugucuugucccauuggggaggugccuucccccuacaacagccgcuuugaauccguugccuggucugcuagcgccugccacgacggaaucaauuggcugacgaucggcauuuccgggccugauaacggagcuguggccguccugaaguauaauggcaucauuaccgacacaaucaagagcuggagaaacaauauucuccggacccaagagucugagugugcgugcgugaacggguccuguuucacagugaugaccgauggaccgagcgacggccaggccucuuacaaaaucuuucgcaucgaaaagggcaaaauugucaagagcguugagaugaaugcucccaacuaucauuucgaagagugcuccuguuacccugauucuagcgagaucacgugcgugugcagagacaauuggcacggguccaaccggcccugggugagcuuuaaucagaaccuggaauaccagauuggauauaucuguucuggcauuuucggggauaauccucgccccaacgacaaaacaggauccugcggcccggucagcucuaauggggccaacggagugaagggcuuuuccuucaaguacggcaacgggguuuggaucggaagaaccaaaagcauuuccucucggaauggcuuugagaugaucugggauccuaacggguggacaggaaccgacaauaacuucagcaucaagcaagacauugugggcaucaaugaaugguccggguauucuggcagcuucguccagcaucccgagcuuaccggacuggauuguauucgcccuugcuuuuggguggaacucaucagaggccggcccaaagagaacacaauuuggacguccgggagcucuaucuccuucuguggaguuaauagcgacaccguggauuggucuuggcccgacggcgcugagcugccuuuuacaaucgauaaguga

SEQ ID NO: 212211 - RNA, 1410 nt, Artificial Sequence; identical to SEQ ID NO: 210161
  derived and/or modified CDS sequence (opt5) from neuraminidase__InfluenzaA__ADU59847

SEQ ID NO: 212212 - RNA, 1410 nt, Artificial Sequence; identical to SEQ ID NO: 208810
  derived and/or modified CDS sequence (opt5) from neuraminidase__InfluenzaA__ADU59907

SEQ ID NO: 212213 - RNA, 1410 nt, Artificial Sequence; identical to SEQ ID NO: 208810
  derived and/or modified CDS sequence (opt5) from neuraminidase__InfluenzaA__ADU59917

SEQ ID NO: 212214 - RNA, 1410 nt, Artificial Sequence; identical to SEQ ID NO: 208810
  derived and/or modified CDS sequence (opt5) from neuraminidase__InfluenzaA__ADU59920

SEQ ID NO: 212215 - RNA, 1410 nt, Artificial Sequence; identical to SEQ ID NO: 208810
  derived and/or modified CDS sequence (opt5) from neuraminidase__InfluenzaA__ADU59941

SEQ ID NO: 212216 - RNA, 1410 nt, Artificial Sequence
  derived and/or modified CDS sequence (opt5) from neuraminidase__InfluenzaA__ADU76311
augaaccccaaucagaagaucauuaccaucggcagcgugugcaugacaauugggauggccaaccugauccuccaaauuggaaauaucaucuccauuuggaucucucacagcauucagcugggcaaccagaaucagaucgagacguguaaccaauccgucauuaccuacgaaaauaacacauggguuaaucagaccuaugugaacaucucuaauacaaacuucgcugccgggcagagcguggucuccgugaaacuugcgggaaauucuagccugugcccuguuuccggcugggcuauuuacagcaaggacaacucuaucagaaucggguccaaaggagauguguuugucauucgggagccguucaucagcuguucuccccucgaaugccgcaccuuuuuccugacacagggcgcccuucugaaugacaagcauuccaacggcaccauuaaagauagaagcccuuaucggacgcucaugucuugucccaucggggaggugccuucccccuacaacagccgcuuugaauccguugccuggucugcuagcgccugccacgacggaauuaauuggcugaccaucggcaucuccgggccugauaacggagcuguggccguccugaaguauaauggcauuaucacagacaccauuaagagcuggagaaacaauauccuccggacacaagagucugagugugcgugcgugaacggguccuguuucaccgugaugacggauggaccgagcgacggccaggccucuuacaaaauuuuucgcaucgaaaagggcaaaaucgucaagagcguugagaugaaugcucccaacuaucauuacgaagagugcuccuguuacccugauucuagcgagauuacaugcgugugcagagacaauuggcacggguccaaccggcccugggugagcuucaaucagaaccuggaauaucagaucggauacauuuguucuggcaucuuuggggauaauccucgccccaacgacaaaaccggauccugcggcccggucagcucuaauggggccaacggagugaagggcuucuccuuuaaguauggcaacgggguuuggauuggaagaacaaaaagcaucuccucucggaauggcuucgagaugauuugggauccuaacggguggaccggaaccgacaauaacuuuagcaucaagcaagacaucgugggcauuaaugaaugguccggguacucuggcagcuucguccagcaucccgagcuuacaggacuggauuguauccgcccuugcuucuggguggaacucauuagaggccggcccaaagagaacacgaucuggaccuccgggagcucuauuuccuuuuguggaguuaauagcgacacagugggcuggucuuggcccgauggggcuaagcugccuuucaccaucgacaaauga

SEQ ID NO: 212217 - RNA, 1410 nt, Artificial Sequence
  derived and/or modified CDS sequence (opt5) from neuraminidase__InfluenzaA__ADU76313
augaaccccaaucagaagaucauuaccaucggcagcgugugcaugacaauugggauggccaaccugauccuccaaauuggaaauaucaucuccauuuggaucucucacagcauucagcugggcaaccagaaucagaucgagacguguaaccaauccgucauuaccuacgaaaauaacacauggguuaaucagaccuaugugaacaucucuaauacaaacuucgcugccgggcagagcguggucuccgugaaacuugcgggaaauucuagccugugcccuguuuccggcugggcuauuuacagcaaggacaacucuaucagaaucggguccaaaggagauguguuugucauucgggagccguucaucagcuguucuccccucgaaugccgcaccuuuuuccugacacagggcgcccuucugaaugacaagcauuccaacggcaccauuaaagauagaagcccuuaucggacgcucaugucuugucccaucggggaggugccuucccccuacaacagccgcuuugaauccguugccuggucugcuagcgccugccacgacggaauuaauuggcugaccaucggcaucuccgggccugauaacggagcuguggccguccugaaguauaauggcauuaucacagacaccauuaagagcuggagaaacaauauccuccggacacaagagucugagugugcgugcgugaacggguccuguuucaccgugaugacggauggaccgagcgacggccaggccucuuacaaaauuuuucgcaucgaaaagggcaaaaucgucaagagcguugagaugaaugcucccaacuauuacuacgaagagugcuccuguuauccugauucuagcgagauuacaugcgugugcagagacaauuggcauggguccaaccggcccugggugagcuucaaucagaaccuggaauaccagaucggauauauuuguucuggcaucuuuggggauaauccucgccccaacgacaaaaccggauccugcggcccggucagcucuaauggggccaacggagugaagggcuucuccuuuaaguacggcaacgggguuuggauuggaagaacaaaaagcaucuccucucggaauggcuucgagaugauuugggauccuaacggguggaccggaaccgacaauaacuuuagcaucaagcaagacaucgugggcauuaaugaaugguccggguauucuggcagcuucguccagcaccccgagcuuacaggacuggauuguauccgcccuugcuucuggguggaacucauuagaggccggcccaaagagaacacgaucuggaccuccgggagcucuauuuccuuuuguggaguuaauagcgacacagugggcuggucuuggcccgauggggcuaagcugccuuucaccaucgacaaauga

SEQ ID NO: 212218 - RNA, 1410 nt, Artificial Sequence; identical to SEQ ID NO: 212217
  derived and/or modified CDS sequence (opt5) from neuraminidase__InfluenzaA__ADU76314

SEQ ID NO: 212219 - RNA, 1410 nt, Artificial Sequence; identical to SEQ ID NO: 212217
  derived and/or modified CDS sequence (opt5) from neuraminidase__InfluenzaA__ADU76315

SEQ ID NO: 212220 - RNA, 1410 nt, Artificial Sequence; identical to SEQ ID NO: 212217
  derived and/or modified CDS sequence (opt5) from neuraminidase__InfluenzaA__ADU76316

SEQ ID NO: 212221 - RNA, 1410 nt, Artificial Sequence
  derived and/or modified CDS sequence (opt5) from neuraminidase__InfluenzaA__ADU76317
augaaccccaaucagaagaucauuaccaucggcagcgugugcaugacaauugggauggccaaccugauccuccaaauuggaaauaucaucuccauuuggaucucucacagcauucagcugggcaaccagaaucagaucgagacguguaaccaauccgucauuaccuacgaaaauaacacauggguuaaucagaccuaugugaacaucucuaauacaaacuucgcugccgggcagagcguggucuccgugaaacuugcgggaaauucuagccugugcccuguuuccggcugggcuauuuacagcaaggacaacucuaucagaaucggguccaaaggagauguguuugucauucgggagccguucaucagcuguucuccccucgaaugccgcaccuuuuuccugacacagggcgcccuucugaaugacaagcauuccaacggcaccauuaaagauagaagcccuuaucggacgcucaugucuugucccaucggggaggugccuucccccuacaacagccgcuuugaauccguugccuggucugcuagcgccugccacgacggaauuaauuggcugaccaucggcaucuccgggccugauaacggagcuguggccguccugaaguauaauggcauuaucacagacaccauuaagagcuggagaaacaauauccuccggacacaagagucugagugugcgugcgugaacggguccuguuucaccgugaugacggauggaccgagcgacggccaggccucuuacaaaauuuuucgcaucgaaaagggcaaaaucgucaagagcguugagaugaaugcucccaacuaucauuacgaagagugcuccuguuacccugauucuagcgagauuacaugcgugugcagagacaauuggcacggguccaaccggcccugggugagcuucaaucagaaccuggaauaucagaucggauacauuuguucuggcaucuuuggggauaauccucgccccaacgacaaaaccggauccugcggcccggucagcucuaauggggccaacggagugaagggcuucuccuuuaaguauggcaacgggguuuggauuggaagaacaaaaagcaccuccucucggaauggcuucgagaugaucugggauccuaacggguggaccggaacagacaauaacuuuagcauuaagcaagacaucgugggcaucaaugaaugguccggguacucuggcagcuucguccagcaucccgagcuuacgggacuggauuguauucgcccuugcuucuggguggaacucaucagaggccggcccaaagagaacaccauuuggacauccgggagcucuaucuccuuuuguggaguuaauagcgacaccgugggcuggucuuggcccgauggggcugagcugccuuucacaauugacaaguga

SEQ ID NO: 212222 - RNA, 1410 nt, Artificial Sequence
  derived and/or modified CDS sequence (opt5) from neuraminidase__InfluenzaA__ADU76318
augaaccccaaucagaagaucauuaccaucggcagcgugugcaugacaauugggauggccaaccugauccuccaaauuggaaauaucaucuccauuuggaucucucacagcauucagcugggcaaccagaaucagaucgagacguguaaccaauccgucauuaccuacgaaaauaacacauggguuaaucagaccuaugugaacaucucuaauacaaacuucgcugccgggcagagcguggucuccgugaaacuugcgggaaauucuagccugugcccuguuuccggcugggcuauuuacagcaaggacaacucuaucagaaucggguccaaaggagauguguuugucauucgggagccguucaucagcuguucuccccucgaaugccgcaccuuuuuccugacacagggcgcccuucugaaugacaagcauuccaacggcaccauuaaagauagaagcccuuaucggacgcucaugucuugucccaucggggaggugccuucccccuacaacagccgcuuugaauccguugccuggucugcuagcgccugccacgacggaauuaauuggcugaccaucggcaucuccgggccugauaacggagcuguggccguccugaaguauaauggcauuaucacagacaccauuaagagcuggagaaacaauauccuccggacacaagagucugagugugcgugcgugaacggguccuguuucaccgugaugacggauggaccgagcgacggccaggccucuuacaaaauuuuucgcaucgaaaagggcaaaaucgucaagagcguugagaugaaugcucccaacuaucauuacgaagagugcuccuguuacccugauucuagcgagauuacaugcgugugcagagacaauuggcacggguccaaccggcccugggugagcuucaaucauaaccuggaauaucagaucggauacauuuguucuggcaucuuuggggauaauccucgccccaacgacaaaaccggauccugcggcccggucagcucuaauggggccaacggagugaagggcuucuccuuuaaguauggcaacgggguuuggauuggaagaacaaaaagcaucuccucucggaauggcuucgagaugauuugggauccuaacggguggaccggaaccgacaauaacuuuagcaucaagcaggacaucgugggcauuaaugaaugguccggguacucuggcagcuucguccaacaccccgagcuuacaggacuggauuguauccgcccuugcuucuggguggaacucauuagaggccggcccaaagagaacacgaucuggaccuccgggagcucuauuuccuuuuguggaguuaauagcgacacagugggcuggucuuggcccgauggggcugagcugccuuucaccaucgacaaguga

SEQ ID NO: 212223 - RNA, 1410 nt, Artificial Sequence; identical to SEQ ID NO: 210053
  derived and/or modified CDS sequence (opt5) from neuraminidase__InfluenzaA__ADU76319

SEQ ID NO: 212224 - RNA, 1410 nt, Artificial Sequence; identical to SEQ ID NO: 208810
  derived and/or modified CDS sequence (opt5) from neuraminidase__InfluenzaA__ADU76320

SEQ ID NO: 212225 - RNA, 1410 nt, Artificial Sequence; identical to SEQ ID NO: 208810
  derived and/or modified CDS sequence (opt5) from neuraminidase__InfluenzaA__ADU76321

SEQ ID NO: 212226 - RNA, 1410 nt, Artificial Sequence
  derived and/or modified CDS sequence (opt5) from neuraminidase__InfluenzaA__ADU76322
augaaccccaaucagaagaucauuaccaucggcagcgugugcaugacaauugggauggccaaccugauccuccaaauuggaaauaucaucuccauuuggaucucucacagcauucagcugggcaaccagaaucagaucgagacguguaaccaauccgucauuaccuacgaaaauaacacauggguuaaucagaccuaugugaacaucucuaauacaaacuucgcugccgggcagagcguggucuccgugaaacuugcgggaaauucuagccugugcccuguuuccggcugggcuauuuacagcaaggacaacucuaucagaaucggguccaaaggagauguguuugucauucgggagccguucaucagcuguucuccccucgaaugccgcaccuuuuuccugacacagggcgcccuucugaaugacaagcauuccaacggcaccauuaaagauagaagcccuuaucggacgcucaugucuugucccaucggggaggugccuucccccuacaacagccgcuuugaauccguugccuggucugcuagcgccugccacgacggaauuaauuggcugaccaucggcaucuccgggccugauaacggagcuguggccguccugaaguauaauggcauuaucacagacaccauuaagagcuggagaaacaauauccuccggacacaagagucugagugugcgugcgugaacggguccuguuucaccgugaugacggauggaccgagcgacggccaggccucuuacaaaauuuuucgcaucgaaaagggcaaagucguuaagagcguggagaugaaugcucccaacuaucauuacgaagagugcuccuguuacccugauucuagcgagaucacaugcgugugcagagacaauuggcacggguccaaccggcccugggucagcuucaaucagaaccuggaauaucagauuggauacaucuguucuggcauuuuuggggauaauccucgccccaacgacaaaaccggauccugcggcccggugagcucuaauggggccaacggaguuaagggcuucuccuuuaaguauggcaacgggguguggaucggaagaacaaaaagcauuuccucucggaauggcuucgagaugaucugggauccuaacggguggaccggaaccgacaauaacuuuagcauuaagcaagacaucgucggcaucaaugaaugguccggguacucuggcagcuucgugcagcaucccgagcuuacaggacuggauuguauucgcccuugcuucuggguugaacucaucagaggccggcccaaagagaacacgauuuggaccuccgggagcaucauuucuuuuuguggagucaauuccgacacagugggcuggagcuggcccgauggggcugagcugccuuucaccaucgacaaguga

SEQ ID NO: 212227 - RNA, 1410 nt, Artificial Sequence; identical to SEQ ID NO: 212216
  derived and/or modified CDS sequence (opt5) from neuraminidase__InfluenzaA__ADU76323

SEQ ID NO: 212228 - RNA, 1410 nt, Artificial Sequence; identical to SEQ ID NO: 212217
  derived and/or modified CDS sequence (opt5) from neuraminidase__InfluenzaA__ADU76324

SEQ ID NO: 212229 - RNA, 1410 nt, Artificial Sequence; identical to SEQ ID NO: 212216
  derived and/or modified CDS sequence (opt5) from neuraminidase__InfluenzaA__ADU76325

SEQ ID NO: 212230 - RNA, 1410 nt, Artificial Sequence; identical to SEQ ID NO: 212217
  derived and/or modified CDS sequence (opt5) from neuraminidase__InfluenzaA__ADU76326

SEQ ID NO: 212231 - RNA, 1410 nt, Artificial Sequence; identical to SEQ ID NO: 212217
  derived and/or modified CDS sequence (opt5) from neuraminidase__InfluenzaA__ADU76327

SEQ ID NO: 212232 - RNA, 1410 nt, Artificial Sequence; identical to SEQ ID NO: 212216
  derived and/or modified CDS sequence (opt5) from neuraminidase__InfluenzaA__ADU76328

SEQ ID NO: 212233 - RNA, 1410 nt, Artificial Sequence; identical to SEQ ID NO: 212217
  derived and/or modified CDS sequence (opt5) from neuraminidase__InfluenzaA__ADU76329

SEQ ID NO: 212234 - RNA, 1410 nt, Artificial Sequence; identical to SEQ ID NO: 212217
  derived and/or modified CDS sequence (opt5) from neuraminidase__InfluenzaA__ADU76330

SEQ ID NO: 212235 - RNA, 1410 nt, Artificial Sequence; identical to SEQ ID NO: 212217
  derived and/or modified CDS sequence (opt5) from neuraminidase__InfluenzaA__ADU76331

SEQ ID NO: 212236 - RNA, 1410 nt, Artificial Sequence; identical to SEQ ID NO: 212217
  derived and/or modified CDS sequence (opt5) from neuraminidase__InfluenzaA__ADU76332

SEQ ID NO: 212237 - RNA, 1410 nt, Artificial Sequence; identical to SEQ ID NO: 208810
  derived and/or modified CDS sequence (opt5) from neuraminidase__InfluenzaA__ADU76333

SEQ ID NO: 212238 - RNA, 1410 nt, Artificial Sequence; identical to SEQ ID NO: 208810
  derived and/or modified CDS sequence (opt5) from neuraminidase__InfluenzaA__ADU76334

SEQ ID NO: 212239 - RNA, 1410 nt, Artificial Sequence; identical to SEQ ID NO: 208810
  derived and/or modified CDS sequence (opt5) from neuraminidase__InfluenzaA__ADU76335

SEQ ID NO: 212240 - RNA, 1410 nt, Artificial Sequence; identical to SEQ ID NO: 212217
  derived and/or modified CDS sequence (opt5) from neuraminidase__InfluenzaA__ADU76336

SEQ ID NO: 212241 - RNA, 1410 nt, Artificial Sequence; identical to SEQ ID NO: 209577
  derived and/or modified CDS sequence (opt5) from neuraminidase__InfluenzaA__ADU76337

SEQ ID NO: 212242 - RNA, 1410 nt, Artificial Sequence; identical to SEQ ID NO: 210712
  derived and/or modified CDS sequence (opt5) from neuraminidase__InfluenzaA__ADU76338

SEQ ID NO: 212243 - RNA, 1410 nt, Artificial Sequence; identical to SEQ ID NO: 212216
  derived and/or modified CDS sequence (opt5) from neuraminidase__InfluenzaA__ADU76339

SEQ ID NO: 212244 - RNA, 1410 nt, Artificial Sequence; identical to SEQ ID NO: 208810
  derived and/or modified CDS sequence (opt5) from neuraminidase__InfluenzaA__ADU76341

SEQ ID NO: 212245 - RNA, 1410 nt, Artificial Sequence; identical to SEQ ID NO: 208810
  derived and/or modified CDS sequence (opt5) from neuraminidase__InfluenzaA__ADU76342

SEQ ID NO: 212246 - RNA, 1410 nt, Artificial Sequence; identical to SEQ ID NO: 208810
  derived and/or modified CDS sequence (opt5) from neuraminidase__InfluenzaA__ADU76343

SEQ ID NO: 212247 - RNA, 1410 nt, Artificial Sequence; identical to SEQ ID NO: 212217
  derived and/or modified CDS sequence (opt5) from neuraminidase__InfluenzaA__ADU76344

SEQ ID NO: 212248 - RNA, 1410 nt, Artificial Sequence; identical to SEQ ID NO: 212217
  derived and/or modified CDS sequence (opt5) from neuraminidase__InfluenzaA__ADU76345

SEQ ID NO: 212249 - RNA, 1410 nt, Artificial Sequence
  derived and/or modified CDS sequence (opt5) from neuraminidase__InfluenzaA__ADU76346
augaaccccaaucagaagaucauuaccaucggcagcgugugcaugacaauugggauggccaaccugauccuccaaauuggaaauaucaucuccauuuggaucucucacagcauucagcugggcaaccagaaucagaucgagacguguaaccaauccgucauuaccuacgaaaauaacacauggguuaaucagaccuaugugaacaucucuaauacaaacuucgcugccgggcagagcguggucuccgugaaacuugcgggaaauucuagccugugcccuguuuccggcugggcuauuuacagcaaggacaacucuaucagaaucggguccaaaggagauguguuugucauucgggagccguucaucagcuguucuccccucgaaugccgcaccuuuuuccugacacagggcgcccuucugaaugacaagcauuccaacggcaccauuaaagauagaagcccuuaucggacgcucaugucuugucccaucggggaggugccuucccccuacaacagccgcuuugaauccguugccuggucugcuagcgccugccacgacggaauuaauuggcugaccaucggcaucuccgggccugauaacggagcuguggccguccugaaguauaauggcauuaucacagacaccauuaagagcuggagaaacaauauccuccggacacaagagucugagugugcgugcgugaacggguccuguuucaccgugaugacggauggaccgagcgacggccaggccucuuacaaaauuuuucgcaucgaaaagggcaaaaucgucaagagcguugagaugaaugcucccaacuaucauuacgaagagugcuccuguuacccugauucuagcgagauuacaugcgugugcagagacaauuggcacggguccaaccggcccugggugagcuucaaucagaaccuggaauaucagaucggauacauuuguucuggcaucuuuggggauaauccucgccccaacgacaaaaccggauccugcggcccggucagcucuaauggggccaacggagugaagggcuucuccuuuaaguauggcaacgggguuuggauuggaagaacaaaaagcaucuccucucggaauggcuucgagaugauuugggauccuaacggguggaccgaaaccgacaauaacuuuagcaucaagcaagacaucgugggaauuaaugagugguccggcuacucugggagcuucguccagcaucccgaacuuacaggccuggauuguauccgcccuugcuucuggguggagcucauuagaggacggcccaaagagaacacgaucuggaccuccggcagcucuauuuccuuuugugggguuaauagcgacacagugggauggucuuggcccgauggcgcugaacugccuuucaccaucgacaaguga

SEQ ID NO: 212250 - RNA, 1410 nt, Artificial Sequence; identical to SEQ ID NO: 209577
  derived and/or modified CDS sequence (opt5) from neuraminidase__InfluenzaA__ADU76347

SEQ ID NO: 212251 - RNA, 1410 nt, Artificial Sequence
  derived and/or modified CDS sequence (opt5) from neuraminidase__InfluenzaA__ADV17285
augaaccccaaucaggagaucauuaccaucggcagcgugugcaugacaauugggauggccaaccugauccuccaaauuggaaauaucaucuccauuuggaucucucacagcauucagcugggcaaccagaaucagaucgaaacguguaaccaauccgucauuaccuacgagaauaacacauggguuaaucagaccuaugugaacaucucuaauacaaacuucgcugccgggcagagcguggucuccgugaaacuugcgggaaauucuagccugugcccuguuuccggcugggcuauuuacagcaaggacaacucuaucagaaucggguccaagggagauguguuugucauucgggaaccguucaucagcuguucuccccucgagugccgcaccuuuuuccugacacagggcgcccuucugaaugacaaacauuccaacggcaccauuaaggauagaagcccuuaucggacgcucaugucuugucccaucggggaagugccuucccccuacaacagccgcuuugaguccguugccuggucugcuagcgccugccacgacggaauuaauuggcugaccaucggcaucuccgggccugauaacggagcuguggccguccugaaauauaauggcauuaucacagacaccauuaagagcuggagaaacaauauccuccggacacaagagucugaaugugcgugcgugaacggguccuguuucaccgugaugacggauggaccgagcgacggccaggccucuuacaagauuuuucgcaucgagaaaggcaagaucgucaaaagcguugaaaugaaugcucccaacuaucauuacgaggagugcuccuguuacccugauucuagcgaaauuacaugcgugugcagagacaauuggcacggguccaaccggcccugggugagcuucaaucagaaccuggaguaucagaucggauacauuuguucuggcaucuuuggggauaauccucgccccaacgacaagaccggauccugcggcccggucagcucuaauggggccaacggagugaaaggcuucuccuuuagauauggcaacgggguuuggauuggacggacaaagagcaucuccucucgcaauggcuucgaaaugauuugggauccuaacggguggaccggaaccgacaauaacuuuagcaucaagcaagacaucgugggcauuaaugagugguccggguacucuggcagcuucguccagcaucccgaacuuacaggacuggauuguaucagaccuugcuucuggguggagcucauucggggccgccccaaagagaacacgaucuggaccuccgggagcucuauuuccuuuuguggaguuaauagcgacacagugggcuggucuuggcccgauggggcugaacugccuuucaccaucgacaaguga

SEQ ID NO: 212252 - RNA, 1410 nt, Artificial Sequence; identical to SEQ ID NO: 208810
  derived and/or modified CDS sequence (opt5) from neuraminidase__InfluenzaA__ADV17295

SEQ ID NO: 212253 - RNA, 1410 nt, Artificial Sequence
  derived and/or modified CDS sequence (opt5) from neuraminidase__InfluenzaA__ADV17305
augaaccccaaucagaagaucauuaccaucggcagcgugugcaugacaauugggauggccaaccugauccuccaaauuggaaauaucaucuccauuuggaucucucacagcauucagcugggcaaccagaaucagaucgagacguguaaccaauccgucauuaccuacgaaaauaacacauggguuaaucagaccuaugugaacaucucuaauacaaacuucgcugccgggcagagcguggucuccgugaaacuugcgggaaauucuagccugugcccuguuuccggcugggcuauuuacagcaaggacaacucuaucagaaucggguccaaaggagauguguuugucauucgggagccguucaucagcuguucuucccucgaaugccgcaccuuuuuccugacacagggcgcccuucugaaugacaagcauagcaacggcaccauuaaagauagaucucccuaucggacgcucauguccuguccuaucggggaggugcccagcccuuacaacucccgcuuugaaucuguugccuggagcgcuuccgccugccacgacggaauuaauuggcugaccaucggcaucagcgggucugauaacggagcuguggccguccugaaguauaauggcauuaucacagacaccauuaaguccuggagaaacaauauccuccggacacaagagagcgagugugcgugcgugaacgggucuuguuucaccauuaugacggauggacccagcgacggccaggccuccuacaaaaucuuucgcaucgaaaagggcaaaauugugaagucugucgagaugaaugcuccuaacuaucauuacgaagagugcagcuguuacccggauuccagcgagaucacaugcguuugcagagacaauuggcacgggucuaaccggcccuggguguccuucaaucagaaccuggaauaucagauuggauacaucuguagcggcauuuuuggggauaauccucgccccaacgacaaaaccggaucuugcggcccuguguccagcaauggggccaacggagucaagggcuucuccuuuaaguauggcaacgggguguggaucggaagaacaaaaucuauuagcucccggaauggcuucgagaugaucugggaucccaacggguggaccggaaccgacaauaacuuuucuaucaagcaagacauuguuggcaucaaugaauggagcggguacuccggcagcuucgugcagcauccggagcuuacaggacuggauuguauucgcccuugcuucugggucgaacucaucagaggccggcccaaagagaacacgauuuggaccucuggguccagcaucucuuuuuguggaguuaauuccgacacagugggcuggagcuggccugauggggcugagcugcccuucaccaucgacaaguga

SEQ ID NO: 212254 - RNA, 1410 nt, Artificial Sequence; identical to SEQ ID NO: 208810
  derived and/or modified CDS sequence (opt5) from neuraminidase__InfluenzaA__ADV17315

SEQ ID NO: 212255 - RNA, 1410 nt, Artificial Sequence; identical to SEQ ID NO: 210241
  derived and/or modified CDS sequence (opt5) from neuraminidase__InfluenzaA__ADV17325

SEQ ID NO: 212256 - RNA, 1410 nt, Artificial Sequence
  derived and/or modified CDS sequence (opt5) from neuraminidase__InfluenzaA__ADV17335
augaaccccaaucagaagaucauuaccaucggcagcgugugcaugacaauugggauggccaaccugauccuccaaauuggaaauaucaucuccauuuggaucucucacagcauucagcugggcaaccagaaucagaucgagacguguaaccaauccgucauuaccuacgaaaauaacacauggguuaaucagaccuaugugaacaucucuaauacaaacuucgcugccgggcagagcguggucuccgugaaacuugcgggaaauucuagccugugcccuguuuccggcugggcuauuuacagcaaggacaacucuaucagaaucggguccaaaggagauguguuugucauucgggagccguucaucagcuguucuccccucgaaugccgcaccuuuuuccugacacagggcgcccuucugaaugacaagcauuccaacggcaccauuaaagauagaagcccuuaucggacgcucaugucuugucccaucggggaggugccuucccccuacaacagccgcuuugaauccguugccuggucugcuagcgccugccacgacggaauuaauuggcugaccaucggcaucuccgggccugauaacggagcuguggccguccugaaguauaauggcauuaucacagacaccauuaagagcuggagaaacaauauccuccggacacaagagucugagugugcgugcgugaacggguccuguuucaccgugaugacggauggaccgagcgacggccaggccucuuacaaaauuuuucgcaucgaaaagggcaaaaucgucaagagcguugagaugaaugcucccaacuaucauuacgaagagugcuccuguuacccugauucuagcgagauuacaugcgugugcagagacaauuggcacggguccaaccggcccugggugagcuucaaucagaaccuggaauaucagaucggauacauuuguucuggcgucuuuggggauaauccucgccccaacgacaaaaccggauccugcggcccggugagcucuaauggggccaacggaguuaagggcuucuccuuuaaguauggcaacgggguguggaucggaagaacaaaaagcauuuccucucggaauggcuucgagaugaucugggauccuaacggguggaccggaaccgacaauaacuuuagcauuaagcaagacaucgucggcaucaaugaaugguccggguacucuggcagcuucgugcagcaucccgagcuuacaggacuggauuguauucgcccuugcuucuggguugaacucaucagaggccggcccaaagagaacacgauuuggaccuccgggagcucuaucuccuuuuguggagugaauagcgacacagucggcuggucuuggcccgauggggcugagugcccuuucaccauugacaaguga

SEQ ID NO: 212257 - RNA, 1410 nt, Artificial Sequence; identical to SEQ ID NO: 208810
  derived and/or modified CDS sequence (opt5) from neuraminidase__InfluenzaA__ADV19022

SEQ ID NO: 212258 - RNA, 1410 nt, Artificial Sequence
  derived and/or modified CDS sequence (opt5) from neuraminidase__InfluenzaA__ADV41679
augaaccccaaucagaagaucauuaccaucggcagcgugugcaugacaauugggauggccaaccugauccuccaaauuggaaauaucaucuccauuuggaucucucacagcauucagcugagaaaccagaaucagaucgagacguguaaccaauccgucauuaccuacgaaaauaacacauggguuaaucagaccuaugugaacaucucuaauacaaacuucgcugccggccagagcguggucuccgugaaacuugcgggaaauucuagccugugcccuguuuccgggugggcuauuuacagcaaggacaacucuauccggaucggcuccaaaggggauguguuugucauucgcgagccguucaucagcuguucuccccucgaaugcagaaccuuuuuccugacacagggagcccuucugaaugacaagcauuccaacggcaccauuaaagaucggagcccuuaucgcacgcucaugucuugucccaucggcgaggugccuucccccuacaacagcagauuugaauccguugccuggucugcuagcgccugccacgacgggauuaauuggcugaccaucggaaucuccggcccugauaacggggcuguggccguccugaaguauaauggaauuaucacagacaccauuaagagcuggcggaacaauauccuccgcacacaagagucugagugugcgugcgugaacggcuccuguuucaccgugaugacggaugggccgagcgacggacaggccucuuacaaaauuuuuagaaucgaaaagggcaaaaucgucaagagcguugagaugaaugcucccaacuaucauuacgaagagugcuccuguuacccugauucuagcgagauuacaugcgugugccgggacaauuggcacggcuccaaccgccccugggugagcuucaaucagaaccuggaauaucagaucggguacauuuguucuggaaucuuuggcgauaauccuagacccaacgacaaaaccggguccugcggaccggucagcucuaauggcgccaacggggugaagggauucuccuuuaaguauggcaacggcguuuggauugggcggacaaaaagcaucuccucucgcaauggauucgagaugauuugggauccuaacggcuggaccgggaccgacaauaacuuuagcaucaagcaagacaucgugggaauuaaugaaugguccggcuacucugggagcuucguccagcaucccgagcuuacaggccuggauuguaucagaccuugcuucuggguggaacucauucggggacgccccaaagagaacacgaucuggaccuccggcagcucuauuuccuuuugugggguuaauagcgacacagugggauggucuuggcccgauggcgcugagcugccuuucaccaucgacaaguga

SEQ ID NO: 212259 - RNA, 1410 nt, Artificial Sequence
  derived and/or modified CDS sequence (opt5) from neuraminidase__InfluenzaA__ADV76582
augaaccccaaucagaagaucauuaccaucggcagcgugucccugacaauuucuacggucugcuucuuuaugcaaaucgccauucucaucaccacaguuacccugcacuucaaacaguacgaguuuaacagcccuccgaauaaccaggugaugcuuugugaacccacaaucauugagagaaauaucaccgaaauuguguaucugacaaacaccacgaucgagaaggaaauuugcccuaaacucgcugaguaccggaauugguccaagccccagugugacaucaccggguucgccccuuuuucuaaagauaacagcauucgccuguccgcgggaggcgacaucugggucacaagagagcccuaugugucuugcgauccugacaaguguuaccaauucgcucuugggcagggaaccacacugaauaacguucauagcaauaacaccgugcgggaucgcacgccguauagaacacuccugaugaaugaacugggcguccccuuucaccucgggaccaaacaggugugcaucgccugguccagcagcuccugucaugacggaaaggccuggcugcacguuugcauuacaggcgaugacaagaacgcuaccgccagcuucaucuacaauggccggcuuguggauucugucguguccuggagcaaagagauucugcgcacccaggaaucugagugugugugcaucaacgggacauguacggucguuaugaccgacggauccgcuagcggcaaggccgauacaaaaauucucuuuaucgaggaagggaagaucgugcauaccuccacacugucuggaagcgcgcaacacguggaggaaugcuccugcuauccuagauaccccggcguccggugugugugccgcgacaacuggaaggggagcaauagaccuauuguugauaucaacauuaaagaccacucuaucguguccagcuacgucuguucuggacuugugggcgacacgccccggaagaaugauagcuccucuagcucccauugccuggacccgaacaaugaggaaggcgggcacggaguuaaaggcugggccuucgaugacgggaacgauguguggaugggacgcaccauuaaugagacaagcagacucggcuaugagaccuuuaaggucaucgaaggguggucuaacccuaaauccaagcugcagaucaaucgccaggugauugucgacaaaggaaaccggagcggcuacucuggcaucuucuccguggaggggaagucuuguauuaauagaugcuuuuauguugaacugauccggggaagaaaggaggaaaccgaggugcucuggacauccaacucuauugucguguucuguggcaccagcgggacauacggaacgggcuccuggcccgauggggcugaccugaaucuuaugccuaucuga

SEQ ID NO: 212260 - RNA, 1410 nt, Artificial Sequence; identical to SEQ ID NO: 208671
  derived and/or modified CDS sequence (opt5) from neuraminidase__InfluenzaA__ADV76590

SEQ ID NO: 212261 - RNA, 1410 nt, Artificial Sequence; identical to SEQ ID NO: 208671
  derived and/or modified CDS sequence (opt5) from neuraminidase__InfluenzaA__ADV76601

SEQ ID NO: 212262 - RNA, 1410 nt, Artificial Sequence; identical to SEQ ID NO: 209664
  derived and/or modified CDS sequence (opt5) from neuraminidase__InfluenzaA__ADV76612

SEQ ID NO: 212263 - RNA, 1410 nt, Artificial Sequence; identical to SEQ ID NO: 208671
  derived and/or modified CDS sequence (opt5) from neuraminidase__InfluenzaA__ADV76623

SEQ ID NO: 212264 - RNA, 1410 nt, Artificial Sequence; identical to SEQ ID NO: 208671
  derived and/or modified CDS sequence (opt5) from neuraminidase__InfluenzaA__ADV76634

SEQ ID NO: 212265 - RNA, 1410 nt, Artificial Sequence; identical to SEQ ID NO: 211538
  derived and/or modified CDS sequence (opt5) from neuraminidase__InfluenzaA__ADV76645

SEQ ID NO: 212266 - RNA, 1410 nt, Artificial Sequence
  derived and/or modified CDS sequence (opt5) from neuraminidase__InfluenzaA__ADV76667
augaaccccaaucagaagaucauuaccaucggcagcgugucccugacaauugccacggucugcuuccucaugcaaaucgcuauucugguuaccacagugacccuucacuuuaaacaguacgagugugacucuccugccagcaaccaggugaugccgugcgaacccaucaucauugagagaaauaucacagaaauugucuaucugaacaauaccacaaucgagaaggaaauuuguccuaaagugguugaguaccggaacugguccaagccccagugccaaaucaccggguucgcgccuuuuucuaaagauaauagcauucgccucuccgcuggaggcgacaucugggugacgagagagcccuaugucucuugugaucaugggaagugcuaccaguucgcccugggacagggcaccacacuugacaacaagcacagcaaugauaccauccaugaccggauuccucaccgcacacugcucaugaacgaacugggggugccguuucaucugggaaccagacagguuuguaucgccugguccuccucuuccugccacgauggcaaggcuuggcuccacguguguauuacgggcgacgauaaaaaugccacagcuagcuucaucuaugacgggcggcuggucgauucuauuggauccuggagccaaaacauccuucgcacccaggagucugaaugcguguguaucaauggcacaugcaccguggucaugaccgacggguccgccagcggacgggcggauacacggauucuguuuaucgaggagggcaaaauuguucauaucagcccccucucugggagcgcccagcacguggaagagugcuccuguuacccucgcuaucccggagugagaugcauuugucgggacaacuggaagggcagcaaucgcccugucguggacaucaacauggaagauuacucuaucgacuccagcuacguuugcucuggccuggugggggauacgcccagaaacgacgaucggagcuccaauucuaaaagccgcaacccgaauaacgagagaggaaaucagggcgucaaggggugggcuuucgacaacggagaugacguguggaugggccggaccauuuccagagaucuucgcagcggguaugaaacauuuaagguuaucggaggcuggucuaccccuaauuccaaaagccaaauuaacagacaggugaucgucgacucugauaauagauccggcuacagcgggauuuucuccguggagggaaagucuuguaucaaccgcugcuuuuaugucgagcugauucggggcagaaaacaggaaacacgcgugugguggaccagcaauuccaucguuguguucugugggacgucuggaacauacggcaccgggagcuggcccgacggcgccaacaucaauuuuaugccuauuuga

SEQ ID NO: 212267 - RNA, 1410 nt, Artificial Sequence; identical to SEQ ID NO: 211540
  derived and/or modified CDS sequence (opt5) from neuraminidase__InfluenzaA__ADV76676

SEQ ID NO: 212268 - RNA, 1410 nt, Artificial Sequence; identical to SEQ ID NO: 210681
  derived and/or modified CDS sequence (opt5) from neuraminidase__InfluenzaA__ADV76697

SEQ ID NO: 212269 - RNA, 1410 nt, Artificial Sequence
  derived and/or modified CDS sequence (opt5) from neuraminidase__InfluenzaA__ADV76708
augaaccccaaucagaagaucauuaccaucggcagcgugucccugacaauuucuacgaucugcuucuuuaugcaaaccgccauucucaucacaaccgucacacugcacuucaaacagugugaguuuaacagcccuccgaauaaccagguuaugcuuugcgaacccaccaucauugagagaaauaucacagaaauuguguaccugaccaacaucacgauugagaaggaaaucuguccuaaacucgcugaguaucggaauugguccaagccccagugcgacauuaccggguucgccccuuuuucuaaagauaacagcauccgccuguccgcgggaggcgacaucugggugacaagagagcccuacgucucuugugauccugacaagugcuaucaauucgcucuugggcagggaaccacacugaauaacgugcauagcaauaacaccguucgggaucgcacgccguacagaacacuccugaugaaugaacugggcgugcccuuucaccucgggaccaagcaggucuguauugccugguccucuagcuccugccaugacggaaaagccuggcugcacguguguaucacaggcgaugacaagaacgcuaccgccagcuucauuuauaauggccggcuuguugauucuguggucuccuggagcaaagagauccugcgcacccaggaaucugagugcguguguauuaacgggacaugcacgguggucaugaccgacggauccgcuagcggcaaggccgauacaaaaauccucuuuaucgaggaagggaagauuguucauaccuccacacugucuggaagcgcgcaacacguggaggaaugcuccuguuacccuagauaucccggcgugcggugcgucugucgcgacaacuggaaggggagcaauagaccuaucguggauauuaacaucaaagaccacucuauuguuuccagcuacgugugcucuggacuugucggcgacacgccccggaagaaugauagcuccucuagcucccauugucuggacccgaacaaugaggaaggcgggcacggagugaaaggcugggccuucgaugacgggaacgauguuuggaugggacgcaccaucagcgagaagucuagacucggcuacgagacauuuaaagugaucgaagggugguccaauccuaagagcaaacugcagauuaaccggcaggucaucguggaccgcggaaauagaucuggcuauuccggcauuuucagcgucgaggggaaguccugcaucaaccgguguuuuuacguggaacugauuagaggacgcaaggaggaaaccgagguucucuggaccucuaauagcaucguggucuucugcggcacauccgggaccuauggaacaggcucuuggcccgauggggcugacauuaaccugaugccuaucuga

SEQ ID NO: 212270 - RNA, 1410 nt, Artificial Sequence
  derived and/or modified CDS sequence (opt5) from neuraminidase__InfluenzaA__ADV76719
augaaccccaaucagaagaucauuaccaucggcagcgugucccugacaauuucuacgaucugcuucuuuaugcaaauugccauccucaucaccacagucacccugcacuucaaacaguacgaguuuaacagcccuccgaauaaccagguuaugcuuugugaacccacaauuaucgagaagaauauuaccgaaaucguguaucugacaaacaccacgauugagaaagaaaucugcccuaagcucgcugaguacagaaauugguccaaaccccagugugacauuaccggguucgccccuuuuucuaaggauaacagcauccggcuguccgcgggaggcgacaucugggugacacgcgagcccuaugucucuugcgauccugacaaguguuaccaauucgcucuugggcagggaaccacacugaauaacgugcauagcaauaacaccguuagagaucggacgccguaucgcacacuccugaugaaugaacugggcgugcccuuucaccucgggaccaaacaggucugcauugccugguccucuagcuccugucaugacggaaaggccuggcugcacgugugcaucacaggcgaugacaaaaacgcuaccgccagcuucauuuacaauggcagacuuguugauucuguggucuccuggagcaaggagauccugcggacccaggaaucugagugugugugcauuaacgggacauguacgguggucaugaccgacggauccgcuagcggcaaagccgauacaaagauccucuuuaucgaggaagggaagauuguucauaccuccacacugucuggaagcgcgcaacacguggaggaaugcuccugcuauccucgcuaccccggcgugagaugugucugccgggacaacuggaaagggagcaaucgcccuaucguggauauuaacaucaaggaccacucuauuguuuccagcuacguguguucuggacuugucggcgacacccccagaaagaaugauagcuccucuagcucccauugccuggacccgaacaaugaggaaggcgggcacggagugaaaggcugggccuucgaugacgggaacgauguuuggaugggacggacgaucagcgagaaaucucgccucggcuaugagacauuuaaggugaucgaagggugguccaauccuaaaagcaagcugcagaugaacagacaggucauuguggaccggggaaaucgcucuggcuacuccggcaucuucagcgucgaggggaaguccuguauuaacagaugcuuuuauguggaacugauccggggaagaaaagaggaaaccgagguucucuggaccucuaauagcauuguggucuucuguggcacauccgggaccuacggaacaggcucuuggcccgauggggcugacaucaaccugaugccuauuuga

SEQ ID NO: 212271 - RNA, 1410 nt, Artificial Sequence
  derived and/or modified CDS sequence (opt5) from neuraminidase__InfluenzaA__ADV76730
augaaccccaaucagaagaucauuaccaucggcagcgugucccugacaauuucuacgaucugcuucuuuaugcaaauugccauccucaucaccacagucacccugcacuucaaacaguacgaguuuaacagcccuccgaauaaccagguuaugcuuugugaacccacaauuaucgagagaaauauuaccgaaaucguguaucugacaaacaccacgauugagaaggaaaucugcccuaaacucgcugaguaccggaauugguccaagccccagugugacauuaccggguucgccccuuuuucuaaagauaacagcauccgccuguccgcgggaggcgacaucugggugacaagagagcccuaugucucuugcgauccugacaaguguuaccaauucgcucuugggcagggaaccacacugaauaacgugcauagcaauaacaccguucgggaucgcacgccguauagaacacuccugaugaaugaacugggcgugcccuuucaccucgggaccaagcaggucugcauugccugguccucuagcuccugucaugacggaaaagccuggcugcacgugugcaucacaggcgaugacaagaacgcuaccgccagcuucauuuacaauggccggcuuguugauucuguggucuccuggagcaaagagacccugcgcacacaggaaucugagugugugugcaucaacgggacguguaccguggucaugacagacggauccgcuagcggcaaggccgauaccaaaauucucuuuaucgaggaagggaagaucguucauacauccacccugucuggaagcgcgcaacacguggaggaaugcuccugcuauccuagauaccccggcgugcggugugucugccgcgacaacuggaaggggagcaauagaccuauuguggauaucaacauuaaagaccacucuaucguuuccagcuacguguguucuggacuugucggcgacacgccccggaaggaugacagcuccucuagcucccauugccuggauccgaauaacgaggaaggcgggcacggagugaaaggcugggccuucgacgaugggaaugacguuuggaugggacgcacaauuagcgagaagucuagacucggcuaugagaccuuuaaagugaucgaagggugguccaacccuaagagcaaacugcagaucaaucggcaggucauuguggaucgcggaaacagaucuggcuacuccggcaucuucagcgucgaggggaaguccuguauuaaucggugcuuuuauguggaacugaucagaggacgcaaggaggaaaccgagguucucuggacaucuaacagcauuguggucuucuguggcaccuccgggacauacggaacgggcucuuggcccgacggggcugauaucaaucugaugccuauuuga

SEQ ID NO: 212272 - RNA, 1410 nt, Artificial Sequence
  derived and/or modified CDS sequence (opt5) from neuraminidase__InfluenzaA__ADV78132
augaaccccaaucagaagaucauuaccaucggcagcgugugcaugacaauugggauggccaaccugauccuccaaauuggaaauaucaucuccauuuggaucucucacagcauucagcugggcaaccagucccagaucgagacguguaaucaaucugucauuaccuacgaaaacaauacauggcuuaaccagaccuauguuaauaucagcaacacaaauuucgcugccgggcaguccguggugucugucaaacuggcgggaaacagcucccucugcccugugagcggcugggcuauuuacucuaaggacaauuccaucagaaucgggagcaaaggagauguuuuugugauucgggagccguucaucucuuguucccccagcgaaugccgcaccuuuuuccugacacagggcgcccuucugaacgacaagcauucuaauggcaccauuaaagauagauccccuuaucggacgcucaugagcugucccaucggggaggucccuucccccuacaacucucgcuuugaaagcguggccugguccgcuagcgccugccacgacggaauuaacuggcugaccaucggcaucucugggccugauaauggagcuguugccgugcugaaguauaacggcauuaucacagacaccauuaaguccuggagaaauaacauccuccggacacaagagagcgagugugcgugcgucaaugggucuuguuucaccauuaugacggauggaccgagcgacggccaggccuccuacaaaaucuuucgcaucgaaaagggcaaaauugugaagucuguggggaugaacgcucccaauuaucauuacgaggaaugcagcuguuacccugauuccagcgagaucacaugcgucugcagagacaacuggcacggaucuaaucggcccuggguuuccuucaaccagaaucuggaguaucagauuggcuacaucuguagcgggauuuuuggagauaacccucgccccaaugacaaaaccggcucuugcgggccgguguccagcaacggagccaauggcgugaagggcuucuccuuuaaguaugggaacggagucuggaucggcagaacaaaaucuauuagcucccggaagggguucgaaaugaucugggauccuaacggauggaccggcaccgacaauaacuuuucuaucaaacaagacauuguggggaucaaugaguggagcggcuacuccggcagcuucguucagcaucccgaacuuacaggacuggauuguauucgcccuugcuucuggguggagcucaucagagggcggcccaaggaaaacacgauuugggcuucuggauccagcaucucuuuuuguggcgucaauuccgacaccgugggguggagcuggcccgauggagccgagcugccuuucaucauugacaaauga

SEQ ID NO: 212273 - RNA, 1413 nt, Artificial Sequence
  derived and/or modified CDS sequence (opt5) from neuraminidase__InfluenzaA__ADW09104
augaaccccaaucagaagaucauuaccaucggcagcauuuccaucgccauugggaucaucucucugaugcuccaaauuggaaacaucauuagcaucugggcuucccacucuauucagacaggcagccagaauaacacggggaucugcaaucagagaauuaucaccuacgagaacuccacaugggugaaucauaccuaugucaacaucaauaacacaaauguuguggccggagaagacaaaaccucugugacacuggcgggcaacagcucccuuuguagcauuucugggugggcuaucuacaccaaggauaauuccauucggaucggaagcaaaggcgacgucuucgugauucgcgagccuuuuaucucuugcucccaccuggaauguagaacguucuuucucacccaaggcgcccugcuuaacgauaagcauagcaaugggacaguuaaagaccggucuccguaucgcgcccugauguccugcccccucggagaggcuccuagccccuacaacuccaaguucgaaucuguggccuggagcgcuuccgccugucacgauggcaugggguggcugaccaucggaauuagcggcccugacaacggggcggucgccgugcugaaguauaauggaaucauuacaggcaccaucaaaucuuggaagaaacagauucucagaacgcaggaguccgagugcguuuguaugaacggcagcugcuuuacaaucaugaccgaugggcccaauaacaaggcugccucuuacaaaaucuucaagauugaaaagggaaaagugacaaagagcaucgagcugaaugcuccuaacuuuuauuacgaagaguguuccugcuacccggacaccggcauugucaugugugugugccgggauaauuggcaugggucuaaccgccccugggugagcuucaaucagaaccuugacuaucaaaucggauacauuugcuccggcgucuuuggggauaauccuagacccgaggacggagaaggcagcuguaacccuguuaccguggauggcgccaauggggugaaaggauucucuuauaaguacggcaacggggucuggaucggacggacaaaauccaaucgccugagaaagggcuuugagaugauuugggaccccaacggguggacgaacaccgacagcgauuucucugugaaacaggacguuguggcgaucacagauugguccggcuauagcggauccuuuguccagcacccggaacucaccggccuggacugcauccggccuuguuucuggguggagcuuguucgcgggcugcccagagaaaauacaaccauuuggacgucuggaagcuccaucucuuucugcggcgugaacagcgauacagccaauugguccuggccugacggggcugagcuccccuuuaccauugauaaguga

SEQ ID NO: 212274 - RNA, 1413 nt, Artificial Sequence; identical to SEQ ID NO: 209533
  derived and/or modified CDS sequence (opt5) from neuraminidase__InfluenzaA__ADW09114

SEQ ID NO: 212275 - RNA, 1413 nt, Artificial Sequence
  derived and/or modified CDS sequence (opt5) from neuraminidase__InfluenzaA__ADW09123
augaaccccaaucagaagaucauuaccaucggcagcauuuccaucgccauugggaucacaucucugaugcuccaaaucggaaacauuaucagcauuugggcuucccacucuauccagacgggcagccagaauaacaccgggauuugcaaucagagaaucauuacauacgagaacuccaccugggugaaucauacauaugucaacaucaauaacaccaauguuguggccggagaagacaaaacaucugugacccuggcgggcaacagcucccuuuguagcaucucugggugggcuauuuacacgaaggauaauuccauccggauuggaagcaaaggcgacgucuucgugauccgcgagccuuuuauuucuugcucccaccuggaauguagaaccuucuuucucacacaaggcgcccugcuuaacgauaagcauagcaaugggaccguuaaagaccggucuccguaucgcgcccugauguccugcccccucggagaggcuccuagccccuacaacuccaaguucgaaucuguggccuggagcgcuuccgccugucacgauggcaugggguggcugacaaucggaaucagcggcccugacaacggggcggucgccgugcugaaguauaauggaauuaucaccggcacgauuaaaucuuggaagaaacagauccucagaacacaggaguccgagugcguuuguaugaacggcagcugcuuuaccauuaugacagaugggcccucuaauaaggcugccagcuacaaaaucuucaagaucgaaaagggaaaagugaccaaguccauugagcugaacgcuccuaauuuuuauuacgaagaguguucuugcuacccggacaccggcaucgucaugugugugugccgggauaacuggcaugggagcaaucgccccuggguguccuucaaccagaaucuugacuaucaaauuggauacaucugcagcggcgucuuuggggauaacccuagacccgaggacggagaaggcucuuguaauccuguuacaguggauggcgccgacggggugaaaggauucuccuauaaguacggcaacggggucuggauuggacggacgaaaagcaaucgccugagaaagggcuuugagaugaucugggaccccaacggguggaccaauacagauucugacuucuccgugaaacaggauguuguggcgauuaccgacuggagcggcuauuccggaucuuuuguccagcacccggaacucacaggccuggauugcauccggccuuguuucuggguggagcuuguucgcgggcugcccagagaaaacaccacgaucuggacaagcggauccucuauuagcuucugcggcgugaacuccgacaccgccaauuggagcuggccugauggggcugagcuccccuuuaccaucgacaaguga

SEQ ID NO: 212276 - RNA, 1413 nt, Artificial Sequence
  derived and/or modified CDS sequence (opt5) from neuraminidase__InfluenzaA__ADW09156
augaaccccaaucagaagaucauuaccaucggcagcauuuccaucgccauugggaucaucucucugaugcuccaaauuggaaacaucauuagcaucugggcuucccacucuauucagacaggcagccagaauaacacggggaucugcaaucagagaauuaucaccuacgagaacuccacaugggugaaucauaccuaugucaacaucaauaacacaaauguuguggccggagaagacaaaaccucugugacacuggcgggcaacagcucccuuuguagcauuucugggugggcuaucuacaccaaggauaauuccauucggaucggaagcaaaggcgacgucuucgugauucgcgagccuuuuaucucuugcucccaccuggaauguagaacguucuuucucacccaaggcgcccugcuuaacgauaagcauagcaaugggacaguuaaagaccggucuccguaucgcgcccugauguccugcccccucggagaggcuccuagccccuacaacuccaaguucgaaucuguggccuggagcgcuuccgccugucacgauggcaugggguggcugaccaucggaauuagcggcccugacaacggggcggucgccgugcugaaguauaauggaaucauuacaggcaccaucaaaucuuggaagaaacagauucucagaacgcaggaguccgagugcguuuguaugaacggcagcugcuuuacaaucaugaccgaugggcccucuaauaaggcugccagcuacaaaaucuucaagauugaaaagggaaaagugacaaaguccaucgagcugaacgcuccuaauuuuuauuacgaagaguguucuugcuacccggacaccggcauugucaugugugugugccgggauaacuggcaugggagcaaucgccccuggguguccuucaaccagaaucuugacuaucaaaucggauacauuugcagcggcgucuuuggggauaacccuagacccgaggacggagaaggcucuuguaauccuguuaccguggauggcgccgacggggugaaaggauucuccuauaaguacggcaacggggucuggaucggacggacaaaaagcaaucgccugagaaagggcuuugagaugauuugggaccccaacggguggacgaauaccgauucugacuucuccgugaaacaggauguuguggcgaucacagacuggagcggcuauuccggaucuuuuguccagcacccggaacucaccggccuggauugcauccggccuuguuucuggguggagcuuguucgcgggcugcccagagaaaacacaaccauuuggacgagcggauccucuaucagcuucugcggcgugaacuccgacacagccaauuggagcuggccugauggggcugagcuccccuuuaccauugacaaguga

SEQ ID NO: 212277 - RNA, 1413 nt, Artificial Sequence
  derived and/or modified CDS sequence (opt5) from neuraminidase__InfluenzaA__ADW09167
augaaccccaaucagaagaucauuaccaucggcagcauuuccaucgccauugggaucaucucucugaugcuccaaauuggaaacaucauuagcaucugggcuucccacucuauucagacaggcagccagaauaacacggggaucugcaaucagagaauuaucaccuacgagaacuccacaugggugaaucauaccuaugugaacaucaauaacacaaauguuguggccggagaagacaaaaccucugugacacuggcgggcaacagcucccuuuguagcauuucugggugggcuaucuacaccaaggauaauuccauucggaucggaagcaaaggcgacgucuucgugauucgcgagccuuuuaucucuugcucccaccuggaauguagaacguucuuucucacccaaggcgcccugcuuaacgauaagcauagcaaugggacaguuaaagaccggucuccguaucgcgcccugauguccugcccccucggagaggcuccuagccccuacaacuccaaguucgaaucuguggccuggagcgcuuccgccugucacgauggcaugggguggcugaccaucggaauuagcggcccugacaacggggcggucgccgugcugaaguauaauggaaucauuacaggcaccaucaaaucuuggaagaaacagauucucagaacgcaggaguccgagugcguuuguaugaacggcagcugcuuuacaaucaugaccgaugggcccucuaauaaggcugccagcuacaaaaucuucaagauugaaaagggaaaagugacaaaguccaucgagcugaacgcuccuaauuuuuauuacgaagaguguucuugcuacccggacaccggcauugucaugugugugugccgggauaacuggcaugggagcaaucgccccuggguguccuucaaccagaaucuugacuaucaaaucggauacauuugcagcggcgucuuuggggauaacccuagacccgaggacggagaaggcucuuguaauccuguuaccgugaacggcgccgauggggugaaaggauucuccuauaaguacggcaauggggucuggaucggacggacaaaaagcaaccgccugagaaagggcuuugagaugauuugggaccccaauggguggacgaacaccgacucugauuucuccgugaaacaggacguuguggcgaucacagauuggagcggcuauuccggaucuuuuguccagcacccggaacucaccggccuggacugcauccggccuuguuucuggguggagcuuguucgcgggcugcccagagaaaacacaaccauuuggacgagcggauccucuaucagcuucugcggcgucaauuccgauacagccaacuggagcuggccugacggggcugagcuccccuuuaccauugauaaguga

SEQ ID NO: 212278 - RNA, 1413 nt, Artificial Sequence; identical to SEQ ID NO: 209533
  derived and/or modified CDS sequence (opt5) from neuraminidase__InfluenzaA__ADW09178

SEQ ID NO: 212279 - RNA, 1413 nt, Artificial Sequence; identical to SEQ ID NO: 209533
  derived and/or modified CDS sequence (opt5) from neuraminidase__InfluenzaA__ADW09189

SEQ ID NO: 212280 - RNA, 1413 nt, Artificial Sequence; identical to SEQ ID NO: 212277
  derived and/or modified CDS sequence (opt5) from neuraminidase__InfluenzaA__ADW09211

SEQ ID NO: 212281 - RNA, 1413 nt, Artificial Sequence
  derived and/or modified CDS sequence (opt5) from neuraminidase__InfluenzaA__ADW09222
augaaccccaaucagaagaucauuaccaucggcagcauuuccaucgccauugggaucaucucucugaugcuccaaauuggaaacaucauuagcaucugggcuucccacucuauucagacaggcagccagaauaacacggggaucugcaaucagagaauuaucaccuacgagaacuccacaugggugaaucauaccuaugucaacaucaauaacacaaauguuguggccggagaagacaaaaccucugugacacuggcgggcaacagcucccuuuguagcauuucugggugggcuaucuacaccaaggauaauuccauucggaucggaagcaaaggcgacgucuucgugauucgcgagccuuuuaucucuugcucccaccuggaauguagaacguucuuucucacccaaggcgcccugcuuaacgauaagcauagcaaugggacaguuaaagaccggucuccguaucgcgcccugauguccugcccccucggagaggcuccuagccccuacaacuccaaguucgaaucuguggccuggagcgcuuccgccugucacgauggcaugggguggcugaccaucggaauuagcggcccugacaacggggcggucgccgugcugaaguauaauggaaucauuacaggcaccaucaaaucuuggaagaaacagauucucagaacgcaggaguccgagugcguuuguaugaacggcagcugcuuuacaaucaugaccgaugggcccucuaauaaggcugccagcuacaaaaucuucaagauugaaaagggaaaagugacaaaguccaucgagcugaacgcuccuaauuuuuauuacgaagaguguucuugcuacccggacaccggcauugucaugugugugugccgggauaacuggcaugggagcaaucgccccuggguguccuucaaccagaaucuugacuaucaaaucggauacauuugcagcggcgucuuuggggauaacccuagacccgaggacggagaaggcucuuguaauuccguuaccguggauggcgccgacggggugaaaggauucagcuauaaguacggcaacggggucuggaucggacggacaaaaucuaaucgccugagaaagggcuuugagaugauuugggacccuaacggguggacgaauaccgauuccgacuucagcgugaaacaggauguuguggcgaucacagacugguccggcuauucuggcagcuuuguccagcaccccgaacucaccggacuggauugcauccggccguguuucuggguggagcuuguucgcgggcugccuagagaaaacacaaccauuuggacguccggaucuagcaucuccuucugcggcgugaacagcgacacagccaauuggucuuggcccgauggggcugagcucccuuuuaccauugacaaguga

SEQ ID NO: 212282 - RNA, 1413 nt, Artificial Sequence
  derived and/or modified CDS sequence (opt5) from neuraminidase__InfluenzaA__ADW09233
augaaccccaaucagaagaucauuaccaucggcagcauuuccaucgccauugggacaaucucucugaugcuccaaaucggaaacauuaucagcauuugggcuucccacucuauccagacgggcagccagaauaacaccgggauuugcaaucagagaaucauuacauacgagaacuccaccugggugaaucauacauaugugaacaucaauaacaccaauguuguggccggagaagacaaaacaucugugacccuggcgggcaacagcucccuuuguagcaucucugggugggcuauuuacacgaaggauaauuccauccggauuggaagcaaaggcgacgucuucgugauccgcgagccuuuuauuucuugcucccaccuggaauguagaaccuucuuucucacacaaggcgcccugcuuaacgauaagcauagcaaugggaccguuaaagaccggucuccguaucgcgcccugauguccugcccccucggagaggcuccuagccccuacaacuccaaguucgaaucuguggccuggagcgcuuccgccugucacgauggcaugggguggcugacaaucggaaucagcggcccugacaacggggcggucgccgugcugaaguauaauggaauuaucaccggcacgauuaaaucuuggaagaaacagauccucagaacacaggaguccgagugcguuuguaugaacggcagcugcuuuaccauuaugacagaugggcccucuaauaaggcugccagcuacaaaaucuucaagaucgaaaagggaaaagugaccaaguccauugagcugaacgcuccuaauuuuuauuacgaagaguguucuugcuacccggacaccggcaucgucaugugugugugccgggauaacuggcaugggagcaaucgccccuggguguccuucaaccagaaucuugacuaucaaauuggauacaucugcagcggcgucuuuggggauaacccuagacccgaggacggagaaggcucuuguaauccuguuacaguggauggcgccaacggggugaaaggauucuccuauaaguacggcaauggggucuggauuggacggacgaaaagcaaccgccugagaaagggcuuugagaugaucugggaccccaauggguggaccaacacagacucugauuucuccgugaaacaggacguuguggcgauuaccgauuggagcggcuauuccggaucuuuuguccagcacccggaacucacaggccuggacugcauccggccuuguuucuggguggagcuuguucgcgggcugcccagagaaaacaccacgaucuggacaagcggauccucuauuagcuucugcggcgucaauuccgauaccgccaacuggagcuggccugacggggcugagcuccccuuuaccaucgauaaguga

SEQ ID NO: 212283 - RNA, 1413 nt, Artificial Sequence; identical to SEQ ID NO: 212276
  derived and/or modified CDS sequence (opt5) from neuraminidase__InfluenzaA__ADW09244

SEQ ID NO: 212284 - RNA, 1413 nt, Artificial Sequence; identical to SEQ ID NO: 212276
  derived and/or modified CDS sequence (opt5) from neuraminidase__InfluenzaA__ADW09255

SEQ ID NO: 212285 - RNA, 1413 nt, Artificial Sequence; identical to SEQ ID NO: 212276
  derived and/or modified CDS sequence (opt5) from neuraminidase__InfluenzaA__ADW09266

SEQ ID NO: 212286 - RNA, 1413 nt, Artificial Sequence; identical to SEQ ID NO: 212276
  derived and/or modified CDS sequence (opt5) from neuraminidase__InfluenzaA__ADW09277

SEQ ID NO: 212287 - RNA, 1413 nt, Artificial Sequence; identical to SEQ ID NO: 209533
  derived and/or modified CDS sequence (opt5) from neuraminidase__InfluenzaA__ADW09288

SEQ ID NO: 212288 - RNA, 1413 nt, Artificial Sequence; identical to SEQ ID NO: 212277
  derived and/or modified CDS sequence (opt5) from neuraminidase__InfluenzaA__ADW09299

SEQ ID NO: 212289 - RNA, 1413 nt, Artificial Sequence; identical to SEQ ID NO: 209533
  derived and/or modified CDS sequence (opt5) from neuraminidase__InfluenzaA__ADW09310

SEQ ID NO: 212290 - RNA, 1413 nt, Artificial Sequence; identical to SEQ ID NO: 209533
  derived and/or modified CDS sequence (opt5) from neuraminidase__InfluenzaA__ADW09330

SEQ ID NO: 212291 - RNA, 1413 nt, Artificial Sequence; identical to SEQ ID NO: 212276
  derived and/or modified CDS sequence (opt5) from neuraminidase__InfluenzaA__ADW10475

SEQ ID NO: 212292 - RNA, 1413 nt, Artificial Sequence; identical to SEQ ID NO: 212277
  derived and/or modified CDS sequence (opt5) from neuraminidase__InfluenzaA__ADW10486

SEQ ID NO: 212293 - RNA, 1413 nt, Artificial Sequence; identical to SEQ ID NO: 209533
  derived and/or modified CDS sequence (opt5) from neuraminidase__InfluenzaA__ADW10497

SEQ ID NO: 212294 - RNA, 1413 nt, Artificial Sequence
  derived and/or modified CDS sequence (opt5) from neuraminidase__InfluenzaA__ADW10508
augaaccccaaucagaagaucauuaccaucggcagcauuuccaucgccauugggaucaucucucugaugcuccaaauuggaaacaucauuagcaucugggcuucccacucuauucagacaggcagccagaauaacacggggaucugcaaucagagaauuaucaccuacgagaacuccacaugggugaaucauaccuaugucaacaucaauaacacaaauguuguggccggagaagacaaaaccucugugacacuggcgggcaacagcucccuuuguagcauuucugggugggcuaucuacaccaaggauaauuccauucggaucggaagcaaaggcgacgucuucgugauucgcgagccuuuuaucucuugcucccaccuggaauguagaacguucuuucucacccaaggcgcccugguuaacgauaagcauagcaaugggacagugaaagaccggucuccguaucgcgcccuuauguccugcccccugggagaggcuccuagccccuacaacuccaaguucgaaucugucgccuggagcgcuuccgccugucacgauggcaugggguggcucaccaucggaauuagcggcccugacaacggggcgguggccguucugaaguauaauggaaucauuacaggcaccaucaaaucuuggaagaaacagauucugagaacgcaggaguccgagugcguguguaugaacggcagcugcuuuacaaucaugaccgaugggcccucuaauaaggcugccagcuacaaaaucuucaagauugaaaagggaaaagucacaaaguccaucgagcucaacgcuccuaauuuuuauuacgaagaguguucuugcuacccggacaccggcauugugaugugugugugccgggauaacuggcaugggagcaaucgccccugggucuccuucaaccagaaucuggacuaucaaaucggauacauuugcagcggcguuuuuggggauaacccuagacccgaggacggagaaggcucuuguaauccugugaccgugaacggcgccgauggggucaaaggauucuccuauaaguacggcaaugggguguggaucggacggacaaaaagcaaccgccuuagaaagggcuuugagaugauuugggaccccaauggguggacgaacaccgacucugauuucuccguuaaacaggacguggucgcgaucacagauuggagcggcuauuccggaucuuuugugcagcacccggaacugaccggccucgacugcauccggccuuguuucuggguugagcuggugcgcgggcuucccagagaaaacacaaccauuuggacgagcggauccucuaucagcuucugcggcgucaauuccgauacagccaacuggagcuggccugacggggcugagcugcccuuuaccauugauaaguga

SEQ ID NO: 212295 - RNA, 1413 nt, Artificial Sequence; identical to SEQ ID NO: 209533
  derived and/or modified CDS sequence (opt5) from neuraminidase__InfluenzaA__ADW10519

SEQ ID NO: 212296 - RNA, 1413 nt, Artificial Sequence; identical to SEQ ID NO: 209533
  derived and/or modified CDS sequence (opt5) from neuraminidase__InfluenzaA__ADW10530

SEQ ID NO: 212297 - RNA, 1413 nt, Artificial Sequence
  derived and/or modified CDS sequence (opt5) from neuraminidase__InfluenzaA__ADW10541
augaaccccaaucagaagaucauuaccaucggcagcauuuccaucgccauugggaucaucucucugaugcuccaaauuggaaacaucauuagcaucugggcuucccacucuauucagacaggcagccagaauaacacggggaucugcaaucagagaauuaucaccuacgagaacuccacaugggugaaucauaccuaugucaacaucaauaacacaaauguuguggccggagaagacaaaaccucugugacacuggcgggcaacagcucccuuuguagcauuucugggugggcuaucuacaccaaggauaauuccauucggaucggaagcaaaggcgacgucuucgugauucgcgagccuuuuaucucuugcucccaccuggaauguagaacguucuuucucacccaaggcgcccugcuuaacgauaagcauagcaaugggacaguuaaagaccggucuccguaucgcgcccugauguccugcccccucggagaggcuccuagccccuacaacuccaaguucgaaucuguggccuggagcgcuuccgccugucacgauggcaugggguggcugaccaucggaauuagcggcccugacaacggggcggucgccgugcugaaguauaauggaaucauuacaggcaccaucaaaucuuggaagaaacagauucucagaacgcaggaguccgagugcguuuguauggauggcagcugcuuuacaaucaugaccgacgggcccucuaacaaggcugccagcuacaaaaucuucaagauugaaaagggaaaagugacaaaguccaucgagcugaaugcuccuaacuuuuauuacgaagaguguucuugcuacccggauaccggcauugucaugugugugugccgggacaauuggcaugggagcaaccgccccuggguguccuucaaucagaaccuugauuaucaaaucggauacauuugcagcggcgucuuuggggacaauccuagacccgaggauggagaaggcucuuguaacccuguuaccguggacggcgccaauggggugaaaggauucuccuauaaguacggcaacggggucuggaucggacggacaaaaagcaaucgccugagaaagggcuuugagaugauuugggaccccaacggguggacgaauaccgauucugacuucuccgugaaacaggauguuguggcgaucacagacuggagcggcuauuccggaucuuuuguccagcacccggaacucaccggccuggauugcauccggccuuguuucuggguggagcuuguucgcgggcugcccagagaaaacacaaccauuuggacgagcggauccucuaucagcuucugcggcgugaacuccgacacagccaauuggagcuggccugauggggcugagcuccccuuuaccauugacaaguga

SEQ ID NO: 212298 - RNA, 1413 nt, Artificial Sequence
  derived and/or modified CDS sequence (opt5) from neuraminidase__InfluenzaA__ADW10552
augaaccccaaucagaagaucauuaccaucggcagcauuuccaucgccauugggaucaucucucugaugcuccaaauuggaaacaucauuagcaucugggcuucccacucuauucagacaggcagccagaauaacacggggaucugcaaucagagaauuaucaccuacgagaacuccacaugggugaaucauaccuaugucaacaucaauaacacaaauguuguggccggagaagacaaaaccucugugacacuggcgggcaacagcucccuuuguagcauuucugggugggcuaucuacaccaaggauaauuccauucggaucggaagcaaaggcgacgucuucgugauucgcgagccuuuuaucucuugcucccaccuggaauguagaacguucuuucucacccaaggcgcccugcuuaacgauaagcauagcaaugggacaguuaaagaccggucuccguaucgcgcccugauguccugcccccucggagaggcuccuagccccuacaacuccaaguucgaaucuguggccuggagcgcuuccgccugucacgauggcaugggguggcugaccaucggaauuagcggcccugacaacggggcggucgccgugcugaaguauaauggaaucauuacaggcaccaucaaaucuuggaagaaacagauucucagaacgcaggaguccgagugcguuuguaugaacggcagcugcuuuacaaucaugaccgaugggcccucuaauaaggcugccagcuacaaaaucuucaagauugaaaagggaaaagugacaaaguccaucgagcugaacgcuccugacuuuuauuacgaagaguguucuugcuacccggauaccggcauugucaugugugugugccgggacaauuggcaugggagcaaccgccccuggguguccuucaaucagaaccuugauuaucaaaucggauacauuugcagcggcgucuuuggggacaauccuagacccgaggauggagaaggcucuuguaacccuguuaccgugaauggcgccgacggggugaaaggauucuccuauaaguacggcaacggggucuggaucggacggacaaaaagcaaucgccugagaaagggcuuugagaugauuugggaccccaacggguggacgaauaccgauucugacuucuccgugaaacaggauguuguggcgaucacagacuggagcggcuauuccggaucuuuuguccagcacccggaacucaccggccuggauugcauccggccuuguuucuggguggagcuuguucgcgggcugcccagagaaaacacaaccauuuggacgagcggauccucuaucagcuucugcggcgugaacuccgacacagccaauuggagcuggccugauggggcugagcuccccuuuaccauugacaaguga

SEQ ID NO: 212299 - RNA, 1413 nt, Artificial Sequence; identical to SEQ ID NO: 212009
  derived and/or modified CDS sequence (opt5) from neuraminidase__InfluenzaA__ADW10563

SEQ ID NO: 212300 - RNA, 1413 nt, Artificial Sequence; identical to SEQ ID NO: 209533
  derived and/or modified CDS sequence (opt5) from neuraminidase__InfluenzaA__ADW10574

SEQ ID NO: 212301 - RNA, 1413 nt, Artificial Sequence
  derived and/or modified CDS sequence (opt5) from neuraminidase__InfluenzaA__ADW10585
augaaccccaaucagaagaucauuaccaucggcagcauuuccaucgccauugggaucaucucucugaugcuccaaauuggaagcaucauuuccaucugggcuucucacagcauucagacaggcucccagaacaauacggggaucugcaaccagagaauuaucaccuacgagaauagcacaugggugaaccauaccuaugucaauaucaacaauacaaacguuguggccggagaagacaaaaagagcgugacccuggcgggcaauuccagccuuuguucuauuuccgggugggcuaucuacacaaaagauaacagcauucggaucggaucuaagggcgacgucuucgugauucgcgagccuuuuaucuccugcagccaccuggaauguagaaccuucuuucucacgcaaggcgcccugcuuaaugauaaacauucuaacgggaccguuaaggaccgguccccguaucgcgcccugaugagcugcccccucggagaggcuccuucccccuacaauucuaaguucgaaagcguggccugguccgcuagcgccugucacgauggcaugggguggcugacaaucggaauuucuggcccugacaacggggcggucgccgugcugaaauauaacggaaucauuaccggcacaaucaaguccuggaaaaagcagauucucagaacccaggagagcgagugcguuuguaugaauggcucuugcuuuacgaucaugacagaugggcccagcaacaaagcugccuccuacaagaucuucaagauugaaaaaggaaaggugaccaaaucuaucgagcugaaugcuccuaacuuuuauuacgaagaguguagcugcuacccggacacaggcauugucaugugugugugccgggauaauuggcauggguccaaccgccccugggugagcuucaaucagaaccuugaguaucaaaucggauacauuugcucuggcgucuuuggggacaauccuagacccgaagauggagagggcuccuguaacccuguuaccguggacggcgccaauggggugaagggauucagcuauaaauacggcaacggggucuggaucggacggaccaagucuaaucgccugagaaaaggcuuugaaaugauuugggaucccaacggguggacaaauacggacuccgacuucagcgugaagcaggauguuguggcgaucaccgacugguccggcuauucuggaucuuuuguccagcacccggagcucacaggccuggauugcauccggccuuguuucuggguggaacuuguucgcgggcugcccagagagaacaccacaauuuggaccuccggaucuagcaucuccuucugcggcgugaacagcgacacggccaauuggucuuggccugauggggcugagcuccccuuuacaauugacaaguga

SEQ ID NO: 212302 - RNA, 1413 nt, Artificial Sequence; identical to SEQ ID NO: 212277
  derived and/or modified CDS sequence (opt5) from neuraminidase__InfluenzaA__ADW10596

SEQ ID NO: 212303 - RNA, 1413 nt, Artificial Sequence; identical to SEQ ID NO: 212276
  derived and/or modified CDS sequence (opt5) from neuraminidase__InfluenzaA__ADW10607

SEQ ID NO: 212304 - RNA, 1413 nt, Artificial Sequence; identical to SEQ ID NO: 212276
  derived and/or modified CDS sequence (opt5) from neuraminidase__InfluenzaA__ADW10618

SEQ ID NO: 212305 - RNA, 1413 nt, Artificial Sequence; identical to SEQ ID NO: 212276
  derived and/or modified CDS sequence (opt5) from neuraminidase__InfluenzaA__ADW10629

SEQ ID NO: 212306 - RNA, 1413 nt, Artificial Sequence; identical to SEQ ID NO: 212276
  derived and/or modified CDS sequence (opt5) from neuraminidase__InfluenzaA__ADW10724

SEQ ID NO: 212307 - RNA, 1413 nt, Artificial Sequence; identical to SEQ ID NO: 212277
  derived and/or modified CDS sequence (opt5) from neuraminidase__InfluenzaA__ADW10735

SEQ ID NO: 212308 - RNA, 1413 nt, Artificial Sequence; identical to SEQ ID NO: 212277
  derived and/or modified CDS sequence (opt5) from neuraminidase__InfluenzaA__ADW10746

SEQ ID NO: 212309 - RNA, 1413 nt, Artificial Sequence
  derived and/or modified CDS sequence (opt5) from neuraminidase__InfluenzaA__ADW10757
augaaccccaaucagaagaucauuaccaucggcagcauuuccaucgccauugggaucaucucucugaugcuccaaauuggaaacaucauuagcaucugggcuucccacucuauucagacaagaagccagaauaacacgggcaucugcaaucagcggauuaucaccuacgagaacuccacaugggugaaucauaccuaugugaacaucaauaacacaaauguuguggccgggggagacaaaaccucugugacacuggcgggcaacagcucccuuuguagcauuucugggugggcuaucuacaccaaggauaauuccauucgcaucggaagcaaaggcgacgucuucgugauuagagaaccuuuuaucucuugcucccaccuggagugucggacguucuuucucacccaaggcgcccugcuuaacgauaagcauagcaaugggacaguuaaagaccgcucuccguauagagcccugauguccugcccccucggagaagcuccuagccccuacaacuccaaguucgagucuguggccuggagcgcuuccgccugucacgauggcaugggguggcugaccaucggaauuagcggcccugacaacggggcggucgccgugcugaaguauaauggaaucauuacaggcaccaucaaaucuuggaagaaacagauucuccggacgcaggaauccgagugcguuuguaugaacggcagcugcuuuacacugaugaccgaugggcccucuaauaaggcugccagcuacaaaaucuucaagaucgagaagggaaaagugacaaaguccauugaacuuaacgcuccuaauuuuuauuacgaggaauguucuugcuacccggacaccggcaucgucaugugugugugccgcgauaacuggcaugggagcaauagacccuggguguccuucaaccagaaucuggacuaucaaauuggauacaucugcagcggcgucuuuggggauaacccucggcccgaggacggagagggcucuuguaauccuguuaccguggauggcgccaacggggugaaaggauucuccuauaaguacggcaauggggucuggauuggacgcacaaaaagcaacagacuccggaagggcuuugaaaugaucugggaccccaauggguggacgaacaccgacucugauuucuccgugaaacaggacguuguggcgauuacagauuggagcggcuauuccggaucuuuuguccagcacccggagcugaccggccuugacugcauccgcccuuguuucuggguggaacugguuagagggcucccccgggagaacacaaccaucuggacgagcggauccucuauuagcuucugcggcgucaauuccgauacagccaacuggagcuggccugacggggcugaacugcccuuuaccaucgauaaguga

SEQ ID NO: 212310 - RNA, 1413 nt, Artificial Sequence; identical to SEQ ID NO: 212276
  derived and/or modified CDS sequence (opt5) from neuraminidase__InfluenzaA__ADW10768

SEQ ID NO: 212311 - RNA, 1413 nt, Artificial Sequence; identical to SEQ ID NO: 209533
  derived and/or modified CDS sequence (opt5) from neuraminidase__InfluenzaA__ADW10779

SEQ ID NO: 212312 - RNA, 1413 nt, Artificial Sequence
  derived and/or modified CDS sequence (opt5) from neuraminidase__InfluenzaA__ADW10790
augaaccccaaucagaagaucauuaccaucggcagcauuuccaucgccauugggaucaucucucugaugcuccaaauuggaaacaucauuagcaucugggcuucccacucuauucagacaggcagccagaauaacacggggaucugcaaucagagaauuaucaccuacgagaacuccacaugggugaaucauaccuaugugaacaucaauaacacaaauguuguggccggagaagacaaaaccucugugacacuggcgggcaacagcucccuuuguagcauuucugggugggcuaucuacaccaaggauaauuccauucggaucggaagcaaaggcgacgucuucgugauucgcgagccuuuuaucucuugcucccaccuggaauguagaacguucuuucucacccaaggcgcccugcuuaacgauaagcauagcaaugggacaguuaaagaccggucuccguaucgcgcccugauguccugcccccucggagaggcuccuagccccuacaacuccaaguucgaaucuguggccuggagcgcuuccgccugucacgauggcaugggguggcugaccaucggaauuagcggcccugacaacggggcggucgccgugcugaaguauaauggaaucauuacaggcaccaucaaaucuuggaagaaacagauucucagaacgcaggaguccgagugcguuuguaugaacggcagcugcuuuacaaucaugaccgaugggcccucuaauaaggcugccagcuacaaaaucuucaagauugaaaagggaaaagugacaaaguccaucgagcugaacgcuccuaauuuuuauuacgaagaguguucuugcuacccggacaccggcauugucaugugugugugccgggauaacuggcaugggagcaaucgccccuggguguccuucaaccagaaucuugacuaucaaaucggauacauuugcagcggcgucuuuggggauaacccuagacccgaggacggagaaggcucuuguaauccuguuaccguggauggcgccaacggggugaaaggauucuccuauaaguacggcaauggggucuggaucggacggacaaaaagcaaccgccugagaaagggcuuugagaugauuugggaccccaauggguggacgaacaccgacucugauuucuccgugaaacaggacguuguggcgaucacagauuggagcggcuauuccggaucuuuuguccagcacccggaacucaccggccuggacugcaucauuccuuguuucuggguggagcuuguucgggggcugccccgcgaaaacgccacaaucuggaccagcggauccucuauuagcuucugcggcgucaauuccgauacggcuaacuggagcuggccugacggggccgagcuccccuuuacaaucgauaaguga

SEQ ID NO: 212313 - RNA, 1413 nt, Artificial Sequence; identical to SEQ ID NO: 211002
  derived and/or modified CDS sequence (opt5) from neuraminidase__InfluenzaA__ADW10801

SEQ ID NO: 212314 - RNA, 1413 nt, Artificial Sequence; identical to SEQ ID NO: 212276
  derived and/or modified CDS sequence (opt5) from neuraminidase__InfluenzaA__ADW10812

SEQ ID NO: 212315 - RNA, 1413 nt, Artificial Sequence; identical to SEQ ID NO: 212028
  derived and/or modified CDS sequence (opt5) from neuraminidase__InfluenzaA__ADW10823

SEQ ID NO: 212316 - RNA, 1413 nt, Artificial Sequence
  derived and/or modified CDS sequence (opt5) from neuraminidase__InfluenzaA__ADW10834
augaaccccaaucagaagaucauuaccaucggcagcauuuccaucgccauugggaucaucucucugaugcuccaaauuggaaacaucauuagcaucugggcuucccacucuauucagacaggcagccagaauaacacggggaucugcaaucagagaauuaucaccuacgagaacuccacaugggugaaucauaccuaugugaacaucaauaacacaaauguuguggccggagaagacaaaaccucugugacacuggcgggcaacagcucccuuuguagcauuucugggugggcuaucuacaccaaggauaauuccauucggaucggaagcaaaggcgacgucuucgugauucgcgagccuuuuaucucuugcucccaccuggaauguagaacguucuuucucacccaaggcgcccugcuuaacgauaagcauagcaaugggacaguuaaagaccggucuccguaucgcgcccugauguccugcccccucggagaggcuccuagccccuacaacuccaaguucgaaucuguggccuggagcgcuuccgccugucacgauggcaugggguggcugaccaucggaauuagcggcccugacaacggggcggucgccgugcugaaguauaauggaaucauuacaggcaccaucaaaucuuggaagaaacagauucucagaacgcaggaguccgagugcguuuguaugaacggcagcugcuuuacaaucaugaccgaugggcccucuaauaaggcugccagcuacaaaaucuucaagauugaaaagggaaaagugaucaaguccauugagcugaacgcuccuaauuuuuauuacgaagaguguucuugcuacccggacacaggcaucgucaugugugugugccgggauaacuggcaugggagcaaucgccccuggguguccuucaaccagaaucuugacuaucaaauuggauacaucugcagcggcgucuuuggggauaacccuagacccgaggacggagaaggcucuuguaauccuguuaccguggauggcgccaacggggugaaaggauucuccuauaaguacggcaauggggucuggauuggacggaccaaaagcaaccgccugagaaagggcuuugagaugaucugggaccccaauggguggacaaacacggacucugauuucuccgugaaacaggacguuguggcgaucaccgauuggagcggcuauuccggaucuuuuguccagcacccggaacucacaggccuggacugcauucggccuuguuucuggguggagcuuguucgcgggcugcccagagaaaacaccacaaucuggaccagcggauccucuauuagcuucugcggcgucaauuccgauacggccaacuggagcuggccugacggggcugagcuccccuuuacaaucgauaaguga

SEQ ID NO: 212317 - RNA, 1413 nt, Artificial Sequence; identical to SEQ ID NO: 212277
  derived and/or modified CDS sequence (opt5) from neuraminidase__InfluenzaA__ADW10845

SEQ ID NO: 212318 - RNA, 1413 nt, Artificial Sequence
  derived and/or modified CDS sequence (opt5) from neuraminidase__InfluenzaA__ADW10856
augaaccccaaucagagaaucauuaccaucggcagcauuuccaucgccauugggaucaucucucugaugcuccaaauuggaaacaucauuagcaucugggcuucccacucuauucagacaggcagccagaauaacacggggaucugcaaucagcggauuaucaccuacgagaacuccacaugggugaaucauaccuaugugaacaucaauaacacaaauguuguggccggagaagacaagaccucuaugacacuggcgggcaacagcucccuuuguagcauuucugggugggcuaucuacaccaaagauaauuccauucgcaucggaagcaagggcgacguguucgucauuagagagccuuuuaucucuugcucccaccuggaaugucggacguucuuucucacccaaggcgcccugcuuaacgauaaacauagcaaugggacagccaaggaccgcucuccguauagagcucugauguccugcccccucggagaggccccuagccccuacaacuccaaauucgaaucuguggcuuggagcgccuccgcgugucacgauggcaugggguggcugaccaucggaauuagcggcccugacaacggggccguugcugugcugaaguauaauggaaucauuacaggcaccaucaagucuuggaaaaagcagauucuccggacgcaggaguccgagugcgucuguaugaacggcagcugcuuuacaaucaugaccgaugggcccucuaauaaagccgcuagcuacaagaucuucaaaauugaaaagggaaaggugacaaaauccaucgagcugaacgccccuaauuuuuauuacgaagaguguucuugcuacccggacaccggcauuguuaugugugugugccgcgauaacuggcaugggagcaauagacccugggucuccuucaaccagaaucuugacuaucaaaucggauacauuugcagcggcguguuuggggauaacccucggcccgaggacggagaaggcucuuguaauccugugaccgucgauggcgcgaacgggguuaagggauucuccuauaaauacggcaaugggguguggaucggacgcacaaagagcaacagacugcggaaaggcuuugagaugauuugggaccccaauggguggacgaacaccgacucugauuucuccgugaagcaggacgucguggccaucacagauuggagcggcuauuccggaucuuuuguucagcacccggaacucaccggccuggacugcauccgcccuuguuucuggguggagcuugucagagggcugccccgggaaaacacaaccauuuggacgagcggauccucuaucagcuucugcggcgucaauuccgauacagcuaacuggagcuggccugacggggccgagcuccccuuuaccauugauaaauga

SEQ ID NO: 212319 - RNA, 1413 nt, Artificial Sequence; identical to SEQ ID NO: 212276
  derived and/or modified CDS sequence (opt5) from neuraminidase__InfluenzaA__ADW10867

SEQ ID NO: 212320 - RNA, 1413 nt, Artificial Sequence; identical to SEQ ID NO: 212276
  derived and/or modified CDS sequence (opt5) from neuraminidase__InfluenzaA__ADW10878

SEQ ID NO: 212321 - RNA, 1413 nt, Artificial Sequence; identical to SEQ ID NO: 212276
  derived and/or modified CDS sequence (opt5) from neuraminidase__InfluenzaA__ADW10889

SEQ ID NO: 212322 - RNA, 1413 nt, Artificial Sequence; identical to SEQ ID NO: 209533
  derived and/or modified CDS sequence (opt5) from neuraminidase__InfluenzaA__ADW10900

SEQ ID NO: 212323 - RNA, 1410 nt, Artificial Sequence; identical to SEQ ID NO: 210556
  derived and/or modified CDS sequence (opt5) from neuraminidase__InfluenzaA__ADW11155

SEQ ID NO: 212324 - RNA, 1410 nt, Artificial Sequence; identical to SEQ ID NO: 208810
  derived and/or modified CDS sequence (opt5) from neuraminidase__InfluenzaA__ADW23530

SEQ ID NO: 212325 - RNA, 1410 nt, Artificial Sequence
  derived and/or modified CDS sequence (opt5) from neuraminidase__InfluenzaA__ADW54483
augaaccccaaucagaagaucauuaccaucggcagcgugugcaugacaauugggauggccaaccugaugcuccaaaucggaaauauuaucuccaucuggauuucucacagcauccagcugggcaaccagucccagauugagacguguaaucaaucugucaucaccuacgaaaacaauacauggguuaaccagaccuaugugaauauuagcaacacaaauuucgcugccgggcaguccguggucucugugaaacuugcgggaaacagcucccugugcccuguuagcggcugggcuaucuacucuaaggacaauuccauuagaaucgggagcaaaggagauguguuugucauccgggagccguucauuucuuguagcccccucgaaugccgcaccuuuuuccugacacagggcgcccuucugaacgacaagcauuccaauggcaccaucaaagauagaucuccuuaucggacgcucauguccugucccauuggggaggugccuagccccuacaacucccgcuuugaaucuguugccuggagcgcuuccgccugccacgacggaaucaacuggcugaccauuggcaucagcgggccugauaauggagcuguggccguccugaaguauaacggcaucauuacagacaccaucaagucuuggagaaauaacauucuccggacacaagaguccgagugugcgugcgugaaugggagcuguuucaccaucaugacggauggaccgucugacggccaggccagcuacaaaauuuuucgcaucgaaaagggcaaaaucgugaaguccgucgagaugaacgcucccaauuaucauuacgaagagugcucuuguuacccugauagcuccgagauuacaugcguuugcagagacaacuggcacgggagcaaucggcccugggugucuuucaaccagaaucuggaauaucagaucggauacauuuguuccggcaucuuuggggauaacccucgccccaaugacaaaaccggaagcugcggcccggugucuuccaacggggccaauggagucaagggcuucagcuuuaaguauggcaacgggguguggauuggaagaacaaaauccaucucuagccggaagggcuucgagaugauuugggauccuaacggguggaccggaaccgacaauaacuuuuccaucaaacaagacaucguuggcauuaaugaauggucuggguacagcggcuccuucgugcagcaucccgagcuuacaggacuggauuguauccgcccuugcuucugggucgaacucauuagaggccggcccaaggagaacacgaucuggaccagcgggucuuccauuagcuuuuguggaguuaauucugacacagugggcugguccuggcccgauggggcugagcugccuuucaccaucgacaaauga

SEQ ID NO: 212326 - RNA, 1410 nt, Artificial Sequence
  derived and/or modified CDS sequence (opt5) from neuraminidase__InfluenzaA__ADW54494
augaaccccaaucagaagaucauuaccaucggcagcgugugcaugacaauugggauggccaaccugauccuccaaauuggaaauaucaucuccauuuggaucucucacagcauucagcugggcaaccagaaucagaucgagacguguaaccaauccgucauuaccuacgaaaauaacacauggguuaaucagaccuaugugaacaucucuaauacaaacuucgcugccgggcagagcguggucuccgugaaacuugcgggaaauucuagccugugcccuguuuccggcugggcuauuuacagcaaggacaacucuaucagaaucggguccaaaggagauguguuugucauucgggagccguucaucagcuguucuccccucgaaugccgcaccuuuuuccugacacagggcgcccuucugaaugacaagcauuccaacggcaccauuaaagauagaagcccuuaucggacgcucaugucuugucccaucggggaggugccuucccccuacaacagccgcuuugaauccguugccuggucugcuagcgccugccacgacggaauuaauuggcugaccaucggcaucuccgggccugauaacggagcuguggccguccugaaguauaauggcauuaucacagacaccauuaagagcuggagaaacaauauccuccggacacaagagucugagugugcgugcgugaacggguccuguuucaccgugaugacggauggaccgagcgacggccaggccucuuacaaaauuuuucgcaucgaaaagggcaaaaucgucaagagcguugagaugaaugcucccaacuaucauuacgaagagugcuccuguuacccugauucuagcgagauuacaugcgugugcagagacaauuggcacggguccaaccggcccugggugagcuucaaucagaaccuggaauaucgcaucggauacauuuguucuggcaucuuuggggauaauccuagacccaacgacaaaaccggauccugcggcccggucagcucuaauggggccaacggagugaagggcuucuccuuuaaguauggcaacgggguuuggauuggacggacaaaaagcaucuccucucgcaauggcuucgagaugauuugggauccuaacggguggaccggaaccgacaauaacuuuagcaucaagcaggacaucauuggcaucaaugaaugguccggguacucuggcagcuucgugcaacaucccgagcuuacaggacuggauuguauuagaccuugcuucugggucgaacucauccggggccgccccaaagagaacacgauuuggaccuccgggagcucuaucuccuuuuguggagugaauagcgacacaguuggcuggucuuggcccgauggggcugagcugccuuucaccaucgacaaguga

SEQ ID NO: 212327 - RNA, 1410 nt, Artificial Sequence
  derived and/or modified CDS sequence (opt5) from neuraminidase__InfluenzaA__ADW54514
augaaccccaaucagaagaucauuaccaucggcagcgugugcaugacaauugggauggccaaccugauccuccaaauuggaaauaucaucuccauuuggaucucucacagcauucagcugggcaaccagaaucagaucgagacguguaaccaauccgucauuaccuacgaaaauaacacauggguuaaucagaccuaugugaacaucucuaauacaaacuucgcugccgggcagagcguggucuccgugaaacuugcgggaaauucuagccugugcccuguuuccggcugggcuauuuacagcaaggacaacucuaucagaaucggguccaaaggagauguguuugucauucgggagccguucaucagcuguucuccccucgaaugccgcaccuuuuuccugacacagggcgcccuucugaaugacaagcauuccaacggcaccauuaaagauagaagcccuuaucggacgcucaugucuugucccaucggggaggugccuucccccuacaacagccgcuuugaauccguugccuggucugcuagcgccugccacgacggaauuaauuggcugaccaucggcaucuccgggccugauaacggagcuguggccguccugaaguauaauggcauuaucacagacaccauuaagagcuggaaaaacaauauccucagaacacaagagucugagugugcgugcgugaacggguccuguuucaccgugaugacggauggaccgagcgacggccaggccucuuacaagauuuuucggaucgaaaaaggcaagaucgucaaaagcguugagaugaaugcucccaacuaucauuacgaagagugcuccuguuacccugauucuagcgagauuacaugcgugugccgcgacaauuggcacggguccaacagacccugggugagcuucaaucagaaccuggaauaucggaucggauacauuuguucuggcaucuuuggggauaauccucgccccaacgacaagaccggauccugcggcccggucagcucuaauggggccaacggagugaagggcuucuccuuuaaauauggcaacgggguuuggauuggaagaacaaagagcaucuccucucggaauggcuucgagaugauuugggauccuaacggguggaccggaaccgacaauaacuuuagcaaaaagcaggacaucaucggcauuaaugaaugguccggguacucuggcagcuucgugcaacaucccgagcuuacaggacuggauuguauccgcccuugcuucugggucgaacucauuagaggccggcccaaagagaacacgaucuggaccuccgggagcucuauuuccuuuuguggagugaauagcgacacaguuggcuggucuuggcccgauggggcugagcugccuuucaccaucgacaaguga

SEQ ID NO: 212328 - RNA, 1410 nt, Artificial Sequence
  derived and/or modified CDS sequence (opt5) from neuraminidase__InfluenzaA__ADW54522
augaaccccaaucagaagaucauuaccaucggcagcgugugcaugauuaucgggauggccaaccugauucuccaaaucggaaauaucauuuccaucuggauuucucacagcauccagcugggcaaccagaaucagauugagacauguaaccaauccgucaucacguacgaaaauaacaccuggguuaaucagacauaugugaacauuucuaauaccaacuucgcugccgggcagagcguggucuccgugaaacuugcgggaaauucuagccugugcccuguuuccggcugggcuaucuacagcaaggacaacucuaucagaauuggguccaaaggagauguguuugucauccgggagccguucauuagcuguucuccccucgaaugccgcacauuuuuccugacccagggcgcccuucugaaugacaagcauuccaacggcacaaucaaagauagaagcccuuaucggacccucaugucuugucccauuggggaggugccuucccccuacaacagccgcuuugaauccguugccuggucugcuagcgccugccacgacggaaucaauuggcugacgaucggcauuuccgggccugauaacggagcuguggccguccugaaguauaauggcaucauuaccgacacaaucaagagcuggagaaacaaucggcuccgcacccaagagucugagugugcgugcgugaacggguccuguuucacagugaugaccgauggaccgagcgacggccaggccucuuacaaaauuuuuagaaucgaaaagggcaaaaucgucaagagcguugagaugaaugcucccaacuaucauuacgaagagugcuccuguuacccugauucuagcgagauuacgugcgugugccgggacaauuggcacggguccaaccgccccugggugagcuucaaucagaaccuggaauaucagaucggauacauuuguucuggcaucuuuggggauaauccuagacccaacgacaaaacaggauccugcggcccggucagcucuaauggggccaacggagugaagggcuucuccuuuaaguauggcaacgggguuuggauuggacggaccaaaagcaucuccucucgcaagggcuucgagaugauuugggauccuaauggguggacaggaaccgacaacaauuuuagcaucaaacaagacaucgugggcauuaacgaaugguccggguacucuggcagcuucguccagcaucccgagcuuaccggacuggauuguaucagaccuugcuucuggguggaacucauucggggccgccccaaggagaauacaaucuggacguccgggagcucuauuuccuuuuguggaguuaacagcgacaccgugggcuggucuuggcccgauggggcugagcugccuuucacaaucgacaaauga

SEQ ID NO: 212329 - RNA, 1410 nt, Artificial Sequence
  derived and/or modified CDS sequence (opt5) from neuraminidase__InfluenzaA__ADW65826
augaaccccaaucagaagaucauuaccaucggcagcgugugcaugacaauugggauggccaaccugauccuccaaauuggaaauaucaucuccauuuggaucucucacagcauucagcugggcaaccagucccagaucgagacguguaaucaaucugucauuaccuacgaaaacaauacauggguuaaccagaccuaugugaauaucagcaacacaaauuucgcugccgggcaguccguggucucugugaaacuugcgggaaacagcucccugugcccuguuagcggcugggcuauuuacucuaaggacaauuccaucagaaucgggagcaaaggagauguguuugucauucgggagccguucaucucuuguagcccccucgaaugccgcaccuuuuuccugacacagggcgcccuucugaacgacaagcauuccaauggcaccauuaaagauagaucuccuuaucggacgcucauguccugucccaucggggaggugccuagccccuacaacucccgcuuugaaucuguugccuggagcgcuuccgccugccacgacggaauuaacuggcugaccaucggcaucagcgggccugauaauggagcuguggccguccugaaguauaacggcauuaucacagacaccauuaagucuuggagaaauaacauccuccggacacaagaguccgagugugcgugcgugaaugggagcuguuucaccauuaugacggauggaccgucugacggccaggccagcuacaaaaucuuucgcaucgaaaagggcaaaauugugaaguccgucgagaugaacgcucccaauuaucauuacgaagagugcucuuguuacccugauagcuccgagaucacaugcguuugcagagacaacuggcacgggagcaaucggcccugggugucuuucaaccagaaucuggaauaucagauuggauacaucuguuccggcauuuuuggggauaacccucgccccaaugacaaaaccggaagcugcggcccggugucuuccaacggggccaauggagucaagggcuucagcuuuaaguauggcaacgggguguggaucggaagaacaaaauccauuucuagccggaagggcuucgagaugaucugggauccuaacggguggaccggaaccgacaauaacuuuuccaucaaacaagacauuguuggcaucaaugaauggucuggguacagcggcuccuucgugcagcaucccgagcuuacaggacuggauuguauucgcccuugcuucugggucgaacucaucagaggccggcccaaggagaacacgauuuggaccagcgggucuuccaucagcuuuuguggaguuaauucugacacagugggcugguccuggcccgauggggcugagcugccuuucaccaucgacaaauga

SEQ ID NO: 212330 - RNA, 1410 nt, Artificial Sequence; identical to SEQ ID NO: 208671
  derived and/or modified CDS sequence (opt5) from neuraminidase__InfluenzaA__ADW80519

SEQ ID NO: 212331 - RNA, 1410 nt, Artificial Sequence; identical to SEQ ID NO: 208671
  derived and/or modified CDS sequence (opt5) from neuraminidase__InfluenzaA__ADW82127

SEQ ID NO: 212332 - RNA, 1410 nt, Artificial Sequence; identical to SEQ ID NO: 208671
  derived and/or modified CDS sequence (opt5) from neuraminidase__InfluenzaA__ADW82138

SEQ ID NO: 212333 - RNA, 1410 nt, Artificial Sequence; identical to SEQ ID NO: 208671
  derived and/or modified CDS sequence (opt5) from neuraminidase__InfluenzaA__ADW82149

SEQ ID NO: 212334 - RNA, 1410 nt, Artificial Sequence; identical to SEQ ID NO: 208671
  derived and/or modified CDS sequence (opt5) from neuraminidase__InfluenzaA__ADW82158

SEQ ID NO: 212335 - RNA, 1410 nt, Artificial Sequence; identical to SEQ ID NO: 208671
  derived and/or modified CDS sequence (opt5) from neuraminidase__InfluenzaA__ADW82169

SEQ ID NO: 212336 - RNA, 1410 nt, Artificial Sequence; identical to SEQ ID NO: 208671
  derived and/or modified CDS sequence (opt5) from neuraminidase__InfluenzaA__ADW82180

SEQ ID NO: 212337 - RNA, 1410 nt, Artificial Sequence; identical to SEQ ID NO: 208810
  derived and/or modified CDS sequence (opt5) from neuraminidase__InfluenzaA__ADW82191

SEQ ID NO: 212338 - RNA, 1410 nt, Artificial Sequence; identical to SEQ ID NO: 208810
  derived and/or modified CDS sequence (opt5) from neuraminidase__InfluenzaA__ADW82201

SEQ ID NO: 212339 - RNA, 1410 nt, Artificial Sequence; identical to SEQ ID NO: 208810
  derived and/or modified CDS sequence (opt5) from neuraminidase__InfluenzaA__ADW82211

SEQ ID NO: 212340 - RNA, 1410 nt, Artificial Sequence; identical to SEQ ID NO: 208810
  derived and/or modified CDS sequence (opt5) from neuraminidase__InfluenzaA__ADW82221

SEQ ID NO: 212341 - RNA, 1410 nt, Artificial Sequence; identical to SEQ ID NO: 208810
  derived and/or modified CDS sequence (opt5) from neuraminidase__InfluenzaA__ADW82231

SEQ ID NO: 212342 - RNA, 1410 nt, Artificial Sequence; identical to SEQ ID NO: 208810
  derived and/or modified CDS sequence (opt5) from neuraminidase__InfluenzaA__ADW82241

SEQ ID NO: 212343 - RNA, 1410 nt, Artificial Sequence; identical to SEQ ID NO: 208810
  derived and/or modified CDS sequence (opt5) from neuraminidase__InfluenzaA__ADW82251

SEQ ID NO: 212344 - RNA, 1410 nt, Artificial Sequence; identical to SEQ ID NO: 208810
  derived and/or modified CDS sequence (opt5) from neuraminidase__InfluenzaA__ADW82261

SEQ ID NO: 212345 - RNA, 1410 nt, Artificial Sequence; identical to SEQ ID NO: 208810
  derived and/or modified CDS sequence (opt5) from neuraminidase__InfluenzaA__ADW82271

SEQ ID NO: 212346 - RNA, 1410 nt, Artificial Sequence; identical to SEQ ID NO: 212329
  derived and/or modified CDS sequence (opt5) from neuraminidase__InfluenzaA__ADW95306

SEQ ID NO: 212347 - RNA, 1410 nt, Artificial Sequence; identical to SEQ ID NO: 212329
  derived and/or modified CDS sequence (opt5) from neuraminidase__InfluenzaA__ADW95313

SEQ ID NO: 212348 - RNA, 1410 nt, Artificial Sequence; identical to SEQ ID NO: 212329
  derived and/or modified CDS sequence (opt5) from neuraminidase__InfluenzaA__ADW95320

SEQ ID NO: 212349 - RNA, 1410 nt, Artificial Sequence; identical to SEQ ID NO: 212329
  derived and/or modified CDS sequence (opt5) from neuraminidase__InfluenzaA__ADW95327

SEQ ID NO: 212350 - RNA, 1410 nt, Artificial Sequence
  derived and/or modified CDS sequence (opt5) from neuraminidase__InfluenzaA__ADW95333
augaaccccaaucagaagaucauuaccaucggcagcgugugcaugacaauugggauggccaaccugauccuccaaauuggaaauaucaucuccauuuggaucucucacagcauucagcugggcaaccagucccagaucgagacguguaaucaaucugucauuaccuacgaaaacaauacauggguuaaccagaccuaugugaauaucagcaacacaaauuucgcugccgggcaguccguggucucugugaaacuugcgggaaacagcucccugugcccuguuagcggcugggcuauuuacucuaaggacaauuccaucagaaucgggagcaaaggagauguguuugucauucgggagccguucaucucuuguagcccccucgaaugccgcaccuuuuuccugacacagggcgcccuucugaacgacaagcauuccaauggcaccauuaaagauagaucuccuuaucggacgcucauguccugucccaucggggaggugccuagccccuacaacucccgcuuugaaucuguugccuggagcgcuuccgccugccacgacggaauuaacuggcugaccaucggcaucagcgggccugauaauggagcuguggccguccugaaguauaacggcauuaucacagacaccauuaagucuuggagaaauaacauccuccggacacaagaguccgagugugcgugcgugaaugggagcuguuucaccauuaugacggauggaccgucugacggccaggccagcuacaaaaucuuucgcaucgaaaagggcaaaauugugaaguccgucgagaugaacgcucccaauuaucauuacgaagagugcucuuguuacccugauagcuccgagaucacaugcguuugcagagacaacuggcacgggagcaaucggcccugggugucuuucaaccagaaucuggaauaucagauuggauacaucuguuccggcauuuuuggggauaacccucgccccaaugacaaaaccggaagcugcggcccggugucuuccaacggggccaauggagucaagggcuucagcuuuaaguauggcaacgggguguggaucggauccgcuaaaucuauuagcuccagaaaggccuucgagaugaucugggauccuaacggcuggacagggaccgacaauaacuuuucuaucaaacaauacauuguuggaaucaaugaauggagcggcuauuccgggagcuucguggagcaucccgaacuuaccggccuggacuguauucggccuugcuucugggucgagcucauccgcggaagacccaaggagaacacaauuuggacgucuggcuccagcaucucuuuuugugggguuaauuccgauaccgugggauggagcuggcccgacggcgcggaacugccuuucacaaucgauaaauga

SEQ ID NO: 212351 - RNA, 1410 nt, Artificial Sequence
  derived and/or modified CDS sequence (opt5) from neuraminidase__InfluenzaA__ADX20813
augaaccccaaucagaagaucauuaccaucggcagcgugugcaugacaauugggauggccaaccugauccuccaaauuggaaauaucaucuccauuuggaucucucacagcauucagcugggcaaccagaaucagaucgagacguguaaccaauccgucauuaccuacgaaaauaacacauggguuaaucagaccuaugugaacaucucuaauacaaacuucgcugccgggcagagcguggucuccgugaaacuugcgggaaauucuagccugugcccuguuuccggcugggcuauuuacagcaaggacaacucuaucagaaucggguccaaaggagauguguuugucauucgggagccguucaucagcuguucuccccucgaaugccgcaccuuuuuccugacacagggcgcccuucugaaugacaagcauuccaacggcaccauuaaagauagaagcccuuaucggacgcucaugucuugucccaucggggaggugccuucccccuacaacagccgcuuugaacugguugccugguccgcuucugccugccacgacggaauuaauuggcugaccaucggcaucagcgggccugauaacggagcuguggccguccucaaguauaauggcauuaucacagacaccauuaaguccuggagaaacaauauccugcggacacaagagagcgagugugcgugcgugaacgggucuuguuucaccgugaugacggauggaccguccgacggccagacaagcuacaaaauuuuucgcaucgaaaagggcaaaaucgucaagucuguugagaugaaugcccccaacuauuacuacgaagagugcagcuguuauccugauuccucugagauuaccugcgugugcagagacaauuggcaugggagcaaccggcccuggguguccuucaaucagaaccuugaauaccagaucggauauauuuguagcggcaucuuuggggauaauccucgccccaacgacaaaacaggaucuugcggcccggucuccagcaauggggcuaacggagugaagggcuucucuuuuaaguacggcaacgggguuuggauuggaagaaccaaauccaucagcucccggaagggcuucgagaugauuugggauccuaauggguggaccggaacagacaacaauuuuucuaucaaacaagacaucgugggcauuaacgaauggagcggguauuccggcucuuucguccagcaccccgagcugacgggacucgauuguauccgcccuugcuucuggguggaacugauuagaggccggcccaaggagaauaccaucuggacaagcggguccagcauuucuuuuuguggaguuaacuccgacaccgugggcuggagcuggcccgauggggccgagcuuccuuucacaaucgacaaauga

SEQ ID NO: 212352 - RNA, 1410 nt, Artificial Sequence
  derived and/or modified CDS sequence (opt5) from neuraminidase__InfluenzaA__ADX20814
augaaccccaaucagaagaucauuaccaucggcagcgugugcaugacaauugggauggccaaccugauccuccaaauuggaaauaucaucuccauuuggaucucucacagcauucagcugggcaaccagucccagaucgagacguguaaucaaucugucauuaccuacgaaaacaauacauggguuaaccagaccuaugugaauaucagcaacacaaauuucgcugccgggcaguccguggucucugugaaacuugcgggaaacagcucccugugcccuguuagcggcugggcuauuuacucuaaggacaauuccaucagaaucgggagcaaaggagauguguuugucauucgggagccguucaucucuuguagcccccucgaaugccgcaccuuuuuccugacacagggcgcccuucugaacgacaagcauuccaauggcaccauuaaagauagaucuccuuaucggacgcucauguccugucccaucggggaggugccuagccccuacaacucccgcuuugaaucuguugccuggagcgcuuccgccugccacgacggaauuaacuggcugaccaucggcaucagcgggccugauaauggagcuguggccguccugaaguauaacggcauuaucacagacaccauuaagucuuggagaaauaacauccuccggacacaagaguccgagugugcgugcgugaaugggagcuguuucaccauuaugacggauggaccgucugacggccaggccagcuacaaaaucuuucgcaucgaaaagggcaaaauugugaaguccgucgagaugaacgcucccaauuauuacuacgaagagugcucuuguuauccugauagcuccgagaucacaugcguuugcagagacaacuggcaugggagcaaucggcccugggugucuuucaaccagaaucuggaauaccagauuggauauaucuguuccggcauuuuuggggauaacccucgccccaaugacaaaaccggaagcugcggcccggugucuuccaacggggccaauggagucaagggcuucagcuuuaaguacggcaacgggguguggaucggaagaacaaaauccauuucuagccggaagggcuucgagaugaucugggauccuaacggguggaccggaaccgacaauaacuuuuccaucaaacaagacauuguuggcaucaaugaauggucuggguauagcggcuccuucgugcagcaccccgagcuuacaggacuggauuguauucgcccuugcuucugggucgaacucaucagaggccggcccaaggagaacacgauuuggaccagcgggucuuccaucagcuuuuguggaguuaauucugacacagugggcugguccuggcccgauggggcugagcugccuuucaccaucgacaaauga

SEQ ID NO: 212353 - RNA, 1410 nt, Artificial Sequence; identical to SEQ ID NO: 208671
  derived and/or modified CDS sequence (opt5) from neuraminidase__InfluenzaA__ADX21091

SEQ ID NO: 212354 - RNA, 1410 nt, Artificial Sequence; identical to SEQ ID NO: 208810
  derived and/or modified CDS sequence (opt5) from neuraminidase__InfluenzaA__ADX21101

SEQ ID NO: 212355 - RNA, 1410 nt, Artificial Sequence; identical to SEQ ID NO: 209677
  derived and/or modified CDS sequence (opt5) from neuraminidase__InfluenzaA__ADX36112

SEQ ID NO: 212356 - RNA, 1410 nt, Artificial Sequence
  derived and/or modified CDS sequence (opt5) from neuraminidase__InfluenzaA__ADX87386
augaaccccaaucagagaaucauuaccaucggcagcgugucccugacaauuucuacgaucugcuucuuuaugcaaauugccauccucaucaccacagucacccugcacuucaagcaguacgaguuuaacagcccuccgaauaaccagguuaugcuuugugaacccacaauuaucgagcggaauauuaccgaaaucguguaucugacaaacaccacgauugagaaagaaaucugcccuaagcucgcugaguaccgcaauugguccaaaccccagugugacauuaccggguucgccccuuuuucuaaggauaacagcaucagacuguccgcgggaggcgacaucugggugacacgggagcccuaugucucuugcgauccugacaaauguuaccaauucgcucuugggcagggaaccacacugaauaacgugcauagcaauaacaccguucgcgauagaacgccguaucggacacuccugaugaaugaacugggcgugcccuuucaccucgggaccaagcaggucugcauugccugguccucuagcuccugucaugacggaaaggccuggcugcacgugugcaucacaggcgaugacaaaaacgcuaccgccagcuucauuuacaauggccgccuuguugauucuguggucuccuggagcaaggagauccugagaacccaggaaucugagugugugugcauuaacgggacauguacgguggucaugaccgacggauccgcuagcggcaaagccgauacaaagauccucuuuaucgaggaagggaaaauuguucauaccuccacacugucuggaagcgcgcaacacguggaggaaugcuccugcuauccucgguaccccggcgugcgcugugucugcagagacaacuggaaggggagcaaucggccuaucguggauauuaacaucaaggaccacucuauuguuuccagcuacguguguucuggacuugucggcgacacgccccgcaaaaaugauagcuccucuagcucccauugccuggacccgaacaaugaggaaggcgggcacggagugaagggcugggccuucgaugacgggaacgauguuuggaugggaagaaccaucagcgagaaaucucggcucggcuaugagacauuuaaggugaucgaagggugguccaauccuaaaagcaagcugcagauuaaccgccaggucaucguggacagaggaaaucggucuggcuacuccggcauuuucagcgucgaggggaaauccuguaucaacagaugcuuuuauguggaacugauucgcggacggaaggaggaaaccgagguucucuggaccucuaauagcaucguggucuucuguggcacauccgggaccuacggaacaggcucuuggcccgauggggcugacauuaaccugaugccuguguga

SEQ ID NO: 212357 - RNA, 1410 nt, Artificial Sequence
  derived and/or modified CDS sequence (opt5) from neuraminidase__InfluenzaA__ADX96270
augaaccccaaucagaagaucauuaccaucggcagcgugugcaugacaauugggauggccaaccugauccuccaaauuggaaauaucaucuccauuuggaucucucacagcauucagcugggcaaccagaaucagaucgagacguguaaccaauccauuaucaccuacgaaaauaacacaugggucaaucagaccuauguuaacauuucuaauacaaacuucgcugccgggcagagcguggcguccgugaaacuugcuggaaauucuagccugugcccugucuccggcugggccaucuacagcaaggacaacucugugagaaucggguccaaaggagauguuuuugugauucgggagccguucaucagcuguucuccccucgaaugccgcaccuuuuuccugacacagggcgcccuucugaaugacaagcauuccaacggcaccauuaaagauagaagcccuuaucggacgcucaugucuugucccaucggggaggucccuucccccuacaacagccgcuuugaauccguggcuuggucugccagcgcuugccacgacggaauuaauuggcugaccaucggcaucuccgggccugauaacggagccguugcggugcugaaguauaauggcauuaucacagacaccauuaagagcuggagaaacaauauccuccggacacaagagucugagugugccugcgucaacggguccuguuucaccgugaugacggauggaccgagcgacggccaggcuucuuacaaaauuuuucgcaucgaaaagggcaaaaucgucaagagcguggagaugaaugcccccaacuaucauuacgaagagugcuccuguuacccugauucuagcgagauuacaugcguuugcagagacaauuggcacggguccaaccggcccugggugagcuucaaucagaaccuggaauaucagaucggauacauuuguucuggcaucuuuggggauaauccucgccccaacgacaaaaccggauccugcggcccggugagcucuaauggggcuaacggagucaagggcuucuccuuuaaguauggcaacgggguguggauuggaagaacaaaaagcaucuccucucggaauggcuucgagaugauuugggauccuaacggguggaccggaaccgacaauaacuuuagcaucaagcaagacaucguuggcauuaaugaaugguccggguacucuggcagcuucgugcagcaucccgagcuuacaggacuggauuguauccgcccuugcuucugggucgaacucauuagaggccggcccaaagagaacacgaucuggaccuccgggagcucuauuuccuuuuguggagugaauagcgacacaguuggcuggucuuggcccgauggggccgagcugccuuucaccaucgacaaguga

SEQ ID NO: 212358 - RNA, 1410 nt, Artificial Sequence; identical to SEQ ID NO: 212357
  derived and/or modified CDS sequence (opt5) from neuraminidase__InfluenzaA__ADX96280

SEQ ID NO: 212359 - RNA, 1410 nt, Artificial Sequence; identical to SEQ ID NO: 209393
  derived and/or modified CDS sequence (opt5) from neuraminidase__InfluenzaA__ADX96290

SEQ ID NO: 212360 - RNA, 1410 nt, Artificial Sequence; identical to SEQ ID NO: 208810
  derived and/or modified CDS sequence (opt5) from neuraminidase__InfluenzaA__ADX96300

SEQ ID NO: 212361 - RNA, 1410 nt, Artificial Sequence; identical to SEQ ID NO: 208810
  derived and/or modified CDS sequence (opt5) from neuraminidase__InfluenzaA__ADX96310

SEQ ID NO: 212362 - RNA, 1410 nt, Artificial Sequence
  derived and/or modified CDS sequence (opt5) from neuraminidase__InfluenzaA__ADX96330
augaaccccaaucagaagaucauuaccaucggcagcgugugcaugacaauugggauggccaaccugauccuccaaauuggaaauggcaucuccaucuggauuucucacagcauccagcuggggaaccagaaucagauugagacguguaaccaauccgucaucaccuacgaaaauaacacauggguuaaucagaccuaugugaacauuucuaauacaaacuucgcugccggacagagcguggucuccgugaaacuugcgggcaauucuagccugugcccuguuuccgggugggcuaucuacagcaaggacaacucuauuagaaucggauccaaaggcgauguguuugucauccgggagccguucauuagcuguucuccccucgaaugccgcaccuuuuuccugacacagggcgcccuucugaaugacaagcauuccaacgggaccaucaaagauagaagcccuuaucggacgcucaugucuugucccauuggagaggugccuucccccuacaacagccgcuuugaauccguugccuggucugcuagcgccugccacgacggcaucaauuggcugaccauugggaucuccggaccugauaacggcgcuguggccguccugaaguauaaugggaucauuacagacaccaucaagagcuggagaaacaauauucuccggacacaagagucugagugugcgugcgugaacggauccuguuucaccgugaugacggauggcccgagcgacggccaggccucuuacaaaaucuuucgcauugaaaaggggaaaaucgucaagagcguugagaugaaugcucccaacuaucauuacgaagagugcuccuguuacccugauucuaaugagaucacaugcgugugcagagacaacuggcacggaagcaaucggcccuggguguccuucaaccagaaucuggaauaucagauuggcuacaucuguagcgggauuuuuggagauaacccucgccccaaugacaaaaccggcucuugcgggccggucuccagcaacggagccaacggcgugaagggcuucucuuuuaaguaugggaauggaguuuggaucggcagaacaaaauccauuagcucccggaacggguucgagaugaucugggauccuaauggauggaccggcaccgacaacaauuuuucuauuaagcaagacaucguggggaucaacgaauggagcggcuacuccggaucuuucguccagcaucccgagcuuacaggccuggauuguauucgcccuugcuucuggguggaacucaucagagggcggcccaaagagaauacgauuuggaccagcggauccagcaucucuuuuuguggcguuaacuccgacacagugggguggagcuggcccgauggagcugagcugccuuucaccauugacaaguga

SEQ ID NO: 212363 - RNA, 1410 nt, Artificial Sequence; identical to SEQ ID NO: 208810
  derived and/or modified CDS sequence (opt5) from neuraminidase__InfluenzaA__ADX96339

SEQ ID NO: 212364 - RNA, 1410 nt, Artificial Sequence
  derived and/or modified CDS sequence (opt5) from neuraminidase__InfluenzaA__ADX96349
augaaccccaaucagaagaucauuaccaucggcagcgugugcaugacaauugggauggccaaccugauccuccaaauuggaaauaucaucuccauuuggaucucucacagcauucagcugggcaaccagaaucagaucgagacguguaaccaauccgucauuaccuacgaaaauaacacauggguuaaucagaccuaugugaacaucucuaauacaaacuucgcugccgggcagagcguggucuccgugaaacuugcgggaaauucuagccugugcccuguuuccggcugggcuauuuacagcaaggacaacucuaucagaaucggguccaaaggagauguguuugucauucgggagccguucaucagcuguucuccccucgaaugccgcaccuuuuuccugacacagggcgcccuucugaaugacaagcauuccaacggcaccauuaaagauagaagcccuuaucggacgcucaugucuugucccaucggggaggugccuucccccuacaacagccgcuuugaauccguugccuggucugcuagcgccugccacgacggaauuaauuggcugaccaucggcaucuccgggccugauaacggagcuguggccguccugaaguauaauggcauuaucacagacaccauuaagagcuggagaaacaauauccuccggacacaagagucugagugugcgugcgugaacggguccuguuucaccgugaugacggauggaccgagcgacggccaggccucuuacaaaauuuuucgcaucgaaaagggcaaaaucgucaagagcguugagaugaaugcucccaacuaucauuacgaagagugcuccuguuacccugauucuaaugagauuacaugcgugugcagagacaacuggcacgggagcaaucggcccuggguguccuucaaccagaaucuggaauaucagaucggauacauuuguagcggcaucuuuggggauaacccucgccccaaugacaaaaccggaucuugcggcccggucuccagcaacggggccaacggagugaagggcuucucuuuuaaguauggcaaugggguuuggauuggaagaacaaaauccaucagcucccggaacggcuucgagaugauuugggauccuaauggguggaccggaaccgacaacaauuuuucuaucaagcaagacaucgugggcauuaacgaauggagcggguacuccggcucuuucguccagcaucccgagcuuacaggacuggauuguauccgcccuugcuucuggguggaacucauuagaggccggcccaaagagaauacgaucuggaccagcggguccagcauuucuuuuuguggaguuaacuccgacacagugggcuggagcuggcccgauggggcugagcugccuuucaccaucgacaaguga

SEQ ID NO: 212365 - RNA, 1410 nt, Artificial Sequence; identical to SEQ ID NO: 208810
  derived and/or modified CDS sequence (opt5) from neuraminidase__InfluenzaA__ADX96359

SEQ ID NO: 212366 - RNA, 1410 nt, Artificial Sequence; identical to SEQ ID NO: 208810
  derived and/or modified CDS sequence (opt5) from neuraminidase__InfluenzaA__ADX96369

SEQ ID NO: 212367 - RNA, 1410 nt, Artificial Sequence
  derived and/or modified CDS sequence (opt5) from neuraminidase__InfluenzaA__ADX96380
augaaccccaaucagaagaucauuaccaucggcagcgugugcaugacaauugggauggccaaccugauccuccaaauuggaaauaucaucuccauuuggccuguccacucuauccagcugggcaaccagaaucagauugagacguguaaccaaagcguuaucaccuacgaaaauaacacaugggugaaucagaccuaugugaacauuuccaauacaaacuucgcugccgggcagucugucgugagcaugaaacuugcgggaaauuccucucugugcccgguuggcgggugggcuaucuacagcaaggacaacuccgugagaauuggaagcaaaggcgaugucuuugugauccgggagcccuucaucucuuguuccccucucgaaugccgcaccuuuuuccugacacagggcgcccuucugaaugacaagcauagcaacgggaccauuaaagauagaucucccuaucggacgcucauguccuguccuaucggagagguucccagcccuuacaacucucgcuuugaauccguggccuggagcgcuuccgccugccacgacggcauuaauuggcugaccaucgggauuucuggaccggauaacggcgcugucgccgugcugaaguauaaugggaucaucacagacaccauuaagagcuggagaaacaauauccuccggacacaagaguccgagugugcgugcgugaacggaagcuguuucaccgucaugacggauggccccucugacggccaggccuccuacaaaauuuuucgcaucgaaaaggggaaaauuguugagagcguggaaaugaaugcuccuaacuaucauuacgaggagugcucuuguuaccccgauagcuccgaaaucacaugcgugugcagagacaauuggcacggaucuaaccggccuugggucagcuucaaucagaaccuggaguaucagaucggcuacauuuguuccgggaucuuuggagauaauccccgcccgaacgacaagaccggcagcugcgggccugugucuuccaauggagccaacggcguuaaaggcuucagcuuuaaguaugggaacggaguguggauuggcagaacaaagucuaucuccagccggaauggguucgaaaugauuugggaucccaacggauggaccggcaccgacaauaacuuuuccaucaaacaagacauugucgggaucaaugaguggucuggcuacagcggauccuucgugcagcauccugaacuuacaggccuggauuguauccgccccugcuucuggguugagcucauuagagggcggcccaaggagaacacgaucuggaccucuggaagcuccauuagcuuuuguggcgucaauucugacacaguggggugguccuggccugauggagcugaacugccguucaccaucgacaaauga

SEQ ID NO: 212368 - RNA, 1410 nt, Artificial Sequence
  derived and/or modified CDS sequence (opt5) from neuraminidase__InfluenzaA__ADX96390
augaaccccaaucagaagaucauuaccaucggcagcgugugcaugacaauugggauggccaaccugauccuccaaauuggaaauaucaucuccauuuggcugucucacagcauccagcuuggcaaccagaaucagauugagacguguaaccaauccgucaucaccuacgaaaauaacacauggguuaaucagaccuaugugaacauuucuaauacaaacuucgcugccgggcagagcguggucuccgugaaacuggcgggaaauucuagccucugcccuguuuccggcugggcuaucuacagcaaggacaacucuauuagaaucggguccaaaggagauguguuugucauccgggagccguucauuagcuguucuccccuggaaugccgcaccuuuuuccuuacacagggcgcccugcucaaugacaagcauuccaacggcaccaucaaagauagaagcccuuaucggacgcugaugucuugucccauuggggaggugccuucccccuacaacagccgcuuugaauccguugccuggucugcuagcgccugccacgacggaaucaauuggcugaccauuggcaucuccgggccugauaacggagcuguggccguccucaaguauaauggcaucauuacagacaccaucaagagcuggagaaacaauauucugcggacacaagagucugagugugcgugcgugaacggguccuguuucaccgugaugacggauggaccgagcgacggccaggccucuuacaaaaucuuucgcauugaaaagggcaaaaucgucaagagcguugagaugaaugcucccaacuaucauuacgaagagugcuccuguuacccugauucuagcgagaucacaugcgugugcagagacaauuggcacggguccaaccggcccugggugagcuucaaucagaaccuugaauaucagauuggauacaucuguucuggcauuuuuggggauaauccucgccccaacgacaaaaccggauccugcggcccggucagcucuaauggggccaacggagugaagggcuucuccuuuaaguauggcaacgggguuuggaucggaagaacaaaaagcauuuccucucggaauggcuucgagaugaucugggauccuaacggguggaccggaaccgacaauaacuuuagcauuaagcaagacaucgugggcaucaaugaaugguccggguacucuggcagcuucguccagcaucccgagcugacaggacucgauuguauucgcccuugcuucuggguggaacugaucagaggccggcccaaagagaacacgauuuggaccuccgggagcucuaucuccuuuuguggaguuaauagcgacacagugggcuggucuuggcccgauggggcugagcuuccuuucaccauugacaaguga

SEQ ID NO: 212369 - RNA, 1410 nt, Artificial Sequence; identical to SEQ ID NO: 208810
  derived and/or modified CDS sequence (opt5) from neuraminidase__InfluenzaA__ADX96400

SEQ ID NO: 212370 - RNA, 1410 nt, Artificial Sequence; identical to SEQ ID NO: 208810
  derived and/or modified CDS sequence (opt5) from neuraminidase__InfluenzaA__ADX96410

SEQ ID NO: 212371 - RNA, 1410 nt, Artificial Sequence; identical to SEQ ID NO: 208810
  derived and/or modified CDS sequence (opt5) from neuraminidase__InfluenzaA__ADX96419

SEQ ID NO: 212372 - RNA, 1410 nt, Artificial Sequence
  derived and/or modified CDS sequence (opt5) from neuraminidase__InfluenzaA__ADX96429
augaaccccaaucagaagaucauuaccaucggcagcgugugcaugacaauugggauggccaaccugauccuccaaauuggaaauaucaucuccauuuggaucucucacagcauucagcugggcaaccagaaucagaucgagacguguaaccaauccgucauuaccuacgaaaauaacacauggguuaaucagaccuaugugaacaucucuaauacaaacuucgcugccgggcagagcguggucuccgugaaacuugcgggaaauucuagccugugcccuguuuccggcugggcuauuuacagcaaggacaacucugugagaaucggguccaaaggagaugucuuugugauccgggagccguucauuagcuguucuccccucgaaugccgcaccuuuuuccugacacagggcgcccuucugaaugacaagcauuccaacggcaccaucaaagauagaagcccuuaucggacgcucaugucuugucccauuggggagguuccuucccccuacaacagccgcuuugaauccguggccuggucugcuagcgccugccacgacggaaucaauuggcugaccauuggcaucuccgggccugauaacggagcugucgccgugcugaaguauaauggcaucauuacagacaccaucaagagcuggagaaacaauauucuccggacacaagagucugagugugcgugcgugaacggguccuguuucaccgucaugacggauggaccgagcaauggccaggccucuuacaaaaucuuucgcauugaaaagggcaaaaucguuaagagcguggagaugaacgcucccaauuaucauuacgaagagugcuccuguuacccugacucuagcgagaucacaugcgugugcagagauaacuggcacggguccaaucggcccugggucagcuucaaccagaaucuggaauaucagauuggauacaucuguucuggcauuuuuggggacaacccucgccccaaugauaaaaccggauccugcggcccggugagcucuaacggggccaacggaguuaagggcuucuccuuuaaguauggcaaugggguguggaucggaagaacaaaaagcauuuccucucggaacggcuucgagaugaucugggacccuaauggguggaccggaaccgauaacaauuuuagcauuaagcaagacaucguccgcaucaacgaaugguccggcuacucugggagcuucgugcagcaucccgagcuuacaggccuggacuguauuagaccuugcuucuggguugaacucauccggggacgccccaaagagaauacgauuuggaccuccggcagcucuaucuccuuuuguggggugaacagcgauacagucggauggucuuggcccgacggcgcugagcugccuuucaccauugauaaguga

SEQ ID NO: 212373 - RNA, 1410 nt, Artificial Sequence; identical to SEQ ID NO: 208810
  derived and/or modified CDS sequence (opt5) from neuraminidase__InfluenzaA__ADX96449

SEQ ID NO: 212374 - RNA, 1410 nt, Artificial Sequence; identical to SEQ ID NO: 208810
  derived and/or modified CDS sequence (opt5) from neuraminidase__InfluenzaA__ADX96469

SEQ ID NO: 212375 - RNA, 1410 nt, Artificial Sequence; identical to SEQ ID NO: 208810
  derived and/or modified CDS sequence (opt5) from neuraminidase__InfluenzaA__ADX96489

SEQ ID NO: 212376 - RNA, 1410 nt, Artificial Sequence; identical to SEQ ID NO: 208810
  derived and/or modified CDS sequence (opt5) from neuraminidase__InfluenzaA__ADX96499

SEQ ID NO: 212377 - RNA, 1410 nt, Artificial Sequence
  derived and/or modified CDS sequence (opt5) from neuraminidase__InfluenzaA__ADX96509
augaaccccaaucagaagaucauuaccaucggcagcgugugcaugacaauugggauggccaaccugauccuccaaauuggaaauaucaucuccauuuggaucucucacagcauucagcugggcaaccagaaucagaucgagacguguaaccaauccgucauuaccuacgaaaauaacacauggguuaaucagaccuaugugaacaucucuaauacaaacuucgcugccgggcagagcguggucuccgugaaacuugcgggaaauucuagccugugcccuguuuccggcugggcuauuuacagcaaggacaacucuaucagaaucggguccaauggagauguguuugucauucgggagccguucaucagcuguucuccccucgaaugccgcaccuuuuuccugacacagggcgcccuucugaacgacaaacauuccaacggcaccauuaaggauagaagcccuuaucggacgcucaugucuugucccaucggggaggugccuucccccuacaauagccgcuuugaauccguugccuggucugcuagcgccugccacgacggaauuaacuggcugaccaucggcaucuccgggccugauaauggagcuguggccguccugaaauauaacggcauuaucacagacaccauuaagagcuggagaaauaacauccuccggacacaagagucugagugugcgugcgugaauggguccuguuucaccgugaugacggauggaccgagcgacggccaggccucuuacaagauuuuucgcaucgaaaaaggcaagaucgucaaaagcguugagaugaacgcucccaauuaucauuacgaagagugcuccuguuacccugauucuagcgagauuacaugcgugugcagagacaacuggcacggguccaaucggcccugggugagcuucaaccagaaucuggaauaucagaucggauacauuuguucuggcaucuuuggggauaacccucgccccaaugacaagaccggauccugcggcccggucagcucuaacggggccaacggagugaaaggcuucuccuuuaaguauggcaaugggguuuggauuggaagaacaaagagcaucuccucucggaacggcuucgagaugauuugggauccuaauggguggaccggaaccgacaacaauuuuagcaucaaacaagacaucgugggcauuaacgaaugguccggguacucuggcagcuucguccagcaucccgagcuuacaggacuggauuguauccgcccuugcuucuggguggaacucauuagaggccggcccaaggagaauacgaucuggaccuccgggagcucuauuuccuuuuguggaguuaacagcgacacagugggcuggucuuggcccgauggggcugagcugccuuucaccaucgacaaauga

SEQ ID NO: 212378 - RNA, 1410 nt, Artificial Sequence; identical to SEQ ID NO: 208810
  derived and/or modified CDS sequence (opt5) from neuraminidase__InfluenzaA__ADX96519

SEQ ID NO: 212379 - RNA, 1410 nt, Artificial Sequence; identical to SEQ ID NO: 208810
  derived and/or modified CDS sequence (opt5) from neuraminidase__InfluenzaA__ADX96529

SEQ ID NO: 212380 - RNA, 1410 nt, Artificial Sequence; identical to SEQ ID NO: 208810
  derived and/or modified CDS sequence (opt5) from neuraminidase__InfluenzaA__ADX96539

SEQ ID NO: 212381 - RNA, 1410 nt, Artificial Sequence; identical to SEQ ID NO: 208810
  derived and/or modified CDS sequence (opt5) from neuraminidase__InfluenzaA__ADX96549

SEQ ID NO: 212382 - RNA, 1410 nt, Artificial Sequence; identical to SEQ ID NO: 208810
  derived and/or modified CDS sequence (opt5) from neuraminidase__InfluenzaA__ADX96559

SEQ ID NO: 212383 - RNA, 1410 nt, Artificial Sequence; identical to SEQ ID NO: 208810
  derived and/or modified CDS sequence (opt5) from neuraminidase__InfluenzaA__ADX96569

SEQ ID NO: 212384 - RNA, 1410 nt, Artificial Sequence; identical to SEQ ID NO: 208800
  derived and/or modified CDS sequence (opt5) from neuraminidase__InfluenzaA__ADX96579

SEQ ID NO: 212385 - RNA, 1410 nt, Artificial Sequence; identical to SEQ ID NO: 208810
  derived and/or modified CDS sequence (opt5) from neuraminidase__InfluenzaA__ADX96589

SEQ ID NO: 212386 - RNA, 1410 nt, Artificial Sequence; identical to SEQ ID NO: 208810
  derived and/or modified CDS sequence (opt5) from neuraminidase__InfluenzaA__ADX96599

SEQ ID NO: 212387 - RNA, 1410 nt, Artificial Sequence
  derived and/or modified CDS sequence (opt5) from neuraminidase__InfluenzaA__ADX96609
augaaccccaaucagaagaucauuaccaucggcagcgugugcaugacaauugggauggccaaccugauccuccaaauuggaaauaucaucuccauuuggaucucucacagcauucagcugggcaaccagaaucagaucgagacguguaaccaauccgucauuaccuacgaaaauaacacauggguuaaucagaccuaugugaacaucucuaauacaaacuucgcugccgggcagagcguggucuccgugaaacuugcgggaaauucuagccugugcccuguuggcgggugggcuauuuacuccaaggacaacagcgugagaaucggaucuaaaggcgaugucuuugugauccgggagccguucauuuccuguagcccccucgaaugccgcaccuuuuuccugacacagggcgcccuucugaaugacaagcauucuaacgggaccaucaaagauagauccccuuaucggacgcucaugagcugucccauuggagagguuccuucucccuacaacucccgcuuugaaagcguggccugguccgcuucugccugccacgacggcaucaauuggcugaccauugggaucagcggaccugauaacggcgcugucgccgugcugaaguauaaugggaucauuacagacaccaucaaguccuggagaaacaauauucuccggacacaagagagcgagugugcgugcgugaacggaucuuguuucaccgucaugacggauggcccguccaauggccaggccagcuacaaaaucuuucgcauugaaaaggggaaaaucguuaagucuguggagaugaacgcucccaauuaucauuacgaagagugcagcuguuacccugacuccucugagaucacaugcgugugcagagauaacuggcacggaagcaaucggcccugggucuccuucaaccagaaucuggaauaucagauuggcuacaucuguagcgggauuuuuggagacaacccucgccccaaugauaaaaccggcucuugcgggccgguguccagcaacggagccaacggcguuaagggcuucucuuuuaaguauggggacggaguguggaucggcagaacaaaauccauuagcucccggaauggguucgagaugaucugggauccuaacggauggaccggcaccgacaauaacuuuucuauuaagcaagacaucgucgggaucaaugaauggagcggcuacuccggaucuuucgugcagcaucccgagcuuacaggccuggauuguauucgcccuugcuucuggguugaacucaucagagggcggcccaaagagaacacgauuuggaccagcggauccagcaucucuuuuuguggcgucaauuccgacacagugggguggagcuggcccgauggagcugagcugccuuucaccauugacaaguga

SEQ ID NO: 212388 - RNA, 1410 nt, Artificial Sequence; identical to SEQ ID NO: 208800
  derived and/or modified CDS sequence (opt5) from neuraminidase__InfluenzaA__ADX96619

SEQ ID NO: 212389 - RNA, 1410 nt, Artificial Sequence; identical to SEQ ID NO: 208810
  derived and/or modified CDS sequence (opt5) from neuraminidase__InfluenzaA__ADX96629

SEQ ID NO: 212390 - RNA, 1410 nt, Artificial Sequence; identical to SEQ ID NO: 208810
  derived and/or modified CDS sequence (opt5) from neuraminidase__InfluenzaA__ADX96639

SEQ ID NO: 212391 - RNA, 1410 nt, Artificial Sequence; identical to SEQ ID NO: 208810
  derived and/or modified CDS sequence (opt5) from neuraminidase__InfluenzaA__ADX96649

SEQ ID NO: 212392 - RNA, 1410 nt, Artificial Sequence; identical to SEQ ID NO: 208800
  derived and/or modified CDS sequence (opt5) from neuraminidase__InfluenzaA__ADX96659

SEQ ID NO: 212393 - RNA, 1410 nt, Artificial Sequence; identical to SEQ ID NO: 208810
  derived and/or modified CDS sequence (opt5) from neuraminidase__InfluenzaA__ADX96669

SEQ ID NO: 212394 - RNA, 1410 nt, Artificial Sequence; identical to SEQ ID NO: 208810
  derived and/or modified CDS sequence (opt5) from neuraminidase__InfluenzaA__ADX96679

SEQ ID NO: 212395 - RNA, 1410 nt, Artificial Sequence; identical to SEQ ID NO: 208810
  derived and/or modified CDS sequence (opt5) from neuraminidase__InfluenzaA__ADX96689

SEQ ID NO: 212396 - RNA, 1410 nt, Artificial Sequence; identical to SEQ ID NO: 208810
  derived and/or modified CDS sequence (opt5) from neuraminidase__InfluenzaA__ADX96699

SEQ ID NO: 212397 - RNA, 1410 nt, Artificial Sequence
  derived and/or modified CDS sequence (opt5) from neuraminidase__InfluenzaA__ADX96709
augaaccccaaucagaagaucauuaccaucggcagcgugugcaugacaauugggauggccaaccugauccuccaaauuggaaauaucaucuccauuuggaucucucacagcauucagcugggcaaccagaaucagaucgagacguguaaccaauccgucauuaccuacgaaaauaacacauggguuaaucagaccuaugugaacaucucuaauacaaacuucgcugccgggcagagcguggucuccgugaaacuugcgggaaauucuagccugugcccuguuuccggcugggcuauuuacagcaaggacaacucuaucagaaucggguccaaaggagauguguuugucauucgggagccguucaucagcuguucuccccucgaaugccgcaccuuuuuccugacacagggcgcccuucugaaugacaagcauuccaacggcaccauuaaagauagaagcccuuaucggacgcucaugucuugucccaucggggaggugccuucccccuacaacagccgcuuugaauccguugccuggucugcuagcgccugccacgacggaauuaauuggcugaccaucggcaucuccgggccugauaacggagcuguggccguccugaaguauaauggcauuaucacagacaccauuaagagcuggagaaacaauauccuccggacacaagagucugagugugcgugcgugaacggguccuguuucaccgugaugacggauggaccgagcgacggccaggccucuuacaaaauuuuucgcaucgaaaagggcaaaaucgucaagagcguugagauuaaugcucccaacuaucauuacgaagagugcuccuguuacccugauucuagcgagaucacaugcgugugcagagacaauuggcacggguccaaccggcccugggugagcuucaaucagaaccuggaauaucagauuggauacaucuguucuggcauuuuuggggauaauccucgccccaacgacgagaccggauccugcggcccggucagcucuaauggggccaacggagugaaaggcuucuccuuuaaguauggcaacgggguuuggaucggaagaacaaagagcauuuccucucggaauggcuucgaaaugaucugggauccuaacggguggaccggaaccgacaauaacuuuagcaucaaacaagacauugugggcaucaaugagugguccggguacucuggcagcuucguccagcaucccgaacuuacaggacuggauuguauucgcccuugcuucuggguggagcucaucagaggccggcccaaggagaacacgauuuggaccuccgggagcucuaucuccuuuuguggaguuaauagcgacacagugggcuggucuuggcccgauggggcugaacugccuuucaccaucgacaaauga

SEQ ID NO: 212398 - RNA, 1410 nt, Artificial Sequence
  derived and/or modified CDS sequence (opt5) from neuraminidase__InfluenzaA__ADX96719
augaaccccaaucagaagaucauuaccaucggcagcgugugcaugacaauugggauggccaaccugauccuccaaauuggaaauaucaucuccauuuggaucucucacagcauucagcugggcaaccagaaucagaucgagacguguaaccaauccgucauuaccuacgaaaauaacacauggguuaaucagaccuaugugaacaucucuaauacaaacuucgcugccgggcagagcguggucuccgugaaauuugcgggaaauucuagccuuugcccuguuuccggcugggcuauuuacagcaaggacaacucuaucagaaucggguccaaaggagauguguucgucauucgggagccguuuaucagcuguucuccccuggaaugccgcaccuucuuucucacacagggcgcccugcuuaaugacaagcauuccaacggcaccauuaaagauagaagcccuuaucggacgcugaugucuugucccaucggggaggugccuucccccuacaacagccgcuucgaauccguugccuggucugcuagcgccugccacgacggaauuaauuggcucaccaucggcaucuccgggccugauaacggagcuguggccguccugaaguauaauggcauuaucacagacaccauuaagagcuggagaaacaauauccugcggacacaagagucugagugugcgugcgugaacggguccuguuuuaccgugaugacggauggaccgagcgacggccaggccucuuacaaaauuuuccgcaucgaaaagggcaaaaucgucaagagcguugagaugaaugcucccaacuaucauuacgaagagugcuccuguuacccugauucuagcgagauuacaugcgugugcagagacaauuggcacggguccaaccggcccugggugagcuuuaaucagaaccucgaauaucagaucggauacauuuguucuggcaucuucggggauaauccucgccccaacgacaaaaccggauccugcggcccggucagcucuaauggggccaacggagugaagggcuuuuccuucaaguauggcaacgggguuuggauuggaagaacaaaaagcaucuccucucggaauggcuuugagaugauuugggauccuaacggguggaccggaaccgacaauaacuucagcaucaagcaagacaucgugggcauuaaugaaugguccggguacucuggcagcuucguccagcaucccgagcugacaggacuugauuguauccgcccuugcuuuuggguggaacugauuagaggccggcccaaagaguccacgguuuggaccagcgggucuuccaucagcuucuguggagugaacucugacacagucggcugguccuggcccgauggggcugagcucccuuuuaccauugacaaguga

SEQ ID NO: 212399 - RNA, 1410 nt, Artificial Sequence; identical to SEQ ID NO: 208810
  derived and/or modified CDS sequence (opt5) from neuraminidase__InfluenzaA__ADX96729

SEQ ID NO: 212400 - RNA, 1410 nt, Artificial Sequence
  derived and/or modified CDS sequence (opt5) from neuraminidase__InfluenzaA__ADX96739
augaaccccaaucagaagaucauuaccaucggcagcgugugcaugacaauugggauggccaaccugauccuccaaauuggaaauaucaucuccauuuggaucucucacagcauucagcugggcaaccagaaucagaucgagacguguaaccaauccgucauuaccuacgaaaauaacacauggguuaaucagaccuaugugaacaucucuaauacaaacuucgcugccgggcagagcguggucuccgugaaacuugcgggaaauucuagccugugcccuguuuccggcugggcuauuuacagcaaggacaacucuaucagaaucggguccaaaggagauguguuugucauucgggagccguucaucagcuguucuccccucgaaugccgcaccuuuuuccugacacagggcgcccuucugaaugacaagcauuccaacggcaccauuaaagauagaagcccuuaucggacgcucaugucuugucccaucggggaggugccuucccccuacaacagccgcuuugaauccguugccuggucugcuagcgccugccacgacggaauuaauuggcugaccaucggcaucuccgggccugauaacggagcuguggccguccugaaguauaauggcauuaucacagacaccauuaagagcuggagaaacaauauccuccggacacaagagucugagugugcgugcgugaacggguccuguuucaccgugaugacggauggaccgagcgacggccaggccucuuacaaaauuuuucgcaucgaaaagggcaaaaucgucaagagcguugagaugaaugcucccaacuaucauuacgaagagugcuccuguuacccugauucuagcgagauuacaugcgugugcagagacaauuggcacggguccaaccggcccugggugagcuucaaucagaaccuggaauaucagaucggauacauuuguucuggcaucuuuggggauaauccucgccccaacgacaaaaccggauccugcggcccggucagcucuaauggggccaacggagugaagggcuucuccuuuaaguauggcaacgggguuuggauuggaagaacaaaaagcaucuccucucggaauggcuucgagaugauuugggauccuaacggguggaccggaaccgacaauaacuuuagcaucaagcaagacaucgugggcauuaaugaaugguccggguacucuggcagcuucguccagcaucccgagcuuacaggacuggauuguauccgcccuugcuucuggguggaacucauuagaggccggcccaaagagaacacgaucuggaccuccgggagcucuauuuccuuuuguggaguuaagagcgacacagugggcuggucuuggcccgauggggcugagcugccuuucaccaucgacaaauga

SEQ ID NO: 212401 - RNA, 1410 nt, Artificial Sequence; identical to SEQ ID NO: 208810
  derived and/or modified CDS sequence (opt5) from neuraminidase__InfluenzaA__ADX96749

SEQ ID NO: 212402 - RNA, 1410 nt, Artificial Sequence; identical to SEQ ID NO: 208810
  derived and/or modified CDS sequence (opt5) from neuraminidase__InfluenzaA__ADX96759

SEQ ID NO: 212403 - RNA, 1410 nt, Artificial Sequence; identical to SEQ ID NO: 209784
  derived and/or modified CDS sequence (opt5) from neuraminidase__InfluenzaA__ADX96769

SEQ ID NO: 212404 - RNA, 1410 nt, Artificial Sequence; identical to SEQ ID NO: 208810
  derived and/or modified CDS sequence (opt5) from neuraminidase__InfluenzaA__ADX96779

SEQ ID NO: 212405 - RNA, 1410 nt, Artificial Sequence
  derived and/or modified CDS sequence (opt5) from neuraminidase__InfluenzaA__ADX96789
augaaccccaaucagaagaucauuaccaucggcagcgugugcaugacaauugggauggccaaccugauccuccaaauuggaaauaucaucuccauuuggaucucucacagcauucagcugggcaaccagaaucagaucgagacguguaaccaauccgucauuaccuacgaaaauaacacauggguuaaucagaccuaugugaacaucucuaauacaaacuucgcugccgggcagagcguggucucccuuaaacuggcgggaaauucuagccucugcccuguguccggcugggcuauuuacagcaaggacaacucuaucagaaucggguccaaaggagauguuuuugugauucgggagccguucaucagcuguucuccccuggaaugccgcaccuuuuuccuuacacagggcgcccugcucaaugacaagcauuccaacggcaccauuaaagauagaagcccuuaucggacgcugaugucuugucccaucggggaggucccuucccccuacaacagccgcuuugaauccguggccuggucugcuagcgccugccacgacggaauuaauuggcugaccaucggcaucuccgggccugauaacggagcuguugccgugcucaaguauaauggcauuaucacagacaccauuaagagcuggagaaacaauauccugcggacacaagagucugagugugcgugcgucaacggguccuguuucaccgugaugacggauggaccgagcgacggccaggccucuuacaaaauuuuucgcaucgaaaagggcaaaaucgucaagagcguggagaugaaugcucccaacuaucauuacgaagagugcuccuguuacccugauucuagcgagauuacaugcguuugcagagacaauuggcacggguccaaccggcccugggugagcuucaaucagaaccuugaauaucagaucggauacauuuguucuggcaucuuuggggauaauccucgccccaacgacaaaaccggauccugcggcccggugagcucuaauggggccaacggagucaagggcuucuccuuuaaguauggcaacgggguguggauuggaagaacaaaaagcaucuccucucggaauggcuucgagaugauuugggauccuaacggguggaccggaaccgacaauaacuuuagcaucaagcaagacaucguuggcauuaaugaaugguccggguacucuggcagcuucgugcagcaucccgagcugacaggacucgauuguauccgcccuugcuucugggucgaacugauuagaggccggcccaaagagaacacgaucuggaccuccgggagcucuauuuccuuuuguggagugaauagcgacacaguuggcuggucuuggcccgauggggcugagcuuccuuucaccaucgacaaguga

SEQ ID NO: 212406 - RNA, 1410 nt, Artificial Sequence; identical to SEQ ID NO: 208810
  derived and/or modified CDS sequence (opt5) from neuraminidase__InfluenzaA__ADX96799

SEQ ID NO: 212407 - RNA, 1410 nt, Artificial Sequence; identical to SEQ ID NO: 208965
  derived and/or modified CDS sequence (opt5) from neuraminidase__InfluenzaA__ADX96809

SEQ ID NO: 212408 - RNA, 1410 nt, Artificial Sequence; identical to SEQ ID NO: 208810
  derived and/or modified CDS sequence (opt5) from neuraminidase__InfluenzaA__ADX96819

SEQ ID NO: 212409 - RNA, 1410 nt, Artificial Sequence; identical to SEQ ID NO: 210033
  derived and/or modified CDS sequence (opt5) from neuraminidase__InfluenzaA__ADX96829

SEQ ID NO: 212410 - RNA, 1410 nt, Artificial Sequence
  derived and/or modified CDS sequence (opt5) from neuraminidase__InfluenzaA__ADX96839
augaaccccaaucagaagaucauuaccaucggcagcgugugcaugacaauugggauggccaaccugauccuccaaauuggaaauaucaucuccauuuggaucucucacagcauucagcugggcaaccagaaucagaucgagacguguaaccaauccgucauuaccuacgaaaauaacacauggguuaaucagaccuaugugaacaucucuaauacaaacuucgcugccgggcagagcguggucuccgugaaacuugcgggaaauucuagccugugcccuguuuccggcugggcuauuuacagcaaggacaacaaugugagaaucgggucuaaaggagaugucuuugugauccgggagccguucauuuccuguagcccccucgaaugccgcaccuuuuuccugacacagggcgcccuucugaacgacaagcauucuaacggcaccaucaaagauagauccccuuaucggacgcucaugagcugucccauuggggagguuccuucucccuacaauucccgcuuugaaagcguggccugguccgcuucugccugccacgacggaaucaacuggcugaccauuggcaucagcgggccugauaauggagcugucgccgugcugaaguauaacggcaucauuacagacaccaucaaguccuggagaaauaacauucuccggacacaagagagcgagugugcgugcgugaaugggucuuguuucaccgucaugacggauggaccguccgacggccaggccagcuacaaaaucuuucgcauugaaaagggcaaaaucguuaagucuguggagaugaacgcucccaauuaucauuacgaagagugcagcuguuacccugauuccucugagaucacaugcgugugcagagacaacuggcacgggagcaaucggcccugggucuccuucaaccagaaucuggaauaucagauuggauacaucuguagcggcauuuuuggggauaacccucgccccaaugacaaaaccggaucuugcggcccgguguccagcaacggggccaacggaguuaagggcuucucuuuuaaguauggcaaugggguguggaucggaagaacaaaauccauuagcucccggaacggcuucgagaugaucugggauccuaauggguggaccggaaccgacaacaauuuuucuauuaagcaagacaucgucggcaucaacgaauggagcggguacuccggcucuuucgugcagcaucccgagcuuacaggacuggauuguauucgcccuugcuucuggguugaacucaucagaggccggcccaaagagaauacgauuuggaccagcggguccagcaucucuuuuuguggagugaacuccgacacagucggcuggagcuggcccgauggggcugagcugccuuucaccauugacaaguga

SEQ ID NO: 212411 - RNA, 1410 nt, Artificial Sequence; identical to SEQ ID NO: 208810
  derived and/or modified CDS sequence (opt5) from neuraminidase__InfluenzaA__ADX96849

SEQ ID NO: 212412 - RNA, 1410 nt, Artificial Sequence; identical to SEQ ID NO: 208810
  derived and/or modified CDS sequence (opt5) from neuraminidase__InfluenzaA__ADX96859

SEQ ID NO: 212413 - RNA, 1410 nt, Artificial Sequence; identical to SEQ ID NO: 210033
  derived and/or modified CDS sequence (opt5) from neuraminidase__InfluenzaA__ADX96869

SEQ ID NO: 212414 - RNA, 1410 nt, Artificial Sequence; identical to SEQ ID NO: 208810
  derived and/or modified CDS sequence (opt5) from neuraminidase__InfluenzaA__ADX96879

SEQ ID NO: 212415 - RNA, 1410 nt, Artificial Sequence; identical to SEQ ID NO: 208810
  derived and/or modified CDS sequence (opt5) from neuraminidase__InfluenzaA__ADX96899

SEQ ID NO: 212416 - RNA, 1410 nt, Artificial Sequence
  derived and/or modified CDS sequence (opt5) from neuraminidase__InfluenzaA__ADX96909
augaaccccaaucagaagaucauuaccaucggcagcgugugcaugacaauugggauggccaaccugauccuccaaauuggaaauaucaucuccauuuggaucucucacagcauucagcugggcaaccagaaucagaucgagacguguaaccaauccgucauuaccuacgaaaauaacacauggguuaaucagaccuaugugaacaucucuaauacaaacuucgcugccgggcagagcguggucuccgugaaacuugcgggaaauucuagccugugcccuguuuccggcugggcuauuuacagcaaggacaacucuaucagaaucggguccaaaggagauguguuugucauucgggagccguucaucagcuguucuccccucgaaugccgcaccuuuuuccugacacagggcgcccuucugaaugacaagcauuccaacggcaccauuaaagauagaagcccuuaucggacgcucaugucuugucccaucggggaggugccuucccccuacaacagccgcuuugaauccguugccuggucugcuagcgccugccacgacggaauuaauuggcugaccaucggcaucuccgggccugauaacggagcuguggccguccugaaguauaauggcauuaucacagacaccauuaagagcuggagaaacgauauccuccggacacaagagucugagugugcgugcgugaauggguccuguuucaccgugaugacggacggaccgagcgauggccaggccucuuacaaaauuuuucgcaucgaaaagggcaaaaucgucaagagcguugagauuaacgcucccaauuaucauuacgaagagugcuccuguuacccugacucuagcgagaucacaugcgugugcagagauaacuggcacggguccaaucggcccugggugagcuucaaccagaaucuggaauaucagauuggauacaucuguucuggcauuuuuggggacaacccucgccccaaugauaaaaccggauccugcggcccggucagcucuaacggggccaauggagugaagggcuucuccuuuaaguauggcaacgggguuuggaucggaagaacaaaaagcauuaacucccggaauggcuucgagaugaucugggacccuaacggguggaccggaaccgacaauaacuuuucuaucaagcaagauauugugggcaucaaugaauggagcggguacuccggcucuuucguccagcaucccgagcuuacaggacuggacuguauucgcccuugcuucuggguggaacucaucagaggccggcccaaagagaacacgauuuggaccagcggguccagcaucucuuuuuguggaguuaauuccgauacagugggcuggagcuggcccgacggggcugagcugccuuucaccaucgauaaguga

SEQ ID NO: 212417 - RNA, 1410 nt, Artificial Sequence; identical to SEQ ID NO: 208810
  derived and/or modified CDS sequence (opt5) from neuraminidase__InfluenzaA__ADX96919

SEQ ID NO: 212418 - RNA, 1410 nt, Artificial Sequence; identical to SEQ ID NO: 208810
  derived and/or modified CDS sequence (opt5) from neuraminidase__InfluenzaA__ADX96929

SEQ ID NO: 212419 - RNA, 1410 nt, Artificial Sequence; identical to SEQ ID NO: 208810
  derived and/or modified CDS sequence (opt5) from neuraminidase__InfluenzaA__ADX96939

SEQ ID NO: 212420 - RNA, 1410 nt, Artificial Sequence; identical to SEQ ID NO: 209393
  derived and/or modified CDS sequence (opt5) from neuraminidase__InfluenzaA__ADX96949

SEQ ID NO: 212421 - RNA, 1410 nt, Artificial Sequence; identical to SEQ ID NO: 208810
  derived and/or modified CDS sequence (opt5) from neuraminidase__InfluenzaA__ADX96959

SEQ ID NO: 212422 - RNA, 1410 nt, Artificial Sequence
  derived and/or modified CDS sequence (opt5) from neuraminidase__InfluenzaA__ADX96969
augaaccccaaucagaugaucauuaccaucggcagcgugugcaugacaauugggauggccaaccugauccuccaaauuggaaauaucaucuccauuuggaucucucacagcauucagcugggcaaccagaaucagaucgagacguguaaccaauccgucauuaccuacgaaaauaacacauggguuaaucagaccuaugugaacaucucuaauacaaacuucgcugccgggcagagcguggucuccgugaaacuugcgggaaauucuagccugugcccuguuuccggcugggcuauuuacagcaaggacaacucugugagaaucggguccaagggagaugucuuugugauccgggagccguucauuagcuguucuccccucgaaugccgcaccuuuuuccugacacagggcgcccuucugaaugacaaacauuccaacggcaccaucaaggauagaagcccuuaucggacgcucaugucuugucccauuggggagguuccuucccccuacaacagccgcuuugaauccguggccuggucugcuagcgccugccacgacggaaucaauuggcugaccauuggcaucuccgggccugauaacggagcugucgccgugcugaaauauaauggcaucauuacagacaccaucaagagcuggagaaacaauauucuccggacacaagagucugagugugcgugcgugaacggguccuguuucaccgucaugacggauggaccgagcaauggccaggccucuuacaagaucuuucgcauugaaaaaggcaagaucguuaaaagcguggagaugaacgcucccaauuaucauuacgaagagugcuccuguuacccugacucuagcgagaucacaugcgugugcagagauaacuggcacggguccaaucggcccugggucagcuucaaccagaaucuggaauaucagauuggauacaucuguucuggcauuuuuggggacaacccucgccccaaugauaagaccggauccugcggcccggugagcucuaacggggccaacggaguuaaaggcuucuccuuuaaguauggcaaugggguguggaucggaagaacaaagagcauuuccucucggaacggcuucgagaugaucugggacccuaauggguggaccggaaccgauaacaauuuuagcauuaaacaagacaucgucggcaucaacgaaugguccggguacucuggcagcuucgugcagcaucccgagcuuacaggacuggacuguauucgcccuugcuucuggguugaacucaucagaggccggcccaaggagaauacgauuuggaccuccgggagcucuaucuccuuuuguggagugaacagcgauacagucggcuggucuuggcccgacggggcugagcugccuuucaccauugauaaauga

SEQ ID NO: 212423 - RNA, 1410 nt, Artificial Sequence; identical to SEQ ID NO: 210033
  derived and/or modified CDS sequence (opt5) from neuraminidase__InfluenzaA__ADX96979

SEQ ID NO: 212424 - RNA, 1410 nt, Artificial Sequence; identical to SEQ ID NO: 210033
  derived and/or modified CDS sequence (opt5) from neuraminidase__InfluenzaA__ADX96989

SEQ ID NO: 212425 - RNA, 1407 nt, Artificial Sequence
  derived and/or modified CDS sequence (opt5) from neuraminidase__InfluenzaA__ADX96999
augaaccccaaucagaagaucauuaccaucggcagcgugugcaugacaauugggauggccaaccugauccuccaaauuggaaucaucuccauuuggaucucucacagcauucagcugggcaaucagaaccagaucgagacguguaaucaauccgucauuaccuacgaaaacaauacauggguuaaccagaccuaugugaauaucucuaacacaaauuucgcugccgggcagagcguggucuccgugaaacuugcgggaaacucuagccugugcccuguuuccggcugggcuauuuacagcaaggacaauucuaucagaaucggguccaaaggagauguguuugucauucgggagccguucaucagcuguucuccccucgaaugccgcaccuuuuuccugacacagggcgcccuucugaacgacaagcauuccaauggcaccauuaaagauagaagcccuuaucggacgcucaugucuugucccaucggggaggugccuucccccuacaacagccgcuuugaauccguugccuggucugcuagcgccugccacgacggaauuaacuggcugaccaucggcaucuccgggccugauaauggagcuguggccguccugaaguauaacggcauuaucacagacaccauuaagagcuggagaaauaacauccuccggacacaagagucugagugugcgugcgugaauggguccuguuucaccgugaugacggauggaccgagcaacggccaggccucuuacaaaauuuuucgcaucgaaaagggcaaaaucgucaagagcguugagaugaaugcucccaacuaucauuacgaagagugcuccuguuacccugacucuagcgagauuacaugcgugugcagagauaauuggcacggguccaaccggcccugggugagcuucaaucagaaccuggaauaucagaucggauacauuuguucuggcaucuuuggggacaauccucgccccaacgauaaaaccggauccugcggcccggucagcucuaauggggccaacggagugaagggcuucuccuuuaaguauggcaacgggguuuggauuggaagaacaaaaagcaucuccucucggaauggcuucgagaugauuugggacccuaacggguggaccggaaccgauaauaacuuuagcaucaagcaagacaucgugggcauuaaugaaugguccggguacucuggcagcuucguccagcaucccgagcuuacaggacuggacuguauccgcccuugcuucuggguggaacucauuagaggccggcccaaagagaacacgaucuggaccuccgggagcucuauuuccuuuuguggaguuaauagcgauacagugggcuggucuuggcccgacggggcugagcugccuuucaccaucgauaaguga

SEQ ID NO: 212426 - RNA, 1410 nt, Artificial Sequence; identical to SEQ ID NO: 208810
  derived and/or modified CDS sequence (opt5) from neuraminidase__InfluenzaA__ADX97009

SEQ ID NO: 212427 - RNA, 1410 nt, Artificial Sequence; identical to SEQ ID NO: 208965
  derived and/or modified CDS sequence (opt5) from neuraminidase__InfluenzaA__ADX97020

SEQ ID NO: 212428 - RNA, 1410 nt, Artificial Sequence
  derived and/or modified CDS sequence (opt5) from neuraminidase__InfluenzaA__ADX97030
augaaccccaaucagaagaucauuaccaucggcagcgugugcaugauuaucgggauggccaaccugaugcuccaaauuggaaauaucaucuccauuuggaucucucacagcauucagcugggcaaccagaaucagaucgagacauguaaccaauccgucauuacguacgaaaauaacaccuggguuaaucagacauaugugaacaucucuaauaccaacuucgcugccgggcagagcguggucuccgugaaacuugcgggaaauucuagccugugcccuguuuccggcugggcuauuuacagcaaggacaacucugugagaaucggguccaaaggagaugucuuugugauccgggagccguucauuagcuguucuccccucgaaugccgcacauuuuuccugacccagggcgcccuucugaaugacaagcauuccaacggcacaaucaaagauagaagcccuuaucggacccucaugucuugucccauuggggagguuccuucccccuacaacagccgcuuugaauccguggccuggucugcuagcgccugccacgacggaaucaauuggcugacgauuggcaucuccgggccugauaacggagcugucgccgugcugaaguauaauggcaucauuaccgacacaaucaagagcuggagaaacaauauucuccggacccaagagucugagugugcgugcgugaacggguccuguuucacagucaugaccgauggaccgagcgacggccaggccucuuacaaaaucuuucgcauugaaaagggcaaaaucguuaagagcguggagaugaaugcucccaacuaucauuacgaagagugcuccuguuacccugauucuagcgagaucacgugcgugugcagagacaauuggcacggguccaaccggcccugggucagcuucaaucagaaccuggaauaucagauuggauacaucuguucuggcauuuuuggggauaauccucgccccaacgacaaaacaggauccugcggcccggugagcucuaauggggccaacggaguuaagggcuucuccuuuaaguauggcaacgggguguggaucggaagaaccaaaagcauuuccucucggaauggcuucgagaugaucugggauccuaacggguggacaggaaccgacaauaacuuuagcauuaagcaagacaucgucggcaucaaugaaugguccggguacucuggcagcuucgugcagcaucccgagcuuaccggacuggauuguauucgcccuugcuucuggguugaacucaucagaggccggcccaaagagaacacaauuuggacguccgggagcucuaucuccuuuuguggagugaauagcgacaccgucggcuggucuuggcccgauggggcugagcugccuuucacaauugacaaguga

SEQ ID NO: 212429 - RNA, 1410 nt, Artificial Sequence; identical to SEQ ID NO: 210358
  derived and/or modified CDS sequence (opt5) from neuraminidase__InfluenzaA__ADX98643

SEQ ID NO: 212430 - RNA, 1410 nt, Artificial Sequence; identical to SEQ ID NO: 208810
  derived and/or modified CDS sequence (opt5) from neuraminidase__InfluenzaA__ADX98653

SEQ ID NO: 212431 - RNA, 1410 nt, Artificial Sequence
  derived and/or modified CDS sequence (opt5) from neuraminidase__InfluenzaA__ADX98668
augaaccccaaucagaagaucauuaccaucggcagcauuugcaucacaauugggauggccaaccugauccuccaaaucggaaauauuaucuccauuuggaucucucacagcauucagcugggcaaccagaaucagaucgagacguguaaccaauccgugauuaccuacgaaaauaacacaugggucaaucagaccuauguuaacaucucuaauacaaacuucgcugccgggcagagcgugguguccgucaaacuugcgggaaauucuagccugugcccuguguccggcugggcuaucuacagcaaggacaacucuauuagaaucggguccaaaggagauguuuuugugauucgggagccguucaucagcuguucuccccucgaaugccgcaccuuuuuccugacacagggcgcccuucugaaugacaagcauuccaacggcaccauuaaagauagaagcccuuaucggacgcucaugucuugucccaucggggaggucccuucccccuacaacagccgcuuugaauccguggccuggucugcuagcgccugccacgacggaaucaauuggcugaccauuggcaucuccgggccugauaacggagcuguugccgugcugaaguauaauggcauuaucacagacaccauuaagagcuggagaaacaauauccuccggacacaagagucugagugugcgugcgucaacggguccuguuucaccgugaugacggauggaccgagcgacggccaggccucuuacaaaaucuuucgcauugaaaagggcaaaaucgucaagagcguggagaugaaugcucccaacuaucauuacgaagagugcuccuguuacccugauucuagcgagauuacaugcguuugcagagacaauuggcacggguccaaccggcccugggugagcuucaaucagaaccuggaauaucagaucggauacauuuguucuggcaucuuuggggauaauccucgccccaacgacaaaaccggauccugcggcccggugagcucuaauggggccaacggagucaagggcuucuccuuuaaguauggcaacgggguguggauuggaagaacaaaaagcaucuccucucggaauggcuucgagaugaucugggauccuaacggguggaccggaaccgacaauaacuuuagcauuaagcaagacaucguuggcauuaaugaaugguccggguacucuggcagcuucgugcagcaucccgagcuuacaggacuggauuguauccgcccuugcuucugggucgaacucauuagaggccggcccaaagagaacacgaucuggaccuccgggagcucuaucuccuuuuguggagugaauagcgacacaguuggcuggucuuggcccgauggggcugagcugccuuucaccauugacaaguga

SEQ ID NO: 212432 - RNA, 1410 nt, Artificial Sequence; identical to SEQ ID NO: 208810
  derived and/or modified CDS sequence (opt5) from neuraminidase__InfluenzaA__ADX98678

SEQ ID NO: 212433 - RNA, 1410 nt, Artificial Sequence; identical to SEQ ID NO: 208810
  derived and/or modified CDS sequence (opt5) from neuraminidase__InfluenzaA__ADX98698

SEQ ID NO: 212434 - RNA, 1410 nt, Artificial Sequence
  derived and/or modified CDS sequence (opt5) from neuraminidase__InfluenzaA__ADX98708
augaaccccaaucagaagaucauuaccaucggcagcgugugcaugacaauugggauggccaaccugauccuccaaauuggaaauaucaucuccauuuggaucucucacagcauucagcugggcaaccagaaucagaucgagacguguaaccaauccgucauuaucuacgaaaauaacaccuggguuaaucagacauaugugaacauuucuaauaccaacuucgcugccgggcagagcguggucuccgugaaacuugcgggaaauucuagccugugcccuguuuccggcugggcuaucuacagcaaggacaacucuaucagaauuggguccaaaggagauguguuugucauccgggagccguucauuagcuguucuccccucgaaugccgcacauuuuuccugacccagggcgcccuucugaaugacaagcauuccaacggcacaaucaaagauagaagcccuuaucggacccucaugucuugucccauuggggaggugccuucccccuacaacagccgcuuugaauccguugccuggucugcuagcgccugccacgacggaaucaauuggcugacgaucggcauuuccgggccugauaacggagcuguggccguccugaaguauaauggcaucauuaccgacacaaucaagagcuggagaaacaauauucuccggacccaagagucugagugugcgugcgugaacggguccuguuucacagugaugaccgauggaccgagcgacggccaggccucuuacaaaaucuuucgcaucgaaaagggcaaaauugucaagagcguugagaugaaugcucccaacuaucauuacgaagagugcuccuguuacccugauucuagcgagaucacgugcgugugcagagacaauuggcacggguccaaccggcccugggugagcuucaaucagaaccuggaauaucagauuggauacaucuguucuggcauuuuuggggauaauccucgccccaacgacaaaacaggauccugcggcccggucagcucuaauggggccaacggagugaagggcuucuccuuuaaguauggcaacgggguuuggaucggaagaaccaaaagcauuuccucucggaauggcuucgagaugaucugggauccuaacggguggacaggaaccgacaauaacuuuagcaucaagcaagacauugugggcaucaaugaaugguccggguacucuggcagcuucguccagcaucccgagcuuaccggacuggauuguauucgcccuugcuucuggguggaacucaucagaggccggcccaaagagaacacaauuuggacguccgggagcucuaucuccuuuuguggaguuaauagcgacaccgugggcuggucuuggcccgauggggcugagcugccuuucacaaucgacaaguga

SEQ ID NO: 212435 - RNA, 1410 nt, Artificial Sequence; identical to SEQ ID NO: 208810
  derived and/or modified CDS sequence (opt5) from neuraminidase__InfluenzaA__ADX98722

SEQ ID NO: 212436 - RNA, 1410 nt, Artificial Sequence; identical to SEQ ID NO: 208810
  derived and/or modified CDS sequence (opt5) from neuraminidase__InfluenzaA__ADX98732

SEQ ID NO: 212437 - RNA, 1410 nt, Artificial Sequence; identical to SEQ ID NO: 208810
  derived and/or modified CDS sequence (opt5) from neuraminidase__InfluenzaA__ADX98742

SEQ ID NO: 212438 - RNA, 1410 nt, Artificial Sequence; identical to SEQ ID NO: 210161
  derived and/or modified CDS sequence (opt5) from neuraminidase__InfluenzaA__ADX98751

SEQ ID NO: 212439 - RNA, 1410 nt, Artificial Sequence; identical to SEQ ID NO: 208810
  derived and/or modified CDS sequence (opt5) from neuraminidase__InfluenzaA__ADX98761

SEQ ID NO: 212440 - RNA, 1410 nt, Artificial Sequence
  derived and/or modified CDS sequence (opt5) from neuraminidase__InfluenzaA__ADX98770
augaaccccaaucagaagaucauuaccaucggcagcgugugcaugacaauugggauggccaaccugauccuccaaauuggaaauaucaucuccauuuggaucucucacagcauucagcugggcaaccagaaucagaucgagacguguaaccaauccgucauuaccuacgaaaauaacacauggguuaaucagaccuaugugaacaucucuaauacaaacuucgcugccgggcagagcguggucuccgugaaacuugcgggaaauucuagccugugcccuguuuccggcugggcuauuuacagcaaggacaacucuaucagaaucggguccaaaggagauguguuugucauucgggagccguucaucagcuguucuccccucgaaugccgcaccuuuuuccugacacagggcgcccuucugaaugacaagcauuccaacggcaccauuaaagauagaagcccuuaucggacgcucaugucuugucccaucggggaggugccuucccccuacaacagccgcuuugaauccguugccuggucugcuagcgccugccacgacggaauuaauuggcugaccaucggcaucuccgggccugauaacggagcuguggccguccugaaguauaauggcauuaucacagacaccauuaagagcuggagaaacaauauccuccggacacaagagucugagugugcgugcgugaacggguccuguuucaccgugaugacggauggaccgagcgacggccaggccucuuacaaaauuuuucgcaucgaaaagggcaaaaucgucaagagcguugagaugaaugcucccaacuaucauuacgaagagugcuccuguuacccugauucuagcgagauuacaugcgugugcagagacaauuggcacggguccaaccggcccuggggcagcuucaaucagaaccuggaauaucagaucggauacauuuguucugggaucuuuggagauaauccucgccccaacgacaaaaccggcuccugcgggccggugagcucuaauggagccaacggcgucaagggcuucuccuuuaaguaugggaacggaguguggauuggcagaacaaaaagcaucuccucucggaauggguucgagaugauuugggauccuaacggauggaccggcaccgacaauaacuuuagcaucaagcaagacaucguugggauuaaugaaugguccggcuacucuggcagcuucgugcagcaucccgagcuuacaggacuggauuguauccgcccuugcuucugggucgaacucauuagagggcggcccaaagagaacacgaucuggaccuccggaagcucuauuuccuuuuguggcgugaauagcgacacaguuggguggucuuggcccgauggagcugagcugccuuucaccaucgacaaguga

SEQ ID NO: 212441 - RNA, 1410 nt, Artificial Sequence; identical to SEQ ID NO: 208810
  derived and/or modified CDS sequence (opt5) from neuraminidase__InfluenzaA__ADX98780

SEQ ID NO: 212442 - RNA, 1410 nt, Artificial Sequence
  derived and/or modified CDS sequence (opt5) from neuraminidase__InfluenzaA__ADX98788
augaaccccaaucagaagaucauuaccaucggcagcgugugcaugacaauugggauggccaaccugguccuccaaaucggaaauauuaucuccaucuggauuucucacagcauccagcugggcaaccagaaucagauugagacguguaaccaauccguuaucaccuacgaaaauaacacaugggugaaucagaccuaugugaacauuucuaauacaaacuucgcugccgggcagagcgucguguccguuaaacuugcgggaaauucuagccugugcccuguguccggcugggcuaucuacagcaaggacaacucuauuagaaucggguccaaaggagaugucuuugugauccgggagccguucauuagcuguucuccccucgaaugccgcaccuuuuuccugacacagggcgcccuucugaaugacaagcauuccaacggcaccaucaaagauagaagcccuuaucggacgcucaugucuugucccauuggggagguuccuucccccuacaacagccgcuuugaauccguggccuggucugcuagcgccugccacgacggaaucaauuggcugaccauuggcaucuccgggccugauaacggagcugucgccgugcugaaguauaauggcaucauuacagacaccaucaagagcuggagaaacaauauucuccggacacaagagucugagugugcgugcgugaacggguccuguuucaccgucaugacggauggaccgagcgacggccaggccucuuacaaaaucuuucgcauugaaaagggcaaaaucguuaagagcguggagaugaaugcucccaacuaucauuacgaagagugcuccuguuacccugauucuagcgagaucacaugcgugugcagagacaauuggcacggguccaaccggcccugggucagcuucaaucagaaccuggaauaucagauuggauacaucuguucuggcauuuuuggggauaauccucgccccaacgacaaaaccggauccugcggcccggugagcucuaauggggccaacggaguuaagggcuucuccuuuaaguauggcaacgggguguggaucggaagaacaaaaagcauuuccucucggaauggcuucgagaugaucugggauccuaacggguggaccggaaccgacaauaaguuuagcauuaaacaagacaucgucggcaucaacgaaugguccggguacucuggcagcuucgugcagcaucccgagcuuacaggacuggauuguauucgcccuugcuucuggguugaacucaucagaggccggcccaaggagaauacgauuuggaccuccgggagcucuaucuccuuuuguggagugaacagcgacacagucggcuggucuuggcccgauggggcugagcugccuuucaccauugacaaauga

SEQ ID NO: 212443 - RNA, 1410 nt, Artificial Sequence
  derived and/or modified CDS sequence (opt5) from neuraminidase__InfluenzaA__ADX98809
augaaccccaaucagaagaucauuaccaucggcagcgugugcaugacaauugggauggccaaccugauccuccaaauuggaaauaucauccugauuuggaucucccacucuauucagcuuggcaaccagaaucagaucgagacguguaaccaaagcgucauuaccuacgaaaauaacacauggguuaaucagaccuaugugaacaucuccaauacaaacuucgcugccgggcagucuguggucagcgugaaacuggcgggaaauuccucucucugcccuguuagcggcugggcuauuuacuccaaggacaacagcaucagaaucgggucuaaaggagauguguuugucauucgggagccguucaucuccuguagcccccuggaaugccgcaccuuuuuccuuacacagggcgcccugcucaaugacaagcauucuaacggcaccauuaaagauagauccccuuaucggacgcugaugagcugucccaucggggaggugccuucucccuacaacucccgcuuugaaagcguugccugguccgcuucugccugccacgacggaauuaauuggcugaccaucggcaucagcgggccugauaacggagcuguggccguccucaaguauaauggcauuaucacagacaccauuaaguccuggagaaacaauauccugcggacacaagagagcgagugugcgugcgugaacgggucuuguuucaccgugaugacggauggaccguccgacggccaggccagcuacaaaauuuuucgcaucgaaaagggcaaaaucgucaagucuguugagaugaaugcucccaacuaucauuacgaagagugcagcuguuacccugauuccucugagauuacaugcgugugcagagacaauuggcacgggagcaaccggcccuggguguccuucaaucagaaccuugaauaucagaucggauacauuuguagcggcaucuuuggggauaauccucgccccaacgacaaaaccggaucuugcggcccggucuccagcaauggggccaacggagugaagggcuucucuuuuaaguauggcaacgggguuuggauuggaagaacaaaauccaucagcucccggaauggcuucgagaugauuugggauccuaacggguggaccggaaccgacaauaacuuuucuaucaagcaagacaucgugggcauuaaugaauggagcggguacuccggcucuuucguccagcaucccgagcugacaggacucgauuguauccgcccuugcuucuggguggaacugauuagaggccggcccaaagagaacacgaucuggaccagcggguccagcauuucuuuuuguggaguuaauuccgacacagugggcuggagcuggcccgauggggcugagcuuccuuucaccaucgacaaguga

SEQ ID NO: 212444 - RNA, 1410 nt, Artificial Sequence; identical to SEQ ID NO: 208810
  derived and/or modified CDS sequence (opt5) from neuraminidase__InfluenzaA__ADX98821

SEQ ID NO: 212445 - RNA, 1410 nt, Artificial Sequence; identical to SEQ ID NO: 208810
  derived and/or modified CDS sequence (opt5) from neuraminidase__InfluenzaA__ADX98846

SEQ ID NO: 212446 - RNA, 1410 nt, Artificial Sequence
  derived and/or modified CDS sequence (opt5) from neuraminidase__InfluenzaA__ADX98856
augaaccccaaucagaagaucaugaccauuggcagcgugugcaugacaaucgggauggccaaccugauucuccaaaucggaaauauuaucuccaucuggauuucucacagcauccagcugggcauucagaaccagaucgagacguguaaucaauccgucauuaccuacgaaaacaauacauggguuaaccagaccuaugugaauaucucuaacacaaauuucgcugccgggcagagcguggucuccgugaaacuugcgggaaacucuagccugugcccuguuuccggcugggcuauuuacagcaaggacaauucuaucagaaucggguccaaaggagauguguuugucauucgggagccguucaucagcuguucuccccucgaaugccgcaccuuuuuccugacacagggcgcccuucugaacgacaagcauuccaauggcaccauuaaagauagaagcccuuaucggacgcucaugucuugucccaucggggaggugccuucccccuacaacagccgcuuugaauccguugccuggucugcuagcgccugccacgacggaauuaacuggcugaccaucggcaucuccgggccugauaauggagcuguggccguccugaaguauaacggcauuaucacagacaccauuaagagcuggagaaauaacauccuccggacacaagagucugagugugcgugcgugaauggguccuguuucaccgugaugacggauggaccgagcgacggccaggccucuuacaaaauuuuucgcaucgaaaagggcaaaaucgucaagagcguugagaugaacgcucccaauuaucauuacgaagagugcuccuguuacccugauucuagcgagauuacaugcgugugcagagacaacuggcacggguccaaucggcccugggugagcuucaaccagaaucuggaauaucagaucggauacauuuguucuggcaucuuuggggauaacccucgccccaaugacaaaaccggauccugcggcccggucagcucuaacggggccaauggagugaagggcuucuccuuuaaguauggcaacgggguuuggauuggaagaacaaaaagcaucuccucucggaacggcuucgagaugauuugggauccuaauggguggaccggaaccgacaacaauuuuagcaucaagcaagacaucgugggcauuaacgaaugguccggguacucuggcagcuucguccagcaucccgagcuuacaggacuggauuguauccgcccuugcuucuggguggaacucauuagaggccggcccaaagagaauacgaucuggaccuccgggagcucuauuuccuuuuguggaguuaacagcgacacagugggcuggucuuggcccgauggggcugagcugccuuucaccaucgacaaguga

SEQ ID NO: 212447 - RNA, 1410 nt, Artificial Sequence; identical to SEQ ID NO: 208810
  derived and/or modified CDS sequence (opt5) from neuraminidase__InfluenzaA__ADX98863

SEQ ID NO: 212448 - RNA, 1410 nt, Artificial Sequence; identical to SEQ ID NO: 208810
  derived and/or modified CDS sequence (opt5) from neuraminidase__InfluenzaA__ADX98873

SEQ ID NO: 212449 - RNA, 1410 nt, Artificial Sequence
  derived and/or modified CDS sequence (opt5) from neuraminidase__InfluenzaA__ADX98883
augaaccccaaucagaagaucauuaccaucggcagcgugugcaugacaauugggauggccaaccugauccuccaaauuggaaauaucaucuccauuuggaucucucacagcauucagcugggcaaccagaaucagaucgagacguguaaccaauccgucauuaccuacgaaaauaacacauggguuaaucagaccuaugugaacaucucuaauacaaacguggcugccgggcagagcgucguguccguuaaacuugcgggaaauucuagccugugcccuguguccggcugggcuauuuacagcaaggacaacucuaucagaaucggguccaaaggagaugccuucgucauucgggagccguuuaucagcuguucuccccucgaaugccgcaccuucuuucugacacagggcgcccuucugaaugacaagcauuccaacggcaccauuaaagauagaagcccuuaucggacgcucaugucuugucccaucggggaggugccuucccccuacaacagccgcuucgaauccguugcuuggucugccagcgcuugccacgacggaauuaauuggcugaccaucggcaucuccgggccugauaacggagccguggcgguccugaaguauaauggcauuaucacagacaccauuaagagcuggagaaacaauauccuccggacacaagagucugagugugccugcgugaacggguccuguuuuaccgugaugacggauggaccgagcgacggccaggcuucuuacaaaauuuuccgcaucgaaaagggcaaaaucgucaagagcguugagaugaaugcccccaacuaucauuacgaagagugcuccuguuacccugauucuagcgagauuacaugcgugugcagagacaauuggcacggguccaaccggcccugggugagcuuuaaucagaaccuggaauaucagaucggauacauuuguucuggcaucuucggggauaauccucgccccaacgacaaaaccggauccugcggcccggucagcucuaauggggcuaacggagugaagggcuuuuccuucaaguauggcaacgggguuuggauuggaagaacaaaaagcaucuccucucggagcggcuuugagaugauuugggauccuaauggguggaccggaaccgacaacaauuucuccaucaagcaagacaucgugggcauuaacgaauggucuggguacagcggcuccuuuguccagcaucccgagcuuacaggacuggauuguauccgcccuugcuucuggguggaacucauuagaggccggcccaaagagaauacgaucuggaccagcgggucuuccauuagcuucuguggaguuaacucugacacagugggcugguccuggcccgauggggccgagcugccuuuuaccaucgacaaguga

SEQ ID NO: 212450 - RNA, 1410 nt, Artificial Sequence; identical to SEQ ID NO: 208810
  derived and/or modified CDS sequence (opt5) from neuraminidase__InfluenzaA__ADX98893

SEQ ID NO: 212451 - RNA, 1410 nt, Artificial Sequence; identical to SEQ ID NO: 208810
  derived and/or modified CDS sequence (opt5) from neuraminidase__InfluenzaA__ADX98903

SEQ ID NO: 212452 - RNA, 1410 nt, Artificial Sequence; identical to SEQ ID NO: 210363
  derived and/or modified CDS sequence (opt5) from neuraminidase__InfluenzaA__ADX98913

SEQ ID NO: 212453 - RNA, 1410 nt, Artificial Sequence; identical to SEQ ID NO: 210241
  derived and/or modified CDS sequence (opt5) from neuraminidase__InfluenzaA__ADX98923

SEQ ID NO: 212454 - RNA, 1410 nt, Artificial Sequence; identical to SEQ ID NO: 210247
  derived and/or modified CDS sequence (opt5) from neuraminidase__InfluenzaA__ADX98933

SEQ ID NO: 212455 - RNA, 1410 nt, Artificial Sequence; identical to SEQ ID NO: 208810
  derived and/or modified CDS sequence (opt5) from neuraminidase__InfluenzaA__ADX98943

SEQ ID NO: 212456 - RNA, 1410 nt, Artificial Sequence; identical to SEQ ID NO: 210767
  derived and/or modified CDS sequence (opt5) from neuraminidase__InfluenzaA__ADX98953

SEQ ID NO: 212457 - RNA, 1410 nt, Artificial Sequence; identical to SEQ ID NO: 208810
  derived and/or modified CDS sequence (opt5) from neuraminidase__InfluenzaA__ADX98963

SEQ ID NO: 212458 - RNA, 1410 nt, Artificial Sequence
  derived and/or modified CDS sequence (opt5) from neuraminidase__InfluenzaA__ADX98973
augaaccccaaucagaagaucauuaccaucggcagcgugugcaugacaauugggauggccaaccugauccuccaaauuggaaauaucaucuccauuuggaucucucacagcauucagcugggcaaccagaaucagaucgagacguguaaccaauccgucauuaccuacgaaaauaacacauggguuaaucagaccuaugugaacaucucuaauacaaacuucgcugccgggcagagcguggucuccgugaaacuugcgggaaauucuagccugugcccuguuuccggcugggcuauuuacagcaaggacaacucuaucagaaucggguccaaaggagauguguuugucauucgggagccguucaucagcuguucuccccucgaaugccgcaccuuuuuccugacacagggcgcccuucugaaugacaagcauuccaacggcaccauuaaagauagaagcccuuaucggacgcucaugaucugucccauuggggaggugccuucucccuacaacucccgcuuugaaagcguugccugguccgcuucugccugccacgacggaaucaauuggcugaccaucggcauuagcgggccugauaacggagcuguggccguccugaaguauaauggcaucauuacagacaccaucaaguccuggagaaacaauauucuccggacacaagagagcgagugugcgugcgugaacgggucuuguuucaccgugaugacggauggaccguccgacggccaggccagcuacaaaaucuuucgcaucgaaaagggcaaaauugucaagucuguugagaugaaugcucccaacuaucauuacgaagagugcagcuguuacccugauuccucugagaucacaugcgugugcagagacaauuggcacgggagcaaccggcccuggguguccuucaaucagaaccuggaauaucagauuggauacaucuguagcggcauuuuuggggauaauccucgccccaacgacaaaaccggaucuugcggcccggucuccagcaauggggccaacggagugaagggcuucucuuuuaaguauggcaacgggguuuggaucggaagaacaaaauccauuagcucccggaauggcuucgagaugaucugggauccuaacggguggaccggaaccgacaauaacuuuucuaucaagcaagacauugugggcaucaaugaauggagcggguacuccggcucuuucguccagcaucccgagcuuacaggacuggauuguauucgcccuugcuucuggguggaacucaucagaggccggcccaaagagaacacgauuuggaccagcggguccagcaucucuuuuuguggaguuaauuccgacacagugggcuggagcuggcccgauggggcugagcugccuuucaccaucgacaaguga

SEQ ID NO: 212459 - RNA, 1410 nt, Artificial Sequence; identical to SEQ ID NO: 208810
  derived and/or modified CDS sequence (opt5) from neuraminidase__InfluenzaA__ADX98983

SEQ ID NO: 212460 - RNA, 1410 nt, Artificial Sequence; identical to SEQ ID NO: 208810
  derived and/or modified CDS sequence (opt5) from neuraminidase__InfluenzaA__ADX98993

SEQ ID NO: 212461 - RNA, 1410 nt, Artificial Sequence; identical to SEQ ID NO: 208810
  derived and/or modified CDS sequence (opt5) from neuraminidase__InfluenzaA__ADX99003

SEQ ID NO: 212462 - RNA, 1365 nt, Artificial Sequence
  derived and/or modified CDS sequence (opt5) from neuraminidase__InfluenzaA__ADX99584
augaaccccaaucagaagaucaccacaauuggcagcaucugccugguggucgggcucauuucccugauccuucaaauuggaaacaucaucucuauuuggaucagccacuccauucagacgggcucucagaaucauaccgggaucuguaaccagaauauuaucacauacaaaaacagcaccuggguuaaggacacaaccuccgugauucugacaggaaauucuagccucugcccuaucagaggcugggccaucuauuccaaagauaacagcauucggaucgggucuaagggagacguguucgucauucgcgagccguuuaucuccuguagccaccuggaaugcagaaccuucuuucuuacgcaaggcgcucugcucaaugauaaacauucuaacggcaccgugaaggaccggucccccuaccgcgcccugaugagcuguccuguuggggaggcgcccucuccuuauaauuccagauucgaaagcguggcuugguccgccucugccugccacgauggaaugggcuggcugacaauugggaucagcggacccgacaacggcgcugucgccgugcucaaguacaaugggaucauuaccgagacaaucaaauccuggcggaagaaaauucugcgcacccaggaaagcgagugugcuugcguuaacggaucuuguuuuacgaucaugacagauggcccuuccgacggccuugccagcuauaagauuuucaaaaucgagaaggggaaggugaccaaaucuaucgaacugaaugcgccgaacagccauuacgaggaaugcuccuguuaucccgauacaggaaaggucaugugcgugugcagagacaacuggcacggcucuaaucggccuugggugagcuuugaucagaaccucgacuaccagauuggguacaucuguuccggagucuucggcgauaauccccgcccugaggacgggaccggaagcugcggccccguuuauguggacggcgccaacggggugaaaggauuuucuuacagauauggcaauggggucuggauuggacggaccaagucccacagcucucgccauggcuucgagaugaucugggauccgaacggguggacagaaacggacuccaaauuuagcgugagacaagauguuguggcuaugaccgacugguccggcuacucuggcagcuucguccagcacccugagcugacaggacuugauuguaugcggcccugcuuuuggguggaacugauucgcgggagaccuaaggagaaaaccaucuggacauccgccucuagcauuuccuucuguggaguuaauagcgacaccguggauuggucuuggcccgacggcgcugaacuccccuucuccaucgauaaguga

SEQ ID NO: 212463 - RNA, 1365 nt, Artificial Sequence; identical to SEQ ID NO: 212462
  derived and/or modified CDS sequence (opt5) from neuraminidase__InfluenzaA__ADX99595

SEQ ID NO: 212464 - RNA, 1365 nt, Artificial Sequence; identical to SEQ ID NO: 212462
  derived and/or modified CDS sequence (opt5) from neuraminidase__InfluenzaA__ADX99606

SEQ ID NO: 212465 - RNA, 1365 nt, Artificial Sequence; identical to SEQ ID NO: 212462
  derived and/or modified CDS sequence (opt5) from neuraminidase__InfluenzaA__ADX99617

SEQ ID NO: 212466 - RNA, 1365 nt, Artificial Sequence; identical to SEQ ID NO: 212462
  derived and/or modified CDS sequence (opt5) from neuraminidase__InfluenzaA__ADX99628

SEQ ID NO: 212467 - RNA, 1365 nt, Artificial Sequence; identical to SEQ ID NO: 212462
  derived and/or modified CDS sequence (opt5) from neuraminidase__InfluenzaA__ADX99639

SEQ ID NO: 212468 - RNA, 1365 nt, Artificial Sequence; identical to SEQ ID NO: 207791
  derived and/or modified CDS sequence (opt5) from neuraminidase__InfluenzaA__ADX99650

SEQ ID NO: 212469 - RNA, 1365 nt, Artificial Sequence; identical to SEQ ID NO: 207791
  derived and/or modified CDS sequence (opt5) from neuraminidase__InfluenzaA__ADX99672

SEQ ID NO: 212470 - RNA, 1365 nt, Artificial Sequence; identical to SEQ ID NO: 207791
  derived and/or modified CDS sequence (opt5) from neuraminidase__InfluenzaA__ADX99683

SEQ ID NO: 212471 - RNA, 1365 nt, Artificial Sequence; identical to SEQ ID NO: 207791
  derived and/or modified CDS sequence (opt5) from neuraminidase__InfluenzaA__ADX99694

SEQ ID NO: 212472 - RNA, 1365 nt, Artificial Sequence; identical to SEQ ID NO: 207791
  derived and/or modified CDS sequence (opt5) from neuraminidase__InfluenzaA__ADX99705

SEQ ID NO: 212473 - RNA, 1365 nt, Artificial Sequence; identical to SEQ ID NO: 207791
  derived and/or modified CDS sequence (opt5) from neuraminidase__InfluenzaA__ADX99846

SEQ ID NO: 212474 - RNA, 1365 nt, Artificial Sequence; identical to SEQ ID NO: 207791
  derived and/or modified CDS sequence (opt5) from neuraminidase__InfluenzaA__ADX99857

SEQ ID NO: 212475 - RNA, 1365 nt, Artificial Sequence; identical to SEQ ID NO: 207791
  derived and/or modified CDS sequence (opt5) from neuraminidase__InfluenzaA__ADX99868

SEQ ID NO: 212476 - RNA, 1365 nt, Artificial Sequence; identical to SEQ ID NO: 207791
  derived and/or modified CDS sequence (opt5) from neuraminidase__InfluenzaA__ADX99879

SEQ ID NO: 212477 - RNA, 1365 nt, Artificial Sequence; identical to SEQ ID NO: 207791
  derived and/or modified CDS sequence (opt5) from neuraminidase__InfluenzaA__ADX99890

SEQ ID NO: 212478 - RNA, 1365 nt, Artificial Sequence; identical to SEQ ID NO: 207791
  derived and/or modified CDS sequence (opt5) from neuraminidase__InfluenzaA__ADX99901

SEQ ID NO: 212479 - RNA, 1365 nt, Artificial Sequence
  derived and/or modified CDS sequence (opt5) from neuraminidase__InfluenzaA__ADX99912
augaaccccaaucagaagaucauuaccaucggcagcauuugccugguggucgggcucaucucccugauucuucaaaucggaaacaucauuucuaucuggauuagccacuccauccagacaggcucucagaaucauacggggauuuguaaccagaauaucauuaccuacaaaaacagcacauggguuaaggacaccacauccgugauccugaccggaaauucuagccucugcccuaucagaggcugggccauuuauuccaaagauaacagcauccggauugggucuaagggagacguguucaucauucgcgagccguuuaucuccuguagccaccuggaaugcagaacauucuuucuuacccaaggcgcucugcucaaugauaaacauucuuccggcacggucaaggaccggagccccuaccgcgcccugaugucuuguccugugggggaggcgcccuccccuuauaacagcagauucgaauccguugcuuggucugccagcgccugccacgauggaaugggcuggcugaccaucgggauuuccggacccgacaauggcgcuguggccguccucaaguacaacgggaucauuacagagaccaucaaaagcuggcggaagaaaauucugcgcacacaggaaucugagugugcuugcgugaauggauccuguuuuaccaucaugacggauggcccuagcgacggccuugccucuuauaagaucuucaaaauugagaaggggaagguuacaaaaagcaucgaacugaacgcgcccaauucccauuacgaggaaugcucuuguuauccggauaccggaaaggugaugugcgucugcagagacaacuggcacggcagcaaccggccuuggguguccuuugaucagaaucucgacuaccagauuggguacaucuguagcggaguguucggcgauaacccccgcccugaggacgggacaggaucuugcggccccgucuauguugacggcgccaauggggugaaaggauuuuccuacagauauggcaacgggguguggauuggacggaccaagagccacucuucccgccauggcuucgagaugaucugggauccgaauggguggaccgaaacagacagcaaauuuuccgucagacaagaugugguugcuaugacggacuggucuggcuacagcggauccuucgugcagcacccugagcugaccggccuugauuguaugcggcccugcuuuugggucgaacugauucgcgggagaccuaaggagaaaacaaucuggaccucugccagcuccaucagcuucuguggagugaacucugacacaguugauugguccuggcccgacggcgcugaacuccccuucagcauugauaaguga

SEQ ID NO: 212480 - RNA, 1365 nt, Artificial Sequence; identical to SEQ ID NO: 207791
  derived and/or modified CDS sequence (opt5) from neuraminidase__InfluenzaA__ADX99923

SEQ ID NO: 212481 - RNA, 1365 nt, Artificial Sequence; identical to SEQ ID NO: 207791
  derived and/or modified CDS sequence (opt5) from neuraminidase__InfluenzaA__ADX99934

SEQ ID NO: 212482 - RNA, 1365 nt, Artificial Sequence; identical to SEQ ID NO: 207791
  derived and/or modified CDS sequence (opt5) from neuraminidase__InfluenzaA__ADX99956

SEQ ID NO: 212483 - RNA, 1365 nt, Artificial Sequence; identical to SEQ ID NO: 207791
  derived and/or modified CDS sequence (opt5) from neuraminidase__InfluenzaA__ADX99967

SEQ ID NO: 212484 - RNA, 1365 nt, Artificial Sequence; identical to SEQ ID NO: 207791
  derived and/or modified CDS sequence (opt5) from neuraminidase__InfluenzaA__ADX99978

SEQ ID NO: 212485 - RNA, 1365 nt, Artificial Sequence; identical to SEQ ID NO: 207791
  derived and/or modified CDS sequence (opt5) from neuraminidase__InfluenzaA__ADX99989

SEQ ID NO: 212486 - RNA, 1365 nt, Artificial Sequence; identical to SEQ ID NO: 207791
  derived and/or modified CDS sequence (opt5) from neuraminidase__InfluenzaA__ADY00001

SEQ ID NO: 212487 - RNA, 1365 nt, Artificial Sequence; identical to SEQ ID NO: 207791
  derived and/or modified CDS sequence (opt5) from neuraminidase__InfluenzaA__ADY00012

SEQ ID NO: 212488 - RNA, 1365 nt, Artificial Sequence; identical to SEQ ID NO: 207791
  derived and/or modified CDS sequence (opt5) from neuraminidase__InfluenzaA__ADY00023

SEQ ID NO: 212489 - RNA, 1413 nt, Artificial Sequence
  derived and/or modified CDS sequence (opt5) from neuraminidase__InfluenzaA__ADY04729
augaaccccaaucagaagaucauuaccaucggcagcauuuccaucgccauugggaucaucucucugaugcuccaaauuggaaacaucauuagcaucugggcuucccacucuauucagacaggcagccagaaucauacgggggugugcaaccagagaaucauuaccuacgagaauagcacaugggucaaccacaccuauguuaauaucaacaauacaaacgugaucgccggaaaagacaagaccucugugacaauggcgggcaauagcucccuguguagcauuucugggugggcuaucuacaccaaagauaacuccauucggaucggaagcaagggcgacgucuucgugauucgcgaaccuuuuaucucuugcucccaucuugaguguagaacguucuuucugacccaaggcgcccuccugaaugauaaacacagcaacgggacaguuaaggaccggucuccguaucgcgcccuuauguccugcccccugggagaagcuccuagccccuacaauuccaaguucgagucuguggccuggagcgcuuccgccugucaugauggcaugggguggcucaccaucggaauuagcggcccugacaacggggcggucgccgugcugaaauauaacggaaucauuacagaaaccaucaagucuuggaaaaagcagauucugagaacgcaggaguccgagugcguuugugugaauggcagcugcuuuacaaucaugaccgauggccccucuaacggggcugccagcuacaaaaucuucaagauugaaaagggaaaagucacaaaguccaucgagcucaaugcuccuaacuuucacuaugaagaguguucuugcuacccggacaccggcaccgugaugugugugugccgggauaauuggcacgggagcaaccgccccugggucuccuucaaucagaaccuggacuaccaaauuggauauaucugcagcggcguuuuuggggauaauccuagacccaaagacggagagggcucuuguaacccugugacaguggauggcgccaauggggucaagggauucuccuacaaauauggcaacgggguguggauuggacggacgaaguccaaucgccuuagaaaaggcuuugaaaugaucugggaccccaacggguggaccgacacagauucugacuucuccguuaagcaggauguggucgcgauuaccgacuggagcggcuacuccggaucuuuugugcagcauccggagcugacaggccucgauugcauccggccuuguuucuggguugaacuggugcgcgggcuucccaaggagaauaccacgaucuggacaagcggauccucuauuagcuucugcggcgucaacuccgacaccgccaacuggagcuggccugauggggcugaacugcccuuuaccaucgacaaauga

SEQ ID NO: 212490 - RNA, 1410 nt, Artificial Sequence; identical to SEQ ID NO: 211590
  derived and/or modified CDS sequence (opt5) from neuraminidase__InfluenzaA__ADY11828

SEQ ID NO: 212491 - RNA, 1410 nt, Artificial Sequence; identical to SEQ ID NO: 208671
  derived and/or modified CDS sequence (opt5) from neuraminidase__InfluenzaA__ADY11839

SEQ ID NO: 212492 - RNA, 1410 nt, Artificial Sequence; identical to SEQ ID NO: 208671
  derived and/or modified CDS sequence (opt5) from neuraminidase__InfluenzaA__ADY17657

SEQ ID NO: 212493 - RNA, 1410 nt, Artificial Sequence; identical to SEQ ID NO: 208671
  derived and/or modified CDS sequence (opt5) from neuraminidase__InfluenzaA__ADY17668

SEQ ID NO: 212494 - RNA, 1410 nt, Artificial Sequence; identical to SEQ ID NO: 208671
  derived and/or modified CDS sequence (opt5) from neuraminidase__InfluenzaA__ADY17679

SEQ ID NO: 212495 - RNA, 1410 nt, Artificial Sequence; identical to SEQ ID NO: 208671
  derived and/or modified CDS sequence (opt5) from neuraminidase__InfluenzaA__ADY17690

SEQ ID NO: 212496 - RNA, 1410 nt, Artificial Sequence; identical to SEQ ID NO: 208671
  derived and/or modified CDS sequence (opt5) from neuraminidase__InfluenzaA__ADY17701

SEQ ID NO: 212497 - RNA, 1410 nt, Artificial Sequence; identical to SEQ ID NO: 208810
  derived and/or modified CDS sequence (opt5) from neuraminidase__InfluenzaA__ADY38722

SEQ ID NO: 212498 - RNA, 1410 nt, Artificial Sequence; identical to SEQ ID NO: 210559
  derived and/or modified CDS sequence (opt5) from neuraminidase__InfluenzaA__ADY38723

SEQ ID NO: 212499 - RNA, 1410 nt, Artificial Sequence; identical to SEQ ID NO: 208810
  derived and/or modified CDS sequence (opt5) from neuraminidase__InfluenzaA__ADY38734

SEQ ID NO: 212500 - RNA, 1410 nt, Artificial Sequence; identical to SEQ ID NO: 210402
  derived and/or modified CDS sequence (opt5) from neuraminidase__InfluenzaA__ADY38753

SEQ ID NO: 212501 - RNA, 1410 nt, Artificial Sequence; identical to SEQ ID NO: 208810
  derived and/or modified CDS sequence (opt5) from neuraminidase__InfluenzaA__ADY38763

SEQ ID NO: 212502 - RNA, 1410 nt, Artificial Sequence; identical to SEQ ID NO: 208810
  derived and/or modified CDS sequence (opt5) from neuraminidase__InfluenzaA__ADZ04600

SEQ ID NO: 212503 - RNA, 1410 nt, Artificial Sequence; identical to SEQ ID NO: 208810
  derived and/or modified CDS sequence (opt5) from neuraminidase__InfluenzaA__ADZ04610

SEQ ID NO: 212504 - RNA, 1410 nt, Artificial Sequence; identical to SEQ ID NO: 208810
  derived and/or modified CDS sequence (opt5) from neuraminidase__InfluenzaA__ADZ04693

SEQ ID NO: 212505 - RNA, 1410 nt, Artificial Sequence; identical to SEQ ID NO: 208810
  derived and/or modified CDS sequence (opt5) from neuraminidase__InfluenzaA__ADZ04701

SEQ ID NO: 212506 - RNA, 1410 nt, Artificial Sequence; identical to SEQ ID NO: 208810
  derived and/or modified CDS sequence (opt5) from neuraminidase__InfluenzaA__ADZ04711

SEQ ID NO: 212507 - RNA, 1410 nt, Artificial Sequence
  derived and/or modified CDS sequence (opt5) from neuraminidase__InfluenzaA__ADZ05393
augaaccccaaucagaagaucauuaccaucgacagcgugugcaugacaauuggcauggccaaccugauccuccaaauugggaauaucaucuccauuuggaucucucacagcauucagcugggaaaccagaaucagaucgagacguguaaccaauccgucauuaccuacgaaaauaacacauggguuaaucagaccuaugugaacaucucuaauacaaacuucgcugccggccagagcguggucuccgugaaacuugcgggaaauucuagccugugcccuguuuccgggugggcuauuuacagcaaggauaacucugugagaaucggcuccaaaggggacgucuuugugauccgggagccguucauuagcuguucuccccucgaaugccgcaccuuuuuccugacacagggagcccuucugaaugauaagcauuccaacggcaccaucaaagacagaagcccuuaucggacgcucaugucuugucccauuggcgagguuccuucccccuacaacagccgcuuugaauccguggccuggucugcuagcgccugccacgaugggaucaauuggcugaccauuggaaucuccggcccugacaacggggcugucgccgugcugaaguauaauggaaucauuacagauaccaucaagagcuggagaaacaauauucuccggacacaagagucugagugugcgugcgugaacggcuccuguuucaccgucaugacggacgggccgagcaauggacaggccucuuacaaaaucuuucgcauugaaaagggcaaaaucguuaagagcguggagaugaacgcucccaauuaucauuacgaagagugcuccuguuacccugauucuagcgagaucacaugcgugugcagagacaacuggcacggcuccaaucggcccugggucagcuucaaccagaaucuggaauaucagauuggguacaucuguucuggaauuuuuggcgauaacccucgccccaaugacaaaaccggguccugcggaccggugagcucuaacggcgccaacgggguuaagggauucuccuuuaaguauggcaauggcguguggaucgggagaacaaaaagcauuuccucucggaacggauucgagaugaucugggauccuaauggcuggaccgggaccgacaacaauuuuagcauuaagcaagacaucgucggaaucaacgaaugguccggcuacucugggagcuucgugcagcaucccgagcuuacaggccuggauuguauucgcccuugcuucuggguugaacucaucagaggacggcccaaagagaauacgauuuggaccuccggcagcucuaucuccuuuuguggggugaacagcgacacagucggauggucuuggcccgauggcgcugagcugccuuucaccauugacaaguga

SEQ ID NO: 212508 - RNA, 1413 nt, Artificial Sequence
  derived and/or modified CDS sequence (opt5) from neuraminidase__InfluenzaA__ADZ05837
augaaccccaaucagaagaucauuaccaucggcagcauuuccaucgccauugggaucaucucucugaugcuccaaauuggaaacaucauuagcaucugggcuucccacucuauucagacaggcagccagaauaacacggggaucugcaaucagagaauuaucaccugugagaacuccacaugggugaaucauaccuacgugaacaucaauaacacaaauguuguggccggagaagacaaaaccucugugacacuggcgggcaacagcucccuuugcagcauuucugggugggcuaucuauaccaaggauaauuccauucggaucggaagcaaaggcgacgucuucgugauucgcgagccuuuuaucucuuguucccaccuggaaugcagaacguucuuucucacccaaggcgcccugcuuaacgauaagcauagcaaugggacaguuaaagaccggucuccguaccgcgcccugauguccuguccccucggagaggcuccuagccccuauaacuccaaguucgaaucuguggccuggagcgcuuccgccugccacgauggcaugggguggcugaccaucggaauuagcggcccugacaacggggcggucgccgugcugaaguacaauggaaucauuacaggcaccaucaaaucuuggaagaaacagauucucagaacgcaggaguccgaguguguuugcaugaacggcagcuguuuuacaaucaugaccgaugggcccucuaauaaggcugccagcuauaaaaucuucaagauugaaaagggaaaagugacaaaguccaucgagcugaacgcuccuaauuuuuacuaugaagagugcucuuguuacccggacaccggcauugucaugugcgugugccgggauaacuggcaugggagcaaucgccccuggguguccuucaaccagaaucuugacuaccaaaucggauauauuuguagcggcgucuuuggggauaacccuagacccgaggacggagaaggcucuugcaauccuguuaccguggauggcgccaacggggugaaaggauucuccuacaaguauggcaauggggucuggaucggacggacaaaaagcaaccgccugagaaagggcuuugagaugauuugggaccccaauggguggacgaacaccgacucugauuucuccgugaaacaggacguuguggcgacaaccgauuggagcggcuacuccggaucuuuuguccagcacccggaacucacaggccuggacuguauccggccuugcuucuggguggagcuuguucgcgggcugcccagagaaaacaccacgaucuggacaagcggauccucuauuagcuucuguggcgucaauuccgauaccgccaacuggagcuggccugacggggcugagcuccccuuuaccaucgauaaguga

SEQ ID NO: 212509 - RNA, 1413 nt, Artificial Sequence; identical to SEQ ID NO: 209533
  derived and/or modified CDS sequence (opt5) from neuraminidase__InfluenzaA__ADZ05848

SEQ ID NO: 212510 - RNA, 1410 nt, Artificial Sequence; identical to SEQ ID NO: 209977
  derived and/or modified CDS sequence (opt5) from neuraminidase__InfluenzaA__ADZ05858

SEQ ID NO: 212511 - RNA, 1410 nt, Artificial Sequence; identical to SEQ ID NO: 208810
  derived and/or modified CDS sequence (opt5) from neuraminidase__InfluenzaA__ADZ47841

SEQ ID NO: 212512 - RNA, 1410 nt, Artificial Sequence; identical to SEQ ID NO: 208810
  derived and/or modified CDS sequence (opt5) from neuraminidase__InfluenzaA__ADZ47851

SEQ ID NO: 212513 - RNA, 1410 nt, Artificial Sequence
  derived and/or modified CDS sequence (opt5) from neuraminidase__InfluenzaA__ADZ47861
augaaccccaaucagaagaucauuaccaucggcagcgugugcaugacaauugggcuggccaaccucauccugcaaauuggaaauaucaucuccauuuggaucucucacagcauucagcuuggcaaccagaaucagaucgagacguguaaccaauccgucauuaccuacgaaaauaacacauggguuaaucagaccuaugugaacaucucuaauauuaacuucgcugccgggcagagcguggucuccgugaaacuggcgggaaauucuagccucugcccuguuuccggcugggcuaucuacagcaaggacaacucugugagaaucggguccaaaggagaugucuuugugauucgggagccguucaucagcuguucuccccuggaaugccgcacauuuuuccuuacccagggcgcccugcucaaugacaagcauuccaacggcacaauuaaagauagaagcccuuaucggacccugaugucuugucccaucggggagguuccuucccccuacaacagccgcuuugaauccguggccuggucugcuagcgccugccacgacggaauuaauuggcugacgaucggcaucuccgggccugauaacggagcugucgccgugcucaaguauaauggcauuaucaccgacacaauuaagagcuggagaaacaauauccugcggacccaagagucugagugugcgugcgugaacggguccuguuucacagucaugaccgauggaccgagcgacggccaggccucuuacaaaauuuuucgcaucgaaaagggcaaaaucguuaagagcguggagaugaaugcucccaacuaucauuacgaagagugcuccuguuacccugauucuagcgagauuacgugcgugugcagagacaauuggcacggguccaaccggcccugggucagcuucaaucagaaccuugaauaucgcaucggauacauuuguucuggcaucuuuggggauaauccuagacccaacgacaaaacaggauccugcggcccggugagcucuaauggggccaacggaguuaagggcuucuccuuuaaguauggcaacgggguguggauuggacggaccaaaagcaucuccucucgcaauggcuucgagaugauuugggauccuaacggguggacaggaaccgacaagaauuuuagcaucaaacaggacaucgucggcauuaacgaaugguccggguacucuggcagcuucgugcaacaucccgagcugaccggacucgauuguaucagaccuugcuucuggguugaacugauucggggccgccccaaggagaauacaaucuggacguccgggagcucuauuuccuuuuguggagugaacagcgacaccgucggcuggucuuggcccgauggggcugagcuuccuuucacaaucgacaaauga

SEQ ID NO: 212514 - RNA, 1413 nt, Artificial Sequence
  derived and/or modified CDS sequence (opt5) from neuraminidase__InfluenzaA__ADZ53101
augaaccccaaucagaagaucauuaccaucggcagcauuuccaucgccauugggaucaucucucugaugcuccaaauuggaaacaucauuagcaucugggcuucccacucuauucagacaggcagccagaauaacacggggaucugcaaucagagaauuaucaccuacgagaacuccacaugggugaaucauaccuaugugaacaucaauaacacaaaaguuguggccggagaagacaagaccucugugacacuggcgggcaauagcucccuuuguagcauuucugggugggcuaucaacaccaaagauaauuccauucggaucggaagcaagggcgacgucuucgugauucgcgagccuuuuaucucuugcucccaccuggaauguagaacguucuuucucacccaaggcgcccugcuuaacgauaaacauagcaaugggacaguuaaggaccggucuccguaccgcgcccugauguccugcccccucggagaggcuccuagccccuauaacuccaaguucgaaucuguggccuggagcgcuuccgccugucacgauggcaugggguggcugaccaucggaauuagcggcccugacaacggggcggucgccgugcugaaauacaauggaaucauuacaggcaccaucaagucuuggaaaaagcagauucucagaacgcaggaguccgagugcguuuguaugaacggcagcugcuuuacaaucaugaccgaugggcccucuaauaaagcugccagcuauaagaucuucaagauugaaaaaggaaaggugacaaaauccaucgagcugaacgcuccuaauuuuuacuaugaagaguguucuugcuacccggacaccggcauugucaugugugugugccgggauaacuggcaugggagcaaucgccccuggguguccuucaaccagaaucuugacuaccaaaucggauauauuugcagcggcgucuuuggggauaacccuagacccgaggacggagaaggcucuuguaauccuguuaccguggauggcgccaacggggugaagggauucuccuacaaauauggcaauggggucuggaucggacggacaaagagcaaccgccugagaaaaggcuuugagaugauuugggaccccaauggguggacgaacaccgacucugauuucuccgugaagcaggacguuguggcgaucacagauuggagcggcuacuccggaucuuuuguccagcacccggaacucaccggccuggacugcauccggccuuguuucuggguggagcuuguucgcgggcugcccagagaaaacacaaccauuuggacgagcggauccucuaucagcuucugcggcgucaauuccgauacagccaacuggagcuggccugacggggcugagcuccccuuuaccauugauaaguga

SEQ ID NO: 212515 - RNA, 1410 nt, Artificial Sequence
  derived and/or modified CDS sequence (opt5) from neuraminidase__InfluenzaA__ADZ53124
augaaccccaaucagaagaucauuaccaucggcagcgugugcaugacaauugggauggccaaccugauccuccaaauuggaaauaucaucuccauuuggaucucucacagcauucagcugggcaaccagaaucagaucgagacguguaaccaauccgucauuaccuacgaaaauaacacauggguuaaucagaccuaugugaacaucucuaauacaaacuucgcugccgggcagagcguggucuccgugaaacuugcgggaaauucuagccugugcccuguuuccggcugggcuauuuacagcaaggacaacucuaucagaaucggguccaaaggagauguguuugucauucgggagccguucaucagcuguucuccccucgaaugccgcaccuuuuuccugacacagggcgcccuucugaaugacaagcauuccaacggcaccauuaaagauagaagcccuuaucggacgcucaugucuugucccaucggggaggugccuucccccuacaacagccgcuuugaauccguugccuggucugcuagcgccugccacgacggaauuaauuggcugaccaucggcaucuccgggccugauaacggagcuguggccguccugaaguauaauggcauuaucacagacaccauuaagagcuggagaaacaauauccuccggacacaagagucugagugugcgugcgugaacggguccuguuucaccgugaugacggauggaccgagcgacggccaggccucuuacaaaauuuuucgcaucgaaaagggcaaaaucgucaagagcguugagaugaaugcucccaacuauuacuacgaagagugcuccuguuauccugauucuagcgagauuacaugcgugugcagagacaauuggcauggguccaaccggcccugggugagcuucaaucagaaccuggaauaccagaucggauauauuuguucuggcaucuuuggggauaauccucgccccaacgacaaaaccggauccugcggcccggucagcucuaauggggccaacggagugaagggcuucuccuuuaaguacggcaacgggguuuggauuggaagaacaaaaagcaucuccucucggaauggcuucgagaugauuugggauccuaacggguggaccggaaccgacaaugacuuuagcaucaagcaagauaucgugggcauuaacgaaugguccggguauucuggcagcuucguccagcaccccgagcuuacaggacuggacuguauccgcccuugcuucuggguggaacucauuagaggccggcccaaagagaauacgaucuggaccuccgggagcucuauuuccuuuuguggaguuaacagcgauacagugggcuggucuuggcccgacggggcugagcugccuuucaccaucgauaaguga

SEQ ID NO: 212516 - RNA, 1410 nt, Artificial Sequence; identical to SEQ ID NO: 208810
  derived and/or modified CDS sequence (opt5) from neuraminidase__InfluenzaA__ADZ53130

SEQ ID NO: 212517 - RNA, 1410 nt, Artificial Sequence; identical to SEQ ID NO: 208800
  derived and/or modified CDS sequence (opt5) from neuraminidase__InfluenzaA__ADZ53132

SEQ ID NO: 212518 - RNA, 1410 nt, Artificial Sequence; identical to SEQ ID NO: 208810
  derived and/or modified CDS sequence (opt5) from neuraminidase__InfluenzaA__ADZ53134

SEQ ID NO: 212519 - RNA, 1410 nt, Artificial Sequence; identical to SEQ ID NO: 208810
  derived and/or modified CDS sequence (opt5) from neuraminidase__InfluenzaA__ADZ53136

SEQ ID NO: 212520 - RNA, 1410 nt, Artificial Sequence; identical to SEQ ID NO: 209164
  derived and/or modified CDS sequence (opt5) from neuraminidase__InfluenzaA__ADZ53137

SEQ ID NO: 212521 - RNA, 1410 nt, Artificial Sequence; identical to SEQ ID NO: 208810
  derived and/or modified CDS sequence (opt5) from neuraminidase__InfluenzaA__ADZ53139

SEQ ID NO: 212522 - RNA, 1410 nt, Artificial Sequence
  derived and/or modified CDS sequence (opt5) from neuraminidase__InfluenzaA__ADZ53141
augaaccccaaucagaagaucauuaccaucggcagcgugugcaugacaauugggauggccaaccugauccuccaaauuggaaauaucaucuccauuuggaucucucacagcauucagcugggcaaccagaaucagaucgagacguguaaccaauccgucauuaccuacgaaaauaacacauggguuaaucagaccuaugugaacaucucuaauacaaacuucgcugccgggcagagcguggucuccgugaaacuugcgggaaauucuagccugugcccuguuuccggcugggcuauuuacagcaaggacaacucuaucagaaucggguccaaaggagauguguuugucauucgggagccguucaucagcuguucuccccucgaaugccgcaccuuuuuccugacacagggcgcccuucugaaugacaagcauuccaacggcaccauuaaagauagaagcccuuaucggacgcucaugucuugucccaucggggaggugccuucccccuacaacagccgcuuugaauccguugccuggucugcuagcgccugccacgacggaauuaauuggcugaccaucggcaucuccgggccugauaacggagcuguggccguccugaaguauaauggcauuaucacagacaccauuaagagcuggagaaacaauauccuccggacacaagagucugagugugcgugcgugaacggguccuguuucaccgugaugacggauggaccgagcgacggccaggccucuuacaaaauuuuucgcaucgaaaagggcaaaaucgucaagagcguugagaugaaugcucccaacuaucauuacgaagagugcuccuguuacccugauucuagcgagauuacaugcgugugcagagacaauuggcacggguccaaccggcccugggugagcuucaaucagaaccuggaauaucagaucggauacauuuguucuggcaucuuuggggauaauccucgccccaacgacaaaaccggauccugcggcccggucagcucuaauggggccaacggagugaagggcuucuccuuuaaguauggcaacgggguuuggauuggaagaacaaaaagcaucuccucucggaauggcuucgagaugauuugggauccuaacggguggaccggaaccgacaaugacuuuagcaucaagcaagauaucgugggcauuaacgaaugguccggguacucuggcagcuucguccagcauuccgagcuuacaggacuggacuguauccgccccugcuucuggguggaacucauuagaggccggccuaaagagaauacgaucuggaccagcgggucuuccauuagcuuuuguggaguuaacucugauacagugggcugguccuggcccgacggggcugagcugcccuucaccaucgauaaguga

SEQ ID NO: 212523 - RNA, 1410 nt, Artificial Sequence; identical to SEQ ID NO: 208671
  derived and/or modified CDS sequence (opt5) from neuraminidase__InfluenzaA__AEA03712

SEQ ID NO: 212524 - RNA, 1410 nt, Artificial Sequence; identical to SEQ ID NO: 208671
  derived and/or modified CDS sequence (opt5) from neuraminidase__InfluenzaA__AEA03722

SEQ ID NO: 212525 - RNA, 1410 nt, Artificial Sequence; identical to SEQ ID NO: 208671
  derived and/or modified CDS sequence (opt5) from neuraminidase__InfluenzaA__AEA03744

SEQ ID NO: 212526 - RNA, 1410 nt, Artificial Sequence
  derived and/or modified CDS sequence (opt5) from neuraminidase__InfluenzaA__AEA03755
augaaccccaaucagaagaucauuaccaucggcagcgugucccugacaauuucuacgaucugcuucuuuaugcaaauugccauccucaucaccacagucacccugcacuucaaacaguacgaguuuaacagcccuccgaauaaccagguuaugcuuugugaacccacaauuaucgagagaaauauuaccgaaaucguguaucugacaaacaccacgauugagaaggaaaucugcccuaaacucgcugaguaccggaauugguccaagccccagugugacauuaccggguucgccccuuuuucuaaagauaacagcauccgccuguccgcgggaggcgacaucugggugacaagagagcccuaugucucuugcgauccugacaaguguuaccaauucgcucuugggcagggaaccacacugaauaacgugcauagcaauaacaccguucggggccgcacgccguauagaacacuccugaugaaugaacugggggugcccuuucaccucggaaccaagcaggucugcauugccugguccucuagcuccugucaugauggcaaagccuggcugcacgugugcaucacaggcgacgauaagaacgcuaccgccagcuucauuuacaaugggcggcuuguugacucuguggucuccuggagcaaagagauccugcgcacccaggaaucugagugugugugcauuaacggaacauguacgguggucaugaccgauggcuccgcuagcgggaaggccgacacaaaaauccucuuuaucgaggaaggaaagauuguucauaccuccacacugucuggcagcgcgcaacacguggaggaaugcuccugcuauccuagauaccccggggugcggugugucugccgcgauaacuggaagggaagcaauagaccuaucguggacauuaacaucaaagaucacucuauuguuuccagcuacguguguucuggccuugucggcgacacgccccggaagaaugacagcuccucuagcucccauugccuggauccgaacaaugaggaagggggacacggcgugaaagggugggccuucgacgauggaaacgacguuuggaugggccgcaccaucagcgagaagucuagacucggguaugagacauuuaaagugaucgaaggaugguccaauccuaagagcaaacugcagauuaaccggcaggucaucguggaucgcggcaauagaucuggcuacuccgggauuuucagcgucgagggaaaguccuguaucaaccggugcuuuuauguggaacugauuagaggccgcaaggaggaaaccgagguucucuggaccucuaauagcaucguggucuucugugggacauccggaaccuacggcacagggucuuggcccgacggcgcugauauuaaccugaugccuaucuga

SEQ ID NO: 212527 - RNA, 1410 nt, Artificial Sequence; identical to SEQ ID NO: 208671
  derived and/or modified CDS sequence (opt5) from neuraminidase__InfluenzaA__AEA03766

SEQ ID NO: 212528 - RNA, 1410 nt, Artificial Sequence; identical to SEQ ID NO: 208671
  derived and/or modified CDS sequence (opt5) from neuraminidase__InfluenzaA__AEA03796

SEQ ID NO: 212529 - RNA, 1410 nt, Artificial Sequence; identical to SEQ ID NO: 208671
  derived and/or modified CDS sequence (opt5) from neuraminidase__InfluenzaA__AEA03806

SEQ ID NO: 212530 - RNA, 1410 nt, Artificial Sequence
  derived and/or modified CDS sequence (opt5) from neuraminidase__InfluenzaA__AEA03817
augaaccccaaucagaagaucauuaccaucggcagcgugucccugacaauuucuacgaucugcuucuuuaugcaaauugccauccucaucaccacagucacccugcacuucaaacaguacgaguuuaacagcccuccgaauaaccagguuaugcuuugugaacccacaauuaucgagagaaauauuaccgaaaucguguaucugacaaacaccacgauugagaaggaaaucugcccuaaacucgcugaguaccggaauugguccaagccccagugugacauuaccggguucgccccuuuuucuaaagauaacagcauccgccuguccgcgggaggcgacaucugggugacaagagagcccuaugucucuugcgauccugaccgguguuaccaauucgcucuugggcagggaaccacacugaauaacgugcauagcaauaacaccguucgcgauagaacgccguaucggacacuccugaugaaugaacugggcgugcccuuucaccucgggaccaagcaggucugcauugccugguccucuagcuccugucaugacggaaaggccuggcugcacgugugcaucacaggcgaugacaaaaacgcuaccgccagcuucauuuacaauggccgccuuguugauucuguggucuccuggagcaaggagauccugagaacccaggaaucugagugugugugcauuaacgggacauguacgguggucaugaccgacggauccgcuagcggcaaagccgauacaaagauccucuuuaucgaggaagggaaaauuguucauaccuccacacugucuggaagcgcgcaacacguggaggaaugcuccugcuauccucgguaccccggcgugcgcugugucugcagagacaacuggaaggggagcaaucggccuaucguggauauuaacaucaaggaccacucuauuguuuccagcuacguguguucuggacuugucggcgacacgccccgcaaaaaugauagcuccucuagcucccauugccuggacccgaacaaugaggaaggcgggcacggagugaagggcugggccuucgaugacgggaacgauguuuggaugggaagaaccaucagcgagaaaucucggcucggcuaugagacauuuaaggugaucgaagggugguccaauccuaaaagcaagcugcagauuaaccgccaggucaucguggacagaggaaaucggucuggcuacuccggcauuuucagcgucgaggggaaauccuguaucaacagaugcuuuuauguggaacugauucgcggacggaaggaggaaaccgagguucucuggaccucuaauagcaucguggucuucuguggcacauccgggaccuacggaacaggcucuuggcccgauggggcugacauuaaccugaugccuaucuga

SEQ ID NO: 212531 - RNA, 1410 nt, Artificial Sequence; identical to SEQ ID NO: 208671
  derived and/or modified CDS sequence (opt5) from neuraminidase__InfluenzaA__AEA03828

SEQ ID NO: 212532 - RNA, 1410 nt, Artificial Sequence; identical to SEQ ID NO: 208671
  derived and/or modified CDS sequence (opt5) from neuraminidase__InfluenzaA__AEA03838

SEQ ID NO: 212533 - RNA, 1410 nt, Artificial Sequence; identical to SEQ ID NO: 211827
  derived and/or modified CDS sequence (opt5) from neuraminidase__InfluenzaA__AEA03849

SEQ ID NO: 212534 - RNA, 1410 nt, Artificial Sequence; identical to SEQ ID NO: 208671
  derived and/or modified CDS sequence (opt5) from neuraminidase__InfluenzaA__AEA03860

SEQ ID NO: 212535 - RNA, 1410 nt, Artificial Sequence
  derived and/or modified CDS sequence (opt5) from neuraminidase__InfluenzaA__AEA03871
augaaccccaaucagaagaucauuaccaucggcagcgugucccugacaauuucuacgaucugcuucuuuaugcaaauugccauccucaucaccacagucacccugcacuucaaacaguacgaguuuaacagcccuccgaauaaccagguuaugcuuugugaacccacaauuaucgagagaaauauuaccgaaaucguguaucugacaaacaccacgauugagaaggaaaucugcccuaaacucgcugaguaccggaauugguccaagccccagugugacauuaccggguucgccccuuuuucuaaagauaacagcauccgccuguccgcgggaggcgacaucugggugacaagagagcccuaugucucuugcgauccugacaaguguuaccaauucgcucuugggcagggaaccacacugaauaacgugcauagcaauaacaccguucgggaucgcacgccguauagaacacuccugaugaaugaacugggcgugcccuuucaccucgggaccaagcaggucugcauugccugguccucuagcuccugucaugacggaaaagccuggcugcacgugugcaucacaggcgaugacaagaacgcuaccgccagcuucauuuacaauggccggcuuguugauucuguggucuccuggagcaaagagauccugcgcacccaggaaucugagugugugugcauuaacgggacauguacgguggucaucaccgacggauccgcuagcggcaaggccgauacaaaaauccucuuuauugaggaagggaagaucguucauaccuccacacugucuggaagcgcgcaacacguggaggaaugcuccugcuauccuagauaccccggcgugcggugugucugccgcgacaacuggaaggggagcaauagaccuauuguggauaucaacauuaaagaccacucuaucguuuccagcuacguguguucuggacuugucggcgacacgccccggaagaaugauagcuccucuagcucccauugccuggacccgaacaaugaggaaggcgggcacggagugaaaggcugggccuucgaugacgggaacgauguuuggaugggacgcaccaucagcgagaagucuagacucggcuaugagacauuuaaagugauugaagggugguccaauccuaagagcaaacugcagaucaaccggcaggucauuguggaccgcggaaauagaucuggcuacuccggcaucuucagcgucgaggggaaguccuguauuaaccggugcuuuuauguggaacugaucagaggacgcaaggaggaaaccgagguucucuggaccucuaauagcauuguggucuucuguggcacauccgggaccuacggaacaggcucuuggcccgauggggcugacaucaaccugaugccuaucuga

SEQ ID NO: 212536 - RNA, 1410 nt, Artificial Sequence; identical to SEQ ID NO: 208671
  derived and/or modified CDS sequence (opt5) from neuraminidase__InfluenzaA__AEA03879

SEQ ID NO: 212537 - RNA, 1410 nt, Artificial Sequence
  derived and/or modified CDS sequence (opt5) from neuraminidase__InfluenzaA__AEA03889
augaaccccaaucagaagaucauuaccaucggcagcgugucccugacaauuucuacgaucugcuucuuuaugcaaauugccauccucaucaccacagucacccugcacuucaaacaguacgaguuuaacagcccuccgaauaaccagguuaugcuuugugaacccacaauuaucgagagaaauauuaccgaaaucguguaucugacaaacaccacgauugagaaggaaaucugcccuaaacucgcugaguaccggaauugguccaagccccagugugacauuaccggguucgccccuuuuucuaaagauaacagcauccgccuguccgcgggaggcgacaucugggugacaagagagcccuaugucucuugcgauccugacaaguguuaccaauucgcucuugggcagggaaccacacugaauaacgugcauagcaauaacaagguucgggaucgcaccccguauagaacgcuccugaugaaugaacugggcgugcccuuucaccucgggacaaaacaggucugcauugccugguccucuagcuccugucaugacggaaaggccuggcugcacgugugcaucaccggcgaugacaaaaacgcuacagccagcuucauuuacaauggccggcuuguugauucuguggucuccuggagcaaggagauccugcgcacccaggaaucugagugugugugcauuaacgggaccuguacaguggucaugacggacggauccgcuagcggcaaagccgauaccaagauccucuuuaucgaggaagggaagauuguucauacauccacccugucuggaagcgcgcaacacguggaggaaugcuccugcuauccuagauaccccggcgugcggugugucugccgcgacaacuggaaagggagcaauagaccuaucguggauauuaacaucaaggaccacucuauuguuuccagcuacguguguucuggacuugucggcgacacaccccggaaaaaugauagcuccucuagcucccauugccuggacccgaacaaugaggaaggcgggcacggagugaagggcugggccuucgaugacgggaacgauguuuggaugggacgcaccaucagcgagaaaucuagacucggcuaugagacguuuaaggugaucgaagggugguccaauccuaaaagcaagcugcagauuaaccggcaggucaucguggaccgcggaaauagaucuggcuacuccggcauuuucagcgucgaggggaaguccuguaucaaccggugcuuuuauguggaacugauuagaggacgcaaagaggaaacagagguucucuggaccucuaauagcaucguggucuucuguggcaccuccgggacauacggaaccggcucuuggcccgauggggcugacauuaaccugaugccuaucuga

SEQ ID NO: 212538 - RNA, 1410 nt, Artificial Sequence
  derived and/or modified CDS sequence (opt5) from neuraminidase__InfluenzaA__AEA03898
augaaccccaaucagaagaucauuaccaucggcagcgugucccugacaauuucuacgaucugcuucuuuaugcaaauugccauccucaucaccacagucacccugcacuucaaacaguacgaguuuaacagcccuccgaauaaccagguuaugcuuugugaacccacaauuaucgagagaaauauuaccgaaaucguguaucugacaaacaccacgauugagaaggaaaucugcccuaaacucgcugaguaccggaauugguccaagccccagugugacauuaccggguucgccccuuuuucuaaagauaacagcauccgccuguccgcgggaggcgacaucugggugacaagagagcccuaugucucuugcgauccugacaaguguuaccaauucgcucuugggcagggaaccacacugaauaacgugcauagcaauaacaccguucgggaucgcacgccguauagaacacuccugaugaaugaacugggcgugcccuuucaccucgggaccaagcaggucugcauugccugguccagcagcuccugucaugacggaaaagccuggcugcacgugugcaucacaggcgaugacaagaacgcuaccgccagcuucauuuacaauggccggcuuguugauucuguggucuccuggagcaaagagauccugcgcacccaggaaucugagugugugugcauuaacgggacauguacgguggucaugaccgacggauccgcuagcggcaaggccgauacaaaaauccucuuuaucgaggaagggaagauuguucauaccuccacacugucuggaagcgcgcaacacguggaggaaugcuccugcuauccuagauaccccggcgugcggugugucugccgcgacaacuggaaggggagcaauagaccuaucguggauauuaacaucaaagaccacucuauuguuuccagcuacguguguucuggacuugucggcgacacgccccggaagucugauuccucuagcuccagccauugccuggacccgaauaacgaggaaggcgggcacggagugaaaggcugggccuucgaugacgggaaugauguuuggaugggacgcaccaucucugagaaguccagacucggcuaugagacauuuaaagugaucgaaggguggagcaacccuaagucuaaacugcagauuaaucggcaggucaucguggaccgcggaaacagauccggcuacagcggcauuuucuccgucgaggggaagucuuguaucaaucggugcuuuuauguggaacugauuagaggacgcaaggaggaaaccgagguucucuggaccagcaacuccaucguggucuucuguggcacaucugggaccuacggaacaggcagcuggcccgauggggcugacauuaaucugaugccuaucuga

SEQ ID NO: 212539 - RNA, 1410 nt, Artificial Sequence; identical to SEQ ID NO: 208671
  derived and/or modified CDS sequence (opt5) from neuraminidase__InfluenzaA__AEA03909

SEQ ID NO: 212540 - RNA, 1410 nt, Artificial Sequence
  derived and/or modified CDS sequence (opt5) from neuraminidase__InfluenzaA__AEA03924
augaaccccaaucagaagaucauuaccaucggcagcgugucccugacaauuucuacgaucugcuucuuuaugcaaauugccauccucaucaccacagucacccugcacuucaaacaguacgaguuuaacagcccuccgaauaaccagguuaugcuuugugaacccacaauuaucgagagaaauauuaccgaaaucguguaucugacaaacaccacgauugagaaggaaaucugcccuaaacucgcugaguaccggaauugguccaagccccagugugacauuaccggguucgccccuuuuucuaaagauaacagcauccgccuguccgcgggaggcgacaucugggugacaagagagcccuaugucucuugcgauccugacaaguguuaccaauucgcucuugggcagggaaccacacugaauaacgugcauagcaauaacaccguucgggaucgcacgccguauagaacacuccugaugaaugaacugggcgugcccuuucaccucgggaccaagcaggucugcauugccugguccucuagcuccugucaugacggaaaagccuggcugcacgugugcaucacaggcgaugacaagaacgcuaccgccagcuucauuuacaauggccggcuuguugauucuguggucuccuggagcaaagagauccugcgcacccaggaaucugagugugugugcauuaacgggacauguacgguggucaugaccgacggauccgcuagcggcaaggccgauacaaaaauccucuuuaucgaggaagggaagauuauccauaccuccacacugucuggaagcgcgcaacacguugaggaaugcuccugcuauccuagauaccccggcgugcggugugugugccgcgacaacuggaaggggagcaauagaccuauugucgauaucaacauuaaagaccacucuaucguguccagcuacguuuguucuggacuugugggcgacacgccccggaagaaugauagcuccucuagcucccauugccuggacccgaacaaugaggaaggcgggcacggagucaaaggcugggccuucgaugacgggaacgauguguggaugggacgcaccaucagcgagaagucuagacucggcuaugagacauuuaaaguuauugaagggugguccaauccuaagagcaaacugcagaucaaccgccaggugauugucgaccggggaaauagaucuggcuacuccggcaucuucagcguggaggggaaguccuguauuaaccggugcuuuuaugucgaacugaucagaggacgcaaggaggaaaccgaggugcucuggaccucuaauagcauuguuguguucuguggcacauccgggaccuacggaacaggcucuuggcccgauggggcugacaucaaccugaugccuaucuga

SEQ ID NO: 212541 - RNA, 1410 nt, Artificial Sequence; identical to SEQ ID NO: 208671
  derived and/or modified CDS sequence (opt5) from neuraminidase__InfluenzaA__AEA03935

SEQ ID NO: 212542 - RNA, 1410 nt, Artificial Sequence
  derived and/or modified CDS sequence (opt5) from neuraminidase__InfluenzaA__AEA03946
augaaccccaaucagaagaucauuaccaucggcagcgugucccugacaauuucuacgaucugcuucuuuaugcaaauugccauccucaucaccacagucacccugcacuucaaacaguacgaguuuaacagcccuccgaauaaccagguuaugcuuugugaacccacaauuaucgagagaaauauuaccgaaaucguguaucugacaaacaccacgauugagaaggaaaucugcccuaaacucgcugaguaccggaauugguccaagccccagugugacauuaccggguucgccccuuuuucuaaagauaacagcauccgccuguccgcgggaggcgacaucugggugacaagagagcccuaugucucuugcgauccugacaaguguuaccaauucgcucuugggcagggaaccacacugaauaacgugcauagcaauaacaccguucgggaucgcacgccguauagaacacuccugaugaaugaacugggcgugcccuuucaccucgggaccaagcaggucugcauugccugguccucuagcuccugucaugacggaaaagccuggcugcacgugugcaucacaggcgaugacaagaacgcuaccgccagcuucauuuacaauggccggcuuguugauucuguggucuccuggagcgaggaaauccugcgcacccaggagucugagugugugugcauuaacgggacauguacgguggucaugaccgacggauccgcuagcggcaaagccgauacaaagauccucuuuaucgaagaggggaaaauuguucauaccuccacacugucuggaagcgcgcaacacguggaagagugcuccugcuauccuagauaccccggcgugcggugugucugccgcgacaacuggaaggggagcaauagaccuaucguggauauuaacaucaaggaccacucuauuguuuccagcuacguguguucuggacuugucggcgacacgccccggaaaaaugauagcuccucuagcucccauugccuggacccgaacaaugaagagggcgggcacggagugaagggcugggccuucgaugacgggaacgauguuuggaugggacgcaccaucagcgagaaaucuagacucggcuaugaaacauuuaaggugaucgaggggugguccaauccuaaaagcaagcugcagauuaaccggcaggucaucguggaccgcggaaauagaucuggcuacuccggcauuuucagcgucgaagggaaauccuguaucaaccggugcuuuuauguggagcugauuagaggacgcaaggaagagaccgagguucucuggaccucuaauagcaucguggucuucuguggcacauccgggaccuacggaacaggcucuuggcccgauggggcugacauuaaccugaugccuaucuga

SEQ ID NO: 212543 - RNA, 1410 nt, Artificial Sequence
  derived and/or modified CDS sequence (opt5) from neuraminidase__InfluenzaA__AEA03957
augaaccccaaucagaagaucauuaccaucggcagcgugucccugacaauuucuacgaucugcuucuuuaugcaaauugccauccucaucaccacagucacccugcacuucaaacaguacgaguuuaacagcccuccgaauaaccagguuaugcuuugugaacccacaauuaucgagagaaauauuaccgaaaucguguaucugacaaacaccacgauugagaaggaaaucugcccuaaacucgcugaguaccggaauugguccaagccccagugugacauuaccggguucgccccuuuuucuaaagauaacagcauccgccuguccgcgggaggcgacaucugggugacaagagagcccuaugucucuugcgauccugacaaguguuaccaauucgcucuugggcagggaaccacacugaauaacgugcauagcaauaacaccguucgggaucgcacgccguauagaacacuccugaugaaugaacugggcgugcccuuucaccucgggaccaagcaggucugcauugccugguccucuagcuccugucaugacggaaaagccuggcugcacgugugcaucacaggcgaugacaagaacgcuaccgccagcuucauuuacaauggccggcuuguugauucuguggucuccuggagcaaagagauccugcgcacccaggaaucugagugugugugcauuaacgggacauguacgguggucaugaccgacggauccgcuagcggcaaggccgauacaaaaauccucuuuaucgaggaagggaagauuguucauaccuccacacugucuggaagcgcgcaacacguggaggaaugcuccugcuauccuagauaccccggcgugcggugugucugccgcgacaacuggaaggggagcaauagaccuaucguggauauuaacaucaaagaccacucuauuguuuccagcuacguguguucuggacuugucggcgacacgccccggaagaaugauagcuccucuagcucccauugccuggacccgaacaaugaggaaggcgggcacggagugaaaggcugggccuucgaugacgggaacgauguuuggaugggacgcaccaucagcgagaagucuagacucggcuaugagacauuuaaagugaucgaagggugguccaauagcaagucuaaacugcagauuaaccggcaggucaucguggaccgcggaaauagauccggcuacagcggcauuuucuccgucgaggggaagucuuguaucaaccggugcuuuuauguggaacugauuagaggacgcaaggaggaaaccgagguucucuggaccagcaauuccaucguggucuucuguggcacaucugggaccuacggaacaggcagcuggccugauggggcugacauuaaccugaugcccaucuga

SEQ ID NO: 212544 - RNA, 1410 nt, Artificial Sequence; identical to SEQ ID NO: 208671
  derived and/or modified CDS sequence (opt5) from neuraminidase__InfluenzaA__AEA03989

SEQ ID NO: 212545 - RNA, 1410 nt, Artificial Sequence; identical to SEQ ID NO: 211827
  derived and/or modified CDS sequence (opt5) from neuraminidase__InfluenzaA__AEA04000

SEQ ID NO: 212546 - RNA, 1410 nt, Artificial Sequence; identical to SEQ ID NO: 208671
  derived and/or modified CDS sequence (opt5) from neuraminidase__InfluenzaA__AEA04011

SEQ ID NO: 212547 - RNA, 1410 nt, Artificial Sequence; identical to SEQ ID NO: 211827
  derived and/or modified CDS sequence (opt5) from neuraminidase__InfluenzaA__AEA04022

SEQ ID NO: 212548 - RNA, 1410 nt, Artificial Sequence; identical to SEQ ID NO: 208671
  derived and/or modified CDS sequence (opt5) from neuraminidase__InfluenzaA__AEA04033

SEQ ID NO: 212549 - RNA, 1410 nt, Artificial Sequence; identical to SEQ ID NO: 208671
  derived and/or modified CDS sequence (opt5) from neuraminidase__InfluenzaA__AEA04044

SEQ ID NO: 212550 - RNA, 1410 nt, Artificial Sequence; identical to SEQ ID NO: 208671
  derived and/or modified CDS sequence (opt5) from neuraminidase__InfluenzaA__AEA04049

SEQ ID NO: 212551 - RNA, 1410 nt, Artificial Sequence; identical to SEQ ID NO: 208671
  derived and/or modified CDS sequence (opt5) from neuraminidase__InfluenzaA__AEA04059

SEQ ID NO: 212552 - RNA, 1410 nt, Artificial Sequence; identical to SEQ ID NO: 208671
  derived and/or modified CDS sequence (opt5) from neuraminidase__InfluenzaA__AEA04070

SEQ ID NO: 212553 - RNA, 1410 nt, Artificial Sequence; identical to SEQ ID NO: 211827
  derived and/or modified CDS sequence (opt5) from neuraminidase__InfluenzaA__AEA04081

SEQ ID NO: 212554 - RNA, 1410 nt, Artificial Sequence; identical to SEQ ID NO: 208671
  derived and/or modified CDS sequence (opt5) from neuraminidase__InfluenzaA__AEA04092

SEQ ID NO: 212555 - RNA, 1410 nt, Artificial Sequence; identical to SEQ ID NO: 208671
  derived and/or modified CDS sequence (opt5) from neuraminidase__InfluenzaA__AEA04103

SEQ ID NO: 212556 - RNA, 1410 nt, Artificial Sequence; identical to SEQ ID NO: 208671
  derived and/or modified CDS sequence (opt5) from neuraminidase__InfluenzaA__AEA04125

SEQ ID NO: 212557 - RNA, 1410 nt, Artificial Sequence; identical to SEQ ID NO: 208671
  derived and/or modified CDS sequence (opt5) from neuraminidase__InfluenzaA__AEA04133

SEQ ID NO: 212558 - RNA, 1410 nt, Artificial Sequence
  derived and/or modified CDS sequence (opt5) from neuraminidase__InfluenzaA__AEA04144
augaaccccaaucagaagaucauuaccaucggcagcgugucccugacaauuucuacgaucugcuucuuuaugcaaauugccauccucaucaccacagucacccugcacuucaaacaguacgaguuuaacagcccuccgaauaaccagguuaugcuuugugaacccacaauuaucgagagaaauauuaccgaaaucguguaucugacaaacaccacgauugagaaggaaaucugcccuaaacucgcugaguaccggaauugguccaagccccagugugacauuaccggguucgccccuuuuucuaaagauaacagcauccgccuguccgcgggaggcgacaucugggugacaagagagcccuaugucucuugcgauccugacaaguguuaccaauucgcucuugggcagggaaccacacugaauaacgugcauagcaauaacaccguucgggaucgcacgccguauagaacacuccugaugaaugaacugggcgugcccuuucaccucgggaccaagcaggucugcauugccugguccucuagcuccugucaugacggaaaagccuggcugcacgugugcaucacaggcgaugacaagaacgcuaccgccagcuucauuuacaauggccggcuuguugauucuguggucuccuggagcaaagagauccugcgcacccaggaaucugagugugugugcauuaacgggacauguacgguggucaugaccgacggauccgcuagcggcaaggccgauacaaaaauccucuuuaucgaggaagggaagauuauccauaccuccacacugucuggaagcgcgcaacacguugaggaaugcuccugcuauccuagauaccccggcgugcggugugugugccgcgacaacuggaaggggagcaauagaccuauugucgauaucaacauuaaagaccacucuaucguguccagcuacguuuguucuggacuugugggcgacacgccccggaagaaugauagcuccucuagcucccauugccuggacccgaacaaugaggaaggcgggcacggagucaaaggcugggccuucgaugacgggaacgauguguggaugggacgcaccaucagcgagaagucuagacucggcuaugagacauuuaaaguuauugaagggugguccaauccuaagagcaaacugcagaucaaccgccaggugauugucgaccggggaaauagaucuggcuacuccggcaucuucagcguggaggggaaguccuguauuaaccggugcuuuuaugucgaacugaucagaggacgcaaggaggaaaccgaggugcucuggaccucuaauagcauuaucguuuucuguggcacauccgggaccuacggaacaggcucuuggcccgauggggcugacaucaaccugaugccuauuuga

SEQ ID NO: 212559 - RNA, 1410 nt, Artificial Sequence; identical to SEQ ID NO: 208671
  derived and/or modified CDS sequence (opt5) from neuraminidase__InfluenzaA__AEA04155

SEQ ID NO: 212560 - RNA, 1410 nt, Artificial Sequence; identical to SEQ ID NO: 208671
  derived and/or modified CDS sequence (opt5) from neuraminidase__InfluenzaA__AEA04166

SEQ ID NO: 212561 - RNA, 1410 nt, Artificial Sequence
  derived and/or modified CDS sequence (opt5) from neuraminidase__InfluenzaA__AEA04177
augaaccccaaucagaagaucauuaccaucggcagcgugucccugacaauuucuacgaucugcuucuuuaugcaaauugccauccucaucaccacagucacccugcacuucaaacaguacgaguuuaacagcccuccgaauaaccagguuaugcuuugugaacccacaauuaucgagagaaauauuaccgaaaucguguaucugacaaacaccacgauugagaaggaaaucugcccuaaacucgcugaguaccggaauugguccaagccccagugugacauuaccggguucgccccuuuuucuaaagauaacagcauccgccuguccgcgggaggcgacaucugggugacaagagagcccuaugucucuugcgauccugacaaguguuaccaauucgcucuugggcagggaaccacacugaauaacgugcauagcaauaacaccguucggaaucgcacgccguauagaacacuccugaugaacgaacugggcgugcccuuucaccucgggaccaagcaggucugcauugccugguccucuagcuccugucaugauggaaaagccuggcugcacgugugcaucacaggcgacgauaagaaugcuaccgccagcuucauuuacaacggccggcuuguugacucuguggucuccuggagcaaagagauccugcgcacccaggaaucugagugugugugcauuaacgggacauguacgguggucaugaccgauggauccgcuagcggcaaggccgacacaaaaauccucuuuaucgaggaagggaagauuguucauaccuccacacugucuggaagcgcgcaacacguggaggaaugcuccugcuauccuagauaccccggcgugcggugugucugccgcgauaauuggaaggggagcaacagaccuaucguggacauuaauaucaaagaucacucuauuguuuccagcuacguguguucuggacuugucggcgacacgccccggaagaacgacagcuccucuagcucccauugccuggauccgaauaacgaggaaggcgggcacggagugaaaggcugggccuucgacgaugggaaugacguuuggaugggacgcaccaucagcgagaagucuagacucggcuaugagacauuuaaagugaucgaagggugguccaacccuaagagcaaacugcagauuaaucggcaggucaucguggaucgcggaaacagaucuggcuacuccggcauuuucagcgucgaggggaaguccuguaucaaucggugcuuuuauguggaacugauuagaggacgcaaggaggaaaccgagguucucuggaccucuaacagcaucguggucuucuguggcacauccgggaccuacggaacaggcucuuggcccgacggggcugauauuaaucugaugccuaucuga

SEQ ID NO: 212562 - RNA, 1410 nt, Artificial Sequence; identical to SEQ ID NO: 208671
  derived and/or modified CDS sequence (opt5) from neuraminidase__InfluenzaA__AEA04188

SEQ ID NO: 212563 - RNA, 1410 nt, Artificial Sequence; identical to SEQ ID NO: 209664
  derived and/or modified CDS sequence (opt5) from neuraminidase__InfluenzaA__AEA04199

SEQ ID NO: 212564 - RNA, 1410 nt, Artificial Sequence; identical to SEQ ID NO: 208671
  derived and/or modified CDS sequence (opt5) from neuraminidase__InfluenzaA__AEA04210

SEQ ID NO: 212565 - RNA, 1410 nt, Artificial Sequence; identical to SEQ ID NO: 209664
  derived and/or modified CDS sequence (opt5) from neuraminidase__InfluenzaA__AEA04229

SEQ ID NO: 212566 - RNA, 1410 nt, Artificial Sequence; identical to SEQ ID NO: 209664
  derived and/or modified CDS sequence (opt5) from neuraminidase__InfluenzaA__AEA04239

SEQ ID NO: 212567 - RNA, 1410 nt, Artificial Sequence
  derived and/or modified CDS sequence (opt5) from neuraminidase__InfluenzaA__AEA04250
augaaccccaaucagaagaucauuaccaucggcagcgugucccugacaauuucuacgaucugcuucuuuaugcaaaccgccauucucaucacaaccgucacacugcacuucaaacagugugaguuuaacagcccuccgaauaaccagguuaugcuuugcgaacccaccaucauugagagaaauaucacagaaauuguguaccugaccaacacgaccaucgagaaggaaauuuguccuaaacucgcugaguaucggaauugguccaagccccagugcgacaucacaggguucgccccuuuuucuaaagauaacagcauucgccuguccgcgggaggcgacaucugggugaccagagagcccuacgucucuugugauccugacaagugcuaucaauucgcucuugggcagggaacaacccugaauaacgugcauagcaauaacacgguucgggugcgcacaccguacagaacccuccugaugaaugaacugggcguccccuuucaccucgggacaaaacagguguguaucgccugguccucuagcuccugccaugauggaaaggccuggcugcacguuuguauuaccggcgacgauaagaacgcuaccgccagcuucaucuauaauggccggcuuguggacucugucguguccuggagcaaagagauucugcgcacacaggaaucugagugcguguguaucaacgggacgugcaccgucguuaugacagauggauccgcuagcggcaaggccgacaccaaaauucucuuuaucgaggaagggaagaucgugcauacauccacccugucuggaagcgcgcaacacguggaggaaugcuccuguuacccuagauaucccggcguccggugcgugugucgcgauaacuggaaggggagcaauagaccuauuguugacaucaacauuaaagaucacucuaucguguccagcuacgucugcucuggacuugugggcgacacgccccggaagaaugacagcuccucuagcucccauugucuggauccgaacaaugaggaaggcgggcacggaguuaaaggcugggccuucgacgaugggaacgacguguggaugggacgcacaauuagcgagaagucuagacucggcuacgagaccuuuaaagucaucgaagggugguccaauccuaagagcaaacugcagaucaaccgccaggugauugucgaucggggaaauagaucuggcuauuccggcaucuucagcguggaggggaaguccugcauuaaccgguguuuuuacguugaacugaucagaggacgcaaggaggaaaccgaggugcucuggacaucuaauagcauugucguguucugcggcaccuccgggacauauggaacgggcucuuggcccgacggggcugauaucaaccugaugccuauuuga

SEQ ID NO: 212568 - RNA, 1410 nt, Artificial Sequence; identical to SEQ ID NO: 209664
  derived and/or modified CDS sequence (opt5) from neuraminidase__InfluenzaA__AEA04260

SEQ ID NO: 212569 - RNA, 1410 nt, Artificial Sequence
  derived and/or modified CDS sequence (opt5) from neuraminidase__InfluenzaA__AEA04268
augaaccccaaucagaagaucauuaccaucggcagcgugucccugacaauuucuacgaucugccucuucaugcaaaccgccauucugaucacaaccgucacacuucacuuuaaacagugugaguucaacagcccuccgaauaaccaggcuaugcugugcgaacccaccaucauugagagaaauaucacagaaauuguuuaccucaccaacacgaccaucgagaaggaaauuuguccuaaacuggccgaguaucggaauugguccaagccccagugcgacaucacaggguuugcgccuuucucuaaagauaacagcauucgccuuuccgcuggaggcgacaucugggugaccagagagcccuacgugucuugugauccugacaagugcuaucaauuugcccuggggcagggaacaacccucaauaacguccauagcaauaacacggugcgggaucgcacaccguacagaacccugcugaugaaugaacucggcguucccuuccaccuggggacaaaacagguguguaucgccugguccucuagcuccugccaugacggaaaggcuuggcuucacgucuguauuaccggcgaugacaagaacgccaccgcuagcuuuaucuauaauggccggcugguggauucuguuguguccuggagcaaagagauucuccgcacacaggaaucugagugcgucuguaucaacgggacgugcaccguggugaugacagacggauccgccagcggcaaggcggauaccaaaauucuguucaucgaggaagggaagaucguccauacauccacccuuucuggaagcgcccaacacguugaggaaugcuccuguuacccuagauaucccggcgugcggugcgugugucgcgacaacuggaaggggagcaauagaccuauugucgauaucaacauuaaagaccacucuaucguguccagcuacguuugcucuggacuggugggcgacacgccccggaagaaugauagcuccucuagcucccauugucucgacccgaacaaugaggaaggcgggcacggagucaaaggcugggcuuuugaugacgggaacgauguguggaugggacgcacaauuagcgagaagucuagacugggcuacgagaccuucaaaguuaucgaagggugguccaauccuaagagcaaacugcagaucaaccgccaggugauugucgaccggggaaauagaucuggcuauuccggcaucuuuagcguggaggggaaguccugcauuaaccgguguuucuacgucgaacucaucagaggacgcaaggaggaaaccgaggugcuguggacaucuaauagcauuguuguguuuugcggcaccuccgggacauauggaacgggcucuuggcccgauggggccgacaucaaccuuaugccuauuuga

SEQ ID NO: 212570 - RNA, 1410 nt, Artificial Sequence; identical to SEQ ID NO: 209664
  derived and/or modified CDS sequence (opt5) from neuraminidase__InfluenzaA__AEA04276

SEQ ID NO: 212571 - RNA, 1410 nt, Artificial Sequence; identical to SEQ ID NO: 209664
  derived and/or modified CDS sequence (opt5) from neuraminidase__InfluenzaA__AEA04287

SEQ ID NO: 212572 - RNA, 1410 nt, Artificial Sequence; identical to SEQ ID NO: 209664
  derived and/or modified CDS sequence (opt5) from neuraminidase__InfluenzaA__AEA04298

SEQ ID NO: 212573 - RNA, 1410 nt, Artificial Sequence
  derived and/or modified CDS sequence (opt5) from neuraminidase__InfluenzaA__AEA04307
augaaccccaaucagaagaucauuaccaucggcagcgugucccugacaauuucuacgaucugcuucuuuaugcaaaccgccauucucaucacaaccgucacacugcacuucaaacagugugaguuuaacagcccuccgaauaaccagguuaugcuuugcgaacccaccaucauugagagaaauaucacagaaauuguguaccugaccaacacgaccaucgagaaggaaauuuguccuaaacucgcugaguaucggaauugguccaagccccagugcgacaucacaggguucgccccuuuuucuaaagauaacagcauucgccuguccgcgggaggcgacaucugggugaccagagagcccuacgucucuugugauccugacaagugcuaucaauucgcucuugggcagggaacaacccugaauaacgugcauagcaauaacacgguucgggaucgcacaccguacagaacccuccugaugaaugaacugggcgugcccuuucaccucgggacaaagcaggucuguaucgccugguccucuagcuccugccaugacggaaaagccuggcugcacguguguauuaccggcgaugacaagaacgcuaccgccagcuucaucuauaauggccggcuuguugauucuguggucuccuggagcaaagagauucugcgcacacaggaaucugagugcguguguaucaacgggacgugcaccguggucaugacagacggauccgcuagcggcaaggccgauaccaaaauucucuuuaucgaggaagggaagaucguucauacauccacccugucuggaagcgcgcaacacguggaggaaugcuccuguuacccuagauaucccgacgugcggugcgucugucgcgauaacuggaagggcagcaauagaccuauuguggacaucaacauuaaagaccacucuaucguuuccagcuacgugugcucugggcuugucggagauacgccccggaagaaugacagcuccucuagcucccauugucuggauccgaacaaugaggaaggcggccacggggugaaaggaugggccuucgacgauggcaacgacguuuggauggggcgcacaauuagcgagaagucuagacucggauacgagaccuuuaaagugaucgaaggcugguccaauccuaagagcaaacugcagaucaaccggcaggucauuguggaucgcgggaauagaucuggauauuccggcaucuucagcgucgagggcaaguccugcauuaaccgguguuuuuacguggaacugaucagagggcgcaaggaggaaaccgagguucucuggacaucuaauagcauuguggucuucugcggaaccuccggcacauaugggacgggaucuuggcccgacggcgcugauaucaaccugaugccuauuuga

SEQ ID NO: 212574 - RNA, 1395 nt, Artificial Sequence
  derived and/or modified CDS sequence (opt5) from neuraminidase__InfluenzaA__AEA04357
augaaccccaaucagaagaucauuaccaucggcagcauuugcaugguggucgggaucauuucccugauccuccaaaucggaaacauuguuucuaucuggauuagccacuccauccagacaggcaaucagaaccauacggggaccugugaccagucuauuaucacauacaaaaauagcaccugggugaaccaaacauaugugaaugucguggccggaaaggauaccacauccguuauucuggcuggcaacucuagccuuugcccuaucagagggugggccaucuacuccaaagacaauggagugcggauuggcagcaagggcgaugucuucgugauccgcgagccguuuauuucuuguucccaccuggaaugcagaaccuucuuucucacgcagggggcgcugcuuaacgacaaacauagcaauggaaccguuaaggaucggucucccuaucgcgcucugauguccuguccugugggcgaggcccccagcccuuacaacucuagauucgaauccgucgccuggagcgcuuccgccugccacgacgggaugggauggcucacaaucggcauuucugggcccgaugacggagcuguggccgugcugaaguauaauggcaucaucaccgagacaauuaaaagcuggcggaaggaaauccugcgcacccaggaguccgagugugucugcguuaacggcagcuguuuuacgauuaugacagaugggccuucuggaggcccggcguccuacaaaaucuucaagauugaaaaagggaaggugaccaagagcaucgagcucgacgcccccaauucucauuaugaagagugcagcuguuacccugauacauccaaagugaugugcgucugcagagacaacuggcacggaucuaaccggcccugggugagcuuugaucagaaucuggacuaccaaaugggcuauaucuguuccgggguuuucggagacaacccucgccccaaggauggcaaaggcagcugcgggccgguguacgucgacggagcuaauggcgugaagggguuuucuuauaaauacggaaacggcguuuggauugggagaaccaaguccaucagcucucggcagggcuucgagaugauuugggauccuaauggauggaccgaaacagacuccaacuuuuucacgaaacaggauguggucgccgugaccgacuggagcggcuauuccgggucuuuuguccagcaccccgagcuuacaggacuggauuguaugcgcccuugcuucuggguggaacucaucagaggccggcccaaggagaauaccauuuggacaagcggguccucuaucagcuucuguggaguuaacuccgacaccguggauuggagcuggcccgacggcgcugaacugccuuuuacgauugauaaguga

SEQ ID NO: 212575 - RNA, 1410 nt, Artificial Sequence; identical to SEQ ID NO: 208539
  derived and/or modified CDS sequence (opt5) from neuraminidase__InfluenzaA__AEA04368

SEQ ID NO: 212576 - RNA, 1410 nt, Artificial Sequence
  derived and/or modified CDS sequence (opt5) from neuraminidase__InfluenzaA__AEA04379
augaaccccaaucagaagaccaucacaauuggcagcgugucccugacgaucgagaccgucugcuuccucaugcaaauugccauccuggcuacaaccguuacacuucacuuuaaacagcaugaaugugacucuccugccagcaaccaggugaugccgugcgagcccauuaucaucgaaagaaauauuaccgagaucguguaccugaacaauacaaccauugaaaaggagaucuguccugaggucguggaauaucggaacugguccaaaccccagugccaaauuacgggguucgcgccuuuuucuaaggauaauagcauccgccucuccgcuggaggcgacauuuggguuaccagagagcccuacgugucuugugauccugggaaaugcuaucaguucgcccugggacagggcacaacccuugacaacaagcacagcaaugggacaauccaugaucggaucccgcaccgcacccugcucaugaacgaacugggaguccccuuucaucugggcacgaaacagguguguguugccugguccucuagcuccugccacgacggcaaggcuuggcuccacgugugugucacaggggaugacagaaaugccaccgcuagcuucauuuacgauggacggcugguggacucuaucggcuccuggagccaaaacauucuucgcacacaggagucugagugcguguguaucaaugggaccugcaccgucguuaugacagauggauccgccagcggcagagcggacacgcggauucuguuuaucaaggaagggaaaaucgugcauauuuccccucucucuggaagcgcccagcacaucgaggaaugcuccuguuauccccgcuacccugaugugagaugcauuugucgggacaacuggaagggcagcaaucgccccgucaucgacauuaacauggaggauuauucuaucgacuccagcuacgugugcucuggccugguuggggauaccccgagaaacgacgauagcuccucuaauagcaaaucccgggacccuaacaaugaacgcggaaaccccggcgugaaggggugggcuuucgauaauggagacgaugucuggaugggcagaacaaucagcaaggacucucgguccggguacgagaccuuuaaagugauuggaggcuggagcacaccuaacucuaagucccagguuaauagacaagugaucgucgauaacaauaacuggagcggcuauuccgggauuuucucuguggagggaaaaagcuguaucaaucgcugcuuuuacgucgaacuuauucggggcagaccccaggagacccgcgugugguggacguccaacucuaucguuguguucugugggacaagcggaaccuauggcaccggguccuggcccgacggcgccaauauuaacuuuaugccuaucuga

SEQ ID NO: 212577 - RNA, 1413 nt, Artificial Sequence; identical to SEQ ID NO: 212276
  derived and/or modified CDS sequence (opt5) from neuraminidase__InfluenzaA__AEA10295

SEQ ID NO: 212578 - RNA, 1410 nt, Artificial Sequence; identical to SEQ ID NO: 208810
  derived and/or modified CDS sequence (opt5) from neuraminidase__InfluenzaA__AEA10306

SEQ ID NO: 212579 - RNA, 1410 nt, Artificial Sequence; identical to SEQ ID NO: 212163
  derived and/or modified CDS sequence (opt5) from neuraminidase__InfluenzaA__AEA10316

SEQ ID NO: 212580 - RNA, 1410 nt, Artificial Sequence; identical to SEQ ID NO: 208810
  derived and/or modified CDS sequence (opt5) from neuraminidase__InfluenzaA__AEA10326

SEQ ID NO: 212581 - RNA, 1410 nt, Artificial Sequence; identical to SEQ ID NO: 210098
  derived and/or modified CDS sequence (opt5) from neuraminidase__InfluenzaA__AEA10335

SEQ ID NO: 212582 - RNA, 1410 nt, Artificial Sequence; identical to SEQ ID NO: 208810
  derived and/or modified CDS sequence (opt5) from neuraminidase__InfluenzaA__AEA10342

SEQ ID NO: 212583 - RNA, 1410 nt, Artificial Sequence
  derived and/or modified CDS sequence (opt5) from neuraminidase__InfluenzaA__AEA10352
augaaccccaaucagaagaucauuaccaucggcagcgugugcaugacaauugggauggccaaccugauccuccaaauuggaaauaucaucuccauuuggaucucucacagcauucagcugggcaaccagaaucagaucgagacguguaaccaauccgucauuaccuacgaaaauaacacauggguuaaucagaccuaugugaacaucucuaauacaaacuucgcugccgggcagagcguggucuccgugaaacuugcgggaaauucuagccugugcccuguuuccggcugggcuauuuacagcaaggacaacucuaucagaaucggguccaaaggagauguguuugucauucgggagccguucaucagcuguucuccccucgaaugccgcaccuuuuuccugacacagggcgcccuucugaaugacaagcauuccaacggcaccauuaaagauagaagcccuuaucggacgcucaugucuugucccaucggggaggugccuucccccuacaacagccgcuuugaauccguugccuggucugcuagcgccugccacgacggaauuaauuggcugaccaucggcaucuccgggccugauaacggagcuguggccguccugaaguauaauggcauuaucacagacaccauuaagagcuggagaaacaauauccuccggacacaagagucugagugugcgugcauuaacggguccuguuucaccgugaugacggauggaccgagcgacggccaggccucuuacaaaaucuuucgcaucgaaaagggcaaaauugugaagucugucgagaugaaugcucccaacuaucauuacgaagagugcuccuguuacccugauucuagcgagaucacaugcguuugcagagacaauuggcacggguccaaccggcccugggugagcuucaaucagaaccuggaauaucagauuggauacaucuguucuggcauuuuuggggauaauccucgccccaacgacaaaaccggauccugcagcccggugucuuccaauggcgccaacggggucaagggauucagcuuuaaguauggcaacggcguguggaucgggagaacaaaauccauuucuagccggaauggauucgagaugaucugggauccuaacggcuggaccgggaccgacaauaacuuuuccaucaagcaagacauuguuggaaucaaugaauggucuggcuacagcggguccuucgugcagcaucccgagcuuacaggccuggauuguauucgcccuugcuucugggucgaacucaucagaggacggcccaaagagaacacgauuuggaccagcgggucuuccaucagcuuuuguggcgugaauagcgacacaguuggaugguccuggcccgauggcgcugagcugccuuucaccaucgacaaguga

SEQ ID NO: 212584 - RNA, 1410 nt, Artificial Sequence; identical to SEQ ID NO: 208810
  derived and/or modified CDS sequence (opt5) from neuraminidase__InfluenzaA__AEA48991

SEQ ID NO: 212585 - RNA, 1410 nt, Artificial Sequence; identical to SEQ ID NO: 211482
  derived and/or modified CDS sequence (opt5) from neuraminidase__InfluenzaA__AEA72707

SEQ ID NO: 212586 - RNA, 1410 nt, Artificial Sequence; identical to SEQ ID NO: 211482
  derived and/or modified CDS sequence (opt5) from neuraminidase__InfluenzaA__AEA72718

SEQ ID NO: 212587 - RNA, 1410 nt, Artificial Sequence; identical to SEQ ID NO: 211482
  derived and/or modified CDS sequence (opt5) from neuraminidase__InfluenzaA__AEA72729

SEQ ID NO: 212588 - RNA, 1410 nt, Artificial Sequence
  derived and/or modified CDS sequence (opt5) from neuraminidase__InfluenzaA__AEA72742
augaaccccaaucagaagaucauuaccaucggcagcgugugcaugacaauugggauggccaaccugauccuccaaauuggaaauaucaucuccauuuggaucucucacagcauucagcugggcaaccagucccagaucgagacguguaaucaaucugucauuaccuacgaaaacaauacauggguuaaccagaccuaugugaauaucagcaacacaaauuucgcugccgggcaguccguggucucugugaaacuugcgggaaacagcucccugugcccuguuagcggcugggcuauuuacucuaaggacaauuccaucagaaucgggagcaaaggagauguguuugucauucgggagccguucaucucuuguagcccccucgaaugccgcaccuuuuuccugacacagggcgcccuucugaacgacaagcauuccaauggcaccauuaaagauagaucuccuuaucggacgcucauguccugucccaucggggaggugccuagccccuacaacucccgcuuugaaucuguugccuggagcgcuuccgccugccacgacggaauuaacuggcugaccaucggcaucagcgggccugauaauggagcuguggccguccugaaguauaacggcauuaucacagacaccauuaagucuuggagaaauaacauccuccggacacaagaguccgagugugcgugcgugaaugggagcuguuucaccauuaugacggauggaccgucugacggccaggccagcuacaaaaucuuucgcaucgaaaagggcaaaauugugaaguccgucgagaugaacgcucccaauuaucauuacgaagagugcucuuguuacccugauagcuccgagaucacaugcguuugcagagacaacuggcacgggagcaaucggcccugggugucuuucaaccagaaucuggaauaucagauuggauacaucuguuccggcauuuuuggggauaacccucgccccaaugacaaaaccggaagcugcggcccggugucuuccaacggggccaauggagucaagggcuucagcuuuaaguauggcaacgggguguggaucggaagaacaaaauccauuucuagccggaacggcuucgagaugaucugggauccuaauggguggaccggaaccgacaacaauuuuuccaucaagcaagacauuguuggcaucaacgaauggucuggguacagcggcuccuucgugcagcaucccgagcuuacaggacuggauuguauucgcccuugcuucugggucgaacucaucagaggccggcccaaagagaauacgauuuggaccagcgggucuuccaucagcuuuuguggagugaacucugacacaguuggcugguccuggcccgauggggcugagcugccuuucaccaucgacaaguga

SEQ ID NO: 212589 - RNA, 1410 nt, Artificial Sequence; identical to SEQ ID NO: 211085
  derived and/or modified CDS sequence (opt5) from neuraminidase__InfluenzaA__AEA72779

SEQ ID NO: 212590 - RNA, 1410 nt, Artificial Sequence
  derived and/or modified CDS sequence (opt5) from neuraminidase__InfluenzaA__AEA72789
augaaccccaaucagaagaucauuaccaucggcagcgugugcaugacaauugggauggccaaccugauccuccaaauuggaaauaucaucuccauuuggaucucucacagcauucagcugggcaaccagucccagaucgagacguguaaucaaucugucauuaccuacgaaaacaauacauggguuaaccagaccuaugugaauaucagcaacacaaauuucgcugccgggcaguccguggucucugugaaacuugcgggaaacagcucccugugcccuguuagcggcugggcuauuuacucuaaggacgauuccaucagaaucgggagcaaaggagacguguuugucauucgggagccguucaucucuuguagcccccucgaaugccgcaccuuuuuccugacacagggcgcccuucugaaugauaagcauuccaacggcaccauuaaagacagaucuccuuaucggacgcucauguccugucccaucggggaggugccuagccccuacaauucccgcuuugaaucuguugccuggagcgcuuccgccugccacgauggaauuaacuggcugaccaucggcaucagcgggccugacaacggagcuguggccguccugaaguauaauggcauuaucacagauaccauuaagucuuggagaaacaauauccuccggacacaagaguccgagugugcgugcgugaacgggagcuguuucaccgugaugacggacggaccgucugauggccaggccagcuacaaaauuuuucgcaucgaaaagggcaaaaucgucaaguccguugagaugaaugcucccaacuaucauuacgaagagugcucuuguuacccugacagcuccgagauuacaugcgugugcagagauaauuggcacgggagcaaccggcccugggugucuuucaaucagaaccuggaauaucagaucggauacauuuguuccggcaucuuuggggacaauccucgccccaacgauaaaaccggaagcugcggcccggucucuuccaauggggccaacggagugaagggcuucagcuuuaaguauggcaaugggguuuggauuggaagaacaaaauccaucucuagccggaacggcuucgagaugauuugggacccuaacggguggaccggaaccgacaauaacuuuuccaucaagcaagauaucgugggcauuaaugaauggucuggguacagcggcuccuucguccagcaucccgagcuuacaggacuggacuguauccgcccuugcuucuggguggaacucauuagaggccggcccaaagagaacacgaucuggaccagcgggucuuccauuagcuuuuguggaguuaauucugauacagugggcugguccuggcccgacggggcugagcugccuuucaccaucgauaaguga

SEQ ID NO: 212591 - RNA, 1410 nt, Artificial Sequence; identical to SEQ ID NO: 211482
  derived and/or modified CDS sequence (opt5) from neuraminidase__InfluenzaA__AEA73291

SEQ ID NO: 212592 - RNA, 1410 nt, Artificial Sequence; identical to SEQ ID NO: 211482
  derived and/or modified CDS sequence (opt5) from neuraminidase__InfluenzaA__AEA73302

SEQ ID NO: 212593 - RNA, 1410 nt, Artificial Sequence; identical to SEQ ID NO: 211482
  derived and/or modified CDS sequence (opt5) from neuraminidase__InfluenzaA__AEA73313

SEQ ID NO: 212594 - RNA, 1410 nt, Artificial Sequence; identical to SEQ ID NO: 211482
  derived and/or modified CDS sequence (opt5) from neuraminidase__InfluenzaA__AEA73324

SEQ ID NO: 212595 - RNA, 1410 nt, Artificial Sequence; identical to SEQ ID NO: 211482
  derived and/or modified CDS sequence (opt5) from neuraminidase__InfluenzaA__AEA73335

SEQ ID NO: 212596 - RNA, 1410 nt, Artificial Sequence; identical to SEQ ID NO: 211482
  derived and/or modified CDS sequence (opt5) from neuraminidase__InfluenzaA__AEA73346

SEQ ID NO: 212597 - RNA, 1410 nt, Artificial Sequence; identical to SEQ ID NO: 211482
  derived and/or modified CDS sequence (opt5) from neuraminidase__InfluenzaA__AEA73357

SEQ ID NO: 212598 - RNA, 1410 nt, Artificial Sequence; identical to SEQ ID NO: 211482
  derived and/or modified CDS sequence (opt5) from neuraminidase__InfluenzaA__AEA73368

SEQ ID NO: 212599 - RNA, 1410 nt, Artificial Sequence; identical to SEQ ID NO: 211482
  derived and/or modified CDS sequence (opt5) from neuraminidase__InfluenzaA__AEA73379

SEQ ID NO: 212600 - RNA, 1410 nt, Artificial Sequence; identical to SEQ ID NO: 211482
  derived and/or modified CDS sequence (opt5) from neuraminidase__InfluenzaA__AEA73390

SEQ ID NO: 212601 - RNA, 1410 nt, Artificial Sequence; identical to SEQ ID NO: 211482
  derived and/or modified CDS sequence (opt5) from neuraminidase__InfluenzaA__AEA73401

SEQ ID NO: 212602 - RNA, 1410 nt, Artificial Sequence; identical to SEQ ID NO: 211482
  derived and/or modified CDS sequence (opt5) from neuraminidase__InfluenzaA__AEA73412

SEQ ID NO: 212603 - RNA, 1410 nt, Artificial Sequence; identical to SEQ ID NO: 211482
  derived and/or modified CDS sequence (opt5) from neuraminidase__InfluenzaA__AEA73423

SEQ ID NO: 212604 - RNA, 1410 nt, Artificial Sequence; identical to SEQ ID NO: 211482
  derived and/or modified CDS sequence (opt5) from neuraminidase__InfluenzaA__AEA73455

SEQ ID NO: 212605 - RNA, 1410 nt, Artificial Sequence; identical to SEQ ID NO: 211482
  derived and/or modified CDS sequence (opt5) from neuraminidase__InfluenzaA__AEA73466

SEQ ID NO: 212606 - RNA, 1410 nt, Artificial Sequence
  derived and/or modified CDS sequence (opt5) from neuraminidase__InfluenzaA__AEA73477
augaaccccaaucagaagaucauuaccaucggcagcgugucccugacaauuucuacgaucugcuucuuuaugcaaauugccauccucaucaccacagucacccugcacuucaaacaguacaaguuuaacagcccuccgaauaaccagguuaugcuuugugagcccacaauuaucgaaagaaauauuaccgagaucguguaucugacaaacaccacgauugaaaaagagaucugcccuaagcucgcugaauaccggaauugguccaaaccccagugugacauuaccggguucgccccuuuuucuaaggauaacagcauccgccuguccgcgggaggcgacaucugggugacaagagagcccuaugucucuugcgauccugacaaguguuaccaauucgcucuugggcagggaaccacacugaauaacgugcauagcaauaacaccguucgggaucgcacgccguauagaacacuccugaugaaugagcugggcgugcccuuucaccucgggaccaaacaggucugcauugccugguccagcagcuccugucaugacggaaaggccuggcugcacgugugcaucacaggcgaugacaaaaacgcuaccgccagcuucauuuacaauggccggcuuguugauucuguggucuccuggagcaaggaaauccugcgcacccaggagucugaaugugugugcauuaacgggacauguacgguggucaugaccgacggauccgcuagcggcaaagccgauacaaagauccucuuuaucgaggaggggaagauuguucauaccuccacacugucuggaagcgcgcaacacguggaagagugcuccugcuauccuagauaccccggcgugcggugugucugccgcgacaacuggaaagggagcaauagaccuaucguggauauuaacaucaaggaccacucuauuguuuccagcuacguguguucuggacuugucggcgacacgccccggaaaaaugauagcuccucuagcucccauugccuggacccgaacaaugaagagggcgggcacggagugaagggcugggccuucgaugacgggaacgauguuuggaugggacgcaccaucaaugaaacaagcagacucggcuaugagaccuuuaaagugaucgagggguggucuaacccuaaguccaaacugcagauuaaucggcaggucaucguggaccgcggaaacagaagcggcuacucuggcauuuucuccgucgaagggaagucuuguaucaaucggugcuuuuauguggagcugauuagaggacgcaaggaagagaccaaaguucucuggacauccaacucuaucguggucuucuguggcaccagcgggacauacggaacgggcuccuggcccgauggggcugaccugaaucuuaugccuauuuga

SEQ ID NO: 212607 - RNA, 1410 nt, Artificial Sequence; identical to SEQ ID NO: 211482
  derived and/or modified CDS sequence (opt5) from neuraminidase__InfluenzaA__AEA73488

SEQ ID NO: 212608 - RNA, 1410 nt, Artificial Sequence
  derived and/or modified CDS sequence (opt5) from neuraminidase__InfluenzaA__AEA73499
augaaccccaaucagaagaucauuaccaucggcagcgugucccugacaauuucuacgaucugcuucuuuaugcaaauugccauccucaucaccacagucacccugcacuucaaacaguacaaguuuaacagcccuccgaauaaccagguuaugcuuugugagcccacaauuaucgaaagaaauauuaccgagaucguguaucugacaaacaccacgauugaaaaagagaucugcccuaagcucgcugaauaccggaauugguccaaaccccagugugacauuaccggguucgccccuuuuucuaaggauaacagcauccgccuguccgcgggaggcgacaucugggugacaagagagcccuaugucucuugcgauccugacaaguguuaccaauucgcucuugggcagggaaccacaauuaauaacgugcauagcaauaacaccguucgggaucgcacgccguauagaacacugcucaugaaugagcugggcgugcccuuucaccuggggaccaaacaggucugcaucgccugguccagcagcuccugucaugacggaaaggccuggcuccacgugugcauuacaggcgaugacaaaaacgcuaccgccagcuucaucuacaauggccggcugguugauucuguggucuccuggagcaaggaaauucuucgcacccaggagucugaaugugugugcaucaacgggacauguacgguggucaugaccgacggauccgcuagcggcaaagccgauacaaagauccuguuuauugaggaggggaagaucguucauaccuccacacucucuggaagcgcgcaacacguggaagagugcuccugcuauccuagauaccccggcgugcggugugucugccgcgacaacuggaaagggagcaauagaccuauuguggauaucaacauuaaggaccacucuaucguuuccagcuacguguguucuggacuggucggcgacacgccccggaaaaaugauagcuccucuagcucccauugccuugacccgaacaaugaagagggcgggcacggagugaagggcugggccuucgaugacgggaacgauguuuggaugggacgcaccaucaaugaaacaagcagacugggcuaugagaccuuuaaagugauugagggguggucuaacccuaaguccaaacuccagaucaaucggcaggucauuguggaccgcggaaacagaagcggcuacucuggcaucuucuccgucgaagggaagucuuguauuaaucggugcuuuuauguggagcugaucagaggacgcaaggaagagaccgaaguucuguggacauccaacucuauuguggucuucuguggcaccagcgggacauacggaacgggcuccuggcccgauggggcugaccucaaucugaugccuaucuga

SEQ ID NO: 212609 - RNA, 1410 nt, Artificial Sequence; identical to SEQ ID NO: 211482
  derived and/or modified CDS sequence (opt5) from neuraminidase__InfluenzaA__AEA73510

SEQ ID NO: 212610 - RNA, 1410 nt, Artificial Sequence; identical to SEQ ID NO: 211482
  derived and/or modified CDS sequence (opt5) from neuraminidase__InfluenzaA__AEA73521

SEQ ID NO: 212611 - RNA, 1410 nt, Artificial Sequence; identical to SEQ ID NO: 211482
  derived and/or modified CDS sequence (opt5) from neuraminidase__InfluenzaA__AEA73532

SEQ ID NO: 212612 - RNA, 1410 nt, Artificial Sequence; identical to SEQ ID NO: 211482
  derived and/or modified CDS sequence (opt5) from neuraminidase__InfluenzaA__AEA73543

SEQ ID NO: 212613 - RNA, 1410 nt, Artificial Sequence; identical to SEQ ID NO: 211482
  derived and/or modified CDS sequence (opt5) from neuraminidase__InfluenzaA__AEA73554

SEQ ID NO: 212614 - RNA, 1410 nt, Artificial Sequence; identical to SEQ ID NO: 211482
  derived and/or modified CDS sequence (opt5) from neuraminidase__InfluenzaA__AEA73565

SEQ ID NO: 212615 - RNA, 1413 nt, Artificial Sequence; identical to SEQ ID NO: 209533
  derived and/or modified CDS sequence (opt5) from neuraminidase__InfluenzaA__AEA73576

SEQ ID NO: 212616 - RNA, 1413 nt, Artificial Sequence; identical to SEQ ID NO: 209533
  derived and/or modified CDS sequence (opt5) from neuraminidase__InfluenzaA__AEA73587

SEQ ID NO: 212617 - RNA, 1413 nt, Artificial Sequence; identical to SEQ ID NO: 212276
  derived and/or modified CDS sequence (opt5) from neuraminidase__InfluenzaA__AEA73598

SEQ ID NO: 212618 - RNA, 1413 nt, Artificial Sequence; identical to SEQ ID NO: 209533
  derived and/or modified CDS sequence (opt5) from neuraminidase__InfluenzaA__AEA73609

SEQ ID NO: 212619 - RNA, 1413 nt, Artificial Sequence; identical to SEQ ID NO: 209533
  derived and/or modified CDS sequence (opt5) from neuraminidase__InfluenzaA__AEA73620

SEQ ID NO: 212620 - RNA, 1413 nt, Artificial Sequence
  derived and/or modified CDS sequence (opt5) from neuraminidase__InfluenzaA__AEA73631
augaaccccaaucagaagaucauuaccaucggcagcauuuccaucgccauugggaucaucucucugaugcuccaaauuggaaacaucauuagcaucugggcuucccacucuauucagacaggcagccagaauaacacggggaucugcaaucagagaauuaucaccuacgagaacuccacaugggugaaucauaccuaugugaacaucaauaacacaaauguuguggccggagaagacaaaaccucugugacacuggcgggcaacagcucccuuuguagcauuucugggugggcuaucuacaccaaggauaauuccauucggaucggaagcaaaggcgacgucuucgugauucgcgagccuuuuaucucuugcucccaccuggaauguagaacguucuuucucacccaaggcgcccugcuuaacgauaagcauagcaaugggacaguuaaagaccggucuccguaucgcgcccugauguccugcccccucggagaggcuccuagccccuacaacuccaaguucgaaucuguggccuggagcgcuuccgccugucacgauggcaugggguggcugaccaucggaauuagcggcccugacaacggggcggucgccgugcugaaguauaauggaaucauuacaggcaccaucaaaucuuggaagaaacagauucucagaacgcaggaguccgagugcguuuguaugaacggcagcugcuuuacaaucaugaccgaugggcccucuaauaaggcugccagcuacaaaaucuucaagauugaaaagggaaaagugacaaaguccaucgagcugaacgcuccuaauuuuuauuacgaagaguguucuugcuacccggacaccggcauugucaugugugugugccgggauaacuggcaugggagcaaucgccccuggguguccuucaaccagaaucuugacuaucaaaucggauacauuugcagcggcgucuuuggggauaacccuagacccgaggacggagaaggcucuuguaauccuguuaccguggauggcgccaacggggugaaaggauucuccuauaaguacggcaauggggucuggaucggacggauuaaaagcaaccgccugagaaagggcuuugagaugaucugggaccccaauggguggacaaacacggacucugauuucuccgugaaacaggacguuguggcgaucaccgauuggagcggcuauuccggaucuuuuguccagcacccggaacucacaggccuggacugcauucggccuuguuucuggguggagcuuguucgcgggcugcccagagaaaacaccacaaucuggaccagcggauccucuauuagcuucugcggcgucaauuccgauacggccaacuggagcuggccugacggggcugagcuccccuuuacaaucgauaaguga

SEQ ID NO: 212621 - RNA, 1413 nt, Artificial Sequence
  derived and/or modified CDS sequence (opt5) from neuraminidase__InfluenzaA__AEA73642
augaaccccaaucagagaaucauuaccaucggcagcauuuccaucgccauugggaucaucucucugaugcuccaaauuggaaacaucauuagcaucugggcuucccacucuauucagacaggcagccagaauaacacggggaucugcaagcagcggauuaucaccuacgaaaauuccacaugggugaaccauaccuaugucaauaucaacaauacaaacguuguggccggagaggacaaaaccucugugacacuggcgggcaauagcucccuuuguagcauuucugggugggcuaucuacaccaaggauaacuccauucgcaucggaagcaaaggcgacgucuucgugauuagagagccuuuuaucucuugcucccaccuggaaugucggacguucuuucucacccaaggcgcccugcuuaaugauaagcauagcaacgggacagccaaagaccgcucuccguauagagcucugauguccugcccccucggagaggccccuagccccuacaauuccaaguucgaaucuguugcuuggagcgccuccgcgugucacgauggcaugggguggcugaccaucggaauuagcggcccugacaacggggccguggcuguccugaaguauaacggaaucauuacaggcaccaucaaaucuuggaagaaacagauucuccggacgcaggaguccgagugcguguguaugaauggcagcugcuuuacaaucaugaccgaugggcccucuaacaaggccgcuagcuacaaaaucuucaagauugaaaagggaaaaguuacaaaguccaucgagcugaaugccccuaacuuuuauuacgaagaguguucuugcuacccggacaccggcauugugaugugugucugccgcgauaauuggcaugggagcaacagacccuggguguccuucaaucagaaccuugacuaucaaaucggauacauuugcagcggcguguuuggggauaauccucggcccgaggacggagaaggcucuuguaacccugucaccguugauggcgcgaauggggugaaaggauucuccuauaaguacggcaacgggguguggcugggacgcacaaaaagcaauagacuccggaagggcuuugagaugaucugggaccccaacggguggacgaauaccgacucugauuucuccgucaaacaggacgugguugccauuacagauuggagcggcuauuccggaucuuuugugcagcacccggaacugaccggccuugacugcauccgcccuuguuucugggucgagcuggugagagggcucccccgggaaaacacaaccaucuggacgagcggauccucuauuagcuucugcggcguuaacuccgauacagcuaauuggagcuggccugacggggccgagcugcccuuuaccaucgauaaguga

SEQ ID NO: 212622 - RNA, 1413 nt, Artificial Sequence; identical to SEQ ID NO: 209533
  derived and/or modified CDS sequence (opt5) from neuraminidase__InfluenzaA__AEA73653

SEQ ID NO: 212623 - RNA, 1413 nt, Artificial Sequence
  derived and/or modified CDS sequence (opt5) from neuraminidase__InfluenzaA__AEA73664
augaaccccaaucagaagaucauuaccaucggcagcauuuccaucgccauugggaucaucucucugaugcuccaaauuggaaacaucauuagcaucugggcuucccacucuauucagacaggcagccagaauaacacggggaucugcaaucagagaauuaucaccuacgagaacuccacaugggugaaucauaccuaugugaacaucaauaacacaaauguuguggccggagaagacaaaaccucugugacacuggcgggcaacagcucccuuuguagcauuucugggugggcuaucuacaccaaggauaauuccauucggaucggaagcaaaggcgacgucuucgugauucgcgagccuuuuaucucuugcucccaccuggaauguagaacguucuuucucacccaaggcgcccugcuuaacgauaagcauagcaaugggacaguuaaagaccggucuccguaucgcgcccugauguccugcccccucggagaggcuccuagccccuacaacuccaaguucgaaucuguggccuggagcgcuuccgccugucacgauggcaugggguggcugaccaucggaauuagcggcccugacaacggggcggucgccgugcugaaguauaauggaaucauuacaggcaccaucaaaucuuggaagaaacagauucucagaacgcaggaguccgagugcguuuguaugaacggcagcugcuuuacaaucaugaccgaugggcccucuaauaaggcugccagcuacaaaaucuucaagauugaaaagggaaaagugacaaaguccaucgagcugaacgcuccuaauuuuuauuacgaagaguguucuugcuacccggacaccggcauugucaugugugugugccgggauaacuggcaugggagcaaucgccccuggguguccuucaaccagaaucuugacuaucaaaucggauacauuugcagcggcgucuuuggggauaacccuagacccgaggacggagaaggcucuuguaauccuguuaccgugaacggcgccgauggggugaaaggauucuccuauaaguacggcaauggggucuggaucggacggacaaaaagcaaccgccugagaaagggcuuugagaugauuugggaccccaauggguggacgaacaccgacucugauuucuccgugaaacaggacguuguggcgaucacagauuggagcggcuauuccggaucuuuuguccagcacccggaacucaccggccuggacugcauccggccuuguuucuggguggagcuuguucgcgggcugcccaaggaaaacacaaccauuuggacgagcggauccucuaucagcuucugcggcgucaauuccgauacagccaacuggagcuggccugacggggcugagcuccccuuuaccauugauaaguga

SEQ ID NO: 212624 - RNA, 1413 nt, Artificial Sequence
  derived and/or modified CDS sequence (opt5) from neuraminidase__InfluenzaA__AEA73675
augaaccccaaucagaagaucauuaccaucggcagcauuuccaucgccauugggaucaucucucugaugcuccaaauuggaaacaucauuagcaucugggcuucccacucuauucagacaggcagccagaauaacacggggaucugcaaucagagaauuaucaccuacgagaacuccacaugggugaaucauaccuaugucaacaucaauaacacaaauguuguggccggagaagacaaaaccucugugacacuggcgggcaacagcucccuuuguagcauuucugggugggcuaucuacaccaaggauaauuccauucggaucggaagcaaaggcgacgucuucgugauucgcgagccuuuuaucucuugcucccaccuggaauguagaacguucuuucucacccaaggcgcccugcuuaacgauaagcauagcaaugggacaguuaaagaccggucuccguaucgcgcccugauguccugcccccucggagaggcuccuagccccuacaacuccaaguucgaaucuguggccuggagcgcuuccgccugucacgauggcaugggguggcugaccaucggaauuagcggcccugacaacggggcggucgccgugcugaaguauaauggaaucauuacaggcaccaucaaaucuuggaagaaacagauucucagaacgcaggaguccgagugcguuuguaugaacggcagcugcuuuacaaucaugaccgaugggcccucuaauaaggcugccagcuacaaaaucuucaagauugaaaagggaaaagugacaaaguccaucgagcugaacgcuccuaauuuuuauuacgaagaguguucuugcuacccggacaccggcauugucaugugugugugccgggauaacuggcaugggagcaaucgccccuggguguccuucaaccagaaucuugacuaucaaaucggauacauuugcagcggcgucuuuggggauaacccuagacccgaggacggagaaggcucuuguaauccuguuaccguggauggcgccgacggggugaaaggauucuccuauaaguacggcaacggggucuggaucggacggacaaaaagcaaucgccugagaaagggcuuugagaugauuugggaccccaacggguggacgaauaccgauucugacuucuccgugaaacaggauguuguggcgaucacagacuggagcggcuauuccggaucuuuuguccagcacccggaacucaccggccuggauugcauccggccuuguuucuggauugagcuugugcgcgggcugcccagagaaaacacaaccaucuggacgagcggauccucuauuagcuucugcggcguuaacuccgacacagccaauuggagcuggccugauggggcugagcuccccuuuaccaucgacaaguga

SEQ ID NO: 212625 - RNA, 1413 nt, Artificial Sequence; identical to SEQ ID NO: 212276
  derived and/or modified CDS sequence (opt5) from neuraminidase__InfluenzaA__AEA73686

SEQ ID NO: 212626 - RNA, 1413 nt, Artificial Sequence
  derived and/or modified CDS sequence (opt5) from neuraminidase__InfluenzaA__AEA73697
augaaccccaaucagaagaucauuaccaucggcagcauuuccaucgccauugggaucaucucucugaugcuccaaauuggaaacaucauuagcaucugggcuucccacucuauucagacaggcagccagaauaacacggggaucugcaaucagagaauuaucaccuacgagaacuccacaugggugaaucauaccuaugugaacaucaauaacacaaauauuguugccggagaagacaaaaccucugugacacuggcgggcaacagcucccuuuguagcaucucugggugggcuauuuacaccaaggauaauuccauccggauuggaagcaaaggcgacguguucgucauccgcgagccuuuuaucucuugcucccaccuggaauguagaacguucuuucucacccaaggcgcccugcuuaacgauaagcauagcaaugggacagugaaagaccggucuccguaucgcgcccugauguccugcccccucggagaggcuccuagccccuacaacuccaaguucgaaucuguugccuggagcgcuuccgccugucacgauggcaugggguggcugaccauuggaaucagcggcccugacaacggggcgguggccguccugaaguauaauggaauuaucacaggcaccauuaaaucuuggaagaaacagauccucagaacgcaggaguccgagugcguguguaugaacggcagcugcuuuacaaucaugaccgaugggcccucuaauaaggcugccagcuacaaaauuuucaagaucgaaaagggaaaaguuacaaaguccguggagcugaacgcuccuaauuuuuauuacgaagaguguucuugcuacccggacaccggcauugucaugugugugugccgggauaacuggcaugggagcaaucgccccuggguguccuucaaccagaaucuugacuaucaaaucggauacauuugcagcggcgucuuuggggauaacccuagacccgaggacggagaaggcucuuguaauccuguuaccgugaacggcgccgauggggugaaaggauucuccuauaaguacggcaauggggucuggaucggacggacaaaaagcaaccgccugagaaagggcuuugagaugauuugggaccccaauggguggacgaacaccgacucugauuucuccgugaaacaggacguuguggcgaucacagauuggagcggcuauuccggaucuuuuguccagcacccggaacucaccggccuggacugcauccggccuuguuucuggguggagcuuguucgcgggcugcccagagaaaacacaaccauuuggacgagcggauccucuaucagcuucugcggcgucaauuccgauacagccaacuggagcuggccugacggggcugagcuccccuuuaccauugauaaguga

SEQ ID NO: 212627 - RNA, 1413 nt, Artificial Sequence; identical to SEQ ID NO: 212277
  derived and/or modified CDS sequence (opt5) from neuraminidase__InfluenzaA__AEA73708

SEQ ID NO: 212628 - RNA, 1413 nt, Artificial Sequence; identical to SEQ ID NO: 209533
  derived and/or modified CDS sequence (opt5) from neuraminidase__InfluenzaA__AEA73719

SEQ ID NO: 212629 - RNA, 1413 nt, Artificial Sequence; identical to SEQ ID NO: 209533
  derived and/or modified CDS sequence (opt5) from neuraminidase__InfluenzaA__AEA73730

SEQ ID NO: 212630 - RNA, 1413 nt, Artificial Sequence; identical to SEQ ID NO: 209533
  derived and/or modified CDS sequence (opt5) from neuraminidase__InfluenzaA__AEA73741

SEQ ID NO: 212631 - RNA, 1413 nt, Artificial Sequence; identical to SEQ ID NO: 209533
  derived and/or modified CDS sequence (opt5) from neuraminidase__InfluenzaA__AEA73752

SEQ ID NO: 212632 - RNA, 1413 nt, Artificial Sequence; identical to SEQ ID NO: 212276
  derived and/or modified CDS sequence (opt5) from neuraminidase__InfluenzaA__AEA73763

SEQ ID NO: 212633 - RNA, 1410 nt, Artificial Sequence; identical to SEQ ID NO: 208810
  derived and/or modified CDS sequence (opt5) from neuraminidase__InfluenzaA__AEA73774

SEQ ID NO: 212634 - RNA, 1410 nt, Artificial Sequence; identical to SEQ ID NO: 208810
  derived and/or modified CDS sequence (opt5) from neuraminidase__InfluenzaA__AEA73784

SEQ ID NO: 212635 - RNA, 1410 nt, Artificial Sequence; identical to SEQ ID NO: 208810
  derived and/or modified CDS sequence (opt5) from neuraminidase__InfluenzaA__AEA73794

SEQ ID NO: 212636 - RNA, 1410 nt, Artificial Sequence; identical to SEQ ID NO: 208810
  derived and/or modified CDS sequence (opt5) from neuraminidase__InfluenzaA__AEA73804

SEQ ID NO: 212637 - RNA, 1410 nt, Artificial Sequence; identical to SEQ ID NO: 208810
  derived and/or modified CDS sequence (opt5) from neuraminidase__InfluenzaA__AEA73814

SEQ ID NO: 212638 - RNA, 1410 nt, Artificial Sequence; identical to SEQ ID NO: 208810
  derived and/or modified CDS sequence (opt5) from neuraminidase__InfluenzaA__AEA73824

SEQ ID NO: 212639 - RNA, 1410 nt, Artificial Sequence
  derived and/or modified CDS sequence (opt5) from neuraminidase__InfluenzaA__AEA73834
augaaccccaaucagaagaucauuaccaucggcagcauuugcaugacaaucgggauggccaaccugauucuccaaaucggaaauaucauuuccaucuggauuucucacagcauccagcugggcaaccagaaucagauugagacguguaaccaauccgugaucaccuacgaaaauaacacaugggucaaucagaccuauguuaacauuucuaauacaaacuucgcugccgggcagagcgugguguccgucaaacuugcgggaaauucuagccugugcccuguguccggcugggcuaucuacagcaaggacaacucuaucagaauuggguccaaaggagauguuuuugugauccgggagccguucauuagcuguucuccccucgaaugccgcaccuuuuuccugacacagggcgcccuucugaaugacaagcauuccaacggcaccaucaaagauagaagcccuuaucggacgcucaugucuugucccauuggggaggucccuucccccuacaacagccgcuuugaauccguggccuggucugcuagcgccugccacgacggaaucaauuggcugaccaucggcauuuccgggccugauaacggagcuguugccgugcugaaguauaauggcaucauuacagacaccaucaagagcuggaaaaacaauauucucagaacacaagagucugagugugcgugcgucaacggguccuguuucaccgugaugacggauggaccgagcgacggccaggccucuuacaagaucuuucggaucgaaaaaggcaagauugugaaaagcgucgagaugaaugcucccaacuaucauuacgaagagugcuccuguuacccugauucuagcgagaucacaugcguuugccgcgacaauuggcacggguccaacagacccugggugagcuucaaucagaaccuggaauaucagauuggauacaucuguucuggcauuuuuggggauaauccucggcccaacgacaagaccggauccugcggcccggugagcucuaauggggccaacggagucaagggcuucuccuuuaaauauggcaacgggguguggaucggacgcacaaagagcauuuccucuagaaauggcuucgagaugaucugggauccuaacggguggaccggaaccgacaauaacuuuagcaucaaacaagacauuguuggcaucaaugaaugguccggguacucuggcagcuucgugcagcaucccgagcuuacaggacuggauuguauucggccuugcuucugggucgaacucauccgcggcagacccaaggagaacacgauuuggaccuccgggagcucuaucuccuuuuguggagugaauagcgacacaguuggcuggucuuggcccgauggggcugagcugccuuucaccaucgacaaauga

SEQ ID NO: 212640 - RNA, 1410 nt, Artificial Sequence; identical to SEQ ID NO: 212172
  derived and/or modified CDS sequence (opt5) from neuraminidase__InfluenzaA__AEA73844

SEQ ID NO: 212641 - RNA, 1410 nt, Artificial Sequence; identical to SEQ ID NO: 208810
  derived and/or modified CDS sequence (opt5) from neuraminidase__InfluenzaA__AEA73854

SEQ ID NO: 212642 - RNA, 1410 nt, Artificial Sequence; identical to SEQ ID NO: 208810
  derived and/or modified CDS sequence (opt5) from neuraminidase__InfluenzaA__AEA73864

SEQ ID NO: 212643 - RNA, 1410 nt, Artificial Sequence; identical to SEQ ID NO: 210591
  derived and/or modified CDS sequence (opt5) from neuraminidase__InfluenzaA__AEA73874

SEQ ID NO: 212644 - RNA, 1410 nt, Artificial Sequence; identical to SEQ ID NO: 210591
  derived and/or modified CDS sequence (opt5) from neuraminidase__InfluenzaA__AEA73884

SEQ ID NO: 212645 - RNA, 1410 nt, Artificial Sequence; identical to SEQ ID NO: 212172
  derived and/or modified CDS sequence (opt5) from neuraminidase__InfluenzaA__AEA73894

SEQ ID NO: 212646 - RNA, 1410 nt, Artificial Sequence
  derived and/or modified CDS sequence (opt5) from neuraminidase__InfluenzaA__AEA73904
augaaccccaaucagaagaucauuaccaucggcagcgugugcaugacaauugggauggccaaccugguccuccaaaucggaaauauuaucuccaucuggauuucucacagcauccagcugggcaaccagaaucagauugagacguguaaccaauccguuaucaccuacgaaaauaacacaugggugaaucagaccuaugugaacauuucuaauacaaacuucgcugccgggcagagcgucguguccguuaaacuugcgggaaauucuagccugugcccuguguccggcugggcuaucuacagcaaggacaacucuauuagaaucggguccaaaggagaugucuuugugauccgggagccguucauuagcuguucuccccucgaaugccgcaccuuuuuccugacacagggcgcccuucugaaugacaagcauuccaacggcaccaucaaagauagaagcccuuaucggacgcucaugucuugucccauuggggagguuccuucccccuacaacagccgcuuugaauccguggccuggucugcuagcgccugccacgacggaaucaauuggcugaccauuggcaucuccgggccugauaacggagcugucgccgugcugaaguauaauggcaucauuacagacaccaucaagagcuggagaaacaauauucuccggacacaagagucugagugugcgugcgugaacggguccuguuucaccgucaugacggauggaccgagcgacggccaggccucuuacaaaaucuuucgcauugaaaagggcaaaaucguuaagagcguggagaugaaugcucccaacuaucauuacgaagagugcuccuguuacccugauucuagcgagaucacaugcgugugcagagacaauuggcacggguccaaccggcccugggucagcuucaaucagaaccuggaauaucagauuggauacaucuguucuggcauuuuuggggauaauccucgccccaacgacaaaaccggauccugcggcccggugagcucuaauggggccaacggaguuaagggcuucuccuuuaaguauggcaacgggguguggaucggaagaacaaaaagcauuuccucucggaauggcuucgagaugaucugggauccuaacggguggaccggaaccgacaauaacuuuagcauuaagcaagacaucaucggcauuaaugaaugguccggguacucuggcagcuucguccagcaucccgagcuuacaggacuggauuguauccgcccuugcuucuggguggaacucauuagaggccggcccaaagagaagacgaucuggaccuccgggagcucuauuuccuuuuguggaguuaacagcgacacagugggcuggucuuggcccgauggggcugagcugccuuucaccaucgacaaauga

SEQ ID NO: 212647 - RNA, 1410 nt, Artificial Sequence; identical to SEQ ID NO: 208810
  derived and/or modified CDS sequence (opt5) from neuraminidase__InfluenzaA__AEA73914

SEQ ID NO: 212648 - RNA, 1410 nt, Artificial Sequence; identical to SEQ ID NO: 210591
  derived and/or modified CDS sequence (opt5) from neuraminidase__InfluenzaA__AEA73924

SEQ ID NO: 212649 - RNA, 1410 nt, Artificial Sequence; identical to SEQ ID NO: 212249
  derived and/or modified CDS sequence (opt5) from neuraminidase__InfluenzaA__AEA73934

SEQ ID NO: 212650 - RNA, 1410 nt, Artificial Sequence
  derived and/or modified CDS sequence (opt5) from neuraminidase__InfluenzaA__AEA73944
augaaccccaaucagaagaucauuaccaucggcagcgugugcaugacaauugggauggccaaccugauccuccaagucggaaauauuaucuccaucuggauuucucacagcauccagcugggcaaccagaaucagauugagacguguaaccaauccguuaucaccuacgaaaauaacacaugggugaaucagaccuaugugaacauuucuaauacaaacuucgcugccgggcagagcgucguguccguuaaacuugcgggaaauucuagccugugcccuguguccggcugggcuaucuacagcaaggacaacucuauuagaaucggguccaaaggagaugucuuugugauccgggagccguucauuagcuguucuccccucgaaugccgcaccuuuuuccugacacagggcgcccuucugaaugacaagcauuccaacggcaccaucaaagauagaagcccuuaucggacgcucaugucuugucccauuggggagguuccuucccccuacaacagccgcuuugaauccguggccuggucugcuagcgccugccacgacggaaucaauuggcugaccauuggcaucuccgggccugauaacggagcugucgccgugcugaaguauaauggcaucauuacagacaccaucaagagcuggagaaacaauauucuccggacacaagagucugagugugcgugcgugaacggguccuguuucaccgucaugacggauggaccgagcgacggccaggccucuuacaaaaucuuucgcauugaaaagggcaaaaucguuaagagcguggagaugaaugcucccaacuauuacuacgaagagugcuccuguuauccugauucuagcgagaucacaugcgugugcagagacaauuggcauggguccaaccggcccugggucagcuucaaucagaaccuggaauaccagauuggauauaucuguucuggcauuuuuggggauaauccucgccccaacgacaaaaccggauccugcggcccggugagcucuaauggggccaacggaguuaagggcuucuccuuuaaguacggcaacgggguguggaucggaagaacaaaaagcauuuccucucggaauggcuucgagaugaucugggauccuaacggguggaccggaaccgacaauaacuuuagcauuaagcaagacaucgucggcaucaaugaaugguccggguauucuggcagcuucgugcagcaccccgagcuuacaggacuggauuguauucgcccuugcuucuggguugaacucaucagaggccggcccaaagagaacacgauuuggaccuccgggagcucuaucuccuuuuguggagugaauagcgacacagucggcuggucuuggcccgauggggcugagcugccuuucaccauugacaaguga

SEQ ID NO: 212651 - RNA, 1410 nt, Artificial Sequence; identical to SEQ ID NO: 208810
  derived and/or modified CDS sequence (opt5) from neuraminidase__InfluenzaA__AEA73954

SEQ ID NO: 212652 - RNA, 1410 nt, Artificial Sequence; identical to SEQ ID NO: 208810
  derived and/or modified CDS sequence (opt5) from neuraminidase__InfluenzaA__AEA73964

SEQ ID NO: 212653 - RNA, 1410 nt, Artificial Sequence
  derived and/or modified CDS sequence (opt5) from neuraminidase__InfluenzaA__AEA73974
augaaccccaaucagaagaucauuaccaucggcagcgugugcaugacaauugggauggccaaccugauccuccaaauuggaaauaucaucuccauuuggaucucucacagcauucagcauggcaaccagaaucagaucgagacguguaaccaauccgucauuaccuacgaaaauaacacauggguuaaucagaccuaugugaacaucucuaauacaaacuucgcugccgggcagagcguggucuccgugaaacuggcgggaaauucuagccuuugcccuguuuccggcugggcuauuuacagcaaggacaacucuaucagaaucggguccaaaggagauguguuugucauucgggagccguucaucagcuguucuccccuggaaugccgcaccuuuuuccucacacagggcgcccugcuuaaugacaagcacuccaacggcaccauuaaagauagaagcccuuaucggacgcugaugucuugucccaucggggaggugccuucccccuacaacagccgcuuugaauccguugccuggucugcuagcgccugccaugacggaauuaauuggcucaccaucggcaucuccgggccugauaacggagcuguggccguccugaaguauaauggcauuaucacagacaccauuaagagcuggagaaacaauauccugcggacacaagagucugagugugcgugcgugaacggguccuguuucaccgugaugacggauggaccgagcgacggccaggccucuuacaaaauuuuucgcaucgaaaagggcaaaaucgucaagagcguugagaugaaugcucccaacuaucacuacgaagagugcuccuguuacccugauucuagcgagauuacaugcgugugcagagacaauuggcauggguccaaccggcccugggugagcuucaaucagaaccucgaauaucagaucggauacauuuguucuggcaucuuuggggauaauccucgccccaacgacaaaaccggauccugcggcccggucagcucuaauggggccaacggagugaagggcuucuccuuuaaguauggcaacgggguuuggauuggaagaacaaaaagcaucuccucucggaauggcuucgagaugauuugggauccuaacggguggaccggaaccgacaauaacuuuagcaucaagcaagacaucgugggcauuaaugaaugguccggguacucuggcagcuucguccagcaccccgagcugacaggacuugauuguauccgcccuugcuucuggguggaacugauuagaggccggcccaaagagaacacgaucuggaccuccgggagcucuauuuccuuuuguggaguuaauagcgacacagugggcuggucuuggcccgauggggcugagcucccuuucaccaucgacaaguga

SEQ ID NO: 212654 - RNA, 1410 nt, Artificial Sequence; identical to SEQ ID NO: 208810
  derived and/or modified CDS sequence (opt5) from neuraminidase__InfluenzaA__AEA73984

SEQ ID NO: 212655 - RNA, 1410 nt, Artificial Sequence; identical to SEQ ID NO: 210161
  derived and/or modified CDS sequence (opt5) from neuraminidase__InfluenzaA__AEA73994

SEQ ID NO: 212656 - RNA, 1410 nt, Artificial Sequence
  derived and/or modified CDS sequence (opt5) from neuraminidase__InfluenzaA__AEA74004
augaaccccaauaagaaaaucauuaucauuggcagcgugugcaugaccaucgggauggccaaccugauucuccagaucggaaauaucauuuccaucuggauuucucacagcauccaacugggcaaccagaaucagauugagacauguaaccaguccgucaucacguacgaaaauaacaccuggguuaaucaaacauaugugaacauuucuaauaccaacuucgcugccgggcagagcguggucuccgugaaacuugcgggaaauucuagccugugcccuguuuccggcugggcuaucuacagcaaggacaacucuaucagaauuggguccaagggagauguguuugucauccgggagccguucauuagcuguucuccccucgaaugccgcacauuuuuccugacccagggcgcccuucugaaugacaaacauuccaacggcacaaucaaggauagaagcccuuaucggacccucaugucuugucccauuggggaggugccuucccccuacaacagccgcuuugaauccguugccuggucugcuagcgccugccacgacggaaucaauuggcugacgaucggcauuuccgggccugauaacggagcuguggccguccugaaguauaauggcaucauuaccgacacaaucaaaagcuggagaaacaauauucuccggacccaggagucugagugugcgugcgugaacggguccuguuucacagugaugaccgauggaccgagcgacggccaagccucuuacaagaucuuucgcaucgaaaaaggcaagauugucaaaagcguugagaugaaugcucccaacuaucauuacgaagagugcuccuguuacccugauucuagcgagaucacgugcgugugcagagacaauuggcacggguccaaccggcccugggugagcuucaaucagaaccuggaauaucagauuggauacaucuguucuggcauuuuuggggauaauccucgccccaacgacaagacaggauccugcggcccggucagcucuaauggggccaacggagugaagggcuucuccuuuaaauauggcaacgggguuuggaucggaagaaccaagagcauuuccucucggaauggcuucgagaugaucugggauccuaacggguggacaggaaccgacaauaacuuuagcaucaaacaggacauugugggcaucaaugaaugguccggguacucuggcagcuucguccaacaucccgagcuuaccggacuggauuguauucgcccuugcuucuggguggaacucaucagaggccggcccaaggagaacacaauuuggacguccgggagcucuaucuccuuuuguggaguuaauagcgacaccgugggcuggucuuggcccgauggggcugagcugccuuucacaaucgacaaauga

SEQ ID NO: 212657 - RNA, 1410 nt, Artificial Sequence; identical to SEQ ID NO: 209987
  derived and/or modified CDS sequence (opt5) from neuraminidase__InfluenzaA__AEA74014

SEQ ID NO: 212658 - RNA, 1410 nt, Artificial Sequence; identical to SEQ ID NO: 209987
  derived and/or modified CDS sequence (opt5) from neuraminidase__InfluenzaA__AEA74024

SEQ ID NO: 212659 - RNA, 1410 nt, Artificial Sequence; identical to SEQ ID NO: 208810
  derived and/or modified CDS sequence (opt5) from neuraminidase__InfluenzaA__AEA74032

SEQ ID NO: 212660 - RNA, 1410 nt, Artificial Sequence; identical to SEQ ID NO: 208810
  derived and/or modified CDS sequence (opt5) from neuraminidase__InfluenzaA__AEA74034

SEQ ID NO: 212661 - RNA, 1410 nt, Artificial Sequence
  derived and/or modified CDS sequence (opt5) from neuraminidase__InfluenzaA__AEA77302
augaaccccaaucagaagaucauuaccaucggcagcgugucccugacaauuucuacgaucugcuucuuuaugcaaauugccauccucaucaccacagucacccugcacuucaaacaguacgaguuuaacagcccuccgaauaaccagguuaugcuuugugaacccacaauuaucgagagaaauauuaccgaaaucguguaucugacaaacaccacgauugagaaggaaaaaugcccuaagcucgcugaguaccggaauugguccaaaccccagugugacaucaccggguucgccccuuuuucuaaggauaacagcauucgccuguccgcgggaggcgacaucugggugacaagagagcccuaugucucuugcgauccugacaaguguuaccaauucgcucuugggcagggaaccacacugaauaacgugcauagcaauaacaccguucgggaucgcacgccguauagaacacuccugaugaaugaacugggcgugcccuuucaccucgggaccaaacaggucugcaucgccugguccucuagcuccugucaugacggaaaggccuggcugcacgugugcauuacaggcgaugacaaaaacgcuaccgccagcuucaucuacaauggccggcuuguugauucuguggucuccuggagcaaggagauucugcgcacccaggaaucugagugugugugcaucaacgggacauguacgguggucaugaccgacggauccgcuagcggcaaagccgauacaaagauucucuuuaucgaggaagggaagaucguucauaccuccacacugucuggaagcgcgcaacacguggaggaaugcuccugcuauccuagauaccccggcgugcggugugucugccgcgacaacuggaaagggagcaauagaccuauuguggauaucaacauuaaggaccacucuaucguuuccagcuacguguguucuggacuugucggcgacacccccaaaaagaaugauagcuccucuagcucccauugccuggacccgaacaaugaggaaggcgggcacggagugaaaggcugggccuucgaugacgggaacgauguuuggaugggacggacgauuagcgagaagucucgccucggcuaugagacauuuaaagugaucgaagggugguccaauccuaagagcaagcugcagaucaacagacaggucauuguggaccggggaaaucgcucuggcuacuccggcaucuucagcgucgaggggaaauccuguauuaacagaugcuuuuauguggaacugauccggggaagaaaggaggaaaccgagguucucuggaccucuaauagcauuguggucuucuguggcacauccgggaccuacggaacaggcucuuggcccgauggggcugacaucaaccugaugccuauuuga

SEQ ID NO: 212662 - RNA, 1410 nt, Artificial Sequence; identical to SEQ ID NO: 212329
  derived and/or modified CDS sequence (opt5) from neuraminidase__InfluenzaA__AEB21318

SEQ ID NO: 212663 - RNA, 1410 nt, Artificial Sequence
  derived and/or modified CDS sequence (opt5) from neuraminidase__InfluenzaA__AEB21328
augaaccccaaucagaagaucauuaccaucggcagcgugugcaugacaauugggauggccaaccugauccuccaaauuggaaauaucaucuccauuuggaucucucacagcauucagcugggcaaccagucccagaucgagacguguaaucaaucugucauuaccuacgaaaacaauacauggguuaaccagaccuaugugaauaucagcaacacaaauuucgcugccgggcaguccguggucucugugaaacuugcgggaaacagcucccugugcccuguuagcggcugggcuauuuacucuaaggacaauuccaucagaaucgggagcaaaggagauguguuugucauucgggagccguucaucucuuguagcccccucgaaugccgcaccuuuuuccugacacagggcgcccuucugaacgacaagcauuccaauggcaccauuaaagauagaucuccuuaucggacgcucauguccugucccaucggggaggugccuagccccuacaacucccgcuuugaaucuguugccuggagcgcuuccgccugccacgacggauucaacuggcugaccauuggcaucagcgggccugauaauggagcuguggccguccugaaguauaacggcaucauuacagacaccaucaagucuuggagaaauaacauucuccggacacaagaguccgagugugcgugcgugaaugggagcuguuuuaccaucaugacggauggaccgucugacggccaggccagcuacaaaauuuuccgcaucgaaaagggcaaaaucgugaaguccgucgagaugaacgcucccaauuaucauuacgaagagugcucuuguuacccugauagcuccgagauuacaugcguuugcagagacaacuggcacgggagcaaucggcccugggugucuuuuaaccagaaucuggaauaucagaucggauacauuuguuccggcaucuucggggauaacccucgccccaaugacaaaaccggaagcugcggcccggugucuuccaacggggccaauggagucaagggcuuuagcuucaaguauggcaacgggguguggauuggaagaacaaaauccaucucuagccggaagggcuuugagaugauuugggauccuaacggguggaccggaaccgacaauaacuucuccaucaaacaagacaucguuggcauuaaugaauggucuggguacagcggcuccuucgugcagcaucccgagcuuacaggacuggauuguauccgcccuugcuuuugggucgaacucauuagaggccggcccaaggagaacacgaucuggaccagcgggucuuccaugagcuucuguggaguuaauucugacacagugggcugguccuggcccgauggggcugagcugccuuuuaccauugacaaauga

SEQ ID NO: 212664 - RNA, 1410 nt, Artificial Sequence; identical to SEQ ID NO: 212329
  derived and/or modified CDS sequence (opt5) from neuraminidase__InfluenzaA__AEB21340

SEQ ID NO: 212665 - RNA, 1410 nt, Artificial Sequence
  derived and/or modified CDS sequence (opt5) from neuraminidase__InfluenzaA__AEB21350
augaaccccaaucagaagaucauuaccaucggcagcgugugcaugacaauugggauggccaaccugauccuccaaauuggaaauaucaucuccauuuggaucucucacagcauucagcugggcaaccagucccagaucgagacguguaaucaaucugucauuaccuacgaaaacaauacauggguuaaccagaccuaugugaauaucagcaacacaaauuucgcugccgggcaguccguggucucugugaaacuugcgggaaacagcucccugugcccuguuagcggcugggcuauuuacucuaaggacaauuccaucagaaucgggagcaaaggagauguguuugucauucgggagccguucaucucuuguucccccagcgaaugccgcaccuuuuuccucacacagggcgcccugcuuaacgacaagcauucuaauggcaccauuaaagauagauccccuuaucggacgcugaugagcugucccaucggggaggugccuucccccuacaacucucgcuuugaaagcguugccugguccgcuagcgccugccacgacggaauuaacuggcucaccaucggcaucucugggccugauaauggagcuguggccguccugaaguauaacggcauuaucacagacaccauuaaguccuggagaaauaacauccugcggacacaagagagcgagugugcgugcgugaaugggucuuguuucaccauuaugacggauggaccgagcgacggccaggccuccuacaaaaucuuucgcaucgaaaagggcaaaauugugaagucugucgagaugaacgcucccaauuaucauuacgaagagugcagcuguuacccugauuccagcgagaucacaugcguuugcagagacaacuggcacgggucuaaucggcccuggguguccuucaaccagaaucucgaauaucagauuggauacaucuguagcggcauuuuuggggauaacccucgccccaaugacaaaaccggaucuugcggcccgguguccagcaacggggccaauggagucaagggcuucuccuuuaaguauggcaacgggguguggaucggaagaacaaaaucuauuaucagccggaagggcuucgagaugaucugggauccuaacggguggaccggaaccgacaauaacuuuuccauuaaacaagacaucguuggcauuaaugaauggucuggguacagcggcuccuucgugcagcaucccgagcugacaggacuugauuguauccgcccuugcuucugggucgaacugauuagaggccggcccaaggagaacacgaucuggaccagcgggucuuccaucagcuuuuguggaguuaauucugacacagugggcugguccuggcccgauggggcugagcucccuuucaccauugacaaauga

SEQ ID NO: 212666 - RNA, 1410 nt, Artificial Sequence; identical to SEQ ID NO: 212329
  derived and/or modified CDS sequence (opt5) from neuraminidase__InfluenzaA__AEB21360

SEQ ID NO: 212667 - RNA, 1410 nt, Artificial Sequence; identical to SEQ ID NO: 209677
  derived and/or modified CDS sequence (opt5) from neuraminidase__InfluenzaA__AEB40209

SEQ ID NO: 212668 - RNA, 1410 nt, Artificial Sequence; identical to SEQ ID NO: 208671
  derived and/or modified CDS sequence (opt5) from neuraminidase__InfluenzaA__AEB66898

SEQ ID NO: 212669 - RNA, 1413 nt, Artificial Sequence
  derived and/or modified CDS sequence (opt5) from neuraminidase__InfluenzaA__AEB71103
augaaccccaaucagaagaucauuaccaucggcagcgugucccuggggcucgucguuuucaacgugcugcuucacguggucucuauuaucgugacaguugugguccugggaaaugacggcgggaacggaauuugcaauggcacggugguuaaagaguacaacgaaaccgugagaaucgagcgggucauccaauggcauaauacaagcgugguggaauauauuccuuaccucaacgggggaaccuauacaaauaacaccgaguccgucugugauguuaagggcuuugccccguucucuaaagacaauggcgugcgcaucgggagcagaggacacguguuugucauucgggaacccuucguguccugcucuccucgcgaguguagaacauuuuuccugacccagggcagccuucugaacgauaagcauuccaaugggacgguuaaagaccggagccccuuuaagacccucaugucuguggaggucggacaguccccuaacguguaccaggcucgcuucgaagccguugcguggagcgcuacagccugccacgauggcaagaaauggaugaccaucggggugacaggacccgacucuaaggccgucgcugugguccauuauggcggcgugccuaccgauauuaucaauuccugggccggggacauucugagaacgcaagagagcucuuguacaugcauccagggagauuguuacuggguuaugaccgacggcccggcuaaccggcaggcccaguaucgcaucuacaaauccaaccaagggaagauuaucggacagauggauauuaauuuuaacggcgggcacaucgaagagugcagcuguuaccccaaugacggaaaaguggagugcgucuguagagauaacuggacaggcaccaaucggccugugcugguuauuucccccgaccucucuuauaaggugggcuaccugugcgcggggcuuccuagcgacacaccccgcggagaagaugcccaguucuccggcagcugcaccucuccggucgggggacagggcuauggggugaagggcuuuggauucagacaaggcaacgacguguggauggggcggacgaucucccgcaccagcagaucuggauuugagguuauccgggucaaaaauggcuggacacagaccagcaaggaacagauuagaaaacaagugguggucgauaaccugaauugguccggguacucuggcagcuucacacucccuaucgagcuguccggaaagagcugucuugugcccugcuucuggguugaaaccauucgcgggaaaccugaggagaagacgaucuggacaucuuccagcucuauugugauguguggcgucgacuaugaaguggcugauugguccuggcacgacggagccauccugcccuuugauaucgacaaaauguga

SEQ ID NO: 212670 - RNA, 1413 nt, Artificial Sequence; identical to SEQ ID NO: 211002
  derived and/or modified CDS sequence (opt5) from neuraminidase__InfluenzaA__AEB71899

SEQ ID NO: 212671 - RNA, 1410 nt, Artificial Sequence
  derived and/or modified CDS sequence (opt5) from neuraminidase__InfluenzaA__AEB71910
augaaccccaaucagaagaucauuaccaucggcagcgugugcaugacaauugggauggccaaccugauccuccaaauuggaaauaucaucuccauuuggaucucucacagcauucagcugggcaaccagaaucagaucgagacguguaaccaauccgucauuaccuacgaaaauaacacauggguuaaucagaccuaugugaacaucucuaauacauacuucgcugccgggcagagcguggucuccgugaaacuugcgggaaacucuagccugugcccuguuuccggcugggcuauuuauagcaaggacaauucuaucagaaucggguccaaaggagauguguuugucauucgggagccguucaucagcuguucuccccucgaaugccgcaccuuuuuccugacacagggcgcccuucugaacgacaagcauuccaauggcaccauuaaagauagaagcccuuaccggacgcucaugucuugucccaucggggaggugccuucccccuauaacagccgcuuugaauccguugccuggucugcuagcgccugccacgacggaauuaacuggcugaccaucggcaucuccgggccugauaauggagcuguggccguccugaaguacaacggcauuaucacagacaccauuaagagcuggagaaauaacauccuccggacacaagagucugagugugcgugcgugaauggguccuguuucaccgugaugacggauggaccgagcgacggccaggccucuuauaaaauuuuucgcaucgaaaagggcaaaaucgucaagagcguugagaugaacgcucccaauuaccauuacgaagagugcuccuguuauccugauucuagcgagauuacaugcgugugcagagacaacuggcacggguccaaucggcccugggugagcuucaaccagaaucuggaauaccagaucggauauauuuguucuggcaucuuuggggauaacccucgccccaaugacaaaaccggauccugcggcccggucagcucuaacggggccaauggagugaagggcuucuccuuuaaguacggcaacgggguuuggauuggaagaacaaaaagcaucuccucucggaacggcuucgagaugauuugggauccuaauggguggaccggaaccgacaacaauuuuagcaucaagcaagacaucgugggcauuaacgaaugguccggguauucuggcagcuucguccagcaucccgagcuuacaggacuggauuguauccgcccuugcuucuggguggaacucauuagaggccggcccaaagagaauacgaucuggaccuccgggagcucuauuuccuuuuguggaguuaacagcgacacagugggcuggucuuggcccgauggggcugagcugccuuucaccaucgacaaguga

SEQ ID NO: 212672 - RNA, 1410 nt, Artificial Sequence; identical to SEQ ID NO: 208810
  derived and/or modified CDS sequence (opt5) from neuraminidase__InfluenzaA__AEB71919

SEQ ID NO: 212673 - RNA, 1410 nt, Artificial Sequence; identical to SEQ ID NO: 210556
  derived and/or modified CDS sequence (opt5) from neuraminidase__InfluenzaA__AEB71928

SEQ ID NO: 212674 - RNA, 1410 nt, Artificial Sequence
  derived and/or modified CDS sequence (opt5) from neuraminidase__InfluenzaA__AEB71939
augaaccccaaucagaagaucauuaccaucggcagcgugucccugacaauuucugccaucugcuucuuuaugcaaauugcuauccucaucacgaccgucacacugcacuucaaacaguacgaguuuaacagcccuccgaauaaccagguuaugcuuugugaacccaccauuaucgagagaaauauuacagaaaucguguaucugaccaacacaaccauugagaaggaaaucugcccuaaacucgccgaguaccggaauugguccaagccccagugugacauuacgggguucgcgccuuuuucuaaagauaacagcauccgccuguccgcuggaggcgacaucugggugaccagagagcccuaugucucuugcgauccugacaaguguuaccaauucgcccuugggcagggaacaacccugaauaacgugcauagcaauaacacaguucgggaucgcaccccguauagaacgcuccugaugaaugaacugggcgugcccuuucaccucgggacaaagcaggucugcauugccugguccucuagcuccugucaugacggaaaggcuuggcugcacgugugcaucaccggcgaugacaaaaacgccacagcuagcuucauuuacaauggccggcuuguugauucuguggucuccuggagcaaagagauccugcgcacccaggaaucugagugugugugcauuaacgggaccuguacaguggucaugacggacggauccgccagcggcaaggcggauaccaaaauccucuuuaucgaggaagggaagauuguucauacauccacccugucuggaagcgcccaacacguggaggaaugcuccugcuauccuagauaccccggcgugcggugugucugccgcgacaacuggaaggggagcaauagaccuaucguggauauuaacaucaaagaccacucuauuguuuccagcuacguguguucuggacuugucggcgacacaccccggaagaaugauagcuccucuagcucccauugccuggacccgaacaaugaggaaggcgggcacggagugaaaggcugggcuuucgaugacgggaacgauguuuggaugggacgcaccaucagcgagaagucuagacucggcuaugagacguuuaaagugaucgaagggugguccaaucauaagagcaaacugcagauuaaccggcaggucaucguggaccgcggaaauagaucuggcuacuccggcauuuucagcgucgaggggaaguccuguaucaaccggugcuuuuauguggaacugauuagaggacgcaaggaggaaacagagguucucuggaccucuaauagcaucguggucuucuguggcaccuccgggacauacggaaccggcucuuggccugauggggccgaccugaaccuuaugcccauuuga

SEQ ID NO: 212675 - RNA, 1410 nt, Artificial Sequence
  derived and/or modified CDS sequence (opt5) from neuraminidase__InfluenzaA__AEB71950
augaaccccaaucagaagaucauuaccaucggcagcgugucccugacaauuucuacgaucugcuucuuuaugcaaauugccauccucaucaccacagucacccugcacuucaaacaguacgaguuuaacagcccuccgaauaaccagguuaugcuuugugaacccacaauuaucgagagaaauauuaccgaaaucguguaucugacaaacaccacgauugagaaggaaaucugcccuaaacucgcugaguaccggaauugguccaagccccagugugacauuaccggguucgccccuuuuucuaaagauaacagcauccgccuguccgcgggaggcgacaucugggugacaagagagcccuaugucucuugcgauccugacaaguguuaccaauucgcucuugggcagggaaccacacugaauaacgugcauagcaauaacaccguucgggaucgcacgccguauagaacacuccugaugaaugaacugggcgugcccuuucaccucgggaccaagcaggucugcauugccugguccucuagcuccugucaugacggaaaagccuggcugcacgugugcaucacaggcgaugacaagaacgcuaccgccagcuucauuuacaauggccggcuuguugauucuguggucuccuggagcaaagagauccugcgcacccaggaaucugagugugugugcauuaacgggacauguacgguggucaugaccgacggauccgcuagcggcaaggccgauacaaaaauccucuuuaucgaggaagggaagauuguucauaccuccacacugucuggaagcgcgcaacacguggaggaaugcuccugcuauccuagauaccccggcgugcggugugucugccgcgacaacuggaaggggagcaauagaccuaucguggauauuaacaucaaagaccacucuauuguuuccagcuacguguguucuggacuugucggcgacacgccccggaagaaugauagcuccucuagcucccauugccuggacccgaacaaugaggaaggcgaucacggggugaaaggaugggccuucgacgauggcaacgacguuuggauggggcgcaccaucagcgagaagucuagacucggauaugagacauuuaaagugaucgaaggcugguccaaucauaagagcaaacugcagauuaaccggcaggucaucguggaucgcgggaauagaucuggauacuccggcauuuucagcgucgagggcaaguccuguaucaaccggugcuuuuauguggaacugauuagagggcgcaaggaggaaaccgagguucucuggaccucuaauagcaucguggucuucuguggaacauccggcaccuacgggacaggaucuuggccugacggcgcugaucugaaccuuaugcccauuuga

SEQ ID NO: 212676 - RNA, 1413 nt, Artificial Sequence; identical to SEQ ID NO: 212009
  derived and/or modified CDS sequence (opt5) from neuraminidase__InfluenzaA__AEB71961

SEQ ID NO: 212677 - RNA, 1410 nt, Artificial Sequence
  derived and/or modified CDS sequence (opt5) from neuraminidase__InfluenzaA__AEB71972
augaaccccaaucagaagaucauuaccaucggcagcgugucccugacaauuucuacgaucugcuucuuuaugcaaauugccauccucaucaccacagucacccugcacuucaaacaguacgaguuuaacagcccuccgaauaaccagguuaugcuuugugaacccacaauuaucgagagaaauauuaccgaaaucguguaucugacaaacaccacgauugugaaggagaucugcccuaaacucgcugaauaccggaauugguccaagccccagugugacauuaccggguucgccccuuuuucuaaagauaacagcauccgccuguccgcgggaggcgacaucugggucacaagagagcccuaugugucuugcgauccugacaaguguuaccaauucgcucuugggcagggaaccacacugaauaacguucauagcaauaacaccgugcgggaucgcacgccguauagaacacuccugaugaaugagcugggcguccccuuucaccucgggaccaaacaggugugcauugccugguccucuagcuccugucaugacggaaaggccuggcugcacguuugcaucacaggcgaugacaagaacgcuaccgccagcuucauuuacaauggccggcuuguggauucugucguguccuggagcaaagaaauccugcgcacccaggagucugaaugugugugcauuaacgggacauguacggucguuaugaccgacggauccgcuagcggcaaggccgauacaaaaauccucuuuaucgaggaggggaagauugugcauaccuccacacugucuggaagcgcgcaacacguggaagagugcuccugcuauccuagauaccccggcguccggugugugugccgcgacaacuggaaggggagcaauagaccuaucguugauauuaacaucaaagaccacucuauuguguccagcuacgucuguucuggacuugugggcgacacgccccggaagaaugauagcuccucuagcucccauugccuggacccgaacaaugaagagggcgggcacggaguuaaaggcugggccuucgaugacgggaacgauguguggaugggacgcaccaucagcgaaaagucuagacucggcuaugagacauuuaaagucaucgaggggugguccaauccuaagagcaaacugcagauuaaccgccaggugaucgucgaccggggaaauagaucuggcuacuccggcauuuucagcguggaagggaaguccuguaucaaccggugcuuuuauguugagcugauuagaggacgcaaggaagagaccgaagugcucuggaccucuaauagcaucgucguguucuguggcacauccgggaccuacggaacaggcucuuggcccgauggggcugacauuaaccugaugccuaucuga

SEQ ID NO: 212678 - RNA, 1410 nt, Artificial Sequence
  derived and/or modified CDS sequence (opt5) from neuraminidase__InfluenzaA__AEB71983
augaaccccaaucagaagaucauuaccaucggcagcgugucccugacaauuucuacgaucugcuucuuuaugcaaauugccauccucaucaccacagucacccugcacuucaaacaguacgaguuuaacagcccuccgaauaaccagguuaugcuuugugaacccacaauuaucgagagaaauauuaccgaaaucguguaucugacaaacaccacgauugagaaggaaaucugcccuaaacucgcugaguaccggaauugguccaagccccagugugacauuaccggguucgccccuuuuucuaaagauaacagcauccgccuguccgcgggaggcgacaucugggugacaagagagcccuaugucucuugcgauccugacaaguguuaccaauucgcucuugggcagggaaccacacugaauaacgugcauagcaauaacaccguucgggaucgcacgccguauagaacacuccugaugaaugaacugggcgugcccuuucaccucgggaccaagcaggucugcauugccugguccucuagcuccugucaugacggaaaagccuggcugcacgugugcaucacaggcgaugacaagaacgcuaccgccagcuucauuuacaauggccggcuuguugauucuguggucuccuggagcaaagagauccugcgcacccaggaaucugagugugugugcauuaacgggacauguacgguggucaugaccgacggauccgcuagcggcaaggccgauacaaaaauccucuuuaucgaggaagggaagauuguucauaccuccacacugucuggaagcgcgcaacacguggaggaaugcuccugcuauccuagauaccccggcgugcggugugucugccgcgacaacuggaaggggagcaauagaccuaucguggauauuaacaugaaagaccacucuaucguuuccagcuacguguguucuggacuugucggcgacacgccccggcgcaaugauagcuccucuagcucccauugccuggacccgaacaaugaggaaggcgggcacggagugaagggcugggccuucgaugacgggaacgauguuuggaugggaagaaccauuagcgagaaaucucggcucggcuaugagacauuuaaggugaucgaagggugguccaauccuaaaagcaagcugcagaucaaccgccaggucauuguggacagaggaaaucggucuggcuacuccggcaucuucagcgucgaggggaaauccuguauuaacagaugcuuuuauguggaacugauccgcggacggaaggaggaaaccgagguucucuggaccucuaauagcauuguggucuucuguggcacauccgggaccuacggaacaggcucuuggcccgauggggcugacaucaaccugaugccuauuuga

SEQ ID NO: 212679 - RNA, 1413 nt, Artificial Sequence
  derived and/or modified CDS sequence (opt5) from neuraminidase__InfluenzaA__AEB71995
augaaccccaaucagaagaucauuaccaucggcagcauuuccaucgccauugggaucaucucucugaugcuccaaauuggaaacaucauuagcaucugggcuucccacucuauucagacaggcagccagaauaacacggggaucugcaaucagagaauuaucaccuacgagaacuccacaugggugaaucauaccuauaucaacauuaauaacacaaaugucguugccggagaagacaaaaccucugugacacuggcgggcaacagcucccuuuguagcaucucugggugggcuauuuacaccaaggauaauuccauccggauuggaagcaaaggcgacguguucgucauccgcgagccuuuuaucucuugcucccaccuggaauguagaacguucuuucucacccaaggcgcccugcuuaacgauaagcauagcaaugggacagugaaagaccggucuccguaucgcgcccugauguccugcccccucggagaggcuccuagccccuacaacuccaaguucgaaucuguugccuggagcgcuuccgccugucacgauggcaugggguggcugaccauuggaaucagcggcccugacaacggggcgguggccguccugaaguauaauggaauuaucacaggcaccauuaaaucuuggaagaaacagauccucagaacgcaggaguccgagugcguguguaugaacggcagcugcuuuacaaucaugaccgaugggcccucuaauaaggcugccagcuacaaaauuuucaagaucgaaaagggaaaaguuacaaaguccauugagcugaacgcuccuaauuuuuauuacgaagaguguucuugcuacccggacaccggcaucgugaugugugucugccgggauaacuggcaugggagcaaucgccccuggguguccuucaaccagaaucuugacuaucaaauuggauacaucugcagcggcguguuuggggauaacccuagacccgaggacggagaaggcucuuguaauccugucaccguuaacggcgccgauggggugaaaggauucuccuauaaguacggcaaugggguguggauuggacggacaaaaagcaaccgccugagaaagggcuuugagaugaucugggaccccaauggguggacgaacaccgacucugauuucuccgucaaacaggacgugguugcgaucacagauuggagcggcuauuccggaucuuuugugcagcacccggaacucaccggccuggagugcauucggccuuguuucugggucgaacuugugcgcgggcugcccagagagaacacaaccaucuggacgagcggauccucuauuagcuucugcggcguuaauuccgacacagccaacuggagcuggccugauggggcugagcuccccuuuaccaucgacaaguga

SEQ ID NO: 212680 - RNA, 1413 nt, Artificial Sequence; identical to SEQ ID NO: 212277
  derived and/or modified CDS sequence (opt5) from neuraminidase__InfluenzaA__AEC13316

SEQ ID NO: 212681 - RNA, 1410 nt, Artificial Sequence; identical to SEQ ID NO: 208810
  derived and/or modified CDS sequence (opt5) from neuraminidase__InfluenzaA__AEC53262

SEQ ID NO: 212682 - RNA, 1410 nt, Artificial Sequence; identical to SEQ ID NO: 208810
  derived and/or modified CDS sequence (opt5) from neuraminidase__InfluenzaA__AEC53272

SEQ ID NO: 212683 - RNA, 1410 nt, Artificial Sequence; identical to SEQ ID NO: 208810
  derived and/or modified CDS sequence (opt5) from neuraminidase__InfluenzaA__AEC53282

SEQ ID NO: 212684 - RNA, 1410 nt, Artificial Sequence; identical to SEQ ID NO: 208810
  derived and/or modified CDS sequence (opt5) from neuraminidase__InfluenzaA__AEC53292

SEQ ID NO: 212685 - RNA, 1410 nt, Artificial Sequence
  derived and/or modified CDS sequence (opt5) from neuraminidase__InfluenzaA__AEC53302
augaaccccaaucagaagaucauuaccaucggcagcgugugcaugacaauugggauggccaaccugauccuccaaauuggaaauaucaucuccauuuggaucucucacagcauucagcugggcaaccagaaucagaucgagacguguaaccaauccgucauuaccuacgaaaauaacacauggguuaaucagaccuaugugaacaucucuaauacaaacuucgcugccgggcagagcguggucuccgugaaacuugcgggaaauucuagccugugcccuguuuccggcugggcuauuuacagcaaggacaacucuaucagaaucggguccaaaggagauguguuugucauucgggagccguucaucagcuguucuccccucgaaugccgcaccuuuuuccugacacagggcgcccuucugaaugacaagcauuccaacggcaccauuaaagauagaagcccuuaucggacgcucaugucuugucccaucggggaggugccuucccccuacaacagccgcuuugaauccguugccuggucugcuagcgccugccacgacggaauuaauuggcugaccaucggcaucuccgggccugauaacggagcuguggccguccugaaguauaauggcauuaucacagacauuaucaagagcuggagaaacaauauucuccggacccaagagucugagugugcgugcgugaacggguccuguuucacagugaugaccgauggaccgagcgacggccaggccucuuacaaaaucuuucgcaucgaaaagggcaaaauugucaagagcguugagaugaaugcucccaacuaucauuacgaagagugcuccuguuacccugauucuagcgagaucacgugcgugugcagagacaauuggcacggguccaaccggcccugggugagcuucaaucagaaccuggaauaucagauuggauacaucuguucuggcauuuuuggggauaauccucgccccaacgacaaaacaggauccugcggcccggucagcucuaauggggccaacggagugaagggcuucuccuuuaaguauggcaacgggguuuggaucggaagaaccaaaagcauuuccucucggaauggcuucgagaugaucugggauccuaacggguggacaggaaccgacaauaacuuuagcaucaagcaagacauugugggcaucaaugaaugguccggguacucuggcagcuucguccagcaucccgagcuuaccggacuggauuguauucgcccuugcuucuggguggaacucaucagaggccggcccaaagagaacacaauuuggacguccgggagcucuaucuccuuuuguggaguuaauagcgacaccgugggcuggucuuggcccgauggggcugagcugccuuucacaaucgacaaguga

SEQ ID NO: 212686 - RNA, 1410 nt, Artificial Sequence; identical to SEQ ID NO: 208810
  derived and/or modified CDS sequence (opt5) from neuraminidase__InfluenzaA__AEC53350

SEQ ID NO: 212687 - RNA, 1410 nt, Artificial Sequence; identical to SEQ ID NO: 209518
  derived and/or modified CDS sequence (opt5) from neuraminidase__InfluenzaA__AEC53407

SEQ ID NO: 212688 - RNA, 1410 nt, Artificial Sequence; identical to SEQ ID NO: 208810
  derived and/or modified CDS sequence (opt5) from neuraminidase__InfluenzaA__AEC53427

SEQ ID NO: 212689 - RNA, 1410 nt, Artificial Sequence; identical to SEQ ID NO: 209636
  derived and/or modified CDS sequence (opt5) from neuraminidase__InfluenzaA__AED99967

SEQ ID NO: 212690 - RNA, 1410 nt, Artificial Sequence; identical to SEQ ID NO: 208800
  derived and/or modified CDS sequence (opt5) from neuraminidase__InfluenzaA__AEE27161

SEQ ID NO: 212691 - RNA, 1410 nt, Artificial Sequence; identical to SEQ ID NO: 208810
  derived and/or modified CDS sequence (opt5) from neuraminidase__InfluenzaA__AEE27170

SEQ ID NO: 212692 - RNA, 1410 nt, Artificial Sequence; identical to SEQ ID NO: 208800
  derived and/or modified CDS sequence (opt5) from neuraminidase__InfluenzaA__AEE27180

SEQ ID NO: 212693 - RNA, 1410 nt, Artificial Sequence
  derived and/or modified CDS sequence (opt5) from neuraminidase__InfluenzaA__AEE27190
augaaccccaaucagaagaucauuaccaucggcagcgugugcaugacaauugggauggccaaccugauccuccaaauuggaaauaucaucuccauuuggaucucucacagcauucagcugggcaaccagaaucagaucgagacguguaaccaauccgucauuaccuacgaaaauaacacauggguuaaucagaccuaugugaacaucucuaauacaaacuucgcugccgggcagagcguggucuccgugaaacuugcgggaaauucuagccugugcccuguuuccggcugggcuauuuacagcaaggacaacucugugagaaucggguccaaaggagaugucuuugugauccgggagccguucauuagcuguucuccccucgaaugccgcaccuuuuuccugacacagggcgcccuucugaaugacaagcauuccaacggcaccaucaaagauagaagcccuuaucggacgcucaugucuugucccauuggggagguuccuucccccuacaacagccgcuuugaauccguggccuggucugcuagcgccugccacgacggaaucaauuggcugaccauuggcaucuccgggccugauaacggagcugucgccgugcugaaguauaauggcgugaucacagacaccauuaagagcuggagaaacaauauccuccggacacaagagucugagugugcgugcgucaacggguccuguuucaccguuaugacggauggaccgagcaauggccaggccucuuacaaaauuuuuaagaucgaaaaaggcaagauugugaaaagcguggagaugaacgcucccaauuaucauuacgaagagugcuccuguuacccugacucuagcgagaucacaugcgucugccgcgauaacuggcacggguccaauagacccugggugagcuucaaccagaaucuggaauaucagaucggauacauuuguucuggcaucuuuggggacaacccucggcccaaugauaagaccggauccugcggcccgguuagcucuaacggggccaacggagugaagggcuucuccuuuaaauauggcaauggggucuggauuggacgcacaaagagcaucuccucuagaaacggcuucgagaugauuugggacccuaauggguggaccggaaccgauaacaauuuuagcaucaaacaagacauugugggcaucaacgaaugguccggguacucuggcagcuucguucagcaucccgagcuuacaggacuggacuguauccggccuugcuucuggguggaacucauucgcggcagacccaaggagaauacgaucuggaccuccgggagcucuauuuccuuuuguggagucaacagcgauacagugggcuggucuuggcccgacggggcugagcugccuuucaccaucgauaaauga

SEQ ID NO: 212694 - RNA, 1410 nt, Artificial Sequence; identical to SEQ ID NO: 210033
  derived and/or modified CDS sequence (opt5) from neuraminidase__InfluenzaA__AEE27200

SEQ ID NO: 212695 - RNA, 1410 nt, Artificial Sequence; identical to SEQ ID NO: 211869
  derived and/or modified CDS sequence (opt5) from neuraminidase__InfluenzaA__AEG64755

SEQ ID NO: 212696 - RNA, 1362 nt, Artificial Sequence
  derived and/or modified CDS sequence (opt5) from neuraminidase__InfluenzaA__AEG64765
augaaccccaaucagaagaucauuaccaucggcagcauuugcaugguggucgggaucauuucccugauccuccaaaucggaaacauuaucucuauuuggaucagccacuccauucagacaggcaaucagaaccauacggggaucuguaaucagggaauuaucaccuacaacguuguggccggccaagacucuacaagcgugauccugaccggaaauuccucucuuugcccuauuagagggugggcuauccacagcaaagauaacggcauucggaucggcuccaagggggacgucuucgugauucgcgagccguuuaucagcuguucucaucuggaaugcagaacauucuuucucacccagggagcccugcuuaaugauaaacacuccaacggcacaguuaaggaccggagccccuaucgcgcgcugaugucuuguccugugggggaggcucccuccccuuacaauagcagauucgaaucugucgccugguccgccagcgcuugccaugauggaaugggcuggcucaccaucgggauuuccggacccgacaacggcgccguggcuguucugaaauauaauggcaucauuacggagaccaucaagucuuggcggaagaaaauucugcgcacacaggaaagcgaguguaccugcgugaacggguccuguuuuacaaucaugaccgauggaccuagcgacggccucgccucuuacaagaucuucaaaauugagaaggggaaagucacgaaguccaucgaacugaaugcgccgaacagccacuaugaggaaugcucuuguuaccccgauacaggaaaggugaugugcgugugcagagacaacuggcacggcagcaaucggccuugggucuccuuugaucagaaccuugacuaucaaauuggguacaucuguucuggaguuuucggcgauaauccccgcccuaaagacggcaccgggagcugcggacccguguccgccgacggcgcuaacggggugaagggauuuagcuacagauauggcaauggggucuggauuggccggacaaaaucugauuccagccgccauggauucgagaugaucugggacccgaacggcuggaccgagaccgauucuagauuuuccgugcggcaggacguuguggccaugacagaucgcagcggguacuccggaucuuucguccagcacccugaacugacgggccucgacuguaugagacccugcuuuuggguggagcugauucgggggagaccugaagagaagaccaucuggacaagcggauccaucauuucuuucuguggcguuaauagcgauaccguggacugguccuggcccgauggggcugaacuucccuucacaaucgacaaauga

SEQ ID NO: 212697 - RNA, 1410 nt, Artificial Sequence
  derived and/or modified CDS sequence (opt5) from neuraminidase__InfluenzaA__AEG64787
augaaccccaaucagaagaucauuaccaucggcagcgugugcaugacaauugggauggccaaccugauccuccaaauuggaaauaucaucuccauuuggaucucucacagcauucagcugggcaaccagaaucagaucgagacguguaaccaauccgucauuaccuacgaaaauaacacauggguuaaucagaccuaugugaacaucucuaauacaaacuucgcugccgggcagagcguggucuccgugaaacuugcgggaaauucuagccugugcccuguuuccggcugggcuauuuacagcaaggacaacucuaucagaaucggguccaaaggagauguguuugucauucgggagccguucaucagcuguucuccccucgaaugccgcaccuuuuuccugacacagggcgcccuucugaaugacaagcauuccaacggcaccauuaaagauagaagcccuuaucggacgcucaugucuugucccaucggggaggugccuucccccuacaacagccgcuuugaauccguugccuggucugcuagcgccugccacgacggaauuaauuggcugaccaucggcaucuccgggccugauaacggagcuguggccguccugaaguauaauggcauuaucacagacaccauuaagagcuggagaaacaaucggcuccgcacacaagagucugagugugcgugcgugaacggguccuguuucaccgugaugacggauggaccgagcgacggccaggccucuuacaaaaucuuuagaauugaaaagggcaaaaucgucaagagcguugagaugaaugcucccaacuaucauuacgaagagugcuccuguuacccugauucuagcgagaucacaugcgugugccgggacaauuggcacggguccaaccgccccugggugagcuucaaucagaaccuggaauaucagauuggauacaucuguucuggcauuuuuggggauaauccuagacccaacgacaaaaccggauccugcggcccggucagcucuaauggggccaacggagugaagggcuucuccuuuaaguauggcaacgggguuuggaucggacggacaaaaagcauuuccucucgcaauggcuucgagaugaucugggauccuaacggguggaccggaaccgacaaugacuuuagcauuaagcaagauaucgugggcaucaacgaaugguccggguacucuggcagcuucguccagcaucccgagcuuacaggacuggacuguauuagaccuugcuucuggguggaacucauccggggccgccccaaagagaauacgauuuggaccuccgggagcucuaucuccuuuuguggaguuaacagcgauacagugggcuggucuuggcccgacggggcugagcugccuuucaccauugauaaguga

SEQ ID NO: 212698 - RNA, 1410 nt, Artificial Sequence
  derived and/or modified CDS sequence (opt5) from neuraminidase__InfluenzaA__AEG64837
augaaccccaaucagaagaucauuaccaucggcagcgugucccugacaauuucuacgaucugcuucuuuaugcaaauugccauccucaucaccacagucacccugcacuucaaacaguacgaguuuaacagcccuccgaauaaccagguuaugcuuugugaacccacaauuaucgagagaaauauuaccgaaaucguguaucugacaaacaccacgauugagaaggaaaucugcccuaaacucgcugaguaccggaauugguccaagccccagugugacauuaccggguucgccccuuuuucuaaagauaacagcauccgccuguccgcgggaggcgacaucugggugacaagagagcccuaugucucuugcgauccugacaaguguuaccaauucgcucuugggcagggaaccacacugaauaacgugcauagcaauaacaccguucgggaucgcacgccguauagaacacuccugaugaaugaacugggcgugcccuuucaccucgggaccaagcaggucugcauugccugguccuccucuuccugucaugacggaaaagccuggcugcacgugugcaucacaggcgaugacaagaacgcuaccgccagccuuauuuacaauggccggcugguugauucuguggucuccuggagcaaagagauccuccgcacccaggaaucugagugugugugcauuaacgggacauguacgguggucaugaccgacggauccgcuagcggcaaggccgauacaaaaauccuguucaucgaggaagggaagauuguucauaccuccacacuuucuggaagcgcgcaacacguggaggaaugcuccugcuauccuagauaccccggcgugcggugugucugccgcgacaacuggaaggggagcaauagaccuaucguggauauuaacaucaaagaccacucuauuguuuccagcuacguguguucuggacuggucggcgacacgccccggaagaaugauagcuccucuagcucccauugccucgacccgaacaaugaggaaggcgggcacggagugaaaggcugggccuuugaugacgggaacgauguuuggaugggacgcaccaucaaugagacaagcagacugggcuaugagaccuucaaggugaucgaaggguggucuaacccuaaauccaagcugcagauuaaucggcaggucaucguggaccgcggaaacagaagcggcuacucuggcauuuuuagcgucgaggggaaaagcuguaucaaucggugcuucuauguggaacucauuagaggacgcaaggaggaaaccgagguucuguggacauccaacucuaucguggucuuuuguggcaccagcgggacauacggaacgggcuccuggcccgauggggcugaccuuaaucugaugccuauuuga

SEQ ID NO: 212699 - RNA, 1410 nt, Artificial Sequence
  derived and/or modified CDS sequence (opt5) from neuraminidase__InfluenzaA__AEG64848
augaaccccaaucagaagaucauuaccaucggcagcgugucccugacaauuucuacgaucugcuucuuuaugcaaauugccauccucaucaccacagucacccugcacuucaaacaguacgaguuuuauagcccuccgaacaaucagguuaugcuuugugaacccacaauuaucgagagaaacauuaccgaaaucguguaccugacaaauaccacgauugagaaggaaaucugcccuaaacucgcugaguaucggaacuggcugaagccccagugugacauuaccggguucgccccuuuuuccaaagauaauucuauccgccuuagcgcgggaggcgacaucugggugacaagagagcccuacgucuccugcgauccugacaaguguuaucaauucgcucuggggcagggaaccacacucaacaaugugcauucuaacaauaccguucgggaucgcacgccguacagaacacugcugaugaacgaacucggcgugcccuuucaccuggggaccaagcaggucugcauugccuggagcuccagcucuugucaugacggaaaagccuggcuucacgugugcaucacaggcgaugacaagaaugcuaccgccuccuucauuuauaacggccggcugguugauagcguggucucuugguccaaagagauccuccgcacccaggaaagcgagugugugugcauuaaugggacauguacgguggucaugaccgacggaucugcuuccggcaaggccgauacaaaaauccuguuuaucgaggaagggaagauuguucauaccagcacacuuuccggaucugcgcaacacguggaggaaugcagcugcuacccuagauaccccggcgugcggugugucugccgcgacaacuggaagggguccaacagaccuaucguggauauuaauaucaaagaccacagcauuguuucuuccuauguguguagcggacuggucggcgacacgccccggaagaacgauucuagcuccucuagccauugccucgacccgaauaacgaggaaggcgggcacggagugaaaggcugggccuucgaugacgggaaugauguuuggaugggacgcaccaucaacgagacauccagacugggcuacgagaccuuuaaggugaucgaaggguggagcaauccuaaaucuaagcugcagauuaacaaacaggucaucguggaccggggaaaucgcuccggcuauagcggcauuuucucugucgaggggaaguccuguaucaacagaugcuuuuacguggaacucauucggggaagaaaggaggaaaccgagguucuguggacaagcaauuccaucguggucuucuguggcaccucugggacauauggaacgggcagcuggcccgauggggcugaccuuaaccugaugccuauuuga

SEQ ID NO: 212700 - RNA, 1410 nt, Artificial Sequence; identical to SEQ ID NO: 206305
  derived and/or modified CDS sequence (opt5) from neuraminidase__InfluenzaA__AEG64859

SEQ ID NO: 212701 - RNA, 1410 nt, Artificial Sequence; identical to SEQ ID NO: 206133
  derived and/or modified CDS sequence (opt5) from neuraminidase__InfluenzaA__AEG64870

SEQ ID NO: 212702 - RNA, 1410 nt, Artificial Sequence; identical to SEQ ID NO: 206325
  derived and/or modified CDS sequence (opt5) from neuraminidase__InfluenzaA__AEG64881

SEQ ID NO: 212703 - RNA, 1410 nt, Artificial Sequence; identical to SEQ ID NO: 206133
  derived and/or modified CDS sequence (opt5) from neuraminidase__InfluenzaA__AEG64892

SEQ ID NO: 212704 - RNA, 1410 nt, Artificial Sequence; identical to SEQ ID NO: 206209
  derived and/or modified CDS sequence (opt5) from neuraminidase__InfluenzaA__AEG64914

SEQ ID NO: 212705 - RNA, 1410 nt, Artificial Sequence; identical to SEQ ID NO: 206209
  derived and/or modified CDS sequence (opt5) from neuraminidase__InfluenzaA__AEG64925

SEQ ID NO: 212706 - RNA, 1410 nt, Artificial Sequence
  derived and/or modified CDS sequence (opt5) from neuraminidase__InfluenzaA__AEG64936
augaaccccaaucagaagaucauuaccaucggcagcgugucccugacaauugccacgaucugcuuccucaugcaaauugcuauccuggucaccacaguuacccuucacuuuaaacagcaugaguguaacucuccuccgaauaaccaggugaugcugugcgaacccacaaucauugagagaaauaucaccgaaauuguguaccucacaaacaccacgaucgagaaggaaauuuguccuaaacuggccgaguaucggaauuggagcaagccccagugcaacaucaccggguucgcgccuuuuuccaaagacaauucuauucgccuuagcgcuggaggcgauaucugggucacaagagagcccuacguguccugugacccugauaagugcuaucaauucgcccuggggcagggaaccacacucaacaauggccacucuaacgacaccguucaugaucggacgccguaccgcacacugcugaugaaugaacucggggugcccuuucaccugggaaccagacaggucuguaucgccuggagcuccagcucuugccaugacggcaaggcuuggcuucacguguguguuacaggcgaggauaaaaacgccaccgcuuccuucauuuauaaugggcggcugguggacagcaucggaucuugguccaagaaaauucuccgcacccaggaaagcgagugcgucuguaucaacggcacaugcacgguggugaugaccgaugggucugccuccggaaaggcggacacaaaaauucuguuuaucgaggaaggcaagaucguccacauuagcacccuuuccgggucugcccaacauguugaggaaugcagcuguuacccuagauaucccggagugcggugcgugugucgcgauaacuggaagggcuccaauagaccuaucgucgacauuaacgugaaagauuacagcaucguuucuuccuacgugugcagcggccuggucggggacacaccccggaagaaugacucuagcuccucuagccacugucucgauccgaacaaugaggaaggaggccauggggugaaaggaugggcuuucgacgauggcaacgacguuuggauggggcgcaccauuuccgagaagcugagaagcggauaugagacguuuaaagugaucgaaggcuggucuaagccuaauuccaaacugcagaucaaccggcaggucauuguggagcgcggcaauagaagcggguacucuggaaucuucuccgucgaaggcaagagcugcauuaaccgguguuuuuauguggagcucaucagagggcgcaaggaagagacagagguuugguggaccuccaauucuauuguggucuucugcggaaccagcggcacauacgggaccggcuccuggcccgauggagccgacaucaaccugaugccuauuuga

SEQ ID NO: 212707 - RNA, 1410 nt, Artificial Sequence; identical to SEQ ID NO: 206222
  derived and/or modified CDS sequence (opt5) from neuraminidase__InfluenzaA__AEG64947

SEQ ID NO: 212708 - RNA, 1410 nt, Artificial Sequence; identical to SEQ ID NO: 206209
  derived and/or modified CDS sequence (opt5) from neuraminidase__InfluenzaA__AEG64958

SEQ ID NO: 212709 - RNA, 1410 nt, Artificial Sequence; identical to SEQ ID NO: 206209
  derived and/or modified CDS sequence (opt5) from neuraminidase__InfluenzaA__AEG64969

SEQ ID NO: 212710 - RNA, 1410 nt, Artificial Sequence; identical to SEQ ID NO: 206209
  derived and/or modified CDS sequence (opt5) from neuraminidase__InfluenzaA__AEG64980

SEQ ID NO: 212711 - RNA, 1410 nt, Artificial Sequence
  derived and/or modified CDS sequence (opt5) from neuraminidase__InfluenzaA__AEG64991
augaaccccaaucagaagaucauuaccaucggcagcgugucccugacaauuucuacgaucugcuucuuuaugcaaauugccauccucaucaccacagucacccugcacuucaaacaguacgagagcaacuccccuccgaauaaccagguuaugcuuugugaacccacaauuaucgagagaaauauuaccgaaaucguguaucugacaaacaccacgauugagaaggaaaucugcccuaaacucgcugaguaccggaauuggucuaagccccaguguaacauuaccggguuugccccuuucagcaaagacaauuccauccgccugucugcgggaggcgauaucugggugacaagagagcccuaugucagcugcgacccugauaaguguuaccaauuugcucuugggcagggaaccacacugaacaaugugcauuccaacgacaccguucacgaucggacgccguaucgcacacuccugaugaaugaacugggcgugcccuuccaucucgggaccaagcaggucugcauugccuggucuagcuccagcugucacgacggaaaagccuggcugcaugugugcguuacaggcgaugacaagaacgcuaccgccucuuuuaucuacaauggcagacuuguggauuccauugucagcuggucuaaagagauccugcggacccaggaauccgagugugugugcauuaacgggacauguacgguggucaugaccgacggaagcgcuuccggcaaggccgauacaaaaauccucuucaucgaggaagggaagauuguucacaccucuacacugagcggauccgcgcaacacguggaggaaugcagcugcuauccucgcuaccccggcgugagaugugucugccgggacaacuggaaggggucuaaucgcccuaucguggauauuaacaucaaagacuacuccauuguuagcucuuauguguguagcggacuugucggcgacacccccagaaagaaugauuccucuagcuccagccauugccuggacccgaacaaugaggaaggcgggcacggagugaaaggcugggccuuugaugacgggaacgauguuuggaugggacggacgaucucugagaagcuccgcuccggcuacgagacauucaaagugaucgaaggguggagcaauccuaacucuaagcugcagaccaauagacaggucauuguggaccggggaaaccgcuccggcuauagcggcaucuuuuccgucgaggggaaaucuuguauuaauagaugcuucuacguggaacugauccggggaagaaaggaggaaaccgagguucucuggacaagcaacuccauuguggucuuuuguggcaccucugggacauauggaacgggcagcuggcccgauggggcugacaucaaucugaugccuauuuga

SEQ ID NO: 212712 - RNA, 1410 nt, Artificial Sequence; identical to SEQ ID NO: 206399
  derived and/or modified CDS sequence (opt5) from neuraminidase__InfluenzaA__AEG65002

SEQ ID NO: 212713 - RNA, 1410 nt, Artificial Sequence
  derived and/or modified CDS sequence (opt5) from neuraminidase__InfluenzaA__AEG65013
augaaccccaaucagaagaucauuaccaucggcagcgugucccugacaauuucuacgaucugcuucuuuaugcaaauugccauccucaucaccacagucacccugcacuucaaacaguacgaguuuaacagcccuccgaauaaccagguuaugcuuugugaacccacaauuaucgagagaaauauuaccgaaaucguguaucugacaaacaccacgauugagaaggaaaucugcccuaaacucgcugaguaccggaauugguccaagccccagugugacauuaccggguucgccccuuuuucuaaagauaacagcauccgccuguccgcgggaggcgacaucugggugacaagagagcccuaugucucuugcgauccugacaaguguuaccaauucgcucuugggcagggaaccacacugaauaacgugcauagcaaugauaccguucacgaccggacgccguaucgcacacuccugaugaacgaacugggcgugcccuuucaucucgggaccaagcaggucugcauugccugguccucuagcuccugucacgauggaaaagccuggcugcaugugugcguuacaggcgacgauaagaaugcuaccgccagcuucaucuacaacggcagacuuguggacucuauugucuccuggagcaaagauauccugcggacccaggagucugaaugugugugcauuaaugggacauguacgguggucaugaccgacggauccgcuagcggcaaggccgauacaaaaauccucuuuaucgaggaggggaagauuguucacaccuccacacugucuggaagcgcgcaacacguggaagagugcuccugcuauccucgcuaccccggcgugagaugugucugccgggacaacuggaaggggagcaaccgcccuaucguggacauuaauaucaaagauuacucuauuguuuccagcuauguguguucuggacuugucggcgacacccccagaaagaacgauagcuccucuagcucccauugccuggacccgaauaacgaagagggcgggcacggagugaaaggcugggccuucgaugacgggaaugauguuuggaugggacggacgaucagcgaaaagcuccgccugggcuacgagacauuuaaagugaucgagggguggucuaacccuaauuccaagcugcagaccaacagacaggucauuguggaacggggaaaucgcagcggcuauucuggcaucuucuccgucgaggggaaaagcuguauuaacagaugcuuuuacguggaacucauccggggaagaaaggaggaaaccgagguucuguggacauccaauucuauuguggucuucuguggcaccagcgggacauauggaacgggcuccuggcccgacggggcugauaucaaccuuaugccuauuuga

SEQ ID NO: 212714 - RNA, 1410 nt, Artificial Sequence
  derived and/or modified CDS sequence (opt5) from neuraminidase__InfluenzaA__AEG65024
augaaccccaaucagaagaucauuaccaucggcagcgugucccugacaauuucuacgaucugcuucuuuaugcaaauugccauccucaucaccacagucacccugcacuucaaacaguacgaguuuaacagcccuccgaauaaccauguuaugcuuugugaacccacaauuaucgagagaaauauuaccgaaaucguguaucugacaaacaccacgauugagaaggaaaucugcccuaaacucgcugaguaccggaauugguccaagccccagugugacauuaccggguucgccccuuuuucuaaagauaacagcauccgccuguccgcgggaggcgacaucugggugacaagagagcccuaugucucuugcgauccugacaaguguuaccaguucgcucuugggcaaggaaccacacugaauaacgugcacagcaaugauaccguucaugaccggacgccguaucgcacacuccugaugaacgaacugggcgugcccuuucaccucgggaccaagcaggucugcauugccugguccucuagcuccugucaugauggaaaagccuggcugcacgugugcguuacaggcgacgauaagaaugcuaccgccagcuucaucuacaacggcagacuuguggacucuauugucuccuggagcaaagagauccugcggacccaggaaucugagugugugugcauuaaugggacauguacgguggucaugaccgauggauccgcuagcggcaaggccgacacaaaaauccucuuuaucgaggaagggaagauuguucacaccuccacacugucuggaagcgcgcagcauguggaggaaugcuccugcuauccucgcuaccccggcgugagaugugucugccgggauaacuggaaggggagcaaccgcccuaucguggacauuaauaucaaagacuacucuauuguuuccagcuauguguguucuggacuugucggcgauacccccagaaagaacgacagcuccucuagcucccacugccuggauccgaauaacgaggaaggcgggcauggagugaaaggcugggccuucgacgaugggaaugacguuuggaugggacggacgaucagcgagaagcuccgccugggcuacgagacauuuaaagugaucgaaggguggucuaacccuaauuccaagcugcaaauuaacagacaggucaucguggaucggggaaaucgcagcggcuauucuggcauuuucuccgucgaggggaaaagcuguaucaacagaugcuuuuacguggaacucauucggggaagaaaggaggaaaccgagguucuguggaccuccaauucuaucguggucuucuguggcacaagcgggaccuauggaacaggcuccuggcccgacggggcugauauuaaccuuaugccuaucuga

SEQ ID NO: 212715 - RNA, 1410 nt, Artificial Sequence
  derived and/or modified CDS sequence (opt5) from neuraminidase__InfluenzaA__AEG65035
augaaccccaaucagaagaucauuaccaucggcagcgugucccugacaauuucuacgaucugcuucuuuaugcaaauugccauccucaucaccacagucacccugcacuucaaacaguacgaguuuaacagcccuccgaauaaccagguuaugcuuugugaacccacaauuaucgagagaaauauuaccgaaaucguguaucugacaaacaccacgauugagaaggaagugugcccuaaacucgcugaguaccggaauugguccaagccccaguguaacaucaccggguucgccccuuuuucuaaagacaauagcauucgccuguccgcgggaggcgauaucugggucacaagagagcccuaugugucuugcgaccuugauaaguguuaccaauucgcucuggggcagggaaccacacucaacaauguucauagcaacgacaccgugcacgaucggacgccuuaucgcacacugcugaugaaugaacucggcgucccguuucaucuggggaccaaacaggugugcaucgccugguccucuagcuccugucacgacggaaaggccuggcuucauguuugcgugacaggcgaugacaagaacgcuaccgccagcuucauuuacaauggcagacuggucgauucuaucguguccuggagcaaagagauucuccggacccaggaaucugagugugugugcaucaacgggacauguacggucguuaugaccgacggauccgcuagcggcaaggccgauacaaaaauucuguuuaucgaggaagggaagaucgugcacaccuccacacuuucuggaagcgcgcaacacguggaggaaugcuccugcuauccccgcuacccuggcgucagaugugugugccgggacaacuggaaggggagcaaucgccccauuguugauaucaacauuaaagacuacucuaucguguccagcuaugucuguucuggacuggugggcgacaccccuagaaagaaugauagcuccucuagcucccauugccucgaccccaacaaugaggaaggcgggcacggaguuaaaggcugggccuucgaugacgggaacgauguguggaugggacggacgauuagcgagaagcugcgcucuggcuacgagacauuuaaagucaucgaagggugguccaauccgaacagcaagcugcagaucaauagacaggugauugucgaccggggaaaccgcucuggcuauuccggcaucuucagcguggaggggaaauccuguauuaauagaugcuuuuacguugaacucauccggggaagaaaggaggaaaacgaggugcuguggaccucuaauagcauugucguguucuguggcaccuccgggacauauggaaccggcucuuggccugauggggcugacaucaaccuuaugcccauuuga

SEQ ID NO: 212716 - RNA, 1410 nt, Artificial Sequence; identical to SEQ ID NO: 206784
  derived and/or modified CDS sequence (opt5) from neuraminidase__InfluenzaA__AEG65057

SEQ ID NO: 212717 - RNA, 1410 nt, Artificial Sequence; identical to SEQ ID NO: 207779
  derived and/or modified CDS sequence (opt5) from neuraminidase__InfluenzaA__AEG65068

SEQ ID NO: 212718 - RNA, 1410 nt, Artificial Sequence
  derived and/or modified CDS sequence (opt5) from neuraminidase__InfluenzaA__AEG65079
augaaccccaaucagaagaucauuaccaucggcagcgugucccugacaauuucuacgaucugcuucuuuaugcaaauugccauccucaucaccacagucacccugcacuucaaacaguacgaguuuaacagcccuccgaauaaccagguuaugcuuugugaacccacaauuaucgagagaaauauuaccgaaaucguguaucugacaaacaccacgauugagaaggaaaucugcccuaaacucgcugaguaccggaauugguccaagccccaguguaacauuaccggguucgccccuuuuucuaaagacaauagcauccgccuguccgcgggaggcgauaucugggugacaagagagcccuaugucucuugcgacccugauaaguguuaccaauucgcucuugggcagggaaccacacugaacaaugugcauagcaacgacaccguucacgaucggacgccguaucgcacacuccugaugaaugaacugggcgugcccuuucaucucgggaccaagcaggucugcauugccugguccucuagcuccugucacgacggaaaagccuggcugcaugugugcguuacaggcgaugacaagaacgcuaccgccagcuucaucuacaauggcagacuuguggauucuauugucuccuggagcaaagagauccugcggacccaggaaucugagugugugugcauuaacgggacauguacgguggucaugaccgacggauccgcuagcggcaaggccgauacaaaaauccucuuuaucgaggaagggaagauuguucacaccuccacacugucuggaagcgcgaagcacguggaggaaugcuccugcuauccucgcuaccccggcgugagaugugucugccgggacaacuggaaagggagcaaucgcccuaucguggauauuaacaucaaggacuacucuauuguuuccagcuauguguguucuggacuugucggcgacacccccagaaagaaugauagcuccucuagcggccauugccuggacccgaacaaugaggaagggggacacggcgugaaagggugggccuucgaugacggaaacgauguuuggaugggccggacgaucuccgagaaacuccgcagcggguacgagacauuuaaggugaucgaaggauggucuaauccuaacuccaaacugcaaauuaauagacaggucaucguggaccggggcaaccgcagcggcuauucugggauuuucuccgucgagggaaagagcuguaucaauagaugcuuuuacguggaacugauucggggcagaaaggaggaaaccgagguucucuggaccuccaacucuaucguggucuucugugggacaagcggaaccuauggcacaggguccuggcccgauggcgcugacauuaaucugaugccuaucuga

SEQ ID NO: 212719 - RNA, 1410 nt, Artificial Sequence
  derived and/or modified CDS sequence (opt5) from neuraminidase__InfluenzaA__AEG65090
augaaccccaaucagaagaucauuaccaucggcagcgugucccugacaauuucuacgaucugcuucuuuaugcaaauugccauccucaucaccacagucacccugcacuucaaacaguacgaguuuaacagcccuccgaauaaccagguuaugcuuugugaacccacaauuaucgagagaaauauuaccgaaaucguguaucugacaaacaccacgauugagaaggaaaucugcccuaaacucgcugaguaccggaauugguccaagccccaguguaacauuaccggguucgccccuuuuucuaaagacaauagcauccgccuguccgcgggaggcgauaucugggugacaagagagcccuaugucucuugcgacccugauaaguguuaccaauucgcucuugggcagggaaccacacugaacaaugugcauagcaacgacaccguucacgaucggacgccguaucgcacacuccugaugaaugaacugggcgugcccuuucaucucgggaccaagcaggucugcauugccugguccucuagcuccugucacgacggaaaagccuggcugcaugugugcguuacaggcgaugacaagaacgcuaccgccagcuucaucuacaauggcagacuuguggauucuauugucuccuggagcaaagagauccugcggacccaggaaucugagugugugugcauuaacgggacauguacgguggucaugaccgacggauccgcuagcggcaaggccgauacaaaaauccucuuuaucgaggaagggaagauuauccacaccuccacacugucuggaagcgcgcaacacguugaggaaugcuccugcuauccucgcuaccccggcgugagaugugugugccgggacaacuggaaggggagcaaucgcccuauugucgauaucaacauuaaagacuacucuaucguguccagcuauguuuguucuggacuugugggcgacacccccagaaagaaugauagcuccucuagcucccauugccuggacccgaacaaugaggaaggcgggcacggagucaaaggcugggccuucgaugacgggaacgauguguggaugggacggacgaucagcgagaagcuccgcucuggcuacgagacauuuaaaguuauugaagggugguccaauccuaacagcaagcugcagaucaauagacaggugauugucgaccggggaaaccgcucuggcuauuccggcaucuucagcguggaggggaaauccuguauuaauagaugcuuuuacgucgaacugauccggggaagaaaggaggaaaccgaggugcucuggaccucuaacagcauuguuguguucuguggcacauccgggaccuauggaacaggcucuuggcccgauggggcugacaucagccugaugccuaucuga

SEQ ID NO: 212720 - RNA, 1410 nt, Artificial Sequence
  derived and/or modified CDS sequence (opt5) from neuraminidase__InfluenzaA__AEG65101
augaaccccaaucagaagaucauuaccaucggcagcgugucccugacaauuucuacgaucugcuucuuuaugcaaauugccauccucaucaccacagucacccugcacuucaaacaguacgaguuuaacagcccuccggacaaucagguuaugcuuugugaacccacaauuaucgagagaaacauuaccgaaaucguguaucugacaaauaccacgauugagaaggaaaucugcccuaaacucgcugaguaccggaacugguccaagccccagugugauauuaccggguucgccccuuuuucuaaagacaauagcauccgccuguccgcgggaggcgauaucugggugacaagagagcccuaugucucuugcgacccugauaaguguuaccaauucgcucuugggcagggaaccacacugaacaaugugcauagcaacgacaccguucacgaucggacgccguaucgcacacuccugaugaaugaacugggcgugcccuuucaucucgggaccaagcaggucugcauugccugguccucuagcuccugucacgacggaaaagccuggcugcaugugugcguuacaggcgaugacaagaacgcuaccgccagcuucaucuacaauggcagacuuguggauucugucguguccuggagcaaagacauucugcggacccaggagucugaaugugugugcaucaacgggacauguacggucguuaugaccgauggauccgcuagcggcaaggccgacacaaaaauucucuuuaucgaggaggggaagaucgugcacaccuccacacugucuggaagcgcgcaacacguggaagagugcuccugcuauccucgcuaccccggcgucagaugugugugccgggacaauuggaaggggagcaaccgcccuauuguugauaucaacauuaaaaauuacucuaucguguccagcuaugucuguucuggacuugugggcgacacccccagaaagacggauagcuccucuagcucccauugccuggacccgaacaaugaagagggcgggcacggaguuaaaggcugggccuucgaugacgggaacgauguguggaugggacggacaauuagcgaaaagcuccgccugggcuacgagaccuuuaaagucaucgagggguggucuaauccuaacuccaagcugcagaucaauagacaggugauugucgaccggggaaaccgcagcggcuauucuggcaucuucuccguggaagggaaaagcuguauuaauagaugcuuuuacguugagcucauccggggaagaaaggaagagaccgaagugcuguggacauccaacucuauugucguguucuguggcaccagcgggacauauggaacgggcuccuggcccgauggggcugacaucaaucuuaugccuauuuga

SEQ ID NO: 212721 - RNA, 1410 nt, Artificial Sequence
  derived and/or modified CDS sequence (opt5) from neuraminidase__InfluenzaA__AEG65123
augaaccccaaucagaagaucauuaccaucggcagcgugucccugacaauuucuacgaucugcuucuuuaugcaaauugccauccucaucaccacagucacccugcacuucaaacaguacgaguuuaacagcccuccgaauaaccagguuaugcuuugugaacccacaaccauugagagaaauaucacagaaauuguguaucugaccaacacgaccaucgagaaggaaauuugcccuaaacucgcugaguaccggaauugguccaagccccagugugacaucacaggguucgccccuuuuucuaaagauaacagcauucgccuguccgcgggaggcgacaucugggugaccagagagcccuaugucucuugcgauccugacaaguguuaccaauucgcucuugggcagggaacaacccugaauaacgugcauagcaaugauacgguucacgaccggacaccguaucgcacccuccugaugaacgaacugggcgugcccuuucaucucgggacaaagcaggucugcaucgccugguccucuagcuccugucacgauggaaaagccuggcugcaugugugcguuaccggcgacgauaagaaugcuaccgccagcuucauuuacaacggcagacuuguggacucugucguguccuggagcaaagauauccugcggacacaggagucugaaugugugugcauuaaugggacguguaccgucguuaugacagacggauccgcuagcggcaaggccgauaccaaaauccucuuuauugaggaggggaagaucgugcacacauccacccugucuggaagcgcgcaacacguggaagagugcuccugcuauccucgcuaccccggcgucagaugugugugccgggacaacuggaaggggagcaaccgcccuaucguugacauuaauaucaaaaacuacucuauuguguccagcuaugucuguucuggacuugugggcgauacgcccagaaagacagacagcuccucuagcucccauugccuggauccgaauaacgaagagggcgggcacggaguuaaaggcugggccuucgacgaugggaaugacguguggaugggacggaccaucagcgaaaagcuccgccugggcuacgagaccuuuaaagucauugagggguggucuaacccuaauuccaagcugcagaucaacagacaggugaucgucgaucggggaaaucgcagcggcuauucuggcauuuucuccguggaagggaaaagcuguaucaacagaugcuuuuacguugagcucauucggggaagaaaggaagagaaugaagugcuguggacauccaacucuaucgucguguucuguggcaccagcgggacauauggaacgggcuccuggcccgacggggcugauauuaaucuuaugccuaucuga

SEQ ID NO: 212722 - RNA, 1410 nt, Artificial Sequence; identical to SEQ ID NO: 207779
  derived and/or modified CDS sequence (opt5) from neuraminidase__InfluenzaA__AEG65134

SEQ ID NO: 212723 - RNA, 1410 nt, Artificial Sequence
  derived and/or modified CDS sequence (opt5) from neuraminidase__InfluenzaA__AEG65145
augaaccccaaucagaagaucauuaccaucggcagcgugucccugacaauugccacgaucugcuuccucaugcaaauugcuauccuggucaccacaguuacccuucacuuuaaacaguacgaguguaacucuccuccgaauaaccaggugaugcugugcgaacccacaaucauugagagaaauaucaccgaaauuguguaucucacaaacaccacgaucgagaaggaaauuuguccuaaacuggccgaguaccggaauuggagcaagccccagugcaacaucaccggguucgcgccuuuuuccaaagacaauucuauucgccuuagcgcuggaggcgauaucugggucacaagagagcccuauguguccugugacccugauaagugcuaccaauucgcccuggggcagggaaccacacucaacaauggccauucuaacgacaccguucacgaucggacgccguaucgcacacugcugaugaaugaacucggggugcccuuucaucugggaaccagacaggucuguaucgccuggagcuccagcucuugccacgacggcaaggcuuggcuucauguguguguuacaggcgaugacgagaacgccaccgcuuccuucauuuacaaugggcggcugguggauagcaucggaucuugguccaaaaagauucuccgcacccaggaaagcgagugcgucuguaucaacggcacaugcacgguggugaugaccgacgggucugccuccggaaaagcggauacaaagauucuguuuaucgaggaaggcaaaaucguccacauuagcacccuuuccgggucugcccaacacguugaggaaugcagcuguuauccuagauaccccggagugcggugcgugugucgcgacaacuggaagggcuccaauagaccuaucgucgauauuaacgugaaggacuacagcaucguuucuuccuaugugugcagcggccuggucggggacacaccccggaaaaaugauucuuucagcaacucccauugucucgacccgaauaacgaggaaggaggccacggggugaagggaugggcuuuugaugacggcaaugauguuuggauggggcgcaccauuucugagaaacugagaagcggauacgagacguucaaggugaucgaaggcugguccaaaccuaacagcaagcugcagaucaaucggcaggucauuguggagcgcggcaacagaucuggguauuccggaaucuuuagcgucgaaggcaaaucuugcauuaaucgguguuucuacguggagcucaucagagggcgcaaggaagagacagagguuugguggaccuccaacagcauuguggucuuuugcggaaccuccggcacauaugggaccggcucuuggcccgacggagccgauaucaaucugaugccuauuuga

SEQ ID NO: 212724 - RNA, 1410 nt, Artificial Sequence
  derived and/or modified CDS sequence (opt5) from neuraminidase__InfluenzaA__AEG65156
augaaccccaaucagaagaucauuaccaucggcagcgugucccugacaauugccacgaucugcuuccucaugcaaauugcuauccuggucaccacaguuacccuucacuuuaaacaguacgaguguaacucuccuccgaauaaccaggugaugcugugcgaacccacaaucauugagagaaauaucaccgaaauuguguaucucacaaacaccacgaucgagaaggaaauuuguccuaaacuggccgaguaccggaauuggagcaagccccagugcaacaucaccggguucgcgccuuuuuccaaagacaauucuauucgccuuagcgcuggaggcgauaucugggucacaagagagcccuauguguccugugacccugauaagugcuaccaauucgcccuggggcagggaaccacacucaacaauggccauucuaacgacaccguucacgaucggacgccguaucgcacacugcugaugaaugaacucggggugcccuuucaucugggaaccagacaggucuguaucgccuggagcuccagcucuugccacgacggcaaggcuuggcuucauguguguguuacaggcgaugacgagaacgccaccgcuuccuucauuuacaaugggcggcugguggauagcaucggaucuugguccaaaaagauucuccgcacccaggaaagcgagugcgucuguaucaacggcacaugcacgguggugaugaccgacgggucugccuccggaaaagcggauacaaagauucuguuuaucgaggaaggcaaaaucguccacaccagcacacuuuccgggucugcccaacacguugaggaaugcagcuguuauccuagauaccccggagugcggugcgugugucgcgacaacuggaagggcuccaauagaccuauugucgauaucaacgugaaggacuacagcauuguuucuuccuaugugugcagcggccuggucggggacacgccccggaaaaaugauucuuucagcuccucucauugucucgacccgaacaaugaggaaggaggccacggggugaagggaugggcuuuugaugacggcaacgauguuuggauggggcgcaccaucagcgagaaacugagauccggauacgagacauucaaggugauugaaggcuggagcaaaccuaauucuaagcugcagaucaaccggcaggucaucguggagcgcggcaauagauccggguauagcggaaucuuuucugucgaaggcaaauccugcauuaaccgguguuucuacguggagcucauuagagggcgcaaggaagagaccgagguuugguggaccagcaauuccaucguggucuuuugcggaacaucuggcaccuaugggacaggcagcuggcccgacggagccgauauuaaccugaugccuaucuga

SEQ ID NO: 212725 - RNA, 1410 nt, Artificial Sequence
  derived and/or modified CDS sequence (opt5) from neuraminidase__InfluenzaA__AEG65167
augaaccccaaucagaagaucauuaccaucggcagcgugucccugacaauugccacgaucugcuuccucaugcaaauugcuauccuggucaccacaguuacccuucacuuuaaacaguacgaguguaacucuccuccgaauaaccaggugaugcugugcgaacccacaaucauugagagaaauaucaccgaaauuguguaucucacaaacaccacgaucgagaaggaaauuuguccuaaacuggccgaguaccggaauuggagcaagccccagugcaacaucaccggguucgcgccuuuuuccaaagacaauucuauucgccuuagcgcuggaggcgauaucugggucacaagagagcccuauguguccugugacccugauaagugcuaccaauucgcccuggggcagggaaccacacucaacaauggccauucuaacgacaccguucacgaucggacgccguaucgcacacugcugaugaaugaacucggggugcccuuucaucugggaaccagacaggucuguaucgccuggagcuccagcucuugccacgacggcaaggcuuggcuucauguguguguuacaggcgaugacgagaacgccaccgcuuccuucauuuacaaugggcggcugguggauagcaucggaucuugguccaaaaagauucuccgcacccaggaaagcgagugcgucuguaucaacggcacaugcacgguggugaugaccgacgggucugccuccggaaaagcggauacaaagauucuguuuaucgaggaaggcaaaaucguccacauuagcacccuuuccgggucugccagacacguugaggaaugcagcuguuauccucgguaccccggagugcgcugcguguguagagacaacuggaagggcuccaaucggccuaucgucgauauuaacgugaaggacuacagcaucguuucuuccuaugugugcagcggccuggucggggacacaccccgcaaaaaugauucuuucagcuccucucauugucucgacccgaacaaugaggaaggaggccacggggugaagggaugggcuuuugaugacggcaacgauguuuggauggggagaaccauuagcgagaaacugcgguccggauacgagacguucaaggugaucgaaggcuggagcaaaccuaauucuaagcugcaaaucaaccgccaggucauuguggagagaggcaaucgguccggguauagcggaaucuuuucugucgaaggcaaauccugcauuaacagauguuucuacguggagcucauccgcgggcggaaggaagagacagagguuugguggaccagcaauuccauuguggucuuuugcggaaccucuggcacauaugggaccggcagcuggcccgacggagccgauaucaaccugaugccuauuuga

SEQ ID NO: 212726 - RNA, 1410 nt, Artificial Sequence
  derived and/or modified CDS sequence (opt5) from neuraminidase__InfluenzaA__AEG65178
augaaccccaaucagaagaucauuaccaucggcagcgugucccugacaauugccacgaucugcuuccucaugcaaauugcuauccuggucaccacaguuacccuucacuuuaaacagcaugaguguaacucuccuccgaauaaccaggugaugcugugcgaacccacaaucauugagagaaauaucaccgaaauuguguaccucacaaacaccacgaucgagaaggaaauuuguccuaaacuggccgaguaucggaauuggagcaagccccagugcaacaucaccggguucgcgccuuuuuccaaagacaauucuauucgccuuagcgcuggaggcgauaucugggucacaagagagcccuacguguccugugacccugauaagugcuaucaauucgcccuggggcagggaaccacacucaacaauggccacucuaacaauaccguucaugaccggacgccguaccgcacacugcugaugaacgaacucggggugcccuuucaccugggaaccagacaggucuguaucgccuggagcuccagcucuugccaugauggcaaggcuuggcuucacguguguguuacaggcgacgauaaaaaugccaccgcuuccuucauuuauaacgggcggcugguggacagcaucggaucuugguccaagaacauucuccgcacccaggagagcgaaugcgucuguaucaauggcacaugcacgguggugaugaccgaugggucugccuccggaaaagcggacacaaagauucuguuuaucgaggagggcaaaaucguccacauuagcacccuuuccgggucugcccaacauguugaagagugcagcuguuacccuagauaucccggagugcggugcgugugucgcgauaacuggaagggcuccaauagaccuaucgucgacauuaacgugaaggauuacagcaucguuucuuccuacgugugcagcggccuggucggggacacaccccggaaaaaugacucuuucagcuccucucacugucucgauccgaacaaugaagagggaggccauggggugaagggaugggcuuuugacgauggcaacgacguuuggauggggcgcaccauuagcgaaaaacugagauccggauaugagacguucaaggugaucgagggcuggagcaaaccuaauucuaagcugcagaucaaccggcaggucauuguggaacgcggcaauagauccggguacagcggaaucuuuucugucgagggcaaauccugcauuaaccgguguuucuauguggaacucaucagagggcgcaaggaggaaacagagguuugguggaccagcaauuccauuguggucuuuugcggaaccucuggcacauacgggaccggcagcuggcccgauggagccgacaucaaccugaugccuauuuga

SEQ ID NO: 212727 - RNA, 1410 nt, Artificial Sequence
  derived and/or modified CDS sequence (opt5) from neuraminidase__InfluenzaA__AEG65189
augaaccccaaucagaagaucauuaccaucggcagcgugucccugacaauuucuacgaucugcuucuuuaugcaaauugccauccucaucaccacagucacccugcacuucaaacaguacgaguuuaacagcccuccgaauaaccagguuaugcuuugugaacccacaauuaucgagagaaauauuaccgaaaucguguaucugacaaacaccacgauugagaaggaaaucugcccuaaacucgcugaguaccggaauugguccaagccccagugugacauuaccggguucgccccuuuuucuaaagauaacagcauccgccuguccgcgggaggcgacaucugggugacaagagagcccuaugucucuugcgauccugacaaguguuaccaauucgcucuugggcagggaaccacacugaauaacgugcauagcaaugauaccguucacgaccggacgccguaucgcacacuccugaugaacgaacugggcgugcccuuucaucucgggaccaagcaggucugcauugccugguccucuagcuccugucacgauggaaaagccuggcugcaugugugcguuacaggcgacgauaagaaugcuaccgccagcuucaucuacaacggcagacuuguggacucuauugucuccuggagcaaagagauccugcggacccaggaaucugagugugugugcauuaaugggacauguacgguggucaugaccgauggauccgcuagcggcaaggccgacacaaaaauccucuuuaucgaggaagggaagauuguucacaccuccacacugucuggaagcgcgcaacacguggaggaaugcuccugcuauccucgcuaccccggcgugagaugugucugccgggauaacuggaaggggagcaaccgcccuaucguggacauuaauaucaacgacuacucuauuguuuccagcuauguguguucuggacuugucggcgauacccccagaaagaaugacagcuccucuagcucccauugccuggauccgaacaaugaggaaggcgggcacggagugaaaggcugggccuucgacgaugggaacgacguuuggaugggacggacgaucagcgagaaacuccgcucuggcuacgagacauuuaaggugaucgaagggugguccaauccuaacagcaaacugcagauuaauagacaggucaucguggaucggggaaaccgcucuggcuauuccggcauuuucagcgucgaggggaaguccuguaucaauagaugcuuuuacguggaacugauucggggaagaaaagaggaaaccgagguucucuggaccucuaacagcaucguggucuucuguggcacauccgggaccuauggaacaggcucuuggcccgacggggcugauauuaaucugaugccuaucuga

SEQ ID NO: 212728 - RNA, 1410 nt, Artificial Sequence
  derived and/or modified CDS sequence (opt5) from neuraminidase__InfluenzaA__AEG65200
augaaccccaaucagaagaucauuaccaucggcagcgugucccugacaauuucuacgaucugcuucuuuaugcaaauugccauccucaucaccacagucacccugcacuucaaacaguacgaguuuaacagcccuccgaauaaccagguuaugcuuugugaacccacaauuaucgagagaaauauuaccgaaaucguguaucugacaaacaccacgauugagaaggaaaucugcccuaaacucgcugaguaccggaauugguccaagccccagugugacauuaccggguucgccccuuuuucuaaagauaacagcauccgccuguccgcgggaggcgacaucugggugacaagagagcccuaugucucuugcgauccugacaaguguuaccaauucgcucuugggcagggaaccacacugaauaacgugcauagcaaugauaccguucacgaccggacgccguaucgcacacuccugaugaacgaacugggcgugcccuuucaucucgggaccaagcaggucugcauugccugguccucuagcuccugucacgauggaaaagccuggcugcaugugugcguuacaggcgacgauaagaaugcuaccgccagcuucaucuacaacggcagacuuguggacucuauugucuccuggagcaaagaggugcugcggacccaggaaucugagugugugugcaucaaugggacauguacggucguuaugaccgauggauccgcuagcggcaaggccgacacaaaaauucucuuuaucgaggaagggaagaucgugcacaccuccacacugucuggaagcgcgcaacacguggaggaaugcuccugcuauccucgcuaccccggcgucagaugugugugccgggauaacuggaaggggagcaaccgcccuauuguugacaucaauauuaaagacuacucuaucguguccagcuaugucuguucuggacuugugggcgauacccccagaaagaacgacagcuccucuagcucccauugccuggauccgaauaacgaggaaggcgggcacggaguuaaaggcugggccuucgacgaugggaaugacguguggaugggacggacgauuagcgagaagcuccgcucuggcuacgagacauuuaaagucaucgaagggugguccaacccuaauagcaagcugcagaccaacagacaggugaucgucgaucggggaaaucgcucuggcuauuccggcauuuucagcguggaggggaaauccuguaucaacagaugcuuuuacguugaacugauucggggaagaaaggaggaaaccgaggugcucuggacaucuaauagcaucgucguguucuguggcaccuccgggacauauggaacgggcucuuggcccgacggggcugauauuaaccugaugccuaucuga

SEQ ID NO: 212729 - RNA, 1410 nt, Artificial Sequence; identical to SEQ ID NO: 206784
  derived and/or modified CDS sequence (opt5) from neuraminidase__InfluenzaA__AEG65211

SEQ ID NO: 212730 - RNA, 1410 nt, Artificial Sequence; identical to SEQ ID NO: 206786
  derived and/or modified CDS sequence (opt5) from neuraminidase__InfluenzaA__AEG65222

SEQ ID NO: 212731 - RNA, 1410 nt, Artificial Sequence
  derived and/or modified CDS sequence (opt5) from neuraminidase__InfluenzaA__AEG65233
augaaccccaaucagaagaucauuaccaucggcagcgugucccugacaauuucuacgaucugcuucuuuaugcaaauugccauccucaucaccacagucacccugcacuucaaacaguacgaguuuaacagcccuccgaauaaccagguuaugcuuugugaacccacaauuaucgagagaaauauuaccgaaaucguguaucugacaaacaccacgauugagaaggaaaucugcccuaaacucgcugaguaccggaauugguccaagccccagugugacauuaccggguucgccccuuuuucuaaagauaacagcauccgccuguccgcgggaggcgacaucugggugacaagagagcccuaugucucuugcgauccugacaaguguuaccaauucgcucuugggcagggaaccacacugaauaacgugcauagcaaugauaccguucacgaccggacgccguaucgcacacuccugaugaacgaacugggcgugcccuuucaucucgggaccaagcaggucugcauugccugguccucuagcuccugucacgauggaaaagccuggcugcaugugugcguuacaggcgacgauaagaaugcuaccgccagcuucaucuacaacggcagacuuguggacucuauugucuccuggagcaaaaagauccugcggacccaggagucugaaugugugugcauuaaugggacauguacgguggucaugaccgauggauccgcuagcggcaaagccgacacaaagauccucuuuaucgaggaggggaagauuguucacaccuccacacugucuggaagcgcgcaacacguggaagagugcuccugcuauccucgcuaccccggcgugagaugugucugccgggauaacuggaaagggagcaaccgcccuaucauugacaucaauauuaaggacuacucuaucguguccagcuauguuuguucuggacuugugggcgauacccccagaaagaacgacagcuccucuagcucccauugccuggauccgaauaacgaagagggcgggcacggagucaaaggcugggccuucgacgaugggaaugacguguggaugggacggacgaucagcgaaaaacuccgcucuggcuacgagacauuuaagguuauugaggggugguccaacccuaauagcaaacugcagaucaacagacaggugauugucgaucggggaaaucgcucuggcuauuccggcaucuucagcguggaagggaaguccuguauuaacagaugcuuuuacgucgagcugauccggggaagaaaggaagagaccgaagugcucuggaccucuaauagcauuguuguguucuguggcacauccgggaccuauggaacaggcucuuggcccgacggggcugauaucaaccugaugccuaucuga

SEQ ID NO: 212732 - RNA, 1410 nt, Artificial Sequence
  derived and/or modified CDS sequence (opt5) from neuraminidase__InfluenzaA__AEG65244
augaaccccaaucagaagaucauuaccaucggcagcgugucccugacaauuucuacgaucugcuucuuuaugcaaauugccauccucaucaccacagucacccugcacuucaaacaguacgaguuuaacagcccuccgaauaaccagguuaugcuuugugaacccacaauuaucgagagaaauauuaccgaaaucguguaucugacaaacaccacgauugagaaggaaaucugcccuaaacucgcugaguaccggaauugguccaagccccaguguaacauuaccggguucgccccuuuuucuaaagacaauagcauccgccuguccgcgggaggcgauaucugggugacaagagagcccuaugucucuugcgacccugauaaguguuaccaauucgcucuugggcagggaaccacacugaacaaugugcauagcaacgacaccguucacgaucggacgccguaucgcacacuccugaugaaugaacugggcgugcccuuucaucucgggacccagcaggucugcauugccugguccucuagcuccugucacgacggaaaggccuggcugcaugugugcguuacaggcgaugacgagaacgcuaccgccagcuucaucuacaauggcagacuuguggauucuauugucuccuggagcaaaaagauccugcggacccaagaaucugagugugugugcauuaacgggacauguacgguggucaugaccgacggauccgcuagcggcaaagccgauacaaagauccucuuuaucgaggaagggaaaauuguucacaccuccacacugucuggaagcgcgcagcacguggaggaaugcuccugcuauccucgcuaccccggcgugagaugugucugccgggacaacuggaaggggagcaaucgcccuaucguggauauuaacaucaaggacuacucuauugccuccagcuauguuuguucuggacuugugggcgacacccccagaaagaaugauagcuccucuagcucccauugccuggacccgaacaaugaggaaggcgggcacggagucaaaggcugggcuuucgaugacgggaacgauguguggaugggacggacgaucagcgagaaacuccgcucuggcuacgagacauuuaagguuaucgaagggugguccaauccuaacagcaaacugcagauuaauagacaggugaucgucgaccggggaaaccgcucuggcuauuccggcauuuucagcguggaggggaaguccuguaucaauagaugcuuuuacgucgaacugauucggggaagaaaccaagagaccgaagugcucuggaccucuaauagcaucguuguguucuguggcacauccgggaccuauggaacaggcucuuggcccgauggggccgacauuaaccugaugccuaucuga

SEQ ID NO: 212733 - RNA, 1410 nt, Artificial Sequence; identical to SEQ ID NO: 206786
  derived and/or modified CDS sequence (opt5) from neuraminidase__InfluenzaA__AEG65255

SEQ ID NO: 212734 - RNA, 1410 nt, Artificial Sequence; identical to SEQ ID NO: 206663
  derived and/or modified CDS sequence (opt5) from neuraminidase__InfluenzaA__AEG65266

SEQ ID NO: 212735 - RNA, 1410 nt, Artificial Sequence; identical to SEQ ID NO: 206663
  derived and/or modified CDS sequence (opt5) from neuraminidase__InfluenzaA__AEG65277

SEQ ID NO: 212736 - RNA, 1410 nt, Artificial Sequence
  derived and/or modified CDS sequence (opt5) from neuraminidase__InfluenzaA__AEG65288
augaaccccaaucagaagaucauuaccaucggcagcgugucccugacaauugccacgaucugcuuccucaugcaaauugcuauccuggucaccacaguuacccuucacuuuaaacagcaugaguguaacucuccuccgaauaaccaggugaugcugugcgaacccacaaucauugagagaaauaucaccgaaauuguguaccucacaaacaccacgaucgagaaggaaauuuguccuaaacuggucgaguaucggaauuggagcaagccccagugcaacaucaccggguucgccccuuuuuccaaagacaauucuauucgccuuagcgcgggaggcgauaucugggugacaagagagcccuacguuuccugugacccugauaagugcuaucaauucgcucuggggcagggaaccacacucaacaauggccacucuaacgacaccgugcaugaucggacgccguaccgcacacugcugaugaaugaacucgggguccccuuucaccugggaaccagacagguguguaucgccuggagcuccagcucuugccaugacggcaaggccuggcuucacguuugugugacaggcgaugacaaaaacgcuaccgccuccuucauuuauaaugggcggcuggucgauagcaucggaucuugguccaagaaaauucuccgcacccaggagagcgaaugcguguguaucaacggcacaugcacgguggucaugaccgacgggucugcuuccggaaaggccgauacaaaaauucuguuuaucgaggagggcaagaucguucacauuagcacccuuuccgggucugcgcaacauguggaagagugcagcuguuacccuagauaucccggagugcggugcgucugucgcgacaacuggaagggcuccaauagaccuaucguggauauuaacguuaaagacuacagcaucgugucuuccuacgucugcagcggccuggugggggacacaccccggaagaauaacucuuucagcuccucucacugucucgauccgaauaacgaagagggaggccaugggguuaaaggaugggccuuugacgauggcaaugacguguggauggggcgcaccauuagcgaaaagcugagauccggauaugagacguucaaagucaucgagggcuggagcaagccuaacucuaaacugcagaucaaucgccaggugauugucgaacggggcaacagauccggguacagcggaaucuuuucuguggagggcaaguccugcauuaaucgguguuucuauguugaacucaucagagggcgcaaggaggaaacagaggugugguggaccagcaacuccauugucguguuuugcggaaccucuggcacauacgggaccggcagcuggcccgauggagcugacaucaaucugaugccuauuuga

SEQ ID NO: 212737 - RNA, 1410 nt, Artificial Sequence; identical to SEQ ID NO: 206663
  derived and/or modified CDS sequence (opt5) from neuraminidase__InfluenzaA__AEG65299

SEQ ID NO: 212738 - RNA, 1410 nt, Artificial Sequence; identical to SEQ ID NO: 206786
  derived and/or modified CDS sequence (opt5) from neuraminidase__InfluenzaA__AEG65310

SEQ ID NO: 212739 - RNA, 1410 nt, Artificial Sequence; identical to SEQ ID NO: 206786
  derived and/or modified CDS sequence (opt5) from neuraminidase__InfluenzaA__AEG65321

SEQ ID NO: 212740 - RNA, 1410 nt, Artificial Sequence; identical to SEQ ID NO: 206786
  derived and/or modified CDS sequence (opt5) from neuraminidase__InfluenzaA__AEG65332

SEQ ID NO: 212741 - RNA, 1410 nt, Artificial Sequence; identical to SEQ ID NO: 206786
  derived and/or modified CDS sequence (opt5) from neuraminidase__InfluenzaA__AEG65354

SEQ ID NO: 212742 - RNA, 1410 nt, Artificial Sequence; identical to SEQ ID NO: 206786
  derived and/or modified CDS sequence (opt5) from neuraminidase__InfluenzaA__AEG65365

SEQ ID NO: 212743 - RNA, 1410 nt, Artificial Sequence
  derived and/or modified CDS sequence (opt5) from neuraminidase__InfluenzaA__AEG65376
augaaccccaaucagaagaucauuaccaucggcagcgugucccugacaauuucuacgaucugcuucuuuaugcaaauugccauccucaucaccacagucacccugcacuucaaacaguacgaguuuaacagcccuccgaauaaccagguuaugcuuugugaacccacaauuaucgagagaaauauuaccgaaaucguguaucugacaaacaccacgauugagaaggaaaucugcccuaaacucgcugaguaccggaauugguccaagccccaguguaacauuaccggguucgccccuuuuucuaaagacaauagcauccgccuguccgcgggaggcgauaucugggugacaagagagcccuaugucucuugcgacccugauaaguguuaccaauucgcucuugggcagggaaccacacugaacaaugugcauagcaacgacaccguucacgaucggacgccguaucgcacacuccugaugaaugaacugggcgugcccuuucaucucgggacccagcaggucugcauugccugguccucuagcuccugucacgacggaaaggccuggcugcaugugugcguuacaggcgaugacgagaacgcuaccgccagcuucaucuacaauggcagacuuguggauucuauugucuccuggagcaaaaagauccugcggacccaagaaucugagugugugugcauuaacgggacauguacgguggucaugaccgacggauccgcuagcggcaaagccgauacaaagauccucuuuaucgaggaagggaaaauuguucacaccuccacacugucuggaagcgcgcagcacguggaggaaugcuccugcuauccucgcuaccccggcgugagaugugucugccgggacaacuggaaggggagcaaucgcccuaucguggauauuaacaucaaggacuacucuauuguuuccagcuauguguguucuggacuugucggcgacacccccagaaagaaugauagcuccucuagcucccauugccuggacccgaacaaugaggaaggcgggcacggagugaaaggcugggccuucgaugacgggaacgauguuuggaugggacggacgaucagcgagaaacuccgcucuggcuacgagacauuuaaggugaucgaagggugguccaauccuaacagcaaacugcagauuaauagacaggucaucguggaccggggaaaccgcucuggcuauuccggcauuuucagcgucgaggggaaguccuguaucaauagaugcuuuuacguggaacugauucggggaagaaaccaagagaccgaaguucucuggaccucuaauagcaucguggucuucuguggcacauccgggaccuauggaacaggcucuuggcccgauggggcugacauuaaccugaugccuaucuga

SEQ ID NO: 212744 - RNA, 1410 nt, Artificial Sequence; identical to SEQ ID NO: 206663
  derived and/or modified CDS sequence (opt5) from neuraminidase__InfluenzaA__AEG65387

SEQ ID NO: 212745 - RNA, 1410 nt, Artificial Sequence; identical to SEQ ID NO: 206663
  derived and/or modified CDS sequence (opt5) from neuraminidase__InfluenzaA__AEG65398

SEQ ID NO: 212746 - RNA, 1410 nt, Artificial Sequence; identical to SEQ ID NO: 206663
  derived and/or modified CDS sequence (opt5) from neuraminidase__InfluenzaA__AEG65409

SEQ ID NO: 212747 - RNA, 1410 nt, Artificial Sequence; identical to SEQ ID NO: 206663
  derived and/or modified CDS sequence (opt5) from neuraminidase__InfluenzaA__AEG65420

SEQ ID NO: 212748 - RNA, 1410 nt, Artificial Sequence; identical to SEQ ID NO: 206663
  derived and/or modified CDS sequence (opt5) from neuraminidase__InfluenzaA__AEG65431

SEQ ID NO: 212749 - RNA, 1410 nt, Artificial Sequence; identical to SEQ ID NO: 206784
  derived and/or modified CDS sequence (opt5) from neuraminidase__InfluenzaA__AEG65442

SEQ ID NO: 212750 - RNA, 1410 nt, Artificial Sequence; identical to SEQ ID NO: 206786
  derived and/or modified CDS sequence (opt5) from neuraminidase__InfluenzaA__AEG65453

SEQ ID NO: 212751 - RNA, 1410 nt, Artificial Sequence; identical to SEQ ID NO: 206786
  derived and/or modified CDS sequence (opt5) from neuraminidase__InfluenzaA__AEG65464

SEQ ID NO: 212752 - RNA, 1410 nt, Artificial Sequence; identical to SEQ ID NO: 206786
  derived and/or modified CDS sequence (opt5) from neuraminidase__InfluenzaA__AEG65475

SEQ ID NO: 212753 - RNA, 1410 nt, Artificial Sequence
  derived and/or modified CDS sequence (opt5) from neuraminidase__InfluenzaA__AEG65486
augaaccccaaucagaagaucauuaccaucggcagcgugucccugacaauuucuacgaucugcuucuuuaugcaaauugccauccucaucaccacagucacccugcacuucaaacaguacgaguuuaacagcccuccgaauaaccagguuaugcuuugugaacccacaauuaucgagagaaauauuaccgaaaucguguaucugacaaacaccacgauugagaaggaaaucugcccuaaacucgcugagcaucggaauugguccaagccccagugugacauuaccggguucgccccuuuuucuaaagauaacagcauccgccuguccgcgggaggcgacaucugggugacaagagagcccuacgucucuugcgauccugacaaguguuaucaauucgcucuugggcagggaaccacacugaauaacgugcacagcaaugauaccguucaugaccggacgccguaccgcacacuccugaugaacgaacugggcgugcccuuucaccucgggaccaagcaggucugcauugccugguccucuagcuccugucaugauggaaaagccuggcugcacgugugcguuacaggcgacgauaagaaugcuaccgccagcuucaucuauaacggcagacuuguggacucuauugucuccuggagcaaaaagauccugcggacccaggagucugaaugugugugcauuaaugggacauguacgguggucaugaccgauggauccgcuagcggcaaagccgacacaaagauccucuuuaucgaggaggggaagauuguucacaccuccacacugucuggaagcgcgcaacauguggaagagugcuccugcuacccucgcuaucccggcgugagaugugucugccgggauaacuggaaagggagcaaccgcccuaucguggacauuaauaucaaggacuacucuauuguuuccagcuacguguguucuggacuugucggcgauacccccagaaagaacgacagcuccucuagcucccacugccuggauccgaauaacgaagagggcgggcauggagugaaaggcugggccuucgacgaugggaaugacguuuggaugggacggacgaucagcgaaaaacuccgcucuggcuaugagacauuuaaggugaucgaggggugguccaacccuaauagcaaacugcagauuaacagacaggucaucguggaucggggaaaucgcucuggcuacuccggcauuuucagcgucgaagggaaguccuguaucaacagaugcuuuuauguggagcugauucggggaagaaaggaagagaccgaaguucucuggaccucuaauagcaucguggucuucuguggcacauccgggaccuacggaacaggcucuuggcccgacggggcugauauuaaccugaugccuaucuga

SEQ ID NO: 212754 - RNA, 1410 nt, Artificial Sequence; identical to SEQ ID NO: 206786
  derived and/or modified CDS sequence (opt5) from neuraminidase__InfluenzaA__AEG65497

SEQ ID NO: 212755 - RNA, 1410 nt, Artificial Sequence; identical to SEQ ID NO: 206786
  derived and/or modified CDS sequence (opt5) from neuraminidase__InfluenzaA__AEG65508

SEQ ID NO: 212756 - RNA, 1410 nt, Artificial Sequence; identical to SEQ ID NO: 206786
  derived and/or modified CDS sequence (opt5) from neuraminidase__InfluenzaA__AEG65519

SEQ ID NO: 212757 - RNA, 1410 nt, Artificial Sequence; identical to SEQ ID NO: 206786
  derived and/or modified CDS sequence (opt5) from neuraminidase__InfluenzaA__AEG65530

SEQ ID NO: 212758 - RNA, 1410 nt, Artificial Sequence; identical to SEQ ID NO: 206786
  derived and/or modified CDS sequence (opt5) from neuraminidase__InfluenzaA__AEG65541

SEQ ID NO: 212759 - RNA, 1410 nt, Artificial Sequence
  derived and/or modified CDS sequence (opt5) from neuraminidase__InfluenzaA__AEG65563
augaaccccaaucagaagaucauuaccaucggcagcgugucccugacaauuucuacgaucugcuucuuuaugcaaauugccauccucaucaccacagucacccugcacuucaaacaguacgaguuuaacagcccuccgaauaaccagguuaugcuuugugaacccacaauuaucgagagaaauauuaccgaaaucguguaucugacaaacaccacgauugagaaggaaaucugcccuaaacucgcugaguaccggaauugguccaagccccagugugacauuaccggguucgccccuuuuucuaaagauaacagcauccgccuguccgcgggaggcgacaucugggugacaagagagcccuaugucucuugcgauccugaccgguguuaccaauucgcucuugggcagggaaccacacugaauaacgugcauagcaaugauaccguucacgaccgcacgccguauagaacacuccugaugaacgaacugggcgugcccuuucaucucgggaccaagcaggucugcauugccugguccucuagcuccugucacgauggaaaggccuggcugcaugugugcguuacaggcgacgauaaaaaugcuaccgccagcuucaucuacaacggccggcuuguggacucuauugucuccuggagcaagaaaauccugcgcacccaggagucugaaugugugugcauuaaugggacauguacgguggucaugaccgauggauccgcuagcggcaaggccgacacaaaaauccucuuuaucgaggaggggaagauuguucacaccuccacacugucuggaagcgcgcaacacguggaagagugcuccugcuauccuagauaccccggcgugcggugugucugccgcgauaacuggaaggggagcaacagaccuaucguggacauuaauaucaaagacuacucuauuguuuccagcuauguguguucuggacuugucggcgauacgccccggaagaacgacagcuccucuagcucccauugccuggauccgaauaacgaagagggcgggcacggagugaaaggcugggccuucgacgaugggaaugacguuuggaugggacgcaccaucagcgaaaagcucagaucuggcuacgagacauuuaaagugaucgaggggugguccaacccuaauagcaagcugcagauuaaccggcaggucaucguggaucgcggaaauagaucuggcuauuccggcauuuucagcgucgaagggaaauccuguaucaaccggugcuuuuacguggagcugauuagaggacgcaaggaagagaccgaaguucucuggaccucuaauagcaucguggucuucuguggcacauccgggaccuauggaacaggcucuuggcccgacggggcugauauuaaccugaugccuaucuga

SEQ ID NO: 212760 - RNA, 1410 nt, Artificial Sequence
  derived and/or modified CDS sequence (opt5) from neuraminidase__InfluenzaA__AEG65574
augaaccccaaucagaagaucauuaccaucggcagcgugucccugacaauuucuacgaucugcuucuuuaugcaaauugccauccucaucaccacagucacccugcacuucaaacaguacgaguuuaacagcccuccgaauaaccagguuaugcuuugugaacccacaauuaucgagagaaauauuaccgaaaucguguaucugacaaacaccacgauugagaaggaaaucugcccuaaacucgcugaguaccgguccuggucuaagccccagugugacauuaccggguucgccccuuuuagcaaagauaauuccauccgccugucugcgggaggcgacaucugggugacaagagagcccuaugucagcugcgauccugaccgguguuaccaauucgcucuugggcagggaaccacacugaacaaugugcauuccaacgauaccguucacgaccgcacgccguauagaacacuccugaugaaugaacugggcgugcccuuucaucucgggaccaagcaggucugcauugccuggucuagcuccagcugucacgauggaaaggccuggcugcaugugugcguuacaggcgacgauaaaaacgcuaccgccucuuucaucuacaauggccggcuuguggacuccauugucagcuggucuaagaaaauccugcgcacccaggaguccgaaugugugugcauuaacgggacauguacgguggucaugaccgauggaagcgcuuccggcaaggccgacacaaaaauccucuuuaucgaggaggggaagauuguucacaccucuacacugagcggauccgcgcaacacguggaagagugcagcugcuauccuagauaccccggcgugcggugugucugccgcgauaauuggaaggggucuaacagaccuaucguggacauuaacaucaaagacuacuccauuguuagcucuuauguguguagcggacuugucggcgauacgccccggaagaaugacuccucuagcuccagccauugccuggauccgaacaaugaagagggcgggcacggagugaaaggcugggccuucgacgaugggaacgacguuuggaugggacgcaccaucucugaaaagcucagauccggcuacgagacauuuaaagugaucgagggguggagcaauccuaacucuaagcugcagauuaaucggcaggucaucguggaucgcggaaacagauccggcuauagcggcauuuucuccgucgaagggaaaucuuguaucaaucggugcuuuuacguggagcugauuagaggacgcaaggaagagaccgaaguucucuggaccagcaacuccaucguggucuucuguggcacaucugggaccuauggaacaggcagcuggcccgacggggcugauauuaaucugaugccuaucuga

SEQ ID NO: 212761 - RNA, 1410 nt, Artificial Sequence; identical to SEQ ID NO: 212759
  derived and/or modified CDS sequence (opt5) from neuraminidase__InfluenzaA__AEG65585

SEQ ID NO: 212762 - RNA, 1410 nt, Artificial Sequence; identical to SEQ ID NO: 212759
  derived and/or modified CDS sequence (opt5) from neuraminidase__InfluenzaA__AEG65596

SEQ ID NO: 212763 - RNA, 1410 nt, Artificial Sequence
  derived and/or modified CDS sequence (opt5) from neuraminidase__InfluenzaA__AEG65607
augaaccccaaucagaagaucauuaccaucggcagcgugucccugacaauuucuacgaucugcuucuuuaugcaaauugccauccucaucaccacagucacccugcacuucaaacaguacgaguuuaacagcccuccgaauaaccagguuaugcuuugugaacccacaauuaucgagagaaauauuaccgaaaucguguaucugacaaacaccacgauugagaaggaaaucugcccuaaacucgcugaguaccggaauugguccaagccccagugugacauuaccggguucgccccuuuuucuaaagauaacagcauccgccuguccgcgggaggcgacaucugggugacaagagagcccuaugucucuugcgauccugacaaguguuaccaauucgcucuugggcagggaaccacacugaauaacgugcauagcaaugauaccguucacgaccggacgccguaucgcacacuccugaugaacgaacugggcgugcccuuucaucucgggaccaagcaggucugcauugccugguccucuagcuccugucacgauggaaaagccuggcugcaugugugcguuacaggcgacgauaagaaugcuaccgccagcuucaucuacaacggcagacuuguggacucuauugucuccuggagcaaaaagauccugcggacccaggagucugaaugugugugcauuaaugggacauguacgguggucaugaccgauggauccgcuagcggcaaagccgacacaaagauccucuuuaucgaggaggggaagauuguucacaccuccacacugucuggaagcgcgcaacacguggaagagugcuccugcuauccucgcuaccccggcgugagaugugucugccgggauaacuggaaagggagcaaccgcccuaucguggacauuaauaucaaggacuacucuauugccuccagcuauguuuguucuggacuugugggcgauacccccagaaagaacgacagcuccucuagcucccauugccuggauccgaauaacgaagagggcgggcacggagucaaaggcugggcuuucgacgaugggaaugacguguggaugggacggacgaucagcgaaaaacuccgcucuggcuacgagacauuuaagguuaucgaggggugguccaacccuaauagcaaacugcagauuaacagacaggugaucgucgaucggggaaaucgcucuggcuauuccggcauuuucagcguggaagggaaguccuguaucaacagaugcuuuuacgucgagcugauucggggaagaaaggaagagaccgaagugcucuggaccucuaauagcaucguuguguucuguggcacauccgggaccuauggaacaggcucuuggcccgacggggccgauauuaaccugaugccuaucuga

SEQ ID NO: 212764 - RNA, 1410 nt, Artificial Sequence
  derived and/or modified CDS sequence (opt5) from neuraminidase__InfluenzaA__AEG65629
augaaccccaaucagaagaucauuaccaucggcagcgugucccugacaauuucuacgaucugcuucuuuaugcaaauugccauccucaucaccacagucacccugcacuucaaacaguacgaguuuaacagcccuccgaauaaccagguuaugcuuugugaacccacaauuaucgagagaaauauuaccgaaaucguguaucugacaaacaccacgauugagaaggaaaucugcccuaaacucgcugaguaccggaauugguccaagccccagugugacauuaccggguucgccccuuuuucuaaagauaacagcauccgccuguccgcgggaggcgacaucugggugacaagagagcccuaugucucuugcgauccugacaaguguuaccaauucgcucuugggcagggaaccacacugaauaacgugcauagcaaugauaccguucacgaccggacgccguaucgcacacuccugaugaacgaacugggcgugcccuuucaucucgggaccaagcaggucugcauugccugguccucuagcuccugucacgauggaaaagccuggcugcaugugugcguuacaggcgacgauaagaaugcuaccgccagcuucaucuacaacggcagacuuguggacucuauugucuccuggagcaaagagauccugcggacccaggaaucugagugugugugcauuaaugggacauguacgguggucaugaccgauggauccgcuagcggcaaggccgacacaaaaauccucuuuaucgaggaagggaagauuguucacaccuccacacugucuggaagcgcgcaacacguggaggaaugcuccugcuauccucgcuaccccggcgugagaugugucugccgggauaacuggaaggggagcaaccgcccuaucguggacauuaauaucaaagacuacucuauuguuuccagcuauguguguucuggacuugucggcgauacccccagaaagaacgacagcuccucuagcucccauugccuggauccgaaugacgaggaaggcgggcacggagugaaaggcugggccuucgaugacgggaacgauguuuggaugggacggacgaucagcgagaagcuccgcucuggcuacgagacauuuaaagugaucgaagggugguccaauccuaacagcaagcugcagauuaauagacaggucaucguggaccggggaaaccgcucuggcuauuccggcauuuucagcgucgaggggaaauccuguaucaauagaugcuuuuacguggaacugauucggggaagaaaggaggaaaucgagguucucuggaccucuaacagcauuguggucuucuguggcaccuccgggacauauggaaccggcucuuggcccgauggggcugacaucaaucugaugccuaucuga

SEQ ID NO: 212765 - RNA, 1410 nt, Artificial Sequence; identical to SEQ ID NO: 212764
  derived and/or modified CDS sequence (opt5) from neuraminidase__InfluenzaA__AEG65640

SEQ ID NO: 212766 - RNA, 1410 nt, Artificial Sequence; identical to SEQ ID NO: 206207
  derived and/or modified CDS sequence (opt5) from neuraminidase__InfluenzaA__AEG65651

SEQ ID NO: 212767 - RNA, 1410 nt, Artificial Sequence; identical to SEQ ID NO: 206786
  derived and/or modified CDS sequence (opt5) from neuraminidase__InfluenzaA__AEG65662

SEQ ID NO: 212768 - RNA, 1410 nt, Artificial Sequence; identical to SEQ ID NO: 206786
  derived and/or modified CDS sequence (opt5) from neuraminidase__InfluenzaA__AEG65673

SEQ ID NO: 212769 - RNA, 1410 nt, Artificial Sequence; identical to SEQ ID NO: 206786
  derived and/or modified CDS sequence (opt5) from neuraminidase__InfluenzaA__AEG65684

SEQ ID NO: 212770 - RNA, 1410 nt, Artificial Sequence; identical to SEQ ID NO: 212743
  derived and/or modified CDS sequence (opt5) from neuraminidase__InfluenzaA__AEG65695

SEQ ID NO: 212771 - RNA, 1410 nt, Artificial Sequence
  derived and/or modified CDS sequence (opt5) from neuraminidase__InfluenzaA__AEG65706
augaaccccaaucagaagaucauuaccaucggcagcgugucccugacaauuucuacgaucugcuucuuuaugcaaauugccauccucaucaccacagucacccugcacuucaaacaguacgaguuuaacagcccuccgaauaaccagguuaugcuuugugaacccacaauuaucgagagaaauauuaccgaaaucguguaucugacaaacaccacgauugagaaggaaaucugcccuaaacucgcugaguaccggaauugguccaagccccaguguaacauuaccggguucgccccuuuuucuaaagacaauagcauccgccuguccgcgggaggcgauaucugggugacaagagagcccuaugucucuugcgacccugauaaguguuaccaauucgcucuugggcagggaaccacacugaacaaugugcauagcaacgacaccguucacgaucggacgccguaucgcacacuccugaugaaugaacugggcgugcccuuucaucucgggaccaagcaggucugcauugccugguccucuagcuccugucacgacggaaaagccuggcugcaugugugcguuacaggcgaugacaagaacgcuaccgccagcuucaucuacaauggcagacuuguggauucuauugucuccuggagcaaagagauccugcggacccaggaaucugagugugugugcauuaacgggacauguacgguggucaugaccgacggauccgcuagcggcaaggccgauacaaaaauccucuuuaucgaggaagggaagauuguucacaccuccacacugucuggaagcgcgcaacacguggaggaaugcuccugcuauccucgcuaccccggcgugagaugugucugccgggacaacuggaaggggagcaaucgcccuaucguggauauuaacaucaaagacuacucuauuguuuccagcuauguguguucuggacuugucggcgacacccccagaaagaaugauagcuccucuagcucccauugccuggacccgaacaaugaggaaggcgggcacggagugaaaggcugggccuucgaugacgggaacgauguuuggaugggacggacgaucagcgagaagcuccgcucuggcuacgagacauuuaaagugaucgaagggugguccaauccuaacagcaagcugcagauuaauagacaggucaucguggaccggggaaaccgcucuggcuauuccggcauuuucagcgucgaggggaaauccuguaucaauagaugcuuuuacguggaacugauucggggaagaaaggaggaaaacgagguucucuggaccucuaauagcaucguggucuucuguggcaccuccgggacauauggaaccggcucuuggcccgauggggcugacauuaaccugaugccuaucuga

SEQ ID NO: 212772 - RNA, 1410 nt, Artificial Sequence
  derived and/or modified CDS sequence (opt5) from neuraminidase__InfluenzaA__AEG65728
augaaccccaaucagaagaucauuaccaucggcagcgugucccugacaauuucuacgaucugcuucuuuaugcaaauugccauccucaucaccacagucacccugcacuucaaacaguacgaguuuaacagcccuccgaauaaccagguuaugcuuugugaacccacaauuaucgagagaaauauuaccgaaaucguguaucugacaaacaccacgauugagaaggaaaucugcccuaaacucgcugaguaccggaauugguccaagccccaguguaacauuaccggguucgccccuuuuucuaaagacaauagcauccgccuguccgcgggaggcgauaucugggugacaagagagcccuaugucucuugcgacccugauaaguguuaccaauucgcucuugggcagggaaccacacugaacaaugugcauagcaacgacaccguucacgaucggacgccguaucgcacacuccugaugaaugaacugggcgugcccuuucaucucgggaccaagcaggucugcauugccugguccucuagcuccugucacgacggaaaagccuggcugcaugugugcguuacaggcgaugacaagaacgcuaccgccagcuucaucuacaauggcagacuuguggauucuauugucuccuggagcaaagagauccugcggacccaggaaucugagugugugugcauuaacgggacauguacgguggucaugaccgacggauccgcuagcggcaaggccgauacaaaaauccucuuuaucgaggaagggaagauuguucacaccuccacacugucuggaagcgcgcaacacguggaggaaugcuccugcuauccucgcuaccccggcgugagaugugucugccgggacaacuggaaggggagcaaucgcccuaucguggauauuaacaucaaagacuacucuauuguuuccagcuauguguguucuggacuugucggcgacacccccagaaagaaugauagcuccucuagcucccauugccuggacccgaacaaugaggaaggcgggcacggagugaaaggcugggccuucgaugacgggaacgauguuuggaugggacggacgaucagcgagaagcuccgcucuggcuacgagacauuuaaagugaucgaagggugguccaauccuaacagcaagcugcagauuaauagacaggucaucguggaccggggaaaccgcucuggcuauuccggcauuuucagcgucgaggggaaauccuguaucaauagaugcuuuuacguggaacugauucggggaagaaaggaggaaaccgagguucucuggaccucuaacagcaucguggucuucuguggcacauccgggaccuauggaacaggcucuuggcccgauggggcugagauuaaucugaugccuaucuga

SEQ ID NO: 212773 - RNA, 1410 nt, Artificial Sequence
  derived and/or modified CDS sequence (opt5) from neuraminidase__InfluenzaA__AEG65739
augaaccccaaucagaagaucauuaccaucggcagcgugucccugacaauuucuacgaucugcuucuuuaugcaaauugccauccucaucaccacagucacccugcacuucaaacaguacgaguuuagcuccccuccgaacaaucagguuaugcccugugaaccuacaauuaucgagagaaacauuaccgaaaucguguaucuuacaaauaccacgauugagaaggaaaucugccccaaacuggcugaguaccggaacuggucuaagccucagugugacauuaccggguucgcccccuuuagcaaagauaauuccauccgccucucugcgggaggcgacaucugggugacaagagagccuuaugucagcugcgauccggacaaguguuaccaauucgcucuggggcagggaaccacacuuaacaaugugcauuccaacgauaccguucacgaccggacgcccuaucgcacacugcucaugaaugaacugggcgugccuuuucaucuggggaccaagcaggucugcauugccuggucuagcuccagcugucacgauggaaaagccuggcuccaugugugcguuacaggcgacgauaagaacgcuaccgccucuuucaucuacaauggcagacugguggacuccauugucagcuggucuaaagagauccuucggacccaggaauccgagugugugugcauuaacgggacauguacgguggucaugaccgauggaagcgcuuccggcaaggccgacacaaaaauccuguuuaucgaggaagggaagauuguucacaccucuacacucagcggauccgcgcaacacguggaggaaugcagcugcuauccccgcuacccuggcgugagaugugucugccgggauaauuggaaggggucuaaccgccccaucguggacauuaacaugaaagacuacuccaucguuagcucuuauguguguagcggacuggucggcgauaccccgagaaagaaugacuccucuagcuccagccauugccuugauccuaacaaugaggaaggcgggcacggagugaaaggcugggccuucgacgaugggaacgacguuuggaugggacggacgauuucugagaagcugcgcuccggcuacgagacauuuaaagugaucgaaggguggagcaaucccaacucuaagcuccagaucaauagacaggucauuguggaucggggaaaccgcuccggcuauagcggcaucuucuccgucgaggggaaaucuuguauuaauagaugcuuuuacguggaacugauccggggaagaaaggaggaaaccgagguucuguggaccagcaacuccauuguggucuucuguggcacaucugggaccuauggaacaggcagcuggccugacggggcugauaucaaucucaugcccauuuga

SEQ ID NO: 212774 - RNA, 1410 nt, Artificial Sequence; identical to SEQ ID NO: 208636
  derived and/or modified CDS sequence (opt5) from neuraminidase__InfluenzaA__AEG65750

SEQ ID NO: 212775 - RNA, 1410 nt, Artificial Sequence; identical to SEQ ID NO: 212772
  derived and/or modified CDS sequence (opt5) from neuraminidase__InfluenzaA__AEG65761

SEQ ID NO: 212776 - RNA, 1410 nt, Artificial Sequence
  derived and/or modified CDS sequence (opt5) from neuraminidase__InfluenzaA__AEG65772
augaaccccaaucagaagaucauuaccaucggcagcgugucccugacaauuucuacgaucugcuucuuuaugcaaaccgccauucucaucacaaccgucacacugcacuucaaacaguacgaguuuaacagcccuccgaauaaccagguuaugcuuugugaacccaccaucauugagagaaauaucacagaaauuguguaucugaccaacacgaccaucgagaaggaaaugugcccuaaacucgcugaguaccggaauugguccaagccccagugugacauuacaggguucgccccuuuuucuaaagauaacagcauccgccuguccgcgggaggcgacauuugggugaccagagagcccuaugucucuugcgauccugacaaguguuaccaauucgcucuugggcagggaacaacccugaauaacgugcauagcaaugauacgguucacgaccggacaccguaucgcacccuccugaugaacgaacugggcgugcccuuucaucucgggacaaagcaggucugcaucgccugguccucuagcuccugucacgauggaaaagccuggcugcaugugugcguuaccggcgacgauaagaaugcuaccgccagcuucaucuacaacggcagacuuguggacucuauugucuccuggagcaaaaagauccugcggacacaggagucugaaugugugugcauuaaugggacguguaccguggucaugacagauggauccgcuagcggcaaagccgacaccaagauccucuuuauugaggaggggaagaucauccacacauccacccugucuggaagcgcgcaacacguugaagagugcuccugcuauccucgcuaccccggcgugagaugugugugccgggauaacuggaaagggagcaaccgcccuauugucgacaucaauauuaaggacuacucuaucguguccagcuauguuuguucuggacuugugggcgauacgccccggaaaaacgacagcuccucuagcucccauugccuggauccgaauaacgaagagggcgggcacggagucaagggcugggccuucgacgaugggaaugacguguggaugggaagaacaauuagcgaaaaacuccgcucuggcuacgagaccuuuaagguuaucgaggggugguccaaaccuaacagcaagcugcagaucaauagacaggugauugucgaucggggaaaccgcucuggcuauuccggcaucuucagcguggaagggaaguccuguauuaauagaugcuuuuacgucgagcugauccggggaagaaaagaagagaccgaagugcucuggacaucuaacagcauuguuguguucuguggcaccuccgggacauauggaacgggcucuuggcccgacggggcugauaucaaucugaugccuauuuga

SEQ ID NO: 212777 - RNA, 1410 nt, Artificial Sequence; identical to SEQ ID NO: 211590
  derived and/or modified CDS sequence (opt5) from neuraminidase__InfluenzaA__AEG65783

SEQ ID NO: 212778 - RNA, 1410 nt, Artificial Sequence
  derived and/or modified CDS sequence (opt5) from neuraminidase__InfluenzaA__AEG65794
augaaccccaaucagaagaucauuaccaucggcagcgugucccugacaauuucuacgaucugcuucuuuaugcaaauugccauccucaucaccacaauuacccugcacuucaaacaguacgaguuuaacagcccuccgaauaaccaggucaugcuuugugaacccacaaucauugagagaaauaucaccgaaauuguuuaucugacaaacaccacgaucgagaaggaaauuugcccuaaacucgcugaguaccggaauugguccaagccccagugugacaucaccggguucgccccuuuuucuaaagauaacagcauccgccuguccgcgggaggcgacauuugggugacaagagagcccuaugugucuugcgauccugacaaguguuaccaauucgcucuugggcagggaaccacacugaauaacguccauagcaauaacaccgugcgggaucgcacgccguauagaacacuccugaugaaugaacugggcguucccuuucaccucgggaccaaacaggugugcaucgccugguccagcagcuccugucaugacggaaaggccuggcugcacgucugcauuacaggcgaugacaagaacgcuaccgccagcuucaucuacaauggccggcuuguggauucuguuguguccuggagcaaagagauucugcgcacccaggaaucugagugugucugcaucaacgggacauguacgguggugaugaccgacggauccgcuagcggcaaggccgauacaaaaauccucuuuauugaggaagggaagaucguccauaccuccacacugucuggaagcgcgcaacacguugaggaaugcuccugcuauccuagauaccccggcgugcggugugugugccgcgacaacuggaaggggagcaauagaccuauugucgauaucaacauuaaagaccacucuaucguguccagcuacguuuguucuggacuugugggcgacacgccccggaagaaugauagcuccucuagcucccauugccuggacccgaacaaugaggaaggcgggcacggagucaaaggcugggccuucgaugacgggaacgauguguggaugggacgcaccaucaaugagacaagcagacucggcuaugagaccuuuaagguuauugaaggguggucuaacccuaaauccaagcugcagaucaaucgccaggugauugucgacaaaggaaaccggagcggcuacucuggcaucuucuccguggaggggaagucuuguauuaauagaugcuuuuaugucgaacugauccggggaagaaaggaggaaaccgaggugcucuggacauccaacucuauuguuguguucuguggcaccagcgggacauacggaacgggcuccuggcccgauggggcugaccugaaucuuaugccuaucuga

SEQ ID NO: 212779 - RNA, 1410 nt, Artificial Sequence; identical to SEQ ID NO: 211590
  derived and/or modified CDS sequence (opt5) from neuraminidase__InfluenzaA__AEG65805

SEQ ID NO: 212780 - RNA, 1410 nt, Artificial Sequence
  derived and/or modified CDS sequence (opt5) from neuraminidase__InfluenzaA__AEG65816
augaaccccaaucagaagaucauuaccaucggcagcgugucccugacaauuucuacgaucugcuucuuuaugcaaauugccauccucaucaccacagucacccugcacuucaaacaguacgaguuuaacagcccuccgaauaaccagguuaugcuuugugaacccacaauuaucgagagaaauauuaccgaaaucguguaucugacaaacaccacgauugagaaggaaaucugcccuaaacucgcugaguaccggaauugguccaagccccagugugacauuaccggguucgccccuuuuucuaaagauaacagcauccgccuguccgcgggaggcgacaucugggugacaagagagcccuaugucucuugcgauccugacaaguguuaccaauucgcucuugggcagggaaccacacugaauaacgugcauagcaauaacaccguucgggaucgcacgccguauagaacacuccugaugaaugaacugggcgugcccuuucaccucgggaccaagcaggucugcauugccugguccagcagcuccugucaugacggaaaagccuggcugcacgugugcaucacaggcgaugacaagaacgcuaccgccagcuucauuuacaauggccggcuuguugauucuguggucuccuggagcaaagagauccugcgcacccaggaaucugagugugugugcauuaacgggacauguacgguggucaugaccgacggauccgcuagcggcgaggccgauacaaagauccucuuuaucgaagaggggaaaauuguucauaccuccacacugucuggaagcgcgcaacacguggaagagugcuccugcuauccuagauaccccggcgugcggugugucugccgcgacaacuggaaggggagcaauagaccuaucguggauauuaacaucaaggaccacucuauuguuuccagcuacguguguucuggacuugucggcgacacgccccggaaaaaugauagcuccucuagcucccauugccuggacccgaacaaugaagagggcgggcacggagugaagggcugggccuucgaugacgggaacgauguuuggaugggacgcaccaucaaugagacaagcagacucggcuaugaaaccuuuaaagugaucgagggguggucuaacccuaaguccaaacugcagauuaaucggcaggucaucguggaccgcggaaacagaagcggcuacucuggcauuuucuccgucgaagggaagucuuguaucaaucggugcuuuuauguggagcugauuagaggacgcaaagaagagaccgagguucucuggacauccaacucuaucguggucuucuguggcaccagcgggacauacggaacgggcuccuggcccgauggggcugaccugaaucuuaugccuauuuga

SEQ ID NO: 212781 - RNA, 1410 nt, Artificial Sequence
  derived and/or modified CDS sequence (opt5) from neuraminidase__InfluenzaA__AEG79808
augaaccccaaucagaagaucauuaccaucggcagcgugugcaugacaauugggauggccaaccugauccuccaaauuggaaauaucaucuccauuuggaucucucacagcauucagcugggcaaccagaaucagaucgagacguguaaccaauccgucauuaccuacgaaaauaacacauggguuaaucagaccuaugugaacaucucuaauacaaacuucgcugccgggcagagcguggucuccgugaaacuugcgggaaauucuagccugugcccuguuuccggcugggcuauuuacagcaaggacaacucuaucagaaucggguccaaaggagauguguuugucauucgggagccguucaucagcuguucuccccucgaaugccgcaccuuuuuccugacacagggcgcccuucugaaugacaagcauuccaacggcaccauuaaagauagaagcccuuaucggacgcucaugucuugucccaucggggaggugccuucccccuacaacagccgcuuugaauccguugccuggucugcuagcgccugccacgacggaauuaauuggcugaccaucggcaucuccgggccugauaacggagcuguggccguccugaaguauaauggcauuaucacagacaccauuaagagcuggagaaacaauauccuccggacacaagagucugagugugcgugcgugaacggguccuguuucaccauuaugacggauggaccgagcgacggccaggccucuuacaaaaucuuucgcaucgaaaagggcaaaauugucaagagcguggagaugaaugcucccaacuaucauuacgaagagugcuccuguuacccugauucuagcgagaucacaugcguuugcagagacaauuggcacggguccaaccggcccugggugagcuucaaucagaaccuggaauaucagauuggauacaucuguucuggcauuuuuggggauaauccucgccccaacgacaaaaccggauccugcggcccggugagcucuaauggggccaacggagucaagggcuucuccuuuaaguauggcaacgggguguggaucggaagaacaaaaagcauuuccucucggaagggcuucgagaugaucugggauccuaauggguggaccggaaccgacaacaauuuuagcaucaaacaagacauuguuggcaucaacgaaugguccggguacucuggcagcuucgugcagcaucccgagcuuacaggacuggauuguauucgcccuugcuucugggucgaacucaucagaggccggcccaaggagaauacgauuuggaccuccgggagcucuaucuccuuuuguggagugaacagcgacacaguuggcuggucuuggcccgauggggcugagcugccuuucaccaucgacaaauga

SEQ ID NO: 212782 - RNA, 1410 nt, Artificial Sequence; identical to SEQ ID NO: 212781
  derived and/or modified CDS sequence (opt5) from neuraminidase__InfluenzaA__AEG79814

SEQ ID NO: 212783 - RNA, 1410 nt, Artificial Sequence
  derived and/or modified CDS sequence (opt5) from neuraminidase__InfluenzaA__AEG79826
augaaccccaaucagaagaucauuaccaucagcuccgugugcaugacaauuggcauggccaaccugauccuccaaauugggaauaucaucucuauuuggaucagccacuccauucagcugggaaaccagaaucagaucgagacguguaaccaaucugucauuaccuacgaaaauaacacauggguuaaucagaccuaugugaacaucagcaauacaaacuucgcugccggccaguccguggucucugugaaacuugcggggaauagcucccugugcccuguuagcggaugggcuauuuacucuaaggacaacuccaucagaaucggcagcaaaggggauguguuugucauucgggagccguucaucucuuguucuccccucgaaugccgcaccuuuuuccugacacagggagcccuucugaaugacaagcauagcaacggcaccauuaaagauagaucuccuuaucggacgcucauguccugucccaucggcgaggugccuagccccuacaacucccgcuuugaaucuguugccuggagcgcuuccgccugccacgacgggauuaauuggcugaccaucggaaucagcggcccugauaacggggcuguggccguccugaaguauaauggaauuaucacagacaccauuaagucuuggagaaacaauauccuccggacacaagaguccgagugugcgugcgugaacggcagcuguuucaccauuaugacggaugggccgucugacggacaggccagcuacaaaaucuuucgcaucgaaaagggcaaaauugugaaguccgucgagaugaaugcucccaacuaucauuacgaagagugcucuuguuacccugauagcuccgagaucacaugcguuugcagagacaauuggcacggcagcaaccggcccugggugucuuucaaucagaaccuggaauaucagauuggguacaucuguuccggaauuuuuggcgauaauccucgccccaacgacaaaaccgggagcugcggaccggugucuuccaauggcgccaacggggucaagggauucagcuuuaaguauggcaacggcguguggaucgggagaacaaaauccauuucuagccggaagggauucgagaugaucugggauccuaauggcuggaccgggaccgacaacaauuuuuccaucaaacaagacauuguuggaaucaacgaauggucuggcuacagcggguccuucgugcagcaucccgagcuuacaggccuggauuguauucgcccuugcuucugggucgaacucaucagaggacggcccaaggagaauacgauuuggaccagcggcuccuccaucagcuuuuguggggugaacucugacacaaugggaugguccuggcccgauggcgcugagcugccuuucaccaucgacaaauga

SEQ ID NO: 212784 - RNA, 1410 nt, Artificial Sequence
  derived and/or modified CDS sequence (opt5) from neuraminidase__InfluenzaA__AEG79830
augaaccccaaucagaagaucauuaccaucagcuccgugugcaugacaauuggcauggccaaccugauccuccaaauugggaauaucaucucuauuuggaucagccacuccauucagcugggaaaccagaaucagaucgagacguguaaccaaucugucauuaccuacgaaaauaacacauggguuaaucagaccuaugugaacaucagcaauacaaacuucgcugccggccaguccguggucucugugaaacuugcggggaauagcucccugugcccuguuagcggaugggcuauuuacucuaaggacaacuccaucagaaucggcagcaaaggggauguguuugucauucgggagccguucaucucuuguucuccccucgaaugccgcaccuuuuuccugacacagggagcccuucugaaugacaagcauagcaacggcaccauuaaagauagaucuccuuaucggacgcucauguccugucccaucggcgaggugccuagccccuacaacucccgcuuugaaucuguugccuggagcgcuuccgccugccacgacgggauuaauuggcugaccaucggaaucagcggcccugauaacggggcuguggccguccugaaguauaauggaauuaucacagacaccauuaagucuuggagaaacaauauccuccggacacaagaguccgagugugcgugcgugaacggcagcuguuucaccgugaugacggaugggccgucugacggacaggccagcuacaaaauuuuucgcaucgaaaagggcaaaaucgucaaguccguugagaugaaugcucccaacuaucauuacgaagagugcucuuguuacccugauagcuccgagauuacaugcgugugcagagacaauuggcacggcagcaaccggcccugggugucuuucaaucagaaccuggaauaucagaucggguacauuuguuccggaaucuuuggcgauaauccucgccccaacgacaaaaccgggagcugcggaccggucucuuccaauggcgccaacggggugaagggauucagcuuuaaguauggcaacggcguuuggauugggagaacaaaauccaucucuagccggaagggauucgagaugauuugggauccuaauggcuggaccgggaccgacaacaauuuuuccaucaaacaagacaucgugggaauuaacgaauggucuggcuacagcggguccuucguccagcaucccgagcuuacaggccuggauuguauccgcccuugcuucuggguggaacucauuagaggacggcccaaggagaauacgaucuggaccagcggcuccuccauuagcuuuugugggguuaacucugacacagugggaugguccuggcccgauggcgcugagcugccuuucaccaucgacaaauga

SEQ ID NO: 212785 - RNA, 1410 nt, Artificial Sequence; identical to SEQ ID NO: 212329
  derived and/or modified CDS sequence (opt5) from neuraminidase__InfluenzaA__AEG79836
